United States Patent Application Publication US 2020/0163878 A1 - sequence listing, part 28

SEQ ID NO: 102636 - RNA, 1701 nt, Artificial Sequence; identical to SEQ ID NO: 99869
  derived and/or modified CDS sequence (opt2) from hemagglutinin__InfluenzaA__ADZ53138

SEQ ID NO: 102637 - RNA, 1701 nt, Artificial Sequence; identical to SEQ ID NO: 98705
  derived and/or modified CDS sequence (opt2) from hemagglutinin__InfluenzaA__ADZ53140

SEQ ID NO: 102638 - RNA, 1701 nt, Artificial Sequence; identical to SEQ ID NO: 99152
  derived and/or modified CDS sequence (opt2) from hemagglutinin__InfluenzaA__ADZ93496

SEQ ID NO: 102639 - RNA, 1689 nt, Artificial Sequence; identical to SEQ ID NO: 98386
  derived and/or modified CDS sequence (opt2) from hemagglutinin__InfluenzaA__AEA04365

SEQ ID NO: 102640 - RNA, 1689 nt, Artificial Sequence
  derived and/or modified CDS sequence (opt2) from hemagglutinin__InfluenzaA__AEA04376
auggccaucaucuaccucauccuccucuucaccgccguccgcggcgaccagaucugcaucggcuaccacgccaacaacuccaccgagaaggucgacaccauccucgagcgcaacgucaccgucacccacgccaaggacauccucgagaagacccacaacggcaagcucugcaagcucaacggcauccccccccucgagcucggcgacugcuccaucgccggcuggcuccucggcaaccccgagugcgaccgccuccucuccguccccgagugguccuacaucauggagaaggagaacccccgcgacggccucugcuaccccggcuccuucaacgacuacgaggagcucaagcaccuccucuccuccgucaagcacuucgagaaggucaagauccuccccaaggaccgcuggacccagcacaccaccaccggcggcucccgcgccugcgccgucuccggcaaccccuccuucuuccgcaacauggucuggcucaccgagaagggcuccaacuaccccgucgccaagggcuccuacaacaacaccuccggcgagcagaugcucaucaucuggggcguccaccaccccaacgacgagaccgagcagcgcacccucuaccagaacgucggcaccuacgucuccgucggcaccuccacccucaacaagcgcuccacccccgagaucgccacccgccccaaggucaacggccagggcggccgcauggaguucuccuggacccuccucgacaugugggacaccaucaacuucgaguccaccggcaaccucaucgcccccgaguacggcuucaagaucuccaagcgcggcuccuccggcaucaugaagaccgagggcacccucgagaacugcgagaccaagugccagaccccccucggcgccaucaacaccacccuccccuuccacaacguccacccccucaccaucggcgagugccccaaguacgucaaguccgagaagcucguccucgccaccggccuccgcaacgucccccagaucgagucccgcggccucuucggcgccaucgccggcuucaucgagggcggcuggcagggcauggucgacggcugguacggcuaccaccacuccaacgaccagggcuccggcuacgccgccgacaaggaguccacccagaaggccuucgacggcaucaccaacaaggucaacuccgucaucgagaagaugaacacccaguucgaggccgucggcaaggaguucuccaaccucgagcgccgccucgagaaccucaacaagaaggucgaggacggcuuccucgacgucuggaccuacaacgccgagcuccucguccucauggagaacgagcgcacccucgacuuccacgacuccaacgucaagaaccucuacgacaagguccgcaugcagcuccgcgacaacgucaaggagcucggcaacggcugcuucgaguucuaccacaagugcgacgacgagugcaugaacuccgucaagaacggcaccuacgacuaccccaaguacgaggaggaguccaagcucaaccgcaacgagaucaagggcgucaagcucuccuccaugggcgucuaccagauccucgccaucuacgccaccgucgccggcucccucucccucgccaucaugauggccggcaucuccuucuggaugugcuccaacggcucccuccagugccgcaucugcaucuga

SEQ ID NO: 102641 - RNA, 1698 nt, Artificial Sequence
  derived and/or modified CDS sequence (opt2) from hemagglutinin__InfluenzaA__AEA10292
augaaggucaagcuccucguccuccucugcaccuucaccgccaccuacgccgacaccaucugcaucggcuaccacgccaacaacuccaccgacaccgucgacaccguccucgagaagaacgucaccgucacccacuccgucaaccuccucgagaacucccacaacggcaagcucugcucccucaagggcaucgccccccuccagcucggcaacugcuccgucgccggcuggauccucggcaaccccgagugcgagcuccucaucuccaaggaguccugguccuacaucgucgagaagcccaaccccgagaacggcaccugcuaccccggccacuucgccgacuacgaggagcuccgcgagcagcucuccuccgucuccuccuucgagcgcuucgagaucuuccccaaggaguccuccuggcccaaccacaccgucaccggcgucuccgccuccugcucccacaacggcgaguccuccuucuaccgcaaccuccucuggcucaccgucaagaacggccucuaccccaaccucuccaaguccuacgccaacaacaaggagaaggagguccucguccucuggggcguccaccacccccccaacaucgucgaccagaagacccucuaccgcaccgagaacgccuacgucuccgucgucuccucccacuacucccgcaaguucacccccgagaucgccaagcgccccaagguccgcgaccaggagggccgcaucaacuacuacuggacccuccucgagcccggcgacaccaucaucuucgaggccaacggcaaccucaucgccccccgcuacgccuucgcccucucccgcggcuucggcuccggcaucaucaacuccaacgcccccauggacaagugcgacgccaagugccagaccccccgcggcgccaucaacuccucccuccccuuccagaacguccaccccgucaccaucggcgagugccccaaguacguccgcuccgccaagcuccgcauggucaccggccuccgcaacauccccuccauccagucccgcggccucuucggcgccaucgccggcuucaucgagggcggcuggaccggcauggucgacggcugguacggcuaccaccaccagaacgagcagggcuccggcuacgccgccgaccagaaguccacccagaacgccaucaacggcaucaccaacaaggucaacuccgucaucgagaagaugaacacccaguucaccgccgucggcaaggaguucaacaagcucgagcgccgcauggagaaccucaacaagaaggucgacgacggcuucaucgacaucuggaccuacaacgccgagcuccucguccuccucgagaacgagcgcacccucgacuuccacgacuccaacgucaagaaccucuacgagaaggucaagucccagcucaagaacaacgccaaggagaucggcaacggcugcuucgaguucuaccacaagugcaacgacgagugcauggaguccgucaagaacggcaccuacgacuaccccaaguacuccgaggaguccaagcucaaccgcgagaagaucgacggcgucaagcucgaguccaugggcgucuaccagauccucgccaucuacuccaccgucgccuccucccucguccuccucgucucccucggcgccaucuccuucuggaugugcuccaacggcucccuccagugccgcaucugcaucuga

SEQ ID NO: 102642 - RNA, 1701 nt, Artificial Sequence; identical to SEQ ID NO: 101304
  derived and/or modified CDS sequence (opt2) from hemagglutinin__InfluenzaA__AEA10303

SEQ ID NO: 102643 - RNA, 1701 nt, Artificial Sequence; identical to SEQ ID NO: 102158
  derived and/or modified CDS sequence (opt2) from hemagglutinin__InfluenzaA__AEA10313

SEQ ID NO: 102644 - RNA, 1701 nt, Artificial Sequence; identical to SEQ ID NO: 99869
  derived and/or modified CDS sequence (opt2) from hemagglutinin__InfluenzaA__AEA10323

SEQ ID NO: 102645 - RNA, 1701 nt, Artificial Sequence; identical to SEQ ID NO: 100257
  derived and/or modified CDS sequence (opt2) from hemagglutinin__InfluenzaA__AEA10339

SEQ ID NO: 102646 - RNA, 1701 nt, Artificial Sequence
  derived and/or modified CDS sequence (opt2) from hemagglutinin__InfluenzaA__AEA10349
augaaggccauccucaucguccuccucuacaccuucgccaccgccaacgccgacacccucugcaucggcuaccacgccaacaacuccaccgacaccgucgacaccguccucgagaagaacgucaccgucacccacuccgucaaccuccucgaggacaagcacaacggcaagcucugcaagcuccgcggcgucgccccccuccaccucggcaagugcaacaucgccggcuggauccucggcaaccccgagugcgagucccucuccaccgccuccuccugguccuacaucgucgagaccuccuccuccgacaacggcaccugcuaccccggcgacuucaucgacuacgaggagcuccgcgagcagcucuccuccgucuccuccuucgagcgcuucgagaucuuccccaagaccuccuccuggcccaaccacgacuccaacaagggcgucaccgccgccugcccccacgccggcgccaaguccuucuacaagaaccucaucuggcucgucaagaagggcaacuccuaccccaagcucuccaaguccuacaucaacgacaagggcaaggagguccucguccucuggggcauccaccaccccuccaccuccgccgaccagcagucccucuaccagaacgccgacgccuacgucuucgucggcaccucccgcuacuccaagaaguucaagcccgagaucgccauccgccccaagguccgcgaccaggagggccgcaugaacuacuacuggacccucgucgagcccggcgacaagaucaccuucgaggccaccggcaaccucgucgucccccgcuacgccuucgccauggagcgcaacgccggcuccggcaucaucaucuccgacacccccguccacgacugcaacaccaccugccagacccccaagggcgccaucaacaccucccuccccuuccagaacauccaccccaucaccaucggcaagugccccaaguacgucaaguccaccaagcuccgccucgccaccggccuccgcaacguccccuccauccagucccgcggccucuucggcgccaucgccggcuucaucgagggcggcuggaccggcauggucgacggcugguacggcuaccaccaccagaacgagcagggcuccggcuacgccgccgaccucaaguccacccagaacgccaucgacaagaucaccaacaaggucaacuccgucaucgagaagaugaacacccaguucaccgccgucggcaaggaguucaaccaccucgagaagcgcaucgagaaccucaacaagaaggucgacgacggcuuccucgacaucuggaccuacaacgccgagcuccucguccuccucgagaacgagcgcacccucgacuaccacgacuccaacgucaagaaccucuacgagaagguccgcucccagcucaagaacaacgccaaggagaucggcaacggcugcuucgaguucuaccacaagugcgacaacaccugcauggaguccgucaagaacggcaccuacgacuaccccaaguacuccgaggaggccaagcucaaccgcgaggagaucgacggcgucaagcucgaguccacccgcaucuaccagauccucgccaucuacuccaccgucgccuccucccucguccucgucgucucccucggcgccaucuccuucuggaugugcuccaacggcucccuccagugccgcaucugcaucuga

SEQ ID NO: 102647 - RNA, 1701 nt, Artificial Sequence; identical to SEQ ID NO: 100302
  derived and/or modified CDS sequence (opt2) from hemagglutinin__InfluenzaA__AEA30293

SEQ ID NO: 102648 - RNA, 1701 nt, Artificial Sequence
  derived and/or modified CDS sequence (opt2) from hemagglutinin__InfluenzaA__AEA48989
augaaggccauccucgucguccuccucuacaccuucgccaccgccaacgccgacacccucugcaucggcuaccacgccaacaacuccaccgacaccgucgacaccguccucgagaagaacgucaccgucacccacuccgucaaccuccucgaggacaagcacaacggcaagcucugcaagcuccgcggcgucgccccccuccaccucggcaagugcaacaucgccggcuggauccucggcaaccccgagugcgagucccucuccaccgccuccuccugguccuacaucgucgagaccuccuccuccgacaacggcaccugcuaccccggcgacuucaucgacuacgaggagcuccgcgagcagcucuccuccgucuccuccuucgagcgcuucgagaucuuccccaagaccuccuccuggcccaaccacgaguccaacaagggcgucaccgccgccugcccccacgccggcgcccgcuccuucuacaagaaccucaucuggcucgucaagaagggcaacuccuaccccaagcucuccaaguccuacaucaacgacaagggcaaggagguccucguccucuggggcauccaccaccccuccaccuccgccgaccagcagucccucuaccagaacgccgacgccuacgucuucgucggcaccucccgcuacuccaagaaguucaagcccgagaucgccauccgccccaagguccgcgaccaggagggccgcaugaacuacuacuggacccucgucgagcccggcgacaagaucaccuucgaggccaccggcaaccucgucgucccccgcuacgccuucgccauggagcgcaacgccggcuccggcaucaucaucuccgacacccccguccacgacugcaacaccaccugccagacccccaagggcgccaucaacaccucccuccccuuccagaacauccaccccaucaccaucggcaagugccccaaguacgucaaguccaccaagcuccgccucgccaccggccuccgcaacguccccuccauccagucccgcggccucuucggcgccaucgccggcuucaucgagggcggcuggaccggcauggucgacggcugguacggcuaccaccaccagaacgagcagggcuccggcuacgccgccgaccucaaguccacccagaacgccaucgacgagaucaccaacaaggucaacuccgucaucgagaagaugaacacccaguucaccgccgucggcaaggaguucaaccaccucgagaagcgcaucgagaaccucaacaagaaggucgacgacggcuuccucgacaucuggaccuacaacgccgagcuccucguccuccucgagaacgagcgcacccucgacuaccacgacuccaacgucaagaaccucuacgagaagguccgcucccagcucaagaacaacgccaaggagaucggcaacggcugcuucgaguucuaccacaagugcgacaacaccugcauggaguccgucaagaacggcaccuacgacuaccccaaguacuccgaggaggccaagcucaaccgcgaggagaucgacggcgucaagcucgaguccacccgcaucuaccagauccucgccaucuacuccaccgucgccuccucccucguccucgucgucucccucggcgccaucuccuucuggaugugcuccaacggcucccuccagugccgcaucugcaucuga

SEQ ID NO: 102649 - RNA, 1707 nt, Artificial Sequence
  derived and/or modified CDS sequence (opt2) from hemagglutinin__InfluenzaA__AEA50985
auggagaagaucguccuccuccucgccaucaucaaccucgucaaguccgaccagaucugcaucggcuaccacgccaacaacuccaccgagcaggucgacaccaucauggagaagaacgucaccgucacccacgcccaggacauccucgagaagacccacaacggcaagcucugcgaccucgacggcgucaagccccucauccuccgcgacugcuccgucgccggcuggcuccucggcaaccccaugugcgacgaguuccucaacguccccgagugguccuacaucgucgagaagaucaaccccgccaacgaccucugcuaccccggcaacuucaacgacuacgaggagcucaagcaccuccucucccgcaucaaccacuucgagaagauccagaucauccccaaguccuccugguccgaccacgaggccuccuccggcgucuccuccgccugccccuaccagggccgcuccuccuucuuccgcaacgucgucuggcucaucaagaagaacgacgccuaccccaccaucaagaucuccuacaacaacaccaaccaggaggaccuccucguccucuggggcauccaccaccccaacgacgccgccgagcagaccaagcucuaccagaaccccaccaccuacaucuccgucggcaccuccacccucaaccuccgccucguccccaagaucgccacccgcuccaaggucaacggccaguccggccgcauggaguucuucuggaccauccucaagcccaacgacgccaucaacuucgaguccaacggcaacuucaucgcccccgagaacgccuacaagaucgucaagaagggcgacuccaccaucaugaaguccgagcucgaguacggcaacugcaacaccaagugccagacccccgucggcgccaucaacuccuccaugcccuuccacaacauccacccccucaccaucggcgagugccccaaguacgucaaguccaaccgccucguccucgccaccggccuccgcaacuccccccagggcgagcgccgccgcaagaagcgcggccucuucggcgccaucgccggcuucaucgagggcggcuggcagggcauggucgacggcugguacggcuaccaccacuccaacgagcagggcuccggcuacgccgccgacaaggaguccacccagaaggccaucaacggcgucaccaacaaggucaacuccaucaucgacaagaugaacacccaguucgaggccgucggccgcgaguucaacaaccucgagcgccgcaucgagaaccucaacaagaagauggaggacggcuuccucgacgucuggaccuacaacgccgagcuccucguccucauggagaacgagcgcacccucgacuuccacgacuccaacgucaagaaccucuacgacaagguccgccuccagcuccgcgacaacgccaaggagcucggcaacggcugcuucgaguucuaccaccgcugcgacaacgagugcauggaguccguccgcaacggcaccuacgacuacccccaguacuccgaggagucccgccucaagcgcgaggagaucuccggcgucaagcucgaguccaucggcaucuaccagauccucuccaucuacuccaccgccgccuccucccucgcccucgccaucauggucgccggccucucccucuggaugugcuccaacggcucccuccagugccgcaucugcaucuga

SEQ ID NO: 102650 - RNA, 1701 nt, Artificial Sequence; identical to SEQ ID NO: 101569
  derived and/or modified CDS sequence (opt2) from hemagglutinin__InfluenzaA__AEA72704

SEQ ID NO: 102651 - RNA, 1701 nt, Artificial Sequence; identical to SEQ ID NO: 101569
  derived and/or modified CDS sequence (opt2) from hemagglutinin__InfluenzaA__AEA72715

SEQ ID NO: 102652 - RNA, 1701 nt, Artificial Sequence; identical to SEQ ID NO: 101569
  derived and/or modified CDS sequence (opt2) from hemagglutinin__InfluenzaA__AEA72726

SEQ ID NO: 102653 - RNA, 1701 nt, Artificial Sequence
  derived and/or modified CDS sequence (opt2) from hemagglutinin__InfluenzaA__AEA72740
augaaggccauccucgucguccuccucuacaccuucgccaccgccaacgccgacacccucugcaucggcuaccacgccaacaacuccaccgacaccgucgacaccguccucgagaagaacgucaccgucacccacuccgucaaccuccucgaggacaagcacaacggcaagcucugcaagcuccgcggcgucgccccccuccaccucggcaagugcaacaucgccggcuggauccucggcaaccccgagugcgagucccucuccaccgccuccuccugguccuacaucgucgagaccuccuccuccgacaacggcaccugcuaccccggcgacuucaucgacuacgaggagcuccgcgagcagcucuccuccgucuccuccuucgagcgcuucgagaucuuccccaagaccuccuccuggcccaaccacgacuccaacaagggcgucaccgccgccugcccccacgccggcgccaaguccuucuacaagaaccucaucuggcucgucaagaagggcaacuccuaccccaagcucuccaaguccuacaucaacgacaagggcaaggagguccucguccucuggggcauccaccaccccuccaccuccgccgaccagcagucccucuaccagaacgccgacgccuacgucuucgucggcaccucccgcuacuccaagaaguucaagcccgagaucgccacccgccccaagguccgcgaccaggagggccgcaugaacuacuacuggacccucgucgagcccggcgacaagaucaccuucgaggccaccggcaaccucgucgucccccgcuacgccuucgccauggagcgcaacgccggcuccggcaucaucaucuccgacacccccguccacgacugcaacaccaccugccagacccccaagggcgccaucaacaccucccuccccuuccagaacauccaccccaucaccaucggcaagugccccaaguacgucaaguccaccaagcuccgccucgccaccggccuccgcaacguccccuccauccagucccgcggccucuucggcgccaucgccggcuucaucgagggcggcuggaccggcauggucgacggcugguacggcuaccaccaccagaacgagcagggcuccggcuacgccgccgaccucaaguccacccagaacgccaucgacgagaucaccaacaaggucaacuccgucaucgagaagaugaacacccaguucaccgccgucggcaaggaguucaaccaccucgagaagcgcaucgagaaccucaacaagaaggucgacgacggcuuccucgacaucuggaccuacaacgccgagcuccucguccuccucgagaacgagcgcacccucgacuaccacgacuccaacgucaagaaccucuacgagaagguccgcaaccagcucaagaacaacgccaaggagaucggcaacggcugcuucgaguucuaccacaagugcgacaacaccugcauggaguccgucaagaacggcaccuacgacuaccccaaguacuccgaggaggccaagcucaaccgcgaggagaucgacggcgucaagcucgaguccacccgcaucuaccagauccucgccaucuacuccaccgucgccuccucccucguccucgucgucucccucggcgccaucuccuucuggaugugcuccaacggcucccuccagugccgcaucugcaucuga

SEQ ID NO: 102654 - RNA, 1701 nt, Artificial Sequence
  derived and/or modified CDS sequence (opt2) from hemagglutinin__InfluenzaA__AEA72750
augaaggccauccucgucguccuccucuacaccuucgccaccgccaacgccgacacccucugcaucggcuaccacgccaacaacuccaccgacaccgucgacaccguccucgagaagaacgucaccgucacccacuccgucaaccuccucgaggacaagcacaacggcaagcucugcaagcuccgcggcgucgccccccuccaccucggcaagugcaacaucgccggcuggauccucggcaaccccgagugcgagucccucuccaccgccuccuccugguccuacaucgucgagaccuccuccuccgacaacggcaccugcuaccccggcgucuucaucgacuacgaggagcuccgcgagcagcucuccuccgucuccuccuucgagcgcuucgagaucuuccccaagaccuccuccuggcccaaccacgacuccaacaagggcgucaccgccgccugcccccacgccggcgccaaguccuucuacaagaaccucaucuggcucgucaagaagggcaacuccuaccccaagcucuccaaguccuacaucaacgacaagggcaaggagguccucguccucuggggcauccaccaccccuccaccaccgccgaccagcagucccucuaccagaacgccgacaccuacgucuucgucggcaccucccgcuacuccaagaaguucaagcccgagaucgccauccgccccaagguccgcgaccaggagggccgcaugaacuacuacuggacccucgucgagcccggcgacaagaucaccuucgaggccaccggcaaccucgucgucccccgcuacgccuucgccauggagcgcaacgccggcuccggcaucaucaucuccgacacccccguccacgacugcaacaccaccugccagacccccaagggcgccaucaacaccucccuccccuuccagaacauccaccccaucaccaucggcaagugccccaaguacgucaaguccaccaagcuccgccucgccaccggccuccgcaacguccccuccauccagucccgcggccucuucggcgccaucgccggcuucaucgagggcggcuggaccggcauggucgacggcugguacggcuaccaccaccagaacgagcagggcuccggcuacgccgccgaccucaaguccacccagaacgccaucgacaagaucaccaacaaggucaacuccgucaucgagaagaugaacacccaguucaccgccgucggcaaggaguucaaccaccucgagaagcgcaucgagaaccucaacaagaaggucgacgacggcuuccucgacaucuggaccuacaacgccgagcuccucguccuccucgagaacgagcgcacccucgacuaccacgacuccaacgucaagaaccucuacgagaagguccgcaaccagcucaagaacaacgccaaggagaucggcaacggcugcuucgaguucuaccacaagugcgacaacaccugcauggaguccgucaagaacggcaccuacgacuaccccaaguacuccgaggaggccaagcucaaccgcgaggagaucgacggcgucaagcucgaguccacccgcaucuaccagauccucgccaucuacuccaccgucgccuccucccucguccucgucgucucccucggcgccaucuccuucuggaugugcuccaacggcucccuccagugccgcaucugcaucuga

SEQ ID NO: 102655 - RNA, 1701 nt, Artificial Sequence; identical to SEQ ID NO: 102471
  derived and/or modified CDS sequence (opt2) from hemagglutinin__InfluenzaA__AEA72759

SEQ ID NO: 102656 - RNA, 1701 nt, Artificial Sequence
  derived and/or modified CDS sequence (opt2) from hemagglutinin__InfluenzaA__AEA72777
augaaggccauccucgucguccuccucuacacccucgccaccgccaacgccgacacccucugcaucggcuaccacgccaacaacuccaccgacaccgucgacaccguccucgagaagaacgucaccgucacccacuccgucaaccuccucgaggacaagcacgacggcaagcucugcaagcuccgcggcgucgccccccuccaccucggcaagugcaacaucgccggcuggauccucggcaaccccgagugcgagucccucuccaccgccuccuccugguccuacaucgucgagaccuccuccuccgacaacggcaccugcuaccccggcgacuucaucgacuacgaggagcuccgcgagcagcucuccuccgucuccuccuucgagcgcuucgagaucuuccccaagaccuccuccuggcccaaccacgacuccaacaagggcgucaccgccgccugcccccacgccggcgccaaguccuucuacaagaaccucaucuggcucgucaagaagggcaacuccuaccccaagcucuccaaguccuacaucaacgacaagggcaaggagauccucguccucuggggcauccaccaccccuccaccuccgccgaccagcagucccucuaccagaacgccgacgccuacgucuucgucggcaccucccgcuacuccaagaaguucaagcccgagaucgccauccgccccaagguccgcgaccaggagggccgcaugaacuacuacuggacccucgucgagcccggcgacaagaucaccuucgaggccaccggcaaccucgucgucccccgcuacgccuucgccauggagcgcaacgccggcuccggcaucaucaucuccgacacccccguccacgacugcaacgccaccugccagacccccaagggcgccaucaacaccucccuccccuuccagaacauccaccccaucaccaucggcaagugccccaaguacgucaaguccaccaagcuccgccucgccaccggccuccgcaacguccccuccauccagucccgcggccucuucggcgccaucgccggcuucaucgagggcggcuggaccggcauggucgacggcugguacggcuaccaccaccagaacgagcagggcuccggcuacgccgccgaccucaaguccacccagaacgccaucgacaagaucaccaacaaggucaacuccgucaucgagaagaugaacacccaguucaccgccgucggcaaggaguucaaccaccucgagaagcgcaucgagaaccucaacaagaaggucgacgacggcuuccucgacaucuggaccuacaacgccgagcuccucguccuccucgagaacgagcgcacccucgacuaccacgacuccaacgucaagaaccucuacgagaagguccgcucccagcucaagaacaacgccaaggagaucggcaacggcugcuucgaguucuaccacaagugcgacaacaccugcauggaguccgucaagaacggcaccuacgacuaccccaaguacuccgaggaggccaagcucaaccgcgaggagaucgacggcgucaagcucgaguccacccgcaucuaccagauccucgccaucuacuccaccgucgccuccucccucguccucgucgucucccucggcgccaucuccuucuggaugugcuccaacggcucccuccagugccgcaucugcaucuga

SEQ ID NO: 102657 - RNA, 1701 nt, Artificial Sequence; identical to SEQ ID NO: 102471
  derived and/or modified CDS sequence (opt2) from hemagglutinin__InfluenzaA__AEA72787

SEQ ID NO: 102658 - RNA, 1701 nt, Artificial Sequence; identical to SEQ ID NO: 101569
  derived and/or modified CDS sequence (opt2) from hemagglutinin__InfluenzaA__AEA73288

SEQ ID NO: 102659 - RNA, 1701 nt, Artificial Sequence; identical to SEQ ID NO: 101569
  derived and/or modified CDS sequence (opt2) from hemagglutinin__InfluenzaA__AEA73299

SEQ ID NO: 102660 - RNA, 1701 nt, Artificial Sequence; identical to SEQ ID NO: 101569
  derived and/or modified CDS sequence (opt2) from hemagglutinin__InfluenzaA__AEA73310

SEQ ID NO: 102661 - RNA, 1701 nt, Artificial Sequence
  derived and/or modified CDS sequence (opt2) from hemagglutinin__InfluenzaA__AEA73321
augaagaccaucaucgcccucuccuacauccucugccucgucuucgcccagaagcuccccggcaacgacaacuccaccgccacccucugccucggccaccacgccguccccaacggcaccaucgucaagaccaucaccaacgaccagaucgaggucaccaacgccaccgagcucguccaguccuccuccaccggcgagaucugcgacuccccccaccagauccucgacggcgagaacugcacccucaucgacgcccuccucggcgacccccagugcgacggcuuccagaacaagaagugggaccucuucgucgagcgcuccaaggccuacuccaacugcuaccccuacgacguccccgacuacgccucccuccgcucccucgucgccuccuccggcacccucgaguucaacaacgaguccuucaacuggaccggcgucacccagaacggcaccuccuccgccugcauccgccgcuccaacaacuccuucuucucccgccucaacuggcucacccaccucaacuucaaguaccccgcccucaacgucaccaugcccaacaacgagcaguucgacaagcucuacaucuggggcguccaccaccccggcaccgacaaggaccagaucuuccucuacgcccaggccuccggccgcaucaccgucuccaccaagcgcucccagcaggccgucauccccaacaucggcucccgcccccgcguccgcaacauccccucccgcaucuccaucuacuggaccaucgucaagcccggcgacauccuccucaucaacuccaccggcaaccucaucgccccccgcggcuacuucaagauccgcuccggcaaguccuccaucaugcgcuccgacgcccccaucggcaagugcaacuccgagugcaucacccccaacggcuccauccccaacgacaagcccuuccagaacgucaaccgcaucaccuacggcgccugcccccgcuacgucaagcaguccacccucaagcucgccaccggcaugcgcaacguccccgagaagcagacccgcggcaucuucggcgccaucgccggcuucaucgagaacggcugggagggcauggucgacggcugguacggcuuccgccaccagaacuccgagggccgcggccaggccgccgaccucaaguccacccaggccgccaucgaccagaucaacggcaagcucaaccgccucaucggcaagaccaacgagaaguuccaccagaucgagaaggaguucuccgaggucgagggccgcauccaggaccucgagaaguacgucgaggacaccaagaucgaccucugguccuacaacgccgagcuccucgucacccucgagaaccagcacaccaucgaccucaccgacuccgagaugaacaagcucuucgagaagaccaagaagcagcuccgcgagaacgccgaggacaugggcaacggcugcuucaccaucuaccacaagugcgacaacgccugcaucggcuccauccgcaacggcaccuacgaccacaacgucuaccgcgacgaggcccucaacaaccgcuuccagaucaagggcgucgagcucaaguccggcuacaaggacuggauccucuggaucuccuucgccaucuccugcuuccuccucugcgucgcccuccucggcuucaucaugugggccugccagaagggcaacauccgcugcaacaucugcaucuga

SEQ ID NO: 102662 - RNA, 1701 nt, Artificial Sequence; identical to SEQ ID NO: 101569
  derived and/or modified CDS sequence (opt2) from hemagglutinin__InfluenzaA__AEA73332

SEQ ID NO: 102663 - RNA, 1701 nt, Artificial Sequence; identical to SEQ ID NO: 101569
  derived and/or modified CDS sequence (opt2) from hemagglutinin__InfluenzaA__AEA73343

SEQ ID NO: 102664 - RNA, 1701 nt, Artificial Sequence; identical to SEQ ID NO: 101569
  derived and/or modified CDS sequence (opt2) from hemagglutinin__InfluenzaA__AEA73354

SEQ ID NO: 102665 - RNA, 1701 nt, Artificial Sequence
  derived and/or modified CDS sequence (opt2) from hemagglutinin__InfluenzaA__AEA73365
augaagaccaucaucgcccucuccuacacccucugccucgucuucgcccagaagcuccccggcaacgacaacuccaccgccacccucugccucggccaccacgccguccccaacggcaccaucgucaagaccaucaccaacgaccagaucgaggucaccaacgccaccgagcucguccaguccuccuccaccggcgagaucugcgacuccccccaccagauccucgacggcgagaacugcacccucaucgacgcccuccucggcgacccccagugcgacggcuuccagaacaagaagugggaccucuucgucgagcgcuccaaggccuacuccaacugcuaccccuacgacguccccgacuacgccucccuccgcucccucgucgccuccuccggcacccucgaguucaacaacgaguccuucaacuggaccggcgucacccagaacggcaccuccuccgccugcauccgccgcuccaacaacuccuucuucucccgccucaacuggcucacccaccucaacuucaaguaccccgcccucaacgucaccaugcccaacaacgagcaguucgacaagcucuacaucuggggcguccaccaccccggcaccgacaaggaccagaucuuccucuacgcccaggccuccggccgcaucaccgucuccaccaagcgcucccagcaggccgucauccccaacaucggcucccgcccccgcguccgcaacauccccucccgcaucuccaucuacuggaccaucgucaagcccggcgacauccuccucaucaacuccaccggcaaccucaucgccccccgcggcuacuucaagauccgcuccggcaaguccuccaucaugcgcuccgacgcccccaucggcaagugcaacuccgagugcaucacccccaacggcuccauccccaacgacaagcccuuccagaacgucaaccgcaucaccuacggcgccugcccccgcuacgucaagcaguccacccucaagcucgccaccggcaugcgcaacguccccgagaagcagacccgcggcaucuucggcgccaucgccggcuucaucgagaacggcugggagggcauggucgacggcugguacggcuuccgccaccagaacuccgagggccgcggccaggccgccgaccucaaguccacccaggccgccaucgaccagaucaacggcaagcucaaccgccucaucggcaagaccaacgagaaguuccaccagaucgagaaggaguucuccgaggucgagggccgcauccaggaccucgagaaguacgucgaggacaccaagaucgaccucugguccuacaacgccgagcuccucgucgcccucgagaaccagcacaccaucgaccucaccgacuccgagaugaacaagcucuucgagaagaccaagaagcagcuccgcgagaacgccgaggacaugggcaacggcugcuucaccaucuaccacaagugcgacaacgccugcaucggcuccauccgcaacggcaccuacgaccacaacgucuaccgcgacgaggcccucaacaaccgcuuccagaucaagggcgucgagcucaaguccggcuacaaggacuggauccucuggaucuccuucgccaucuccugcuuccuccucugcgucgcccuccucggcuucaucaugugggccugccagaagggcaacauccgcugcaacaucugcaucuga

SEQ ID NO: 102666 - RNA, 1701 nt, Artificial Sequence; identical to SEQ ID NO: 101569
  derived and/or modified CDS sequence (opt2) from hemagglutinin__InfluenzaA__AEA73376

SEQ ID NO: 102667 - RNA, 1701 nt, Artificial Sequence; identical to SEQ ID NO: 101569
  derived and/or modified CDS sequence (opt2) from hemagglutinin__InfluenzaA__AEA73387

SEQ ID NO: 102668 - RNA, 1701 nt, Artificial Sequence; identical to SEQ ID NO: 101569
  derived and/or modified CDS sequence (opt2) from hemagglutinin__InfluenzaA__AEA73398

SEQ ID NO: 102669 - RNA, 1701 nt, Artificial Sequence; identical to SEQ ID NO: 101569
  derived and/or modified CDS sequence (opt2) from hemagglutinin__InfluenzaA__AEA73409

SEQ ID NO: 102670 - RNA, 1701 nt, Artificial Sequence; identical to SEQ ID NO: 101569
  derived and/or modified CDS sequence (opt2) from hemagglutinin__InfluenzaA__AEA73420

SEQ ID NO: 102671 - RNA, 1701 nt, Artificial Sequence; identical to SEQ ID NO: 101569
  derived and/or modified CDS sequence (opt2) from hemagglutinin__InfluenzaA__AEA73452

SEQ ID NO: 102672 - RNA, 1701 nt, Artificial Sequence; identical to SEQ ID NO: 101569
  derived and/or modified CDS sequence (opt2) from hemagglutinin__InfluenzaA__AEA73463

SEQ ID NO: 102673 - RNA, 1701 nt, Artificial Sequence; identical to SEQ ID NO: 101569
  derived and/or modified CDS sequence (opt2) from hemagglutinin__InfluenzaA__AEA73474

SEQ ID NO: 102674 - RNA, 1701 nt, Artificial Sequence
  derived and/or modified CDS sequence (opt2) from hemagglutinin__InfluenzaA__AEA73485
augaagaccaucaucgcccucuccuacauccucugccucgucuucgcccagaagcuccccggcaacgacaacuccaccgccacccucugccucggccaccacgccguccccaacggcaccaucgucaagaccaucaccaacgaccagaucgaggucaccaacgccaccgagcucguccaguccuccuccaccggcgagaucugcgacuccccccaccagauccucgacggcgagaacugcacccucaucgacgcccuccucggcgacccccagugcgacggcuuccagaacaagaagugggaccucuucgucgagcgcuccaaggcccacuccaacugcuaccccuacgacguccccgacuacgccucccuccgcucccucgucgccuccuccggcacccucgaguucaacaacgaguccuucaacuggaccggcgucacccagaacggcaccuccuccgccugcauccgccgcuccaacaacuccuucuucucccgccucaacuggcucacccaccucaacuucaaguaccccgcccucaacgucaccaugcccaacaacgagcaguucgacaagcucuacaucuggggcguccaccaccccggcaccgacaaggaccagaucuuccucuacgcccaggccuccggccgcaucaccgucuccaccaagcgcucccagcaggccgucauccccaacaucggcucccgcccccgcguccgcaacauccccucccgcaucuccaucuacuggaccaucgucaagcccggcgacauccuccucaucaacuccaccggcaaccucaucgccccccgcggcuacuucaagauccgcuccggcaaguccuccaucaugcgcuccgacgcccccaucggcaagugcaacuccgagugcaucacccccaacggcuccauccccaacgacaagcccuuccagaacgucaaccgcaucaccuacggcgccugcccccgcuacgucaagcaguccacccucaagcucgccaccggcaugcgcaacguccccgagaagcagacccgcggcaucuucggcgccaucgccggcuucaucgagaacggcugggagggcauggucgacggcugguacggcuuccgccaccagaacuccgagggccgcggccaggccgccgaccucaaguccacccaggccgccaucgaccagaucaacggcaagcucaaccgccucaucggcaagaccaacgagaaguuccaccagaucgagaaggaguucuccgaggucgagggccgcauccaggaccucgagaaguacgucgaggacaccaagaucgaccucugguccuacaacgccgagcuccucgucgcccucgagaaccagcacaccaucgaccucaccgacuccgagaugaacaagcucuucgagaagaccaagaagcagcuccgcgagaacgccgaggacaugggcaacggcugcuucaccaucuaccacaagugcgacaacgccugcaucggcuccauccgcaacggcaccuacgaccacaacgucuaccgcgacgaggcccucaacaaccgcuuccagaucaagggcgucgagcucaaguccggcuacaaggacuggauccucuggaucuccuucgccaucuccugcuuccuccucugcgucgcccuccucggcuucaucaugugggccugccagaagggcaacauccgcugcaacaucugcaucuga

SEQ ID NO: 102675 - RNA, 1701 nt, Artificial Sequence; identical to SEQ ID NO: 101569
  derived and/or modified CDS sequence (opt2) from hemagglutinin__InfluenzaA__AEA73496

SEQ ID NO: 102676 - RNA, 1701 nt, Artificial Sequence; identical to SEQ ID NO: 101569
  derived and/or modified CDS sequence (opt2) from hemagglutinin__InfluenzaA__AEA73507

SEQ ID NO: 102677 - RNA, 1701 nt, Artificial Sequence; identical to SEQ ID NO: 101569
  derived and/or modified CDS sequence (opt2) from hemagglutinin__InfluenzaA__AEA73518

SEQ ID NO: 102678 - RNA, 1701 nt, Artificial Sequence; identical to SEQ ID NO: 101569
  derived and/or modified CDS sequence (opt2) from hemagglutinin__InfluenzaA__AEA73529

SEQ ID NO: 102679 - RNA, 1701 nt, Artificial Sequence; identical to SEQ ID NO: 101569
  derived and/or modified CDS sequence (opt2) from hemagglutinin__InfluenzaA__AEA73540

SEQ ID NO: 102680 - RNA, 1701 nt, Artificial Sequence; identical to SEQ ID NO: 101569
  derived and/or modified CDS sequence (opt2) from hemagglutinin__InfluenzaA__AEA73551

SEQ ID NO: 102681 - RNA, 1701 nt, Artificial Sequence; identical to SEQ ID NO: 101569
  derived and/or modified CDS sequence (opt2) from hemagglutinin__InfluenzaA__AEA73562

SEQ ID NO: 102682 - RNA, 1698 nt, Artificial Sequence
  derived and/or modified CDS sequence (opt2) from hemagglutinin__InfluenzaA__AEA73573
augaaggucaagcuccucguccuccucugcaccuucaccgccaccuacgccgacaccaucugcaucggcuaccacgccaacaacuccaccgacaccgucgacaccguccucgagaagaacgucaccgucacccacuccgucaaccuccucgagaacucccacaacggcaagcucugccuccucaagggcaucgccccccuccagcucggcaacugcuccgucgccggcuggauccucggcaaccccgagugcgagcuccucaucuccaaggaguccugguccuacaucgucgagaagcccaaccccgagaacggcaccugcuaccccggccacuucgccgacuacgaggagcuccgcgagcagcucuccuccgucuccuccuucgagcgcuucgagaucuuccccaaggaguccuccuggcccaaccacaccgucaccggcgucuccgccuccugcucccacaacggcgaguccuccuucuaccgcaaccuccucuggcucaccgagaagaacggccucuaccccaaccucuccaaguccuacgccaacaacaaggagaaggagguccucguccucuggggcguccaccacccccccaacaucggcgaccagaagacccucuaccacaccgagaacgccuacgucuccgucgucuccucccacuacucccgcaaguucacccccgagaucgccaagcgccccaagguccgcgaccaggagggccgcaucaacuacuacuggacccuccucgagcccggcgacaccaucaucuucgaggccaacggcaaccucaucgccccccgcuacgccuucgcccucucccgcggcuucggcuccggcaucaucaacuccaacgcccccauggacaagugcgacgccaagugccagaccccccagggcgccaucaacuccucccuccccuuccagaacguccaccccgucaccaucggcgagugccccaaguacguccgcuccgccaagcuccgcauggucaccggccuccgcaacauccccuccauccagucccgcggccucuucggcgccaucgccggcuucaucgagggcggcuggaccggcauggucgacggcugguacggcuaccaccaccagaacgagcagggcuccggcuacgccgccgaccagaaguccacccagaacgccaucaacggcaucaccaacaaggucaacuccgucaucgagaagaugaacacccaguucaccgccgucggcaaggaguucaacaagcucgagcgccgcauggagaaccucaacaagaaggucgacgacggcuucaucgacaucuggaccuacaacgccgagcuccucguccuccucgagaacgagcgcacccucgacuuccacgacuccaacgucaagaaccucuacgagaaggucaagucccagcucaagaacaacgccaaggagaucggcaacggcugcuucgaguucuaccacaagugcaacgacgagugcauggaguccgucaagaacggcaccuacgacuaccccaaguacuccgaggaguccaagcucaaccgcgagaagaucgacggcgucaagcucgaguccaugggcgucuaccagauccucgccaucuacuccaccgucgccuccucccucguccuccucgucucccucggcgccaucuccuucuggaugugcuccaacggcucccuccagugccgcaucugcaucuga

SEQ ID NO: 102683 - RNA, 1698 nt, Artificial Sequence
  derived and/or modified CDS sequence (opt2) from hemagglutinin__InfluenzaA__AEA73584
augaaggucaagcuccucguccuccucugcaccuucaccgccaccuacgccgacaccaucugcaucggcuaccacgccaacaacuccaccgacaccgucgacaccguccucgagaagaacgucaccgucacccacuccgucaaccuccucgagaacucccacaacggcaagcucugccuccucaagggcaucgccccccuccagcucggcaacugcuccgucgccggcuggauccucggcaaccccgagugcgagcuccucaucuccaaggaguccugguccuacaucgucgagaagcccaaccccgagaacggcaccugcuaccccggccacuucgccgacuacgaggagcuccgcgagcagcucuccuccgucuccuccuucgagcgcuucgagaucuuccccaaggaguccuccuggcccaaccacaccgucaccggcgucuccgccuccugcucccacaacggcgaguccuccuucuaccgcaaccuccucuggcucaccggcaagaacggccucuaccccaaccucuccaaguccuacgccaacaacaaggagaaggagguccucguccucuggggcguccaccacccccccaacaucgucgaccagaagacccucuaccgcaccgagaacgccuacgucuccgucgucuccucccacuacucccgcaaguucacccccgagaucgccaagcgccccaagguccgcaaccaggagggccgcaucaacuacuacuggacccuccucgagcccggcgacaccaucaucuucgaggccaacggcaaccucaucgccccccgcuacgccuucgcccucucccgcggcuucggcuccggcaucaucaacuccaacgcccccauggacaagugcgacgccaagugccagaccccccagggcgccaucaacuccucccuccccuuccagaacguccaccccgucaccaucggcgagugccccaaguacguccgcuccgccaagcuccgcauggucaccggccuccgcaacauccccuccauccagucccgcggccucuucggcgccaucgccggcuucaucgagggcggcuggaccggcauggucgacggcugguacggcuaccaccaccagaacgagcagggcuccggcuacgccgccgaccagaaguccacccagaacgccaucaacggcaucaccaacaaggucaacuccgucaucgagaagaugaacacccaguucaccgccgucggcaaggaguucaacaagcucgagcgccgcauggagaaccucaacaagaaggucgacgacggcuucaucgacaucuggaccuacaacgccgagcuccucguccuccucgagaacgagcgcacccucgacuuccacgacuccaacgucaagaaccucuacgagaaggucaagucccagcucaagaacaacgccaaggagaucggcaacggcugcuucgaguucuaccacaagugcaacgacgagugcauggaguccgucaagaacggcaccuacgacuaccccaaguacuccgaggaguccaagcucaaccgcgagaagaucgacggcgucaagcucgaguccaugggcgucuaccagauccucgccaucuacuccaccgucgccuccucccucguccuccucgucucccucggcgccaucuccuucuggaugugcuccaacggcucccuccagugccgcaucugcaucuga

SEQ ID NO: 102684 - RNA, 1698 nt, Artificial Sequence
  derived and/or modified CDS sequence (opt2) from hemagglutinin__InfluenzaA__AEA73595
augaaggucaagcuccucguccuccucugcaccuucaccgccaccuacgccgacaccaucugcaucggcuaccacgccaacaacuccaccgacaccgucgacaccguccucgagaagaacgucaccgucacccacuccgucaaccuccucgagaacucccacaacggcaagcucugccuccucaagggcaucgccccccuccagcucggcaacugcuccgucgccggcuggauccucggcaaccccgagugcgagcuccucaucuccaaggaguccugguccuacaucgucgagaagcccaaccccgagaacggcaccugcuaccccggccacuucgccgacuacgaggagcuccgcgagcagcucuccuccgucuccuccuucgagcgcuucgagaucuuccccaaggaguccuccuggcccaaccacaccgucaccggcgucuccgccuccugcucccacaacggcgaguccuccuucuaccgcaaccuccucuggcucaccgucaagaacggccucuaccccaaccucuccaaguccuacgccaacaacaaggagaaggagguccucguccucuggggcguccaccacccccccaacaucgucgaccagaagacccucuaccacaccgagaacgccuacgucuccgucgucuccucccacuacucccgcaaguucacccccgagaucgccaagcgccccaagguccgcgaccaggagggccgcaucaacuacuacuggacccuccucgagcccggcgacaccaucaucuucgaggccaacggcaaccucaucgccccccgcuacgccuucgcccucucccgcggcuucggcuccggcaucaucaacuccaacgcccccauggacaagugcgacgccaagugccagaccccccgcggcgccaucaacuccucccuccccuuccagaacguccaccccgucaccaucggcgagugccccaaguacguccgcuccgccaagcuccgcauggucaccggccuccgcaacauccccuccauccagucccgcggccucuucggcgccaucgccggcuucaucgagggcggcuggaccggcauggucgacggcugguacggcuaccaccaccagaacgagcagggcuccggcuacgccgccgaccagaaguccacccagaacgccaucaacggcaucaccaacaaggucaacuccgucaucgagaagaugaacacccaguucaccgccgucggcaaggaguucaacaagcucgagcgccgcauggagaaccucaacaagaaggucgacgacggcuucaucgacaucuggaccuacaacgccgagcuccucguccuccucgagaacgagcgcacccucgacuuccacgacuccaacgucaagaaccucuacgagaaggucaagucccagcucaagaacaacgccaaggagaucggcaacggcugcuucgaguucuaccacaagugcaacgacgagugcauggaguccgucaagaacggcaccuacgacuaccccaaguacuccgaggaguccaagcucaaccgcgagaagaucgacggcgucaagcucgaguccaugggcgucuaccagauccucgccaucuacuccaccgucgccuccucccucguccuccucgucucccucggcgccaucuccuucuggaugugcuccaacggcucccuccagugccgcaucugcaucuga

SEQ ID NO: 102685 - RNA, 1698 nt, Artificial Sequence; identical to SEQ ID NO: 101989
  derived and/or modified CDS sequence (opt2) from hemagglutinin__InfluenzaA__AEA73606

SEQ ID NO: 102686 - RNA, 1698 nt, Artificial Sequence; identical to SEQ ID NO: 99167
  derived and/or modified CDS sequence (opt2) from hemagglutinin__InfluenzaA__AEA73617

SEQ ID NO: 102687 - RNA, 1698 nt, Artificial Sequence; identical to SEQ ID NO: 99652
  derived and/or modified CDS sequence (opt2) from hemagglutinin__InfluenzaA__AEA73628

SEQ ID NO: 102688 - RNA, 1698 nt, Artificial Sequence; identical to SEQ ID NO: 102008
  derived and/or modified CDS sequence (opt2) from hemagglutinin__InfluenzaA__AEA73639

SEQ ID NO: 102689 - RNA, 1698 nt, Artificial Sequence; identical to SEQ ID NO: 99167
  derived and/or modified CDS sequence (opt2) from hemagglutinin__InfluenzaA__AEA73650

SEQ ID NO: 102690 - RNA, 1698 nt, Artificial Sequence; identical to SEQ ID NO: 99652
  derived and/or modified CDS sequence (opt2) from hemagglutinin__InfluenzaA__AEA73661

SEQ ID NO: 102691 - RNA, 1698 nt, Artificial Sequence
  derived and/or modified CDS sequence (opt2) from hemagglutinin__InfluenzaA__AEA73672
augaaggucaagcuccucguccuccucugcaccuucaccgccaccuucgccgacaccaucugcaucggcuaccacgccaacaacuccaccgacaccgucgacaccguccucgagaagaacgucaccgucacccacuccgucaaccuccucgagaacucccacaacggcaagcucugccuccucaagggcaucgccccccuccagcucggcaacugcuccgucgccggcuggauccucggcaaccccgagugcgagcuccucaucuccaaggaguccugguccuacaucgucgagaagcccaaccccgagaacggcaccugcuaccccggccacuucgccgacuacgaggagcuccgcgagcagcucuccuccgucuccuccuucgagcgcuucgagaucuuccccaaggaguccuccuggcccaaccacaccgucaccggcgucuccgccuccugcucccacaacggcgaguccuccuucuaccgcaaccuccucuggcucaccgucaagaacggccucuaccccaaccucuccaaguccuacgccaacaacaaggagaaggagguccucguccucuggggcguccaccacccccccaacaucgucgaccagaagacccucuaccgcaccgagaacgccuacgucuccgucgucuccucccacuacucccgcaaguucacccccgagaucgccaagcgccccaagguccgcgaccaggagggccgcaucaacuacuacuggacccuccucgagcccggcgacaccaucaucuucgaggccaacggcaaccucaucgccccccgcuacgccuucgcccucucccgcggcuucggcuccggcaucaucaacuccaacgcccccauggacaagugcgacgccaagugccagaccccccgcggcgccaucaacuccucccuccccuuccagaacguccaccccgucaccaucggcgagugccccaaguacguccgcuccgccaagcuccgcauggucaccggccuccgcaacauccccuccauccagucccgcggccucuucggcgccaucgccggcuucaucgagggcggcuggaccggcauggucgacggcugguacggcuaccaccaccagaacgagcagggcuccggcuacgccgccgaccagaaguccacccagaacgccaucaacggcaucaccaacaaggucaacuccgucaucgagaagaugaacacccaguucaccgccgucggcaaggaguucaacaagcucgagcgccgcauggagaaccucaacaagaaggucgacgacggcuucaucgacaucuggaccuacaacgccgagcuccucguccuccucgagaacgagcgcacccucgacuuccacgacuccaacgucaagaaccucuacgagaaggucaagucccagcucaagaacaacgccaaggagaucggcaacggcugcuucgaguucuaccacaagugcaacgacgagugcauggaguccgucaagaacggcaccuacgacuaccccaaguacuccgaggaguccaagcucaaccgcgagaagaucgacggcgucaagcucgaguccaugggcgucuaccagauccucgccaucuacuccaccgucgccuccucccucguccuccucgucucccucggcgccaucuccuucuggaugugcuccaacggcucccuccagugccgcaucugcaucuga

SEQ ID NO: 102692 - RNA, 1698 nt, Artificial Sequence; identical to SEQ ID NO: 99652
  derived and/or modified CDS sequence (opt2) from hemagglutinin__InfluenzaA__AEA73683

SEQ ID NO: 102693 - RNA, 1698 nt, Artificial Sequence
  derived and/or modified CDS sequence (opt2) from hemagglutinin__InfluenzaA__AEA73694
augaaggucaagcuccucguccuccucugcaccuucaccgccaccuacgccgacaccaucugcaucggcuaccacgccaacaacuccaccgacaccgucgacaccguccucgagaagaacgucaccgucacccacuccgucaaccuccucgagaacucccacaacggcaagcucugccuccucaagggcaucgccccccuccagcucggcaacugcuccgucgccggcuggauccucggcaaccccgagugcgagcuccucaucuccaaggaguccugguccuacaucgucgagaagcccaaccccgagaacggcaccugcuaccccggccacuucgccgacuacgaggagcuccgcgagcagcucuccuccgucuccuccuucgagcgcuucgagaucuuccccaaggaguccuccuggcccaaccacaccgucaccggcgucuccgccuccugcucccacaacggcgaguccuccuucuaccgcaaccuccucuggcucaccgucaagaacggccucuaccccaaccucuccaaguccuacgccaacaacaaggagaaggagguccucguccucuggggcguccaccacccccccaacaucgucgaccagaagacccucuaccgcaccgagaacgccuacgucuccgucgucuccucccacuacucccgcaaguucacccccgagaucgccaagcgccccaagguccgcgaccaggagggccgcaucaacuacuacuggacccuccucgagcccggcgacaccaucaucuucgaggccaacggcaaccucaucgccccccgcuacgccuucgcccucucccgcggcuucggcuccggcaucaucaacuccaacgcccccauggacaagugcgacgccaagugccagaccccccgcggcgccaucaacuccucccuccccuuccagaacguccaccccgucaccaucggcgagugccccaaguacguccgcuccgccaagcuccgcauggucaccggccuccgcaacauccccuccauccagucccgcggccucuucggcgccaucgccggcuucaucgagggcggcuggaccggcauggucgacggcugguacggcuaccaccaccagaacgagcagggcuccggcuacgccgccgaccagaaguccacccagaacgccaucaacggcaucaccaacaaggucaacuccgucaucgagaagaugaacacccaguucaccgccgucggcaaggaguucaacaagcucgagcgccgcauggagaaccucaacaagaaggucgacgacggcuucaucgacaucuggaccuacaacgccgagcuccucguccuccucgagaacgagcgcacccucgacuuccacgacuccaacgucaagaaccucuacgagaaggucaagucccagcucaagaacaacgccaaggagaucggcaacggcugcuucgaguucuaccacaagugcaacgacgagugcauggaguccgucaagaacggcaccuacgacuaccccaaguacuccgaggaguccaagcucaaccgcgagaagaucgacggcgucgagcucgaguccaugggcgucuaccagauccucgccaucuacuccaccgucgccuccucccucguccuccucgucucccucggcgccaucuccuucuggaugugcuccaacggcucccuccagugccgcaucugcaucuga

SEQ ID NO: 102694 - RNA, 1698 nt, Artificial Sequence; identical to SEQ ID NO: 99652
  derived and/or modified CDS sequence (opt2) from hemagglutinin__InfluenzaA__AEA73705

SEQ ID NO: 102695 - RNA, 1698 nt, Artificial Sequence; identical to SEQ ID NO: 99167
  derived and/or modified CDS sequence (opt2) from hemagglutinin__InfluenzaA__AEA73716

SEQ ID NO: 102696 - RNA, 1698 nt, Artificial Sequence; identical to SEQ ID NO: 99167
  derived and/or modified CDS sequence (opt2) from hemagglutinin__InfluenzaA__AEA73727

SEQ ID NO: 102697 - RNA, 1698 nt, Artificial Sequence; identical to SEQ ID NO: 99167
  derived and/or modified CDS sequence (opt2) from hemagglutinin__InfluenzaA__AEA73738

SEQ ID NO: 102698 - RNA, 1698 nt, Artificial Sequence; identical to SEQ ID NO: 99167
  derived and/or modified CDS sequence (opt2) from hemagglutinin__InfluenzaA__AEA73749

SEQ ID NO: 102699 - RNA, 1698 nt, Artificial Sequence
  derived and/or modified CDS sequence (opt2) from hemagglutinin__InfluenzaA__AEA73760
augaaggucaagcuccucguccuccucugcaccuucaccgccaccuacgccgacaccaucugcaucggcuaccacgccaacaacuccaccgacaccgucgacaccguccucgagaagaacgucaccgucacccacuccgucaaccuccucgagaacucccacaacggcaagcucugccuccucaagggcaucgccccccuccagcucggcaacugcuccgucgccggcuggauccucggcaaccccgagugcgagcuccucaucuccaaggaguccugguccuacaucgucgagaagcccaaccccgagaacggcaccugcuaccccggccacuucgccgacuacgaggagcuccgcgagcagcucuccuccgucuccuccuucgagcgcuucgagaucuuccccaaggaguccuccuggcccaaccacaccgucaccggcgucuccgccuccugcucccacaacggcgaguccuccuucuaccgcaaccuccucuggcucaccgucaagaacggccucuaccccaaccucuccaaguccuacgccaacaacaaggagaaggagguccucguccucuggggcguccaccacccccccaacaucgucgaccagaagacccucuaccgcaccgagaacgccuacgucuccgucgucuccucccacuacucccgcaaguucacccccgagaucgccaagcgccccaagauccgcgaccaggagggccgcaucaacuacuacuggacccuccucgagcccggcgacaccaucaucuucgaggccaacggcaaccucaucgccccccgcuacgccuucgcccucucccgcggcuucggcuccggcaucaucaacuccaacgcccccauggacaagugcgacgccaagugccagaccccccgcggcgccaucaacuccucccuccccuuccagaacguccaccccgucaccaucggcgagugccccaaguacguccgcuccgccaagcuccgcauggucaccggccuccgcaacauccccuccauccagucccgcggccucuucggcgccaucgccggcuucaucgagggcggcuggaccggcauggucgacggcugguacggcuaccaccaccagaacgagcagggcuccggcuacgccgccgaccagaaguccacccagaacgccaucaacggcaucaccaacaaggucaacuccgucaucgagaagaugaacacccaguucaccgccgucggcaaggaguucaacaagcucgagcgccgcauggagaaccucaacaagaaggucgacgacggcuucaucgacaucuggaccuacaacgccgagcuccucguccuccucgagaacgagcgcacccucgacuuccacgacuccaacgucaagaaccucuacgagaaggucaagucccagcucaagaacaacgccaaggagaucggcaacggcugcuucgaguucuaccacaagugcaacgacgagugcauggaguccgucaagaacggcaccuacgacuaccccaaguacuccgaggaguccaagcucaaccgcgagaagaucgacggcgucaagcucgaguccaugggcgucuaccagauccucgccaucuacuccaccgucgccuccucccucguccuccucgucucccucggcgccaucuccuucuggaugugcuccaacggcucccuccagugccgcaucugcaucuga

SEQ ID NO: 102700 - RNA, 1701 nt, Artificial Sequence; identical to SEQ ID NO: 98705
  derived and/or modified CDS sequence (opt2) from hemagglutinin__InfluenzaA__AEA73771

SEQ ID NO: 102701 - RNA, 1701 nt, Artificial Sequence; identical to SEQ ID NO: 100335
  derived and/or modified CDS sequence (opt2) from hemagglutinin__InfluenzaA__AEA73781

SEQ ID NO: 102702 - RNA, 1701 nt, Artificial Sequence; identical to SEQ ID NO: 100257
  derived and/or modified CDS sequence (opt2) from hemagglutinin__InfluenzaA__AEA73791

SEQ ID NO: 102703 - RNA, 1701 nt, Artificial Sequence; identical to SEQ ID NO: 98885
  derived and/or modified CDS sequence (opt2) from hemagglutinin__InfluenzaA__AEA73801

SEQ ID NO: 102704 - RNA, 1701 nt, Artificial Sequence; identical to SEQ ID NO: 99869
  derived and/or modified CDS sequence (opt2) from hemagglutinin__InfluenzaA__AEA73811

SEQ ID NO: 102705 - RNA, 1701 nt, Artificial Sequence; identical to SEQ ID NO: 100427
  derived and/or modified CDS sequence (opt2) from hemagglutinin__InfluenzaA__AEA73821

SEQ ID NO: 102706 - RNA, 1701 nt, Artificial Sequence
  derived and/or modified CDS sequence (opt2) from hemagglutinin__InfluenzaA__AEA73831
augaaggccauccucgucguccuccucuacaccuucgccaccgccaacgccgacacccucugcaucggcuaccacgccaacaacuccaccgacaccgucgacaccguccucgagaagaacgucaccgucacccacuccgucaaccuccucgaggacaagcacaacggcaagcucugcaagcuccgcggcgucaccccccuccaccucggcaagugcaacaucgccggcuggauccucggcaaccccgagugcgagucccucuccaccgccuccuccugguccuacaucgucgagaccuccuccuccgacaacggcaccugcuaccccggcgacuucaucgacuacgaggagcuccgcgagcagcucuccuccgucuccuccuucgagcgcuucgagaucuuccccaagaccuccuccuggcccaaccacgacuccaacaagggcgucaccgccgccugcccccacgccggcgccaaguccuucuacaagaaccucaucuggcucgucaagaagggcaacuccuaccccaagcucuccaaguccuacaucaacgacaagggcaaggagguccucguccucuggggcauccaccaccccuccaccuccaccgaccagcagucccucuaccagaacgccgacgccuacgucuucgucggcaccucccgcuacuccaagaaguucaagcccgagaucgccauccgccccaagguccgcgaccaggagggccgcaugaacuacuacuggacccucgucgagcccggcgacaagaucaccuucgaggccaccggcaaccucgucgucccccgcuacgccuucgccauggagcgcaacgccggcuccggcaucaucaucuccgacacccccguccacgacugcaacaccaccugccagacccccaagggcgccaucaacaccucccuccccuuccagaacauccaccccaucaccaucggcaagugccccaaguacgucaaguccaccaagcuccgccucgccaccggccuccgcaacguccccuccauccagucccgcggccucuucggcgccaucgccggcuucaucgagggcggcuggaccggcauggucgacggcugguacggcuaccaccaccagaacgagcagggcuccggcuacgccgccgaccucaaguccacccagaacgccaucgacaagaucaccaacaaggucaacuccgucaucgagaagaugaacacccaguucaccgccgucggcaaggaguucaaccaccucgagaagcgcaucgagaaccucaacaagaaggucgacgacggcuuccucgacaucuggaccuacaacgccgagcuccucguccuccucgagaacgagcgcacccucgacuaccacgacuccaacgucaagaaccucuacgagaagguccgcucccagcucaagaacaacgccaaggagaucggcaacggcugcuucgaguucuaccacaagugcgacaacaccugcauggaguccgucaagaacggcaccuacgacuaccccaaguacuccgaggaggccaagcucaaccgcgaggagaucgacggcgucaagcucgaguccacccgcaucuaccagauccucgccaucuacuccaccgucgccuccucccucguccucgucgucucccucggcgccaucuccuucuggaugugcuccaacggcucccuccagugccgcaucugcaucuga

SEQ ID NO: 102707 - RNA, 1701 nt, Artificial Sequence
  derived and/or modified CDS sequence (opt2) from hemagglutinin__InfluenzaA__AEA73841
augaaggccauccucgucguccuccucuacaccuucgccaccgccaacgccgacacccucugcaucggcuaccacgccaacaacuccaccgacaccgucgacaccguccucgagaagaacgucaccgucacccacuccgucaaccuccucgaggacaagcacaacggcaagcucugcaagcuccgcggcgucgccccccuccaccucggcaagugcaacaucgccggcuggauccucggcaaccccgagugcgagucccucuccaccgccuccuccugguccuacaucgucgagaccuccuccuccgacaacggcaccugcuaccccggcgacuucaucaacuacgaggagcuccgcgagcagcucuccuccgucuccuccuucgagcgcuucgagaucuuccccaagaccuccuccuggcccaaccacgacuccaacaagggcgucaccgccgccugcccccacgccggcgccaaguccuucuacaagaaccucaucuggcucgucaagaagggcaacuccuaccccaagcucuccaaguccuacaucaacgacaagggcaaggagguccucguccucuggggcauccaccaccccuccaccuccgccgaccagcagucccucuaccagaacgccgacgccuacgucuucgucggcaccucccgcuacuccaagaaguucaagcccgagaucgccauccgccccaagguccgcgaccaggagggccgcaugaacuacuacuggacccucgucgagcccggcgacaagaucaccuucgaggccaccggcaaccucgucgucccccgcuacgccuucgccauggagcgcaacgccgaguccggcaucaucaucuccgacacccccguccacgacugcaacaccaccugccagacccccaagggcgccaucaacaccucccuccccuuccagaacauccaccccaucaccaucggcaagugccccaaguacgucaaguccaccaagcuccgccucgccaccggccuccgcaacguccccuccauccagucccgcggccucuucggcgccaucgccggcuucaucgagggcggcuggaccggcauggucgacggcugguacggcuaccaccaccagaacgagcagggcuccggcuacgccgccgaccucaaguccacccagaacgccaucgacaagaucaccaacaaggucaacuccgucgucgagaagaugaacacccaguucaccgccgucggcaaggaguucaaccaccucgagaagcgcaucgagaaccucaacaagaaggucgacgacggcuuccucgacaucuggaccuacaacgccgagcuccucguccuccucgagaacgagcgcacccucgacuaccacgacuccaacgucaagaaccucuacgagaagguccgcucccagcucaagaacaacgccaaggagaucggcaacggcugcuucgaguucuaccacaagugcgacaacaccugcauggaguccgucaagaacggcaccuacgacuaccccaaguacuccgaggaggccaagcucaaccgcgaggagaucgacggcgucaagcucgaguccacccgcaucuaccagauccucgccaucuacuccaccgucgccuccucccucguccucgucgucucccucggcgccaucuccuucuggaugugcuccaacggcucccuccagugccgcaucugcaucuga

SEQ ID NO: 102708 - RNA, 1701 nt, Artificial Sequence; identical to SEQ ID NO: 100335
  derived and/or modified CDS sequence (opt2) from hemagglutinin__InfluenzaA__AEA73851

SEQ ID NO: 102709 - RNA, 1701 nt, Artificial Sequence
  derived and/or modified CDS sequence (opt2) from hemagglutinin__InfluenzaA__AEA73861
augaaggccauccucgucguccuccucuacaccuucgccaccgccaacgccgacacccucugcaucggcuaccacgccaacaacuccaccgacaccgucgacaccguccucgagaagaacgucaccgucacccacuccgucaaccuccucgaggacaagcacaacggcaagcucugcaagcuccgcggcgucgccccccuccaccucggcgagugcaacaucgccggcuggauccucggcaaccccgagugcgagucccucuccaccgccuccuccugguccuacaucgucgagaccuccuccuccgacaacggcaccugcuaccccggcgacuucaucgacuacgaggagcuccgcgagcagcucuccuccgucuccuccuucgagcgcuucgagaucuuccccaagaccuccuccuggcccaaccacgacuccaacaagggcgucaccgccgccugcccccacgccggcgccaaguccuucuacaagaaccucaucuggcucgucaagaagggcaacuccuaccccaagcucuccaaguccuacaucaacgacaagggcaaggagguccucguccucuggggcauccaccaccccuccaccuccgccgaccagcagucccucuaccagaacgccgacgccuacgucuucgucggcaccucccgcuacuccaagaaguucaagcccgagaucgccauccgccccaagguccgcgaccaggagggccgcaugaacuacuacuggacccucgucgagcccggcgacaagaucaccuucgaggccaccggcaaccucgucgucccccgcuacgccuucgccauggagcgcaacgccggcuccggcaucaucaucuccgacacccccguccacgacugcaacaccaccugccagacccccaagggcgccaucaacaccucccuccccuuccagaacguccaccccaucaccaucggcaagugccccaaguacgucaaguccaccaagcuccgccucgccaccggccuccgcaacguccccuccauccagucccgcggccucuucggcgccaucgccggcuucaucgagggcggcuggaccggcauggucgacggcugguacggcuaccaccaccagaacgagcagggcuccggcuacgccgccgaccucaaguccacccagaacgccaucgacgagaucaccaacaaggucaacuccgucaucgagaagaugaacacccaguucaccgccgucggcaaggaguucaaccaccucgagaagcgcaucgagaaccucaacaagaagaucgacgacggcuuccucgacaucuggaccuacaacgccgagcuccucguccuccucgagaacgagcgcacccucgacuaccacgacuccaacgucaagaaccucuacgagaagguccgcucccagcucaagaacaacgccaaggagaucggcaacggcugcuucgaguucuaccacaagugcgacaacaccugcauggaguccgucaagaacggcaccuacgacuaccccaaguacuccgaggaggccaagcucaaccgcgaggagaucgacggcgucaagcucgaguccacccgcaucuaccagauccucgccaucuacuccaccgucgccuccucccucguccucgucgucucccucggcgccaucuccuucuggaugugcuccaacggcucccuccagugccgcaucugcaucuga

SEQ ID NO: 102710 - RNA, 1701 nt, Artificial Sequence; identical to SEQ ID NO: 100577
  derived and/or modified CDS sequence (opt2) from hemagglutinin__InfluenzaA__AEA73871

SEQ ID NO: 102711 - RNA, 1701 nt, Artificial Sequence; identical to SEQ ID NO: 100577
  derived and/or modified CDS sequence (opt2) from hemagglutinin__InfluenzaA__AEA73881

SEQ ID NO: 102712 - RNA, 1701 nt, Artificial Sequence; identical to SEQ ID NO: 100257
  derived and/or modified CDS sequence (opt2) from hemagglutinin__InfluenzaA__AEA73891

SEQ ID NO: 102713 - RNA, 1701 nt, Artificial Sequence
  derived and/or modified CDS sequence (opt2) from hemagglutinin__InfluenzaA__AEA73901
augaacgccauccucgucguccuccucuacaccuucgccaccgccaacgccgacacccucugcaucggcuaccacgccaacaacuccaccgacaccgucgacacccuccucgagaagaacgucaccgucacccacuccgucaaccuccucgaggacaagcacaacggcaagcucugcaagcuccgcggcgucgccccccuccaccucggcaagugcaacaucgccggcuggauccucggcaaccccgagugcgagucccucuccaccgccuccuccugguccuacaucgucgagaccuccuccuccgacaacggcaccugcuaccccggcgacuucaucgacuacgaggagcuccgcgagcagcucuccuccgucuccuccuucgagcgcuucgagaucuuccccaagaccuccuccuggcccaaccacgacuccaacaagggcgucaccgccgccugcccccacgccggcgccaaguccuucuacaagaaccucaucuggcucgucaagaagggcaacuccuaccccaagcucuccaaguccuacaucaacgacaagggcaaggagguccucguccucuggggcauccaccaccccuccaccuccgccgaccagcagucccucuaccagaacgccgacgccuacgucuucgucggcaccucccgcuacuccaagaaguucaagcccgagaucgccauccgccccaagguccgcgaccaggagggccgcaugaacuacuacuggacccucgucgagcccggcgacaagaucaccuucgaggccaccggcaaccucgucgucccccgcuacgccuucgccauggagcgcaacgccggcuccggcaucaucaucuccgacacccccguccacgacugcaacaccaccugccagacccccaagggcgccaucaacaccucccuccccuuccagaacauccaccccaucaccaucggcaagugccccaaguacgucaaguccaccaagcuccgccucgccaccggccuccgcaacguccccuccauccagucccgcggccucuucggcgccaucgccggcuucaucgagggcggcuggaccggcauggucgacggcugguacggcuaccaccaccagaacgagcagggcuccggcuacgccgccgaccucaaguccacccagaacgccaucgacgagaucaccaacaagaucaacuccgucaucgagaagaugaacacccaguucaccgccgucggcaaggaguucaaccaccucgagaagcgcaucgagaaccucaacaagaaggucgacgacggcuuccucgacaucuggaccuacaacgccgagcuccucguccuccucgagaacgagcgcacccucgacuaccacgacuccaacgucaagaaccucuacgagaagguccgcucccagcucaagaacaacgccaaggagaucggcaacggcugcuucgaguucuaccacaagugcgacaacaccugcauggaguccgucaagaacggcaccuacgacuaccccaaguacuccgaggaggccaagcucaaccgcgaggagaucgacggcgucaagcucgaguccacccgcaucuaccagauccucgccaucuacuccaccgucgccuccucccucguccucgucgucucccucggcgccaucuccuucuggaugugcuccaacggcucccuccagugccgcaucugcaucuga

SEQ ID NO: 102714 - RNA, 1701 nt, Artificial Sequence; identical to SEQ ID NO: 99869
  derived and/or modified CDS sequence (opt2) from hemagglutinin__InfluenzaA__AEA73911

SEQ ID NO: 102715 - RNA, 1701 nt, Artificial Sequence; identical to SEQ ID NO: 100577
  derived and/or modified CDS sequence (opt2) from hemagglutinin__InfluenzaA__AEA73921

SEQ ID NO: 102716 - RNA, 1701 nt, Artificial Sequence; identical to SEQ ID NO: 100335
  derived and/or modified CDS sequence (opt2) from hemagglutinin__InfluenzaA__AEA73931

SEQ ID NO: 102717 - RNA, 1701 nt, Artificial Sequence; identical to SEQ ID NO: 100335
  derived and/or modified CDS sequence (opt2) from hemagglutinin__InfluenzaA__AEA73961

SEQ ID NO: 102718 - RNA, 1701 nt, Artificial Sequence
  derived and/or modified CDS sequence (opt2) from hemagglutinin__InfluenzaA__AEA73971
augaaggccauccucgucguccuccucuacaccuucgccaccgccaacgccgacacccucugcaucggcuaccacgccaacaacuccaccgacaccgucgacaccguccucgagaagaacgucaccgucacccacuccgucaaccuccucgaggacaagcacaacggcaagcucugcaagcuccgcggcgucgccccccuccaccucggcaagugcaacaucgccggcuggauccucggcaaccccgagugcgagucccucuccaccgccuccuccugguccuacaucgucgagaccuccuccuccgacaacggcaccugcuaccccggcgacuucaucgacuacgaggagcuccgcgagcagcucuccuccgucuccuccuucgagcgcuucgagaucuuccccaagaccuccuccuggcccaaccacgacuccaacaagggcgucaccgccgccugcccccacgccggcgccaaguccuucuacaagaaccucaucuggcucgucaagaagggcaacuccuaccccaagcucuccaaguccuacaucaacgacaagggcaaggagguccucguccucuggggcauccaccaccccuccaccuccgccgaccagcagucccucuaccagaacgccgacgccuacgucuucgucggcaccucccgcuacuccaagaaguucaagcccgagaucgccauccgccccaagguccgcgagcaggagggccgcaugaacuacuacuggacccucgucgagcccggcgacaagaucaccuucgaggccaccggcaaccucgucgucccccgcuacgccuucgccauggagcgcaacgccggcuccggcaucaucaucuccgacacccccguccacgacugcaacaccaccugccagacccccaagggcgccaucaacaccucccuccccuuccagaacauccacuccaucaccaucggcaagugccccaaguacgucaaguccaccaagcuccgccucgccaccggccuccgcaacguccccuccauccagucccgcggccucuucggcgccaucgccggcuucaucgagggcggcuggaccggcauggucgacggcugguacggcuaccaccaccagaacgagcagggcuccggcuacgccgccgaccagaaguccacccagaacgccaucgacgagaucaccaacaaggucaacuccgucaucgagaagaugaacacccaguucaccgccgucggcaaggaguucaaccaccucgagaagcgcaucgagaaccucaacaagaaggucgacgacggcuuccucgacaucuggaccuacaacgccgagcuccucguccuccucgagaacgagcgcacccucgacuaccacgacuccaacgucaagaaccucuacgagaagguccgcucccagcucaagaacaacgccaaggagaucggcaacggcugcuucgaguucuaccacaagugcaacaacaccugcauggaguccgucaagaacggcaccuacgacuaccccaaguacuccgaggaggccaagcucaaccgcgaggagaucgacggcgucaagcucgaguccacccgcaucuaccagauccucgccaucuacuccaccgucgccuccucccucguccucgucgucucccucggcgccaucuccuucuggaugugcuccaacggcucccuccagugccgcaucugcaucuga

SEQ ID NO: 102719 - RNA, 1701 nt, Artificial Sequence; identical to SEQ ID NO: 100335
  derived and/or modified CDS sequence (opt2) from hemagglutinin__InfluenzaA__AEA73981

SEQ ID NO: 102720 - RNA, 1701 nt, Artificial Sequence
  derived and/or modified CDS sequence (opt2) from hemagglutinin__InfluenzaA__AEA73991
augaaggccauccucgucguccuccucuacaccuucgccaccgccaacgccgacacccucugcaucggcuaccacgccaacaacuccaccgacaccgucgacaccguccucgagaagaacgucaccgucacccacuccgucaaccuccucgaggacaagcacaacggcaagcucugcaagcuccgcggcgucgccccccuccaccucggcaagugcaacaucgccggcuggauccucggcaaccccgagugcgagucccucuccaccgccuccuccugguccuacaucgucgagaccuccuccuccgacaacggcaccugcuaccccggcgacuucaucgacuacgaggagcuccgcgagcagcucuccuccgucuccuccuucgagaaguucgagaucuuccccaagaccuccuccuggcccaaccacgacuccaacaagggcgucaccgccgccugcccccacgccggcgccaaguccuucuacaagaaccucaucuggcucgucaagaagggcaacuccuaccccaagcucuccaaguccuacaucaacgacaagggcaaggagguccucguccucuggggcauccaccaccccuccaccuccgccgaccagcagucccucuaccagaacgccgacuccuacgucuucgucggcaccucccgcuacuccaagaaguucaagcccgagaucgccauccgccccaagguccgcgaccaggagggccgcaugaacuacuacuggacccucgucgagcccggcgacaagaucaccuucgaggccaccggcaaccucgucgucccccgcuacgccuucgccauggagcgcaacgccggcuccggcaucaucaucuccgacacccccguccacgacugcaacaccaccugccagacccccgagggcgccaucaacaccucccuccccuuccagaacauccaccccaucaccaucggcaagugccccaaguacgucaaguccaccaagcuccgccucgccaccggccuccgcaacguccccuccauccagucccgcggccucuucggcgccaucgccggcuucaucgagggcggcuggaccggcauggucgacggcugguacggcuaccaccaccagaacgagcagggcuccggcuacgccgccgaccucaaguccacccagaacgccaucgacgagaucaccaacaaggucaacuccgucaucgagaagaugaacacccaguucaccgccgucggcaaggaguucaaccaccucgagaagcgcaucgagaaccucaacaagaaggucgacgacggcuuccucgacaucuggaccuacaacgccgagcuccucguccuccucgagaacgagcgcacccucgacuaccacgacuccaacgucaagaaccucuacgagaagguccgcucccagcucaagaacaacgccaaggagaucggcaacggcugcuucgaguucuaccacaagugcgacaacaccugcauggaguccgucaagaacggcaccuacgacuaccccaaguacuccgaggaggccaagcucaaccgcgaggagaucgacggcgucaagcucgaguccacccgcaucuaccagauccucgccaucuacuccaccgucgccuccucccucguccucgucgucucccucggcgccaucuccuucuggaugugcuccaacggcucccuccagugccgcaucugcaucuga

SEQ ID NO: 102721 - RNA, 1701 nt, Artificial Sequence; identical to SEQ ID NO: 100318
  derived and/or modified CDS sequence (opt2) from hemagglutinin__InfluenzaA__AEA74001

SEQ ID NO: 102722 - RNA, 1701 nt, Artificial Sequence
  derived and/or modified CDS sequence (opt2) from hemagglutinin__InfluenzaA__AEA74011
augaaggccauccucgucguccuccucuacaccuucgccaccgccaacgccgacacccucugcaucggcuaccacgccaacaacuccaccgacaccgucgacaccguccucgagaagaacgucaccgucacccacuccgucaaccuccucgaggacaagcacaacggcaagcucugcaagcuccgcggcgucgccccccuccaccucggcaagugcaacaucgccggcuggauccucggcaaccccgagugcgagucccucuccaccgccuccuccugguccuacaucgucgagaccuccuccuccgacaacggcaccugcuaccccggcgacuucaucgacuacgaggagcuccgcgagcagcucuccuccgucuccuccuucgagcgcuucgagaucuuccccaagaccuccuccuggcccaaccacgacuccaacaagggcgucaccgccgccugcccccacgccggcgccaaguccuucuacaagaaccucaucuggcucgucaagaagcgcaacuccuaccccaagcucucccaguccuacaucaacgacaagggcaaggagguccucguccucuggggcauccaccaccccuccaccuccgccgaccagcagucccucuaccagaacgccgacgccuacgucuucgucggcaccucccgcuacuccaagaaguucaagcccgagaucgccauccgccccaagguccgcgaccaggagggccgcaugaacuacuacuggacccucgucgagcccggcgacaagaucaccuucgaggccaccggcaaccucgucgucccccgcuacgccuucgccauggagcgcaacgccggcuccggcaucaucaucuccgacacccccguccacgacugcaacaccaccugccagacccccaagggcgccaucaacaccucccuccccuuccagaacauccaccccaucaccaucggcaagugccccaaguacgucaaguccaccaagcuccgccucgccaccggccuccgcaacguccccuccauccagucccgcggccucuucggcgccaucgccggcuucaucgagggcggcuggaccggcauggucgacggcugguacggcuaccaccaccagaacgagcagggcuccggcuacgccgccgaccucaaguccacccagaacgccaucgacaagaucaccaacaaggucaacuccgucaucgagaagaugaacacccaguucaccgccgucggcaaggaguucaaccaccucgagaagcgcaucgagaaccucaacaagaaggucgacgacggcuuccucgacaucuggaccuacaacgccgagcuccucguccuccucgagaacgagcgcacccucgacuaccacgacuccaacgucaagaaccucuacgagaagguccgcucccagcucaagaacaacgccaaggagaucggcaacggcugcuucgaguucuaccacaagugcgacaacaccugcauggaguccaucaagaacggcaccuacgacuaccccaaguacuccgaggaggccaagcucaaccgcgaggagaucgacggcgucaagcucgaguccacccgcaucuaccagauccucgccaucuacuccaccgucgccuccucccucguccucgucgucucccucggcgccaucuccuucuggaugugcuccaacggcucccuccagugccgcaucugcaucuga

SEQ ID NO: 102723 - RNA, 1701 nt, Artificial Sequence
  derived and/or modified CDS sequence (opt2) from hemagglutinin__InfluenzaA__AEA74021
augaaggccauccucgucguccuccucuacaccuucgccaccgccaacgccgacacccucugcaucggcuaccacgccaacaacuccaccgacaccgucgacaccguccucgagaagaacgucaccgucacccacuccgucaaccuccucgaggacaagcacaacggcaagcucugcaagcuccgcggcgucgccccccuccaccucggcaagugcaacaucgccggcuggauccucggcaaccccgagugcgagucccucuccaccgccuccuccugguccuacaucgucgagaccuccuccuccgacaacggcaccugcuaccccggcgacuucaucgacuacgaggagcuccgcgagcagcucuccuccgucuccuccuucgagcgcuucgagaucuuccccaagaccuccuccuggcccaaccacgacuccaacaagggcgucaccgccgccugcccccacgccggcgccaaguccuucuacaagaaccucaucuggcucgucaagaagggcaacuccuaccccaagcucucccaguccuacaucaacgacaagggcaaggagguccucguccucuggggcauccaccaccccuccaccuccgccgaccagcagucccucuaccagaacgccgacgccuacgucuucgucggcaccucccgcuacuccaagaaguucaagcccgagaucgccauccgccccaagguccgcgaccaggagggccgcaugaacuacuacuggacccucgucgagcccggcgacaagaucaccuucgaggccaccggcaaccucgucgucccccgcuacgccuucgccauggagcgcaacgccggcuccggcaucaucaucuccgacacccccguccacgacugcaacaccaccugccagacccccaagggcgccaucaacaccucccuccccuuccagaacauccaccccaucaccaucggcaagugccccaaguacgucaaguccaccaagcuccgccucgccaccggccuccgcaacguccccuccauccagucccgcggccucuucggcgccaucgccggcuucaucgagggcggcuggaccggcauggucgacggcugguacggcuaccaccaccagaacgagcagggcuccggcuacgccgccgaccucaaguccacccagaacgccaucgacaagaucaccaacaaggucaacuccgucaucgagaagaugaacacccaguucaccgccgucggcaaggaguucaaccaccucgagaagcgcaucgagaaccucaacaagaaggucgacgacggcuuccucgacaucuggaccuacaacgccgagcuccucguccuccucgagaacgagcgcacccucgacuaccacgacuccaacgucaagaaccucuacgagaagguccgcucccagcucaagaacaacgccaaggagaucggcaacggcugcuucgaguucuaccacaagugcgacaacaccugcauggaguccaucaagaacggcaccuacgacuaccccaaguacuccgaggaggccaagcucaaccgcgaggagaucgacggcgucaagcucgaguccacccgcaucuaccagauccucgccaucuacuccaccgucgccuccucccucguccucgucgucucccucggcgccaucuccuucuggaugugcuccaacggcucccuccagugccgcaucugcaucuga

SEQ ID NO: 102724 - RNA, 1701 nt, Artificial Sequence
  derived and/or modified CDS sequence (opt2) from hemagglutinin__InfluenzaA__AEA74031
augaaggccauccucgucguccuccucuacaccuucgccaccgccaacgccgacacccucugcaucggcuaccacgccaacaacuccaccgacaccgucgacaccguccucgagaagaacgucaccgucacccacuccgucgaccuccucgaggacaagcacaacggcaagcucugcaagcuccgcggcgucgccccccuccaccucggcaagugcaacaucgccggcuggauccucggcaaccccgagugcgagucccucuccaccgccuccuccugguccuacaucgucgagaccuccuccuccgacaacggcaccugcuaccccggcgacuucaucgacuacgaggagcuccgcgagcagcucuccuccgucuccuccuucgagcgcuucgagaucuuccccaagaccuccuccuggcccaaccacgacuccaacaagggcgucaccgccgccugcccccacgccggcgccaaguccuucuacaacaaccucaucuggcucgucaagaagggcaacuccuaccccaagcucaacaaguccuacaucaacgacaagggcaaggagguccucguccucuggggcauccaccaccccuccaccuccaccgaccagcagucccucuaccagaacgccgacgccuacgucuucgucggcaccucccgcuacuccaagaaguucaagcccgagaucgccauccgccccaagguccgcaaccaggagggccgcaugaacuacuacuggacccucgucgagcccggcgacaagaucaccuucgaggccaccggcaaccucgucgucccccgcuacgccuucgccauggagcgcaacgccggcuccggcaucaucaucuccgacacccccauccacgacugcaacaccaccugccagacccccaagggcgccaucaacaccucccuccccuuccagaacauccaccccaucaccaucggcaagugccccaaguacgucaaguccaccaagcuccgccucgccaccggccuccgcaacguccccuccauccagucccgcggccucuucggcgccaucgccggcuucaucgagggcggcuggaccggcauggucgacggcugguacggcuaccaccaccagaacgagcagggcuccggcuacgccgccgaccucaaguccacccagaacgccaucgacgagaucaccaacaaggucaacuccgucaucgagaagaugaacacccaguucaccgccgucggcaaggaguucaaccaccucgagaagcgcaucgagaaccucaacaagaaggucgacgacggcuuccucgacaucuggaccuacaacgccgagcuccucguccuccucgagaacgagcgcacccucgacuaccacgacuccaacgucaagaaccucuacgagaagguccgcucccagcucaagaacaacgccaaggagaucggcaacggcugcuucgaguucuaccacaagugcgacaacaccugcauggaguccgucaagaacggcaccuacgacuaccccaaguacuccgaggaggccaagcucaaccgcgaggagaucgacggcgucaagcucgaguccacccgcaucuaccagauccucgccaucuacuccaccgucgccuccucccucguccucgucgucucccucggcgccaucuccuucuggaugugcuccaacggcucccuccagugccgcaucugcaucuga

SEQ ID NO: 102725 - RNA, 1701 nt, Artificial Sequence
  derived and/or modified CDS sequence (opt2) from hemagglutinin__InfluenzaA__AEA74035
augaaggccauccucgucguccuccucuacaccuucgccaccgccaacgccgacacccucugcaucggcuaccacgccaacaacuccaccgacaccgucgacaccguccucgagaagaacgucaccgucacccacuccgucgaccuccucgaggacaagcacaacggcaagcucugcaagcuccgcggcgucgccccccuccaccucggcaagugcaacaucgccggcuggauccucggcaaccccgagugcgagucccucuccaccgccuccuccugguccuacaucgucgagaccuccuccuccgacaacggcaccugcuaccccggcgacuucaucgacuacgaggagcuccgcgagcagcucuccuccgucuccuccuucgagcgcuucgagaucuuccccaagaccuccuccuggcccaaccacgacuccaacaagggcgucaccgccgccugcccccacgccggcgccaaguccuucuacaacaaccucaucuggcucgucaagaagggcaacuccuaccccaagcucaacaaguccuacaucaacgacaagggcaaggagguccucguccucuggggcauccaccaccccuccaccuccaccgaccagcagucccucuaccagaacgccgacgccuacgucuucgucggcaccucccgcuacuccaagaaguucaagcccgagaucgccauccgccccaagguccgcgaccaggagggccgcaugaacuacuacuggacccucgucgagcccggcgacaagaucaccuucgaggccaccggcaaccucgucgucccccgcuacgccuucgccauggagcgcaacgccggcuccggcaucaucaucuccgacacccccauccacgacugcaacaccaccugccagacccccaagggcgccaucaacaccucccuccccuuccagaacauccaccccaucaccaucggcaagugccccaaguacgucaaguccaccaagcuccgccucgccaccggccuccgcaacguccccuccauccagucccgcggccucuucggcgccaucgccggcuucaucgagggcggcuggaccggcauggucgacggcugguacggcuaccaccaccagaacgagcagggcuccggcuacgccgccgaccucaaguccacccagaacgccaucgacgagaucaccaacaaggucaacuccgucaucgagaagaugaacacccaguucaccgccgucggcaaggaguucaaccaccucgagaagcgcaucgagaaccucaacaagaaggucgacgacggcuuccucgacaucuggaccuacaacgccgagcuccucguccuccucgagaacgagcgcacccucgacuaccacgacuccaacgucaagaaccucuacgagaagguccgcucccagcucaagaacaacgccaaggagaucggcaacggcugcuucgaguucuaccacaagugcgacaacaccugcauggaguccgucaagaacggcaccuacgacuaccccaaguacuccgaggaggccaagcucaaccgcgaggagaucgacggcgucaagcucgaguccacccgcaucuaccagauccucgccaucuacuccaccgucgccuccucccucguccucgucgucucccucggcgccaucuccuucuggaugugcuccaacggcucccuccagugccgcaucugcaucuga

SEQ ID NO: 102726 - RNA, 1701 nt, Artificial Sequence; identical to SEQ ID NO: 98470
  derived and/or modified CDS sequence (opt2) from hemagglutinin__InfluenzaA__AEA77299

SEQ ID NO: 102727 - RNA, 1701 nt, Artificial Sequence; identical to SEQ ID NO: 102471
  derived and/or modified CDS sequence (opt2) from hemagglutinin__InfluenzaA__AEB21316

SEQ ID NO: 102728 - RNA, 1701 nt, Artificial Sequence; identical to SEQ ID NO: 102490
  derived and/or modified CDS sequence (opt2) from hemagglutinin__InfluenzaA__AEB21326

SEQ ID NO: 102729 - RNA, 1701 nt, Artificial Sequence; identical to SEQ ID NO: 102471
  derived and/or modified CDS sequence (opt2) from hemagglutinin__InfluenzaA__AEB21338

SEQ ID NO: 102730 - RNA, 1701 nt, Artificial Sequence; identical to SEQ ID NO: 102490
  derived and/or modified CDS sequence (opt2) from hemagglutinin__InfluenzaA__AEB21348

SEQ ID NO: 102731 - RNA, 1701 nt, Artificial Sequence; identical to SEQ ID NO: 99624
  derived and/or modified CDS sequence (opt2) from hemagglutinin__InfluenzaA__AEB40206

SEQ ID NO: 102732 - RNA, 1701 nt, Artificial Sequence; identical to SEQ ID NO: 99624
  derived and/or modified CDS sequence (opt2) from hemagglutinin__InfluenzaA__AEB66895

SEQ ID NO: 102733 - RNA, 1698 nt, Artificial Sequence
  derived and/or modified CDS sequence (opt2) from hemagglutinin__InfluenzaA__AEB71102
auggacguccccgucuucguccuccucaugcucaccuccaucugcguccaggccgaccgcaucugcgucggcuaccucuccaccaacuccuccgagcgcgucgacacccuccucgagaacaacguccccgucaccuccuccgucgaccucgucgagaccaaccacaccggcaccuacugcucccucggcggcaucucccccguccaccucggcgacugcuccuucgagggcuggaucgucggcaaccccgccugcgccuccaaccucggcauccgcgagugguccuaccucaucgaggaccccuccgccccccacggccucugcuaccccggcgagcucgacaacaacggcgagcuccgccaccucuucuccggcauccgcuccuucucccgcaccgagcucaucgcccccaccuccuggggcgaggucaacgacggcgucaccgccgccugccaggacaagggcgccuccuccuucuaccgcaaccucgucugguucgucgagcgcggcaacaaguaccccgucauccgccgcaccuacaacaacaccaccggccgcgacguccucgucaucuggggcauccaccaccccgucuccaccgacgaggcccgcaagcucuacgccaaggacaaccccuacacccucgucuccaccuccuccuggucccgcaaguacaaccucgagaccggcacccgccccggcuacaacggccagaaguccuggaccaagaucuacugguaccucaugcaccccggcgacuccaucuccuucgaguccaacggcggccuccucgcccccaaguacggcuacaucaucgaggaguacggcaagggccgcaucuuccagucccgcauccgcaucgccaagugcaacaccaagugccagaccuccgucggcggcaucaacaccaacaagaccuuccagaacaucgagcgcaacgcccucggcgacugccccaaguacaucaaguccggccagcucaagcucgccaccggccuccgcaacguccccgccaucuccaaccgcggccucuucggcgccaucgccggcuucaucgagggcggcuggcccggccucaucaacggcugguacggcuuccagcaccagaacgagcagggcaugggcauggccgccgacaaggaguccacccagaaggccaucgaccagaucaccaccaagaucaacaacaucaucgagaagaugaacggcaacuacgacuccauccgcggcgaguucucccaggucgagcagcgcaucaacaugcucgccgaccgcaucgacgacgccgucaccgacgucugguccuacaacgccaagcuccucguccuccucgagaacgacaagacccucgacaugcacgacgccaacguccgcaaccuccacgaccagguccgccgcguccuccgcaccaacgccaucgacgagggcaacggcugcuucgagcuccuccacaagugcaacgacuccugcauggagaccauccgcaacggcaccuacaaccacaucgaguacgaggaggaguccaagcucaagcgccaggagaucgagggcaucaagcucaaguccgacgacaacgucuacaaggcccucuccaucuacuccugcaucgccuccuccaucguccucgucggccucauccucgccuucaucaugugggccugcuccuccggcaacugccgcuucaacaucugcaucuga

SEQ ID NO: 102734 - RNA, 1698 nt, Artificial Sequence
  derived and/or modified CDS sequence (opt2) from hemagglutinin__InfluenzaA__AEB71896
augaaggucaagcuccucguccuccucugcaccuucaccgccaccuacgccgacaccaucugcaucggcuaccacgccaacaacuccaccgacaccgucgacaccguccucgagaagaacgucaccgucacccacuccgucaaccuccucgagaacucccacaacggcaagcucugccuccucaagggcaucgccccccuccagcucggcaacugcuccgucgccggcuggauccucggcaaccccgagugcgagcuccucaucuccaaggaguccugguccuacaucgucgagaagcccaaccccgagaacggcaccugcuaccccggccacuucgccgacuacgaggagcuccgcgagcagcucuccuccgucuccuccuucgagcgcuucgagaucuuccccaaggaguccuccuggcccaaccacaccgucaccggcgucuccgccuccugcucccacaacggcgaguccuccuucuaccgcaaccuccucuggcucaccggcaagaacggccucuaccccaaccucuccaaguccuacgccaacaacaaggagaaggagguccucguccucuggggcguccaccacccccccaacaucgucgaccagaagacccucuaccgcaccgagaacgccuacgucuccgucgucuccucccacuacucccgcaaguucacccccgagaucgccaagcgccccaagguccgcgaccaggagggccgcaucaacuacuacuggacccuccucgagcccggcgacaccaucaucuucgaggccaacggcaaccucaucgccccccgcuacgccuucgcccucucccgcggcuucggcuccggcaucaucaacuccaacgcccccaugggcaagugcgacgccaagugccagaccccccagggcgccaucaacuccucccuccccuuccagaacguccaccccgucaccaucggcgagugccccaaguacguccgcuccgccaagcuccgcauggucaccggccuccgcaacauccccuccauccagucccgcggccucuucggcgccaucgccggcuucaucgagggcggcuggaccggcauggucgacggcugguacggcuaccaccaccagaacgagcagggcuccggcuacgccgccgaccagaaguccacccagaacgccaucaacggcaucaccaacaaggucaacuccgucaucgagaagaugaacacccaguucaccgccgucggcaaggaguucaacaagcucgagcgccgcauggagaaccucaacaagaaggucgacgacggcuucaucgacaucuggaccuacaacgccgagcuccucguccuccucgagaacgagcgcacccucgacuuccacgacuccaacgucaagaaccucuacgagaaggucaagucccagcucaagaacaacgccaaggagaucggcaacggcugcuucgaguucuaccacaagugcaacgacgagugcauggaguccgucaagaacggcaccuacgacuaccccaaguacuccgaggaguccaagcucaacaaggagaagaucgacggcgucaagcucgaguccaugggcgucuaccagauccucgccaucuacuccaccgucgccuccucccucguccuccucgucucccucggcgccaucuccuucuggaugugcuccaacggcucccuccagugccgcaucugcaucuga

SEQ ID NO: 102735 - RNA, 1701 nt, Artificial Sequence; identical to SEQ ID NO: 98947
  derived and/or modified CDS sequence (opt2) from hemagglutinin__InfluenzaA__AEB71916

SEQ ID NO: 102736 - RNA, 1701 nt, Artificial Sequence; identical to SEQ ID NO: 98470
  derived and/or modified CDS sequence (opt2) from hemagglutinin__InfluenzaA__AEB71925

SEQ ID NO: 102737 - RNA, 1701 nt, Artificial Sequence; identical to SEQ ID NO: 98470
  derived and/or modified CDS sequence (opt2) from hemagglutinin__InfluenzaA__AEB71936

SEQ ID NO: 102738 - RNA, 1701 nt, Artificial Sequence; identical to SEQ ID NO: 98470
  derived and/or modified CDS sequence (opt2) from hemagglutinin__InfluenzaA__AEB71947

SEQ ID NO: 102739 - RNA, 1698 nt, Artificial Sequence; identical to SEQ ID NO: 102008
  derived and/or modified CDS sequence (opt2) from hemagglutinin__InfluenzaA__AEB71958

SEQ ID NO: 102740 - RNA, 1701 nt, Artificial Sequence; identical to SEQ ID NO: 101455
  derived and/or modified CDS sequence (opt2) from hemagglutinin__InfluenzaA__AEB71969

SEQ ID NO: 102741 - RNA, 1701 nt, Artificial Sequence
  derived and/or modified CDS sequence (opt2) from hemagglutinin__InfluenzaA__AEB71980
augaagaccaucaucgcccucuccugcauccucugccucgucuucgcccagaagcuccccggcaacgacaacuccaccgccacccucugccucggccaccacgccguccccaacggcaccaucgucaagaccaucaccaacgaccagaucgaggucaccaacgccaccgagcucguccaguccuccuccaccggcgagaucugcgacuccccccaccagauccucgacggcgagaacugcacccucaucgacgcccuccucggcgacccccagugcgacggcuuccagaacaagaagugggaccucuucgucgagcgcuccaaggccuacuccaacugcuaccccuacgacguccccgacuacgccucccuccgcucccucgucgccuccuccggcacccucgaguucaacaacgaguccuucaacuggaccggcgucacccagaacggcaccuccuccgccugcauccgccgcuccaacaacuccuucuucucccgccucaacuggcucacccaccucaaguucaaguaccccgcccucaacgucaccaugcccaacaacgagcaguucgacaagcucuacaucuggggcguccaccaccccggcaccgacaacgaccagaucuuccucuacgcccaggccuccggccgcaucaccgucuccaccaagcgcucccagcagaccgucauccccaacaucggcucccgcccccgcguccgcaacauccccucccgcaucuccaucuacuggaccaucgucaagcccggcgacauccuccucaucaacuccaccggcaaccucaucgccccccgcggcuacuucaagauccgcuccggcaaguccuccaucaugcgcuccgacgcccccaucggcaagugcaacuccgagugcaucacccccaacggcuccauccccaacgacaagcccuuccagaacgucaaccgcaucaccuacggcgccugcccccgcuacgucaagcagaacacccucaagcucgccaccggcaugcgcaacguccccgagaagcagacccgcggcaucuucggcgccaucgccggcuucaucgagaacggcugggagggcauggucgacggcugguacggcuuccgccaccagaacuccgagggccgcggccaggccgccgaccucaaguccacccaggccgccaucgaccagaucaacggcaagcucaaccgccucaucggcaagaccaacgagaaguuccaccagaucgagaaggaguucuccgaggucgagggccgcauccaggaccucgagaaguacgucgaggacaccaagaucgaccucugguccuacaacgccgagcuccucgucgcccucgagaaccagcacaccaucgaccucaccgacuccgagaugaacaagcucuucgagaagaccaagaagcagcuccgcgagaacgccgaggacaugggcaacggcugcuucaagaucuaccacaagugcgacaacgccugcaucggcuccauccgcaacggcaccuacgaccacgacgucuaccgcgacgaggcccucaacaaccgcuuccagaucaagggcgucgagcucaaguccggcuacaaggacuggauccucuggaucuccuucgccaucuccugcuuccuccucugcgucgcccuccucggcuucaucaugugggccugccagaagggcaacauccgcugcaacaucugcaucuga

SEQ ID NO: 102742 - RNA, 1698 nt, Artificial Sequence; identical to SEQ ID NO: 99652
  derived and/or modified CDS sequence (opt2) from hemagglutinin__InfluenzaA__AEB71992

SEQ ID NO: 102743 - RNA, 1698 nt, Artificial Sequence; identical to SEQ ID NO: 99652
  derived and/or modified CDS sequence (opt2) from hemagglutinin__InfluenzaA__AEC13313

SEQ ID NO: 102744 - RNA, 1701 nt, Artificial Sequence
  derived and/or modified CDS sequence (opt2) from hemagglutinin__InfluenzaA__AEC46553
augaaggccauccucgucguccuccucuacaccuucgccaccgccaacgccgacacccucugcaucggcuaccacgccaacaacuccaccgacaccgucgacaccguccucgagaagaacgucaccgucacccacuccgucaaccuccucgaggacaagcacaacggcaagcucugcaagcuccgcggcgucgccccccuccaccucggcaagugcaacaucgccggcuggauccucggcaaccccgagugcgagucccucuccaccgccuccuccugguccuacaucgucgagaccuccuccuccgacaacggcaccugcuaccccggcgacuucaucgacuacgaggagcuccgcgagcagcucuccuccgucuccuccuucgagcgcuucgagaucuuccccaagaccuccuccuggcccaaccacgaccccaacaagggcgucaccgccgccugcccccacgccggcgccaaguccuucuacaagaaccucaucuggcucgucaagaagggcaacuccuaccccaagcucuccaccuccuacaucaacgacaagggcaaggagguccucguccucuggggcauccaccaccccuccaccuccgccgaccagcagucccucuaccagaacgccgacgccuacgccuucgucggcaccucccgcuacuccaagaaguucaagcccgagaucgccauccgccccaagguccgcgaccaggagggccgcaugaacuacuacuggacccucgucgagcccggcgacaagaucaccuucgaggccaccggcaaccucgucgucccccgcuacgccuucgccauggagcgcaacgccggcuccggcaucaucaucuccgacaccuccguccacgacugcaacaccaccugccagacccccaagggcgccaucaacaccucccuccccuuccagaacguccaccccaucaccaucggcaagugccccaaguacgucaaguccaccaagcuccgccucgccaccggccuccgcaacguccccuccauccagucccgcggccucuucggcgccaucgccggcuucaucgagggcggcuggaccggcauggucgacggcugguacggcuaccaccaccagaacgagcagggcuccggcuacgccgccgaccucaaguccacccagaacgccuucgacaagaucaccaacaaggucaacuccgucaucgagaagaugaacacccaguucaccgccgucggcaaggaguucaaccaccucgagaagcgcaucgagaaccucaacaagaaggucgacgacggcuuccucgacaucuggaccuacaacgccgagcuccucguccuccucgagaacgagcgcacccucgacuaccacgacuccaacgucaagaaccucuacgagaagguccgcucccagcucaagaacaacgccaaggagaucggcaacggcugcuucgaguucuaccacaagugcgacaacaccugcauggaguccgucaagaacggcaccuacgacuaccccaaguacuccgaggaggccaagcucaaccgcgaggagaucgacggcgucaagcucgaguccacccgcaucuaccagauccucgccaucuacuccaccgucgccuccucccucguccucgucgucucccucggcgccaucuccuucuggaugugcuccaacggcucccuccagugccgcaucugcaucuga

SEQ ID NO: 102745 - RNA, 1701 nt, Artificial Sequence
  derived and/or modified CDS sequence (opt2) from hemagglutinin__InfluenzaA__AEC46555
augaaggccauccucgucguccuccucuacaccuucgccaccgccaacgccgacacccucugcaucggcuaccacgccaacaacuccaccgacaccgucgacaccguccucgagaagaacgucaccgucacccacuccgucaaccuccucgaggacaagcacaacggcaagcucugcaagcuccgcggcgucgccccccuccaccucggcaagugcaacaucgccggcuggauccucggcaaccccgagugcgagucccucuccaccgccuccuccugguccuacaucgucgagaccuccuccuccgacaacggcaccugcuaccccggcgacuucaucgacuacgaggagcuccgcgagcagcucuccuccgucuccuccuucgagcgcuucgagaucuuccccaagaccuccuccuggcccaaccacgaccccaacaagggcgucaccgccgccugcccccacgccggcgccaaguccuucuacaagaaccucaucuggcucgucaagaagggcaacuccuaccccaagcucuccaccuccuacaucaacgacaagggcaagaagguccucguccucuggggcauccaccaccccuccaccuccgccgaccagcagucccucuaccagaacgccgacgccuacgccuucgucggcaccucccgcuacuccaagaaguucaagcccgagaucgccauccgccccaagguccgcgaccaggagggccgcaugaacuacuacuggacccucgucgagcccggcgacaagaucaccuucgaggccaccggcaaccucgucgucccccgcuacgccuucgccauggagcgcaacgagggcuccggcaucaucaucuccgacaccuccguccacgacugcaacaccaccugccagacccccaagggcgccaucaacaccucccuccccuuccagaacguccaccccaucaccaucggcaagugccccaaguacgucaaguccaccaagcuccgccucgccaccggccuccgcaacguccccuccauccagucccgcggccucuucggcgccaucgccggcuucaucgagggcggcuggaccggcauggucgacggcugguacggcuaccaccaccagaacgagcagggcuccggcuacgccgccgaccucaaguccacccagaacgccuucgacaagaucaccaacaaggucaacuccgucaucgagaagaugaacacccaguucaccgccgucggcaaggaguucaaccaccucgagaagcgcaucgagaaccucaacaagaaggucgacgacggcuuccucgacaucuggaccuacaacgccgagcuccucguccuccucgagaacgagcgcacccucgacuaccacgacuccaacgucaagaaccucuacgagaagguccgcucccagcucaagaacaacgccaaggagaucggcaacggcugcuucgaguucuaccacaagugcgacaacaccugcauggaguccgucaagaacggcaccuacgacuaccccaaguacuccgaggaggccaagcucaaccgcgaggagaucgacggcgucaagcucgaguccacccgcaucuaccagauccucgccaucuacuccaccgucgccuccucccucguccucgucgucucccucggcgccaucuccuucuggaugugcuccaacggcucccuccagugccgcaucugcaucuga

SEQ ID NO: 102746 - RNA, 1701 nt, Artificial Sequence; identical to SEQ ID NO: 102744
  derived and/or modified CDS sequence (opt2) from hemagglutinin__InfluenzaA__AEC46557

SEQ ID NO: 102747 - RNA, 1701 nt, Artificial Sequence; identical to SEQ ID NO: 98692
  derived and/or modified CDS sequence (opt2) from hemagglutinin__InfluenzaA__AEC53259

SEQ ID NO: 102748 - RNA, 1701 nt, Artificial Sequence
  derived and/or modified CDS sequence (opt2) from hemagglutinin__InfluenzaA__AEC53269
augaaggccauccucgucguccuccucuacaccuucgccaccgccaacgccgacacccucugcaucggcuaccacgccaacaacuccaccgacaccgucgacaccguccucgagaagaacgucaccgucacccacuccgucaaccuccucgaggacaagcacaacggcaagcucugcaagcuccgcggcgucgccccccuccaccucggcaagugcaacaucgccggcuggauccucggcaaccccgagugcgagucccucuccaccgccuccuccugguccuacaucgucgagaccuccuccuccgacaacggcaccugcuaccccggcgacuucaucgacuacgaggagcuccgcgagcuccucuccuccgucuccuccuucgagcgcuucgagaucuuccccaagaccuccuccuggcccaaccacgacuccaacaagggcgucaccgccgccugcccccacgccggcgccaaguccuucuacaagaaccucaucuggcucgucaagaagggcaacuccuaccccaagcucuccaaguccuacaucaacgacaagggcaaggagguccucguccucuggggcauccaccaccccuccaccuccgccgaccagcagucccucuaccagaacgccgacgccuacgucuucgucggcuccucccgcuacuccaagaaguucaagcccgagaucgccauccgccccaagguccgcgaccaggagggccgcaugaacuacuacuggacccucgucgagcccggcgacaagaucaccuucgaggccaccggcaaccucgucgucccccgcuacgccuucgccauggagcgcaacgccggcuccggcaucaucaucuccgacacccccguccacgacugcaacaccaccugccagacccccaagggcgccaucaacaccucccuccccuuccagaacauccaccccaucaccaucggcaagugccccaaguacgucaaguccaccaagcuccgccucgccaccggccuccgcaacauccccuccauccagucccgcggccucuucggcgccaucgccggcuucaucgagggcggcuggaccggcauggucgacggcugguacggcuaccaccaccagaacgagcagggcuccggcuacgccgccgaccucaaguccacccagaacgccaucgacgagaucaccaacaaggucaacuccgucaucgagaagaugaacacccaguucaccgccgucggcaaggaguucaaccaccucgagaagcgcaucgagaaccucaacaagaaggucgacgacggcuuccucgacaucuggaccuacaacgccgagcuccucguccuccucgagaacgagcgcacccucgacuaccacgacuccaacgucaagaaccucuacgagaagguccgcucccagcucaagaacaacgccaaggagaucggcaacggcugcuucgaguucuaccacaagugcgacaacaccugcauggaguccgucaagaacggcaccuacgacuaccccaaguacuccgaggaggccaagcucaaccgcgaggagaucgacggcgucaagcucgaguccacccgcaucuaccagauccucgccaucuacuccaccgucgccuccucccucguccucgucgucucccucggcgccaucuccuucuggaugugcuccaacggcucccuccagugccgcaucugcaucuga

SEQ ID NO: 102749 - RNA, 1701 nt, Artificial Sequence; identical to SEQ ID NO: 99435
  derived and/or modified CDS sequence (opt2) from hemagglutinin__InfluenzaA__AEC53279

SEQ ID NO: 102750 - RNA, 1701 nt, Artificial Sequence; identical to SEQ ID NO: 98692
  derived and/or modified CDS sequence (opt2) from hemagglutinin__InfluenzaA__AEC53289

SEQ ID NO: 102751 - RNA, 1701 nt, Artificial Sequence; identical to SEQ ID NO: 98692
  derived and/or modified CDS sequence (opt2) from hemagglutinin__InfluenzaA__AEC53299

SEQ ID NO: 102752 - RNA, 1701 nt, Artificial Sequence; identical to SEQ ID NO: 98885
  derived and/or modified CDS sequence (opt2) from hemagglutinin__InfluenzaA__AEC53327

SEQ ID NO: 102753 - RNA, 1701 nt, Artificial Sequence
  derived and/or modified CDS sequence (opt2) from hemagglutinin__InfluenzaA__AEC53347
augaaggccauccucgucguccuccucuacaccuucgccaccgccaacgccgacacccucugcaucggcuaccacgccaacaacuccaccgacaccgucgacaccguccucgagaagaacgucaccgucacccacuccgucaaccuccucgaggacaagcacaacggcaagcucugcaagcuccgcggcgucgccccccuccaccucggcaagugcaacaucgccggcuggauccucggcaaccccgagugcgagucccucuccaccgccuccuccugguccuacaucgucgagaccuccuccuccgacaacggcaccugcuaccccggcgacuucaucgacuacgaggagcuccgcgagcagcucuccuccgucuccuccuucgagcgcuucgagaucuuccccaagaccuccuccuggcccaaccacgacuccaacaagggcgucaccgccgccugcccccacgccggcgccaaguccuucuacaagaaccucaucuggcucgucaagaagggcaacuccuaccccaagcucuccaaguccuacaucaacgacaagggcaaggagguccucguccucuggggcauccaccaccccuccaccuccgccgaccagcagucccucuaccagaacgccgacgccuacgucuucgucggcuccucccgcuacuccaagaaguucaagcccgagaucgccauccgccccaagguccgcgaccaggagggccgcaugaacuacuacuggacccucaucgagcccggcgacaagaucaccuucgaggccaccggcaaccucgucgucccccgcuacgccuucgccauggagcgcaacgccggcuccggcaucaucaucuccgacacccccguccacgacugcaacaccaccugccagacccccaagggcgccaucaacaccucccuccccuuccagaacauccaccccaucaccaucggcaagugccccaaguacgucaaguccaccaagcuccgccucgccaccggccuccgcaacguccccuccauccagucccgcggccucuucggcgccaucgccggcuucaucgagggcggcuggaccggcauggucgacggcugguacggcuaccaccaccagaacgagcagggcuccggcuacgccgccgaccucaaguccacccagaacgccaucgacgagaucaccaacaaggucaacuccgucaucgagaagaugaacacccaguucaccgccgucggcaaggaguucaaccaccucgagaagcgcaucgagaaccucaacaagaaggucgacgacggcuuccucgacaucuggaccuacaacgccgagcuccucguccuccucgagaacgagcgcacccucgacuaccacgacuccaacgucaagaaccucuacgagaagguccgcucccagcucaagaacaacgccaaggagaucggcaacggcugcuucgaguucuaccacaagugcgacaacaccugcauggaguccgucaagaacggcaccuacgacuaccccaaguacuccgaggaggccaagcucaaccgcgaggagaucgacggcgucaagcucgaguccacccgcaucuaccagauccucgccaucuacuccaccgucgccuccucccucguccucgucgucucccucggcgccaucuccuucuggaugugcuccaacggcucccuccagugccgcaucugcaucuga

SEQ ID NO: 102754 - RNA, 1701 nt, Artificial Sequence
  derived and/or modified CDS sequence (opt2) from hemagglutinin__InfluenzaA__AEC53404
augaaggccauccucgucguccuccucuacaccuucgccaccgccaacgccgacacccucugcaucggcuaccacgccaacaacuccaccgacaccgucgacaccguccucgagaagaacgucaccgucacccacuccgucaacauccucgaggacaagcacaacggcaagcucugcaagcuccgcggcgucgccccccuccaccucggcaagugcaacaucgccggcuggauccucggcaaccccgagugcgagucccucuccaccgccuccuccugguccuacaucgucgagaccuccuccuccgacaacggcaccugcuaccccggcgacuucaucgacuacgaggagcuccgcgagcagcucuccuccgucuccuccuucgagcgcuucgagaucuuccccaagaccuccuccuggcccaaccacgacuccaacaagggcaucaccgccgccugcccccacgccggcgccaaguccuucuacaagaaccucaucuggcucgucaagaagggcaacuccuaccccaagcucuccaaguccuacaucaacgacaagggcaaggagguccucguccucuggggcauccaccaccccuccaccuccgccgaccagcagucccucuaccagaacgccgacgccuacgucuucgucggcuccucccgcuacuccaagaaguucaagcccgagaucgccauccgccccaagguccgcgaccaggagggccgcaugaacuacuacuggacccucgucgagcccggcgacaagaucaccuucgaggccaccggcaaccucgucgucccccgcuacgccuucgccauggagcgcaacgccggcuccggcaucaucaucuccgacacccccguccacgacugcaacaccaccugccagacccccaagggcgccaucaacaccucccuccccuuccagaacauccaccccaucaccaucggcaagugccccaaguacgucaaguccaccaagcuccgccucgccaccggccuccgcaacguccccuccauccagucccgcggccucuucggcgccaucgccggcuucaucgagggcggcuggaccggcauggucgacggcugguacggcuaccaccaccagaacgagcagggcuccggcuacgccgccgaccucaaguccacccagaacgccaucgacgagaucaccaacaaggucaacuccgucaucgagaagaugaacacccaguucaccgccgucggcaaggaguucaaccaccucgagaagcgcaucgagaaccucaacaagaaggucgacgacggcuuccucgacaucuggaccuacaacgccgagcuccucguccuccucgagaacgagcgcacccucgacuaccacgacuccaacgucaagaaccucuacgagaagguccgcucccagcucaagaacaacgccaaggagaucggcaacggcugcuucgaguucuaccacaagugcgacaacaccugcauggaguccgucaagaacggcaccuacgacuaccccaaguacuccgaggaggccaagcucaaccgcgaggagaucgacggcgucaagcucgaguccacccgcaucuaccagauccucgccaucuacuccaccgucgccuccucccucguccucgucgucucccucggcgccaucuccuucuggaugugcuccaacggcucccuccagugccgcaucugcaucuga

SEQ ID NO: 102755 - RNA, 1701 nt, Artificial Sequence; identical to SEQ ID NO: 98692
  derived and/or modified CDS sequence (opt2) from hemagglutinin__InfluenzaA__AEC53414

SEQ ID NO: 102756 - RNA, 1701 nt, Artificial Sequence
  derived and/or modified CDS sequence (opt2) from hemagglutinin__InfluenzaA__AEE27177
augaagaccauccucgucguccuccucuacaccuucgccaccgccaacgccgacacccucugcaucggcuaccacgccaacaacuccaccgacaccgucgacaccguccucgagaagaacgucaccgucacccacuccgucaacauccucgaggacaagcacaacggcaagcucugcaagcuccgcggcgucgccccccuccaccucggcaagugcaacaucgccggcuggauccucggcaaccccgagugcgagucccucuccaccgccuccuccugguccuacaucgucgagaccuccuccuccgacaacggcaccugcuaccccggcgacuucaucgacuacgaggagcuccgcgagcagcucuccuccgucuccuccuucgagcgcuucgagaucuuccccaagaccuccuccuggcccaaccacgacuccaacaagggcgucaccgccgccugcccccacgccggcgccaaguccuucuacaagaaccucaucuggcucgucaagaagggcaacuccuaccccaagcucuccaaguccuacaucaacgacaagcgcaaggagguccucguccucuggggcauccaccaccccuccaccuccgccgaccagcagucccucuaccagaacgccgacgccuacgucuucgucggcuccucccgcuacuccaagaaguucaagcccgagaucgccauccgccccaagguccgcgaccaggagggccgcaugaacuacuacuggacccucgucgagcccggcgacaagaucaccuucgaggccaccggcaaccucgucgucccccgcuacgccuucgccauggagcgcaacgccggcuccggcaucaucaucuccgacacccccguccacgacugcaacaccaccugccagacccccaagggcgccaucaacaccucccuccccuuccagaacauccaccccaucaccaucggcaagugccccaaguacgucaaguccaccaagcuccgccucgccaccggccuccgcaacguccccuccauccagucccgcggccucuucggcgccaucgccggcuucaucgagggcggcuggaccggcauggucgacggcugguacggcuaccaccaccagaacgagcagggcuccggcuacgccgccgaccucaaguccacccagaacgccaucgacgagaucaccaacaaggucaacuccgucaucgagaagaugaacacccaguucaccgccgucggcaaggaguucaaccaccucgagaagcgcaucgagaaccucaacaagaaggucgacgacggcuuccucgacaucuggaccuacaacgccgagcuccucguccuccucgagaacgagcgcacccucgacuaccacgacuccaacgucaagaaccucuacgagaagguccgcucccagcucaagaacaacgccaaggagaucggcaacggcugcuucgaguucuaccacaagugcgacaacaccugcauggaguccgucaagaacggcaccuacgacuaccccaaguacuccgaggaggccaagcucaaccgcgaggagaucgacggcgucaagcucgaguccacccgcaucuaccagauccucgccaucuacuccaccgucgccuccucccucguccucgucgucucccucggcgccaucuccuucuggaugugcuccaacggcucccuccagugccgcaucugcaucuga

SEQ ID NO: 102757 - RNA, 1701 nt, Artificial Sequence; identical to SEQ ID NO: 100477
  derived and/or modified CDS sequence (opt2) from hemagglutinin__InfluenzaA__AEE27187

SEQ ID NO: 102758 - RNA, 1701 nt, Artificial Sequence
  derived and/or modified CDS sequence (opt2) from hemagglutinin__InfluenzaA__AEE27207
augaaggccauccucgucguccuccucuacaccuucgccaccgccaacgccgacacccucugcaucggcuaccacgccaacaacuccaccgacaccgucgacaccguccucgagaagaacgucaccgucacccacuccgucaaccuccucgaggacaagcacaacggcaagcucugcaagcuccgcggcgucgccccccuccaccucggcaagugcaacaucgccggcuggauccucggcaaccccgagugcgagucccucuccaccgccuccuccugguccuacaucgucgagaccuccuccuccgacaacggcaccugcuaccccggcgacuucaucgacuacgaggagcuccgcgagcagcucuccuccgucuccuccuucgagcgcuucgagaucuuccccaagaccuccuccuggcccaaccacgacuccaacaagggcgucaccgccgccugcccccacgccggcgccaaguccuucuacaagaaccucaucuggcucgucaagaagggcaacuccuaccccaagcucuccaaguccuacaucaacgacaagggcaaggagguccucguccucuggggcauccaccaccccuccaccuccgccgaccagcagucccucuaccagaacgccgacgccuacgucuucgucggcaccucccgcuacuccaagaaguucaagcccgagaucgccauccgccccaagguccgcgaccaggagggccgcaugaacuacuacuggacccucgucgagcccggcgacaagaucaccuucgaggccaccggcaaccucgucgucccccgcuacgccuucgccauggagcgcaacgccggcuccggcaucaucaucuccgacacccccguccacgacugcaacaccaccugccagacccccaagggcgccaucaacaccucccuccccuuccagaacauccaccccaucaccaucggcaagugccccaaguacgucaaguccaccaagcuccgccucgccaccggccuccgcaacguccccuccauccagucccgcggccucuucggcgccaucgccggcuucaucgagggcggcuggaccggcauggucgacggcugguacggcuaccaccaccagaacgagcagggcuccggcuacgccgccgaccucaaguccacccagaacgccaucgacgagaucaccaacaaggucaacuccgucaucgagaagaugaacacccaguucaccgccgucggcaaggaguucaaccaccucgagaagcgcaucgagaaccucaacaagaaggucgacgacggcuuccucgacaucuggaccuacaacgccgagcuccucguccuccucgagaacgagcgcacccucgacuaccacgacuccaaggucaagaaccucuacgagaagguccgcucccagcucaagaacaacgccaaggagaucggcaacggcugcuucgaguucuaccacaagugcgacaacaccugcauggaguccgucaagaacggcaccuacgacuaccccaaguacuccgaggaggccaagcucaaccgcgaggagaucgacggcgucaagcucgaguccacccgcaucuaccagauccucgccaucuacuccaccgucgccuccucccucguccucgucgucucccucggcgccaucuccuucuggaugugcuccaacggcucccuccagugccgcaucugcaucuga

SEQ ID NO: 102759 - RNA, 1701 nt, Artificial Sequence
  derived and/or modified CDS sequence (opt2) from hemagglutinin__InfluenzaA__AEG64752
augaaggccauccucgucguccuccucuacaccuucgccaccgccaacgccgacacccucugcaucggcuaccacgccaacaacuccaccgacaccgucgacaccguccucgagaagaacgucaccgucacccacuccgucaaccuccucgaggacaagcacaacggcaagcucugcaagcuccgcggcgucgccccccuccaccucggcaagugcaacaucgccggcuggauccucggcaaccccgagugcgagucccucuccaccgccuccuccugguccuacaucgucgagaccuccuccuccgacaacggcaccugcuaccccggcgacuucaucgacuacgaggagcuccgcgagcagcucuccuccgucuccuccuucgagcgcuucgagaucuuccccaagaccuccuccuggcccaaccacgacuccaacaagggcgucaccgccgccugcccccacgccggcgccaaguccuucuacaagaaccucaucuggcucgucaagaagggcaacuccuaccccaagcucuccaaguccuacaucaacgacaagggcaaggagguccucguccucuggggcauccaccaccccuccaccuccgccgaccagcagucccucuaccagaacgccgacgccuacgucuucgucggcuccucccgcuacuccaagaaguucaagcccgagaucgccauccgccccaagguccgcgaccaggagggccgcaugaacuacuacuggacccucgucgagcccggcgacaagaucaccuucgaggccaccggcaaccucgucgucccccgcuacgccuucgccauggagcgcaacgccggcuccggcaucaucaucuccgacacccccguccacgacugcaacaccaccugccagacccccaagggcgccaucaacaccucccuccccuuccagaacauccaccccaucaccaucggcaagugccccaaguacguccgcuccaccaagcuccgccucgccaccggccuccgcaacguccccuccauccagucccgcggccucuucggcgccaucgccggcuucaucgagggcggcuggaccggcauggucgacggcugguacggcuaccaccaccagaacgagcagggcuccggcuacgccgccgaccucaaguccacccagaacgccaucgacgagaucaccaacaaggucaacuccgucaucgagaagaugaacacccaguucaccgccgucggcaaggaguucaaccaccucgagaagcgcaucgagaaccucaacaagaaggucgacgacggcuuccucgacaucuggaccuacaacgccgagcuccucguccuccucgagaacgagcgcacccucgacuaccacgacuccaacgucaagaaccucuacgagaagguccgccgccagcucaagaacaacgccaaggagaucggcaacggcugcuucgaguucuaccacaagugcgacaacaccugcauggaguccgucaagaacggcaccuacgacuaccccaaguacuccgaggaggccaagcucaaccgcgaggagaucgacggcgucaagcucgaguccacccgcaucuaccagauccucgccaucuacuccaccgucgccuccucccucguccucgucgucucccucggcgccaucuccuucuggaugugcuccaacggcucccuccagugccgcaucugcaucuga

SEQ ID NO: 102760 - RNA, 1701 nt, Artificial Sequence
  derived and/or modified CDS sequence (opt2) from hemagglutinin__InfluenzaA__AEG64762
augaaggcccgccuccucguccuccucugcgcccucgccgccaccgacgccgacaccaucugcaucggcuaccacgccaacaacuccaccgacaccgucgacacccuccucgagaagaacgucaccgucacccacuccgucaaccuccucgaggacucccacaacggcaagcucugcaagcucaagggcaucgccccccuccagcucggcaagugcaacaucgccggcuggcuccucggcaaccccgagugcgacucccuccuccccgcccgcuccugguccuacaucgucgagacccccaacuccgagaacggcgccugcuaccccggcgacuucaucgacuacgaggagcuccgcgagcagcucuccaccgucuccucccucgagcgcuucgagaucuuccccaaggaguccuccuggcccaaccacaacacccucaagggcgucaccgucuccugcucccacggcggcaaguccuccuucuaccgcaaccuccucuggcucaccaagaccggcgacuccuaccccaagcucaacaacuccuacgucaacaacaagggcaaggagguccucguccucuggggcguccaccaccccuccuccuccaacgagcagcagucccucuaccacaacgucaacgccuacgucuccgucgucuccuccaacuacaaccgccgcuucacccccgagaucgccgcccgccccaagguccgcgaccagcccggccgcaugaacuacuacuggacccuccucgagcccggcgacaccauccucuucgaggccaccggcaaccucaucgcccccugguacgccuucgcccucucccgcggcuucggcuccggcaucaucaccuccaacgccuccaugcacgagugcaacaccaagugccagaccccccagggcgccaucaacuccucccuccccuuccagaacauccaccccgucaccaucggcgagugccccaaguacguccgcuccaccaagcuccgcauggucaccggccuccgcaacauccccuccauccagucccgcggccucuucggcgccaucgccggcuucaucgagggcggcuggaccggcaugaucgacggcugguacggcuaccaccaccagaacgagcagggcuccggcuacgccgccgaccagaaguccacccagaacgccaucaacggcaucaccaacaaggucaacuccgucaucgagaagaugaacacccaguucaccgccgucggcaaggaguucaacaaccucgagaagcgcauggagaaccucaacaagaaggucgacgacggcuuccucgacaucuggaccuacaacgccgagcuccucguccuccucgagaacgagcgcacccucgacuuccacgaccucaacgucaagaaccucuacgagaaggucaagucccagcucaagaacaacgccaaggagaucggcaacggcugcuucgaguucuaccacaagugcgacaacgagugcauggaguccguccgcgacggcaccuacgacuaccccaaguacuccgaggaguccaagcucaaccgcgagaagaucgacggcgucaagcucgaguccaugggcgucuaccagauccucgccaucuacuccaccgucgccuccucccucguccuccucgucucccucggcgccaucuccuucuggaugugcuccaacggcucccuccagugccgcaucugcaucuga

SEQ ID NO: 102761 - RNA, 1701 nt, Artificial Sequence; identical to SEQ ID NO: 98705
  derived and/or modified CDS sequence (opt2) from hemagglutinin__InfluenzaA__AEG64784

SEQ ID NO: 102762 - RNA, 1701 nt, Artificial Sequence
  derived and/or modified CDS sequence (opt2) from hemagglutinin__InfluenzaA__AEG64834
augaagaccaucaucgcccucuccuacauccucugccucgucuucgcccagaagcuccccggcaacgacaacuccaccgccacccucugccucggccaccacgccguccccaacggcaccaucgucaagaccaucaccaacgaccagaucgaggucaccaacgccaccgagcucguccagaacuccuccgccggcgagaucugcgacuccccccaccagauccucgacggcgagaacugcacccucaucgacgcccuccucggcgacccccagugcgacggcuuccagaacaagaagugggaccucuucgucgagcgcucccgcgccuacuccaacugcuaccccuacgacguccccgacuacgccucccuccgcucccucgucgccuccuccggcacccucgaguucaacaacgaguccuucaacuggaccggcgucacccagaacggcaccuccuccgccugcauccgccgcuccaacaacuccuucuucucccgccucaacuggcucacccaccucaacuucaaguaccccgcccucaacgucaccaugcccaacaacgagcaguucgacaagcucuacaucuggggcguccaccaccccggcaccgacaaggaccagaucuuccucuacgcccaggccuccggccgcaucaccgucuccaccaagcgcucccagcaggccgucauccccaacaucggcucccgcccccgcguccgcaacauccccucccgcaucuccaucuacuggaccaucgucaagcccggcgacauccuccucaucaacuccaccggcaaccucaucgccccccgcggcuacuucaagauccgcuccggcaaguccuccaucaugcgcuccgacgcccccaucggcaagugcaacuccgagugcaucacccccaacggcuccauccccaacgacaagcccuuccagaacgucaaccgcaucaccuacggcgccugcccccgcuacgucaagcaguccacccucaagcucgccaccggcaugcgcaacguccccgagaagcagacccgcggcaucuucggcgccaucgccggcuucaucgagaacggcugggagggcauggucgacggcugguacggcuuccgccaccagaacuccgagggccgcggccaggccgccgaccucaaguccacccaggccgccaucgaccagaucaacggcaagcucaaccgccucaucggcaagaccaacgagaaguuccaccagaucgagaaggaguucuccgaggucgagggccgcauccaggaccucgagaaguacgucgaggacaccaagaucgaccucugguccuacaacgccgagcuccucgucgcccucgagaaccagcacaccaucgaccucaccgacuccgagaugaacaagcucuucgagaagaccaagaagcagcuccgcgagaacgccgaggacaugggcaacggcugcuucaagaucuaccacaagugcgacaacgccugcaucggcuccauccgcaacggcaccuacgaccacgacgucuaccgcgacgaggcccucaacaaccgcuuccagaucaagggcgucgagcucaaguccggcuacaaggacuggauccucuggaucuccuucgccaucuccugcuuccuccucugcgucgcccuccucggcuucaucaugugggccugccagaagggcaacauccgcugcaacaucugcaucuga

SEQ ID NO: 102763 - RNA, 1701 nt, Artificial Sequence
  derived and/or modified CDS sequence (opt2) from hemagglutinin__InfluenzaA__AEG64845
augaagaccaucaucgcccucuccuacauccucugccucgucuucgcccagaagcuccccggcaacgacaacuccaccgccacccucugccucggccaccacgccguccccaacggcaccaucgucaagaccaucaccaacgaccagaucgaggucaccaacgccaccgagcucguccagaacuccuccaccggcgagaucugcgacuccccccaccagauccucgacggcgagaacugcacccucaucgacgcccuccucggcgacccccagugcgacggcuuccagaacaagaagugggaccucuucgucgagcgcuccaaggccuacuccaacugcuaccccuacgacguccccgacuacgccucccuccgcucccucgucgccuccuccggcacccucgaguucaacaacgaguccuucaacuggaccggcgucacccagaacggcaccuccuccgccugcauccgccgcuccaacaacuccuucuucucccgccucaacuggcucacccaccucaacuucaaguaccccgcccucaacgucaccaugcccaacaacgagcaguucgacaagcucuacaucuggggcguccaccaccccggcaccgacaaggaccagaucuuccucuacgcccaggccuccggccgcaucaccgucuccaccaagcgcucccagcagaccgucauccccaacaucggcucccgcccccgcguccgcaacauccccucccgcaucuccaucuacuggaccaucgucaagcccggcgacauccuccucaucaacuccaccggcaaccucaucgccccccgcggcuacuucaagauccgcuccggcaaguccuccaucaugcgcuccgacgcccccaucggcaagugcaacuccgagugcaucacccccaacggcuccauccccaacgacaagcccuuccagaacgucaaccgcaucaccuacggcgccugcccccgcuacgucaagcagaacacccucaagcucgccaccggcaugcgcaacguccccgagaagcagacccgcggcaucuucggcgccaucgccggcuucaucgagaacggcugggagggcauggucgacggcugguacggcuuccgccaccagaacuccgagggccgcggccaggccgccgaccucaaguccacccaggccgccaucgaccagaucaacggcaagcucaaccgccucaucggcaagaccaacgagaaguuccaccagaucgagaaggaguucuccgaggucgagggccgcauccaggaccucgagaaguacgucgaggacaccaagaucgaccucugguccuacaacgccgagcuccucgucgcccucgagaaccagcacaccaucgaccucaccgacuccgagaugaacaagcucuucgagaagaccaagaagcagcuccgcgagaacgccgaggacaugggcaacggcugcuucaagaucuaccacaagugcgacaacgccugcaucggcuccauccgcaacggcaccuacgaccacgacgucuaccgcgacgaggcccucaacaaccgcuuccagaucaagggcgucgagcucaaguccggcuacaaggacuggauccucuggaucuccuucgccaucuccugcuuccuccucugcgucgcccuccucggcuucaucaugugggccugccagaagggcaacauccgcugcaacaucugcaucuga

SEQ ID NO: 102764 - RNA, 1701 nt, Artificial Sequence
  derived and/or modified CDS sequence (opt2) from hemagglutinin__InfluenzaA__AEG64856
augaagaccaucaucgcccucuccuacauccucugccucgucuucgcccagaagcuccccggcaacgacaacuccaccgccacccucugccucggccaccacgccguccccaacggcacccucgucaagaccaucaccaacgaccagaucgaggucaccaacgccaccgagcucguccaguccuccuccaccggccgcaucugcgacuccccccaccagauccucgacggcgagaacugcacccucaucgacgcccuccucggcgacccccacugcgacggcuuccagaacaaggagugggaccucuucgucgagcgcuccaaggccuacuccaacugcuaccccuacgacguccccgacuacgccucccuccgcucccucgucgccuccuccggcacccucgaguucaacaacgaguccuucaacuggaccggcgucgcccagaacggcaccuccuccgccugcaagcgccgcuccaacaaguccuucuucucccgccucaacuggcuccaccagcucaaguacaaguaccccgcccucaacgucaccaugcccaacaacgagaaguucgacaagcucuacaucuggggcguccaccaccccuccaccgacuccgaccagaucucccucuacgcccaggccuccggccgcgucaccgucuccaccaagcgcucccagcagaccgucauccccaacaucggcucccgccccuggguccgcggcgucuccucccgcaucuccaucuacuggaccaucgucaagcccggcgacauccuccucaucaacuccaccggcaaccucaucgccccccgcggcuacuucaagauccgcuccggcaaguccuccgucaugcgcuccgacgccuccaucggcaagugcaacuccgagugcaucacccccaacggcuccauccccaacgacaagcccuuccagaacgucaaccgcaucaccuacggcgccugcccccgcuacgucaagcagaacacccucaagcucgccaccggcaugcgcaacguccccgagaagcagacccgcggcaucuucggcgccaucgccggcuucaucgagaacggcugggagggcauggucgacggcugguacggcuuccgccaccagaacuccgagggcaccggccaggccgccgaccucaaguccacccaggccgccaucaaccagaucaacggcaagcucaaccgccucaucgagaagaccaacgagaaguuccaccagaucgagaaggaguucuccgaggucgagggccgcauccaggaccucgagaaguacgucgaggacaccaagaucgaccucugguccuacaacgccgagcuccucgucgcccucgagaaccagcacaccaucgaccucaccgacuccgagaugaacaagcucuucgagcgcaccaagaagcagcuccgcgagaacgccgaggacaugggcaacggcugcuucaagaucuaccacaagugcgacaacgccugcaucgaguccauccgcaacggcaccuacgaccacgacgucuaccgcgacgaggcccucaacaaccgcuuccagaucaagggcgucgagcucaaguccggcuacaaggacuggauccucuggaucuccuucgccaucuccugcuuccuccucugcgucguccuccucggcuucaucaugugggccugccagaagggcaacauccgcugcaacaucugcaucuga

SEQ ID NO: 102765 - RNA, 1701 nt, Artificial Sequence; identical to SEQ ID NO: 96108
  derived and/or modified CDS sequence (opt2) from hemagglutinin__InfluenzaA__AEG64867

SEQ ID NO: 102766 - RNA, 1701 nt, Artificial Sequence
  derived and/or modified CDS sequence (opt2) from hemagglutinin__InfluenzaA__AEG64878
augaagaccaucaucgcccucuccuacauccucugccucgucuucgcccagaagcuccccgucaacgacaacuccaccgccacccucugccucggccaccacgccguccccaacggcacccucgucaagaccaucaccaacgaccacaucgaggucaccaacgccaccgagcucguccaguccuccuccaccggccgcaucugcgacuccccccaccagauccucgacggcgagaacugcacccucaucgacgcccuccucggcgacccccacugcgacggcuuccagaacaaggagugggaccucuucgucgagcgcuccaccgccuacuccaacugcuaccccuacgacguccccgacuacgccucccuccgcucccucgucgccuccuccggcacccucgaguucaacaacgaguccuucaacuggaccggcgucgcccagaacggcaccuccuccgccugcaagcgccgcuccaucaaguccuucuucucccgccucaacuggcuccaccagcucaaguacaaguaccccgcccucaacgucaccaugcccaacaacgagaaguucgacaagcucuacaucuggggcguccaccaccccuccaccgacuccgaccagaucucccucuacgcccaggccuccggccgcgucaccgucuccaccaagcgcucccagcagaccgucauccccaacaucggcucccgccccuggguccgcggcgucuccucccgcaucuccaucuacuggaccaucgucaagcccggcgacauccuccucaucaacuccaccggcaaccucaucgccccccgcggcuacuucaagauccgcuccggcaaguccuccaucaugcgcuccaacgcccccaucggcaagugcaacuccgagugcaucacccccaacggcuccauccccaacgacaagcccuuccagaacgucaaccgcaucaccuacggcgccugcccccgcuacgucaagcagaacacccucaagcucgccaccggcaugcgcaacguccccgagaagcagacccgcggcaucuucggcgccaucgccggcuucaucgagaacggcugggagggcauggucgacggcugguacggcuuccgccaccagaacuccgagggcaucggccaggccgccgaccucaaguccacccaggccgccaucaaccagaucaacggcaagcucaaccgccucaucgagaagaccaacgagaaguuccaccagaucgagaaggaguucuccgaggucgagggccgcauccaggaccucgagaaguacgucgaggacaccaagaucgaccucugguccuacaacgccgagcuccucgucgcccucgagaaccagcacaccaucgaccucaccgacuccgagaugaacaagcucuucgagcgcacccgcaagcagcuccgcgagaacgccgaggacaugggcaacggcugcuucaagaucuaccacaagugcgacaacgccugcaucggcuccauccgcaacggcaccuacgaccacgacgucuaccgcgacgaggcccucaacaaccgcuuccagaucaagggcgucgagcucaaguccggcuacaaggacuggauccucuggaucuccuucgccaucuccugcuuccuccucugcgucguccuccucggcuucaucaugugggccugccagaagggcaacauccgcugcaacaucugcaucuga

SEQ ID NO: 102767 - RNA, 1701 nt, Artificial Sequence
  derived and/or modified CDS sequence (opt2) from hemagglutinin__InfluenzaA__AEG64889
augaagaccaucaucgcccucuccuacauccucugccucgucuucgcccagaagcuccccgucaacgacaacuccaccgccacccucugccucggccaccacgccguccccaacggcacccucgucaagaccaucaccaacgaccacaucgaggucaccaacgccaccgagcucguccaguccuccuccaccggccgcaucugcgacuccccccaccagauccucgacggcgagaacugcacccucaucgacgcccuccucggcgacccccacugcgacggcuuccagaacaaggagugggaccucuucgucgagcgcuccaccgccuacuccaacugcuaccccuacgacguccccgacuacgccucccuccgcucccucuucgccuccuccggcacccucgaguucaacaacgaguccuucaacuggaccggcgucgcccagaacggcaccuccuccgccugcaagcgccgcuccaucaaguccuucuucucccgccucaacuggcuccaccagcucaaguacaaguaccccgcccucaacgucaccaugcccaacaacgagaaguucgacaagcucuacaucuggggcguccaccaccccuccaccgacuccgaccagaucucccucuacgcccaggccuccggccgcgucaccgucuccaccaagcgcucccagcagaccgucauccccaacaucggcucccgccccuggguccgcggcgucuccucccgcaucuccaucuacuggaccaucgucaagcccggcgacauccuccucaucaacuccaccggcaaccucaucgccccccgcggcuacuucaagauccgcuccggcaaguccuccaucaugcgcuccaacgcccccaucggcaagugcaacuccgagugcaucacccccaacggcuccauccccaacgacaagcccuuccagaacgucaaccgcaucaccuacggcgccugcccccgcuacgucaagcagaacacccucaagcucgccaccggcaugcgcaacguccccgagaagcagacccgcggcaucuucggcgccaucgccggcuucaucgagaacggcugggagggcauggucgacggcugguacggcuuccgccaccagaacuccgagggcaccggccaggccgccgaccucaaguccacccaggccgccaucaaccagaucaacggcaagcucaaccgccucaucgagaagaccaacgagaaguuccaccagaucgagaaggaguucuccgaggucgagggccgcauccaggaccucgagaaguacgucgaggacaccaagaucgaccucugguccuacaacgccgagcuccucgucgcccucgagaaccagcacaccaucgaccucaccgacuccgagaugaacaagcucuucgagaagacccgcaagcagcuccgcgagaacgccgaggacaugggcaacggcugcuucaagaucuaccacaagugcgacaacgccugcaucggcuccauccgcaacggcaccuacgaccacgacgucuaccgcgacgaggcccucaacaaccgcuuccagaucaagggcgucgagcucaaguccggcuacaaggacuggauccucuggaucuccuucgccaucuccugcuuccuccucugcgucguccuccucggcuucaucaugugggccugccagaagggcaacauccgcugcaacaucugcaucuga

SEQ ID NO: 102768 - RNA, 1701 nt, Artificial Sequence; identical to SEQ ID NO: 96068
  derived and/or modified CDS sequence (opt2) from hemagglutinin__InfluenzaA__AEG64911

SEQ ID NO: 102769 - RNA, 1701 nt, Artificial Sequence; identical to SEQ ID NO: 96068
  derived and/or modified CDS sequence (opt2) from hemagglutinin__InfluenzaA__AEG64922

SEQ ID NO: 102770 - RNA, 1701 nt, Artificial Sequence; identical to SEQ ID NO: 96068
  derived and/or modified CDS sequence (opt2) from hemagglutinin__InfluenzaA__AEG64933

SEQ ID NO: 102771 - RNA, 1701 nt, Artificial Sequence; identical to SEQ ID NO: 96154
  derived and/or modified CDS sequence (opt2) from hemagglutinin__InfluenzaA__AEG64944

SEQ ID NO: 102772 - RNA, 1701 nt, Artificial Sequence; identical to SEQ ID NO: 96068
  derived and/or modified CDS sequence (opt2) from hemagglutinin__InfluenzaA__AEG64955

SEQ ID NO: 102773 - RNA, 1701 nt, Artificial Sequence; identical to SEQ ID NO: 96068
  derived and/or modified CDS sequence (opt2) from hemagglutinin__InfluenzaA__AEG64966

SEQ ID NO: 102774 - RNA, 1701 nt, Artificial Sequence
  derived and/or modified CDS sequence (opt2) from hemagglutinin__InfluenzaA__AEG64977
augaagaccaucaucgcccucuccuacauccucugccucgucuucgcccagaagcuccccgagaacgacaacuccaccgccacccucugccucggccaccacgccguccccaacggcaccaucgucaagaccaucaccaacgaccagaucgaggucaccaacgccaccgagcucguccaguccuccuccaccggcggcaucugcgacuccccccaccagauccucgacggcgagaacugcacccucaucgacgcccuccucggcgacccccagugcgacggcuuccagaacaagaagugggaccucuucgucgagcgcuccaaggccuacuccaacugcuaccccuacgacguccccgacuacgccucccuccgcucccucgucgccuccuccggcacccucgaguucaacaacgaguccuucgacuggaccggcgucacccagaacggcaccuccuccgccugcaagcgccgcuccaacaaguccuucuucucccgccucaacuggcucacccaccucaaguacaaguaccccgcccucaacgucaccaugcccaacaacgagaaguucgacaagcucuacaucuggggcguccaccaccccggcaccgacuccgaccagaucucccucuacgcccaggccuccggccgcaucaccgucuccaccaagcgcucccagcagaccgucauccccaacaucggcucccgcccccgcguccgcgacgucuccucccgcaucuccaucuacuggaccaucgucaagcccggcgacauccuccucaucaacuccaccggcaaccucaucgccccccgcggcuacuucaagauccgcuccggcaaguccuccaucaugcgcuccgacgcccccaucgacaagugcaacuccgagugcaucacccccaacggcuccauccccaacgacaagcccuuccagaacgucaaccgcaucaccuacggcgccugcccccgcuacgucaagcagaacacccucaagcucgccaccggcaugcgcaacguccccgagaagcagacccgcggcaucuucggcgccaucgccggcuucaucgagaacggcugggagggcauggucgacggcugguacggcuuccgccaccagaacuccgagggcaccggccaggccgccgaccucaaguccacccaggccgccaucaaccagaucaacggcaagcucaaccgccucaucggcaagaccaacgagaaguuccaccagaucgagaaggaguucuccgaggucgagggccgcauccaggaccucgagaaguacgucgaggacaccaagaucgaccucugguccuacaacgccgagcuccucgucgcccucgagaaccagcacaccaucgaccucaccgacuccgagaugaacaagcucuucgagcgcaccaagaagcagcuccgcgagaacgccgaggacaugggcaacggcugcuucaagaucuaccacaagugcgacaacgccugcaucggcuccauccgcaacggcaccuacgaccacgacgucuaccgcgacgaggcccucaacaaccgcuuccagaucaagggcgucgagcucaaguccggcuacaaggacuggauccucuggaucuccuucgccaucuccugcuuccuccucugcgucgcccuccucggcuucaucaugugggccugccagaagggcaacauccgcugcaacaucugcaucuga

SEQ ID NO: 102775 - RNA, 1701 nt, Artificial Sequence
  derived and/or modified CDS sequence (opt2) from hemagglutinin__InfluenzaA__AEG64988
augaagaccaucaucgcccucuccuacauccucugccucgucuucgcccagaagcuccccggcaacgacaacuccaccgccacccucugccucggccaccacgccguccccaacggcaccaucgucaagaccaucaccaacgaccagaucgaggucaccaacgccaccgagcucguccaguccuccuccaccggcgagaucugcgacaugccccaccagauccucgacggcgagaacugcacccucaucgacgcccuccucggcgacccccagugcgacggcuuccagaacaagaagugggaccucuucgucgagcgcuccaaggccuacuccaacugcuaccccuacgacguccccgacuacgccucccuccgcucccucgucgccuccuccggcacccucgaguucaacaacgaguccuucaacuggaccggcgucacccagaacggcaccuccuccgccugcaagcgccgcuccaacaacuccuucuucucccgccucaacuggcucacccaccucaaguucaaguaccccgcccucaacgucaccaugcccaacaacgagaaguucgacaagcucuacaucuggggcguccaccaccccggcaccgacaacgaccagaucuuccucuacgcccaggccuccggccgcaucaccgucuccaccaagcgcucccagcagaccgucauccccaacaucggcucccgcccccgcguccgcaacauccccucccgcaucuccaucuacuggaccaucgucaagcccggcgacauccuccucaucaacuccaccggcaaccucaucgccccccgcggcuacuucaagauccgcuccggcaaguccuccaucaugcgcuccgacgcccccaucggcaagugcaacuccgagugcaucacccccaacggcuccauccccaacgacaagcccuuccagaacgucaaccgcaucaccuacggcgccugcccccgcuacgucaagcagaacacccucaagcucgccaccggcaugcgcaacguccccgagaagcagacccgcggcaucuucggcgccaucgccggcuucaucgagaacggcugggagggcauggucgacggcugguacggcuuccgccaccagaacuccgagggcaucggccaggccgccgaccucaaguccacccaggccgccaucaaccagaucaacggcaagcucaaccgccucaucggcaagaccaacgagaaguuccaccagaucgagaaggaguucuccgaggucgagggccgcauccaggaccucgagaaguacgucgaggacaccaagaucgaccucugguccuacaacgccgagcuccucgucgcccucgagaaccagcacaccaucgaccucaccgacuccgagaugaacaagcucuucgagcgcaccaagaagcagcuccgcgagaacgccgaggacaugggcaacggcugcuucaagaucuaccacaagugcgacaacgccugcaucggcuccauccgcaacggcaccuacgaccacgacgucuaccgcgacgaggcccucaacaaccgcuuccagaucaagggcgucgagcucaaguccggcuacaaggacuggauccucuggaucuccuucgccaucuccugcuuccuccucugcgucguccuccucggcuucaucaugugggccugccagaagggcaacauccgcugcaacaucugcaucuga

SEQ ID NO: 102776 - RNA, 1701 nt, Artificial Sequence
  derived and/or modified CDS sequence (opt2) from hemagglutinin__InfluenzaA__AEG64999
augaagaccaucaucgcccucuccuacauccucugccucgucuucgcccagaagcuccccggcaacgacaacuccaccgccacccucugccucggccaccacgccguccccaacggcaccaucgucaagaccaucaccaacgaccagaucgaggucaccaacgccaccgagcucguccagaacuccuccaccggcggcaucugcgacuccccccaccagauccucgacggcgagaacugcacccucaucgacgcccuccucggcgacccccagugcgacggcuuccagaacaagaagugggaccucuucgucgagcgcuccaaggccuacuccaacugcuaccccuacgacguccccgacuacgucucccuccgcucccucgucgccuccuccggcacccucgaguucaacaacgaguccuucaacuggaccggcgucacccagaacggcaccuccuccgccugcaagcgccgcuccaacaacuccuucuucucccgccucaacuggcucacccaccucaaguucaaguaccccgcccucaacgucaccaugcccaacaacgagaaguucgacaagcucuacaucuggggcguccaccaccccggcaccgacaacgaccagaucucccucuacgcccaggccuccggccgcaucaccgucuccaccaagcgcucccagcagaccgucauccccaacaucggcucccgcccccgcguccgcgacauccccucccgcaucuccaucuacuggaccaucgucaagcccggcgacauccuccucaucaacuccaccggcaaccucaucgccccccgcggcuacuucaagauccgcuccggcaaguccuccaucaugcgcuccgacgcccccaucggcaagugcaacuccgagugcaucacccccaacggcuccauccccaacgacaagcccuuccagaacgucaaccgcaucaccuacggcgccugcccccgcuacgucaagcagaacacccucaagcucgccaccggcaugcgcaacguccccgagaagcagacccgcggcaucuucggcgccaucgccggcuucaucgagaacggcugggagggcauggucgacggcugguacggcuuccgccaccagaacuccgagggcaucggccaggccgccgaccucaaguccacccaggccgccaucaaccagaucaacggcaagcucaaccgccucaucggcaagaccaacgagaaguuccaccagaucgagaaggaguucuccgaggucgagggccgcauccaggaccucgagaaguacgucgaggacaccaagaucgaccucugguccuacaacgccgagcuccucgucgcccucgagaaccagcacaccaucgaccucaccgacuccgagaugaacaagcucuucgagcgcaccaagaagcagcuccgcgagaacgccgaggacaugggcaacggcugcuucaagaucuaccacaagugcgacaacgccugcaucggcuccauccgcaacggcaccuacgaccacgacgucuaccgcgacgaggcccucaacaaccgcuuccagaucaagggcgucgagcucaaguccggcuacaaggacuggauccucuggaucuccuucgccaucuccugcuuccuccucugcgucgcccuccucggcuucaucaugugggccugccagaagggcaacauccgcugcaacaucugcaucuga

SEQ ID NO: 102777 - RNA, 1701 nt, Artificial Sequence; identical to SEQ ID NO: 96291
  derived and/or modified CDS sequence (opt2) from hemagglutinin__InfluenzaA__AEG65010

SEQ ID NO: 102778 - RNA, 1701 nt, Artificial Sequence
  derived and/or modified CDS sequence (opt2) from hemagglutinin__InfluenzaA__AEG65021
augaagaccaucaucgcccucuccuacauccucugccucgucuucgcccagaagcuccccggcaacgacaacuccaccgccacccucugccucggccaccacgccguccccaacggcaccaucgucaagaccaucaccaacgaccagaucgaggucaccaacgccaccgagcucguccaguccuccuccaccggcggcaucugcgacuccccccaccagauccucgacggcgagaacugcacccucaucgacgcccuccucggcgacccccagugcgacggcuuccagaacaagaagugggaccucuucgucgagcgcuccaaggccuacuccaacugcuaccccuacgacguccccgacuacgucucccuccgcucccucgucgccuccuccggcacccucgaguucaacaacgaguccuucaacuggaccggcgucacccagaacggcaccuccuccgccugcaagcgccgcuccaacaacuccuucuucucccgccucaacuggcucacccaccucaaguucaaguaccccgcccucaacgucaccaugcccaacaccgagaaguucgacaagcucuacaucuggggcguccaccaccccggcaccgacaacgaccagaucucccucuacgcccaggccuccggccgcaucaccgucuccaccaagcgcucccagcagaccgucauccccaacaucggcucccgcccccgcguccgcgacauccccucccgcaucuccaucuacuggaccaucgucaagcccggcgacauccuccucaucaacuccaccggcaaccucaucgccccccgcggcuacuucaagauccgcuccggcaaguccuccaucaugcgcuccgacgcccccaucggcaagugcaacuccgagugcaucacccccaacggcuccauccccaacgacaagcccuuccagaacgucaaccgcaucaccuacggcgccugcccccgcuacgucaagcagaacacccucaagcucgccaccggcaugcgcaacguccccgagaagcagacccgcggcaucuucggcgccaucgccggcuucaucgagaacggcugggagggcauggucgacggcugguacggcuuccgccaccagaacuccgagggcaucggccaggccgccgaccucaaguccacccaggccgccaucaaccagaucaacggcaagcucaaccgccucaucggcaagaccaacgagaaguuccaccagaucgagaaggaguucuccgaggucgagggccgcauccaggaccucgagaaguacgucgaggacaccaagaucgaccucugguccuacaacgccgagcuccucgucgcccucgagaaccagcacaccaucgaccucaccgacuccgagaugaacaagcucuucgagcgcaccaagaagcagcuccgcgagaacgccgaggacaugggcaacggcugcuucaagaucuaccacaagugcgacaacgccugcaucggcuccauccgcaacggcaccuacgaccacgacgucuaccgcgacgaggcccucaacaaccgcuuccagaucaagggcgucgagcucaaguccggcuacaaggacuggauccucuggaucuccuucgccaucuccugcuuccuccucugcgucgcccuccucggcuucaucaugugggccugccagaagggcaacauccgcugcaacaucugcaucuga

SEQ ID NO: 102779 - RNA, 1701 nt, Artificial Sequence
  derived and/or modified CDS sequence (opt2) from hemagglutinin__InfluenzaA__AEG65032
augaagaccaucaucgcccucuccuacauccucugccucgucuucgcccagaagcuccccggcaacgacaacuccaccgccacccucugccucggccaccacgccguccccaacggcaccaucgucaagaccaucaccaacgaccagaucgaggucaccaacgccaccgagcucguccaguccuccuccaccggcggcaucugcgacuccccccaccagauccucgacggcgagaacugcacccucaucgacgcccuccucggcgacccccagugcgacggcuuccagaacaagaagugggaccucuucgucgagcgcuccaaggccuacuccaacugcuaccccuacgacguccccgacuacgccucccuccgcucccucgucgccuccuccggcacccucgaguucaacaacgaguccuucaacuggaccggcgucacccagaacggcaccuccuccgccugcaagcgccgcuccaacaacuccuucuucucccgccucaacuggcucacccaccucaaguucaaguaccccgcccucaacgucaccaugcccaacaacgagaaguucgacaagcucuacaucuggggcguccaccaccccggcaccgacaacgaccagaucuuccucuacgcccaggccuccggccgcaucaccgucuccaccaagcgcucccagcagaccgucauccccaacaucggcucccgcccccgcguccgcaacauccccucccgcaucuccaucuacuggaccaucgucaagcccggcgacauccuccucaucaacuccaccggcaaccucaucgccccccgcggcuacuucaagauccgcuccggcaaguccuccaucaugcgcuccgacgcccccaucggcaagugcaacuccgagugcaucacccccaacggcuccauccccaacgacaagcccuuccagaacgucaaccgcaucaccuacggcgccugcccccgcuacgucaagcagaacacccucaagcucgccaccggcaugcgcaacguccccgagaagcagacccgcggcaucuucggcgccaucgccggcuucaucgagaacggcugggagggcauggucgacggcugguacggcuuccgccaccagaacuccgagggcaucggccaggccgccgaccucaaguccacccaggccgccaucaaccagaucaacggcaagcucaacaagcucaucggcaagaccaacgagaaguuccaccagaucgagaaggaguucuccgaggucgagggccgcauccaggaccucgagaaguacgucgaggacaccaagaucgaccucugguccuacaacgccgagcuccucgucgcccucgagaaccagcacaccaucgaccucaccgacuccgagaugaacaagcucuucgagcgcaccaagaagcagcuccgcgagaacgccgaggacaugggcaacggcugcuucaagaucuaccacaagugcgacaacgccugcaucggcuccauccgcaacggcaccuacgaccacgacgucuaccgcgacgaggcccucaacaaccgcuuccagaucaagggcgucgagcucaaguccggcuacaaggacuggauccucuggaucuccuucgccaucuccugcuuccuccucugcgucgcccuccucggcuucaucaugugggccugccagaagggcaacauccgcugcaacaucugcaucuga

SEQ ID NO: 102780 - RNA, 1701 nt, Artificial Sequence; identical to SEQ ID NO: 96666
  derived and/or modified CDS sequence (opt2) from hemagglutinin__InfluenzaA__AEG65043

SEQ ID NO: 102781 - RNA, 1701 nt, Artificial Sequence; identical to SEQ ID NO: 96666
  derived and/or modified CDS sequence (opt2) from hemagglutinin__InfluenzaA__AEG65054

SEQ ID NO: 102782 - RNA, 1701 nt, Artificial Sequence
  derived and/or modified CDS sequence (opt2) from hemagglutinin__InfluenzaA__AEG65065
augaagaccaucaucgcccucuccuacauccucugccucgucuucgcccagaagcuccccggcaacgacaacuccaccgccacccucugccucggccaccacgccguccccaacggcaccaucgucaagaccaucaccaacgaccagaucgaggucaccaacgccaccgagcucguccaguccuccuccaccggcgagaucugcgacuccccccaccagauccucgacggcgagaacugcacccucaucgacgcccuccucggcgacccccagugcgacggcuuccagaacaagaagugggaccucuucgucgagcgcuccaaggccuacuccaacugcuaccccuacgacguccccgacuacgccucccuccgcucccucgucgccuccuccggcacccucgaguucaacaacgaguccuucaacuggaccggcgucacccagaacggcaccuccuccgccugcaagcgccgcuccaacaacuccuucuucucccgccucaacuggcucacccaccucaaguucaaguaccccgcccucaacgucaccaugcccaacaacgagaaguucgacaagcucuacaucuggggcguccaccaccccggcaccgacaacgaccagaucuuccucuacgcccaggccuccggccgcaucaccgucuccaccaagcgcucccagcagaccgucauccccaacaucggcucccgcccccgcguccgcaacauccccucccgcaucuccaucuacuggaccaucgucaagcccggcgacauccuccucaucaacuccaccggcaaccucaucgccccccgcggcuacuucaagauccgcuccggcaaguccuccaucaugcgcuccgacgcccccaucggcaagugcaacuccgagugcaucacccccaacggcuccauccccaacgacaagcccuuccagaacgucaaccgcaucaccuacggcgccugcccccgcuacgucaagcagaacacccucaagcucgccaccggcaugcgcaacguccccgagaagcagacccgcggcaucuucggcgccaucgccggcuucaucgagaacggcugggagggcauggucgacggcugguacggcuuccgccaccagaacuccgagggcaucggccaggccgccgaccucaaguccacccaggccgccaucaaccagaucaacggcaagcucaaccgccucaucggcaagaccaacgagaaguuccaccagaucgagaaggaguucuccgaggucgagggccgcauccaggaccucgagaaguacgucgaggacaccaagaucgaccucugguccuacaacgccgagcuccucgucgcccucgagaaccagcacaccaucgaccucaccgacuccgagaugaacaagcucuucgagcgcaccaagaagcagcuccgcgagaacgccgaggacaugggcaacggcugcuucaagaucuaccacaagugcgacaacgccugcaucggcuccauccgcaacggcaccuacgaccacgacgucuaccgcgacgaggcccucaacaaccgcuuccagaucaagggcgucgagcucaaguccggcuacaaggacuggguccucuggaucuccuucgccaucuccugcuuccuccucugcgucguccuccucggcuucaucaugugggccugccagaagggcaacauccgcugcaacaucugcaucuga

SEQ ID NO: 102783 - RNA, 1701 nt, Artificial Sequence
  derived and/or modified CDS sequence (opt2) from hemagglutinin__InfluenzaA__AEG65076
augaagaccaucaucgcccucuccuacauccucugccucgucuucgcccagaagcuccccggcaacgacaacuccaccgccacccucugccucggccaccacgccguccccaacggcaccaucgucaagaccaucaccaacgaccagaucgaggucaccaacgccaccgagcucguccaguccuccuccaccggcggcaucugcgacuccccccaccagauccucgacggcgagaacugcacccucaucgacgcccuccucggcgacccccagugcgacggcuuccagaacaagaagugggaccucuucgucgagcgcuccaaggccuacuccaacugcuaccccuacgacguccccgacuacgccucccuccgcucccucgucgccuccuccggcacccucgaguucaacaacgaguccuucaacuggaccggcgucacccagaacggcaccuccuccgccugcaagcgccgcuccaacaacuccuucuucucccgccucaacuggcucacccaccuccgcuucaaguaccccgcccucaacgucaccaugcccaacaacgagaaguucgacaagcucuacaucuggggcguccaccaccccggcaccgacaacgaccagaucuuccucuacgcccaggccuccggccgcaucaccgucuccaccaagcgcucccagcagaccgucauccccaacgucggcucccgcccccgcguccgcaacauccccucccgcaucuccaucuacuggaccaucgucaagcccggcgacauccuccucaucaacuccaccggcaaccucaucgccccccgcggcuacuucaagauccgcuccggcaaguccuccaucaugcgcuccgacgcccccaucggcaagugcaacuccgagugcaucacccccaacggcuccauccccaacgacaagcccuuccagaacgucaaccgcaucaccuacggcgccugcccccgcuacgucaagcagaacacccucaagcucgccaccggcaugcgcaacguccccgagaagcagacccgcggcaucuucggcgccaucgccggcuucaucgagaacggcugggagggcauggucgacggcugguacggcuuccgccaccagaacuccgagggcaccggccaggccgccgaccucaaguccacccaggccgccaucaaccagaucaacggcaagcucaaccgccucaucggcaagaccaacgagaaguuccaccagaucgagaaggaguucuccgaggucgagggccgcauccaggaccucgagaaguacgucgaggacaccaagaucgaccucugguccuacaacgccgagcuccucgucgcccucgagaaccagcacaccaucgaccucaccgacuccgagaugaacaagcucuucgagcgcaccaagaagcagcuccgcgagaacgccgaggacaugggcaacggcugcuucaagaucuaccacaagugcgacaacgccugcaucggcuccauccgcaacggcaccuacgaccacgacgucuaccgcgacgaggcccucaacaaccgcuuccagaucaagggcgucgagcucaaguccggcuacaaggacuggauccucuggaucuccuucgccaucuccugcuuccuccucugcgucgcccuccucggcuucaucaugugggccugccagaagggcaacauccgcugcaacaucugcaucuga

SEQ ID NO: 102784 - RNA, 1701 nt, Artificial Sequence
  derived and/or modified CDS sequence (opt2) from hemagglutinin__InfluenzaA__AEG65087
augaagaccaucaucgcccucuccuacauccucugccucgucuucgcccagaagcuccccggcaacgacaacuccaccgccacccucugccucggccaccacgccguccccaacggcaccaucgucaagaccaucaccaacgaccagaucgaggucaccaacgccaccgagcucguccaguccuccuccaccggcggcaucugcgacuccccccaccagauccucgacggcgagaacugcacccucaucgacgcccuccucggcgacccccagugcgacggcuuccagaacaagaagugggaccucuucgucgagcgcuccaaggccuacuccaacugcuaccccuacgacguccccgacuacgccucccuccgcucccucgucgccuccuccggcacccucgaguucaacaacgaguccuucaacuggaccggcgucacccagaacggcaccuccuccgccugcaagcgccgcuccaacaacuccuucuucucccgccucaacuggcucacccaccucaaguucaaguaccccgcccucaacgucaccaugcccaacaacgagaaguucgacaagcucuacaucuggggcguccaccaccccggcaccaacaacgaccagaucuuccucuacgcccaggccuccggccgcaucaccgucuccaccaagcgcucccagcagaccgucauccccaacaucggcucccgcccccgcguccgcaacauccccucccgcaucuccaucuacuggaccaucgucaagcccggcgacauccuccucaucaacuccaccggcaaccucaucgccccccgcggcuacuucaagauccgcuccggcaaguccuccaucaugcgcuccgacgcccccaucggcaagugcaacuccgagugcaucacccccaacggcuccauccccaacgacaagcccuuccagaacgucaaccgcaucaccuacggcgccugcccccgcuacgucaagcagaacacccucaagcucgccaccggcaugcgcaacguccccgagaagcagacccgcggcaucuucggcgccaucgccggcuucaucgagaacggcugggagggcauggucgacggcugguacggcuuccgccaccagaacuccgagggcaucggccaggccgccgaccucaaguccacccaggccgccaucaaccagaucaacggcaagcucaaccgccucaucggcaagaccaacgagaaguuccaccagaucgagaaggaguucuccgaggucgagggccgcauccaggaccucgagaaguacgucgaggacaccaagaucgaccucugguccuacaacgccgagcuccucgucgcccucgagaaccagcacaccaucgaccucaccgacuccgagaugaacaagcucuucgagcgcaccaagaagcagcuccgcgagaacgccgaggacaugggcaacggcugcuucaagaucuaccacaagugcgacaacgccugcaucggcuccauccgcaacggcaccuacgaccacgacgucuaccgcgacgaggcccucaacaaccgcuuccagaucaagggcgucgagcucaaguccggcuacaaggacuggauccucuggaucuccuucgccaucuccugcuuccuccucugcgucgcccuccucggcuucaucaugugggccugccagaagggcaacauccgcugcaacaucugcaucuga

SEQ ID NO: 102785 - RNA, 1701 nt, Artificial Sequence
  derived and/or modified CDS sequence (opt2) from hemagglutinin__InfluenzaA__AEG65098
augaagaccaucaucgcccucuccuacauccucugccucgucuucgcccagaagcuccccggcaacgacaacuccaccgccacccucugccucggccaccacgccguccccaacggcaccaucgucaagaccaucaccaacgaccagaucgaggucaccaacgccaccgagcucguccaguccuccuccaccggcgagaucugcgacuccccccaccagauccucgacggcgagaacugcacccucaucgacgcccuccucggcgacccccagugcgacgacuuccagaacaagaagugggaccucuucgucgagcgcuccaaggccuacuccaacugcuaccccuacgacguccccgacuacgccucccuccgcucccucgucgccuccuccggcacccucgaguucaacaacgaguccuucaacuggaccggcgucacccagaacggcaccuccuccgccugcaagcgccgcuccaacaacuccuucuucucccgccucaacuggcucacccacuccaaguucaaguaccccgcccucaacgucaccaugcccaacaacgagaaguucgacaagcucuacaucuggggcguccaccaccccggcaccgacaacgaccagaucuuccucuacgcccaggccuccggccgcaucaccgucuccaccaagcgcucccagcagaccgucauccccaacaucggcucccgcccccgcguccgcaacauccccucccgcaucuccaucuacuggaccaucgucaagcccggcgacauccuccucaucaacuccaccggcaaccucaucgccccccgcggcuacuucaagauccgcuccggcaaguccuccaucaugcgcuccgacgcccccaucggcaagugcaacuccgagugcaucacccccaacggcuccauccccaacgacaagcccuuccagaacgucaaccgcaucaccuacggcgccugcccccgcuacgucaagcagaacacccucaagcucgccaccggcaugcgcaacguccccgagaagcagacccgcggcaucuucggcgccaucgccggcuucaucgagaacggcugggagggcauggucgacggcugguacggcuuccgccaccagaacuccgagggcaucggccaggccgccgaccucaaguccacccaggccgccaucaaccagaucaacggcaaccucaaccgccucaucggcaagaccaacgagaaguuccaccagaucgagaaggaguucuccgaggucgagggccgcauccaggaccucgagaaguacgucgaggacaccaagaucgaccucugguccuacaacgccgagcuccucgucgcccucgagaaccagcacaccaucgaccucaccgacuccgagaugaacaagcucuucgagcgcaccaagaagcagcuccgcgagaacgccgaggacaugggcaacggcugcuucaagaucuaccacaagugcgacaacgccugcaucggcuccauccgcaacggcaccuacgaccacgacgucuaccgcgacgaggcccucaacaaccgcuuccagaucaagggcgucgagcucaaguccggcuacaaggacuggauccucuggaucuccuucgccaucuccugcuuccuccucugcgucguccuccucggcuucaucaugugggccugccagaagggcaacauccgcugcaacaucugcaucuga

SEQ ID NO: 102786 - RNA, 1701 nt, Artificial Sequence
  derived and/or modified CDS sequence (opt2) from hemagglutinin__InfluenzaA__AEG65109
augaagaccaucaucgcccucuccuacauccucugccucgucuucgcccagaagcuccccggcaacgacaacuccaccgccacccucugccucggccaccacgccguccccaacggcaccaucgucaagaccaucaccaacgaccagaucgaggucaccaacgccaccgagcucguccaguccuccuccaccggcgagaucugcgacuccccccaccagauccucgacggcgagaacugcaagcucaucgacgcccuccucggcgacccccagugcgacggcuuccagaacaagaagugggaccucuucgucgagcgcuccaaggccuacuccaacugcuaccccuacgacguccccgacuacgccucccuccgcucccucgucgccuccuccggcacccucgaguucaacaacgaguccuucaacuggaccggcgucacccagaacggcaccuccuccgccugcaagcgccgcuccaacaacuccuucuucucccgccucaacuggcucacccaccucaaguucaaguaccccgcccucaacgucaccaugcccaacaacgagaaguucgacaagcucuacaucuggggcguccaccaccccggcaccgacaacgaccagaucuuccucuacgcccaguccuccggccgcaucaccgucuccaccaagcgcucccagcagaccgucauccccaacaucggcucccgcccccgcguccgcaacauccccucccgcaucuccaucuacuggaccaucgucaagcccggcgacauccuccucaucaacuccaccggcaaccucaucgccccccgcggcuacuucaagauccgcuccggcaaguccuccaucaugcgcuccgacgcccccaucggcaagugcaacuccgagugcaucacccccaacggcuccauccccaacgacaagcccuuccagaacgucaaccgcaucaccuacggcgccugcccccgcuacgucaagcagaacacccucaagcucgccaccggcaugcgcaacguccccgagaagcagacccgcggcaucuucggcgccaucgccggcuucaucgagaacggcugggagggcauggucgacggcugguacggcuuccgccaccagaacuccgagggcaucggccaggccgccgaccucaaguccacccaggccgccaucaaccagaucaacggcaagcucaaccgccucaucggcaagaccaacgagaaguuccaccagaucgagaaggaguucuccgaggucgagggccgcauccaggaccucgagaaguacgucgaggacaccaagaucgaccucugguccuacaacgccgagcuccucgucgcccucgagaaccagcacaccaucgaccucaccgacuccgagaugaacaagcucuucgagcgcaccaagaagcagcuccgcgagaacgccgaggacaugggcaacggcugcuucaagaucuaccacaagugcgacaacgccugcaucggcuccauccgcaacggcaccuacgaccacgacgucuaccgcgacgaggcccucaacaaccgcuuccagaucaagggcgucgagcucaaguccggcuacaaggacuggauccucuggaucuccuucgccaucuccugcuuccuccucugcgucgcccuccucggcuucaucaugugggccugccagaagggcaacauccgcugcaacaucugcaucuga

SEQ ID NO: 102787 - RNA, 1701 nt, Artificial Sequence
  derived and/or modified CDS sequence (opt2) from hemagglutinin__InfluenzaA__AEG65120
augaagaccaucaucgcccucuccuacauccucugccucgucuucgcccagaagcuccccggcaacgacaacuccaccgccacccucugccucggccaccacgccguccccaacggcaccaucgucaagaccaucaccaacgaccagaucgaggucaccaacgccaccgagcucguccaguccuccuccaccggcgagaucugcgacuccccccaccagauccucgacggcgagaacugcacccucaucgacgcccuccucggcgacccccagugcgacggcuuccagaacaagaagugggaccucuucgucgagcgcuccaaggccuacuccaacugcuaccccuacgacguccccgacuacgccucccuccgcucccucgucgccuccuccggcacccucgaguucaacaacgaguccuucaacuggaccggcgucacccagaacggcaccuccuccgccugcaagcgccgcuccaacaacuccuucuucucccgccucaacuggcucacccaccucaaguucaaguaccccgcccucaacgucaccaugcccaacaacgagaaguucgacaagcucuacaucuggggcguccaccaccccggcaccgacaacgaccagaucuuccucuacgcccaggccuccggccgcaucaccgucuccaccaagcgcucccagcagaccgucauccccaacaucggcucccgcccccgcguccgcaacauccccucccgcaucuccaucuacuggaccaucgucaagcccggcgacauccuccucaucaacuccaccggcaaccucaucgccccccgcggcuacuucaagauccgcuccggcaaguccuccaucaugcgcuccgacgcccccaucggcaagugcaacuccgagugcaucacccccaacggcuccauccccaacgacaagcccuuccagaacgucaaccgcaucgccuacggcgccugcccccgcuacgucaagcagaacacccucaagcucgccaccggcaugcgcaacguccccgagaagcagacccgcggcaucuucggcgccaucgccggcuucaucgagaacggcugggagggcauggucgacggcugguacggcuuccgccaccagaacuccgagggcaucggccaggccgccgaccucaaguccacccaggccgccaucaaccagaucaacggcaagcucaaccgccucaucggcaagaccaacgagaaguuccaccagaucgagaaggaguucuccgaggucgagggccgcauccaggaccucgagaaguacgucgaggacaccaagaucgaccucugguccuacaacgccgagcuccucgucgcccucgagaaccagcacaccaucgaccucaccgacuccgagaugaacaagcucuucgagcgcaccaagaagcagcuccgcgagaacgccgaggacaugggcaacggcugcuucaagaucuaccacaagugcgacaacgccugcaucggcuccauccgcaacggcaccuacgaccacgacgucuaccgcgacgaggcccucaacaaccgcuuccagaucaagggcgucgagcucaaguccggcuacaaggacuggauccucuggaucuccuucgccaucuccugcuuccuccucugcgucguccuccucggcuucaucaugugggccugccagaagggcaacauccgcugcaacaucugcaucuga

SEQ ID NO: 102788 - RNA, 1701 nt, Artificial Sequence
  derived and/or modified CDS sequence (opt2) from hemagglutinin__InfluenzaA__AEG65131
augaagaccaucaucgcccucuccuacauccucugccucgucuucgcccagaagcuccccggcaacgacaacuccaccgccacccucugccucggccaccacgccguccccaacggcaccaucgucaagaccaucaccaacgaccagaucgaggucaccaacgccaccgagcucguccaguccuccuccaccggcgagaucugcgacuccccccaccagauccucgacggcgagaacugcacccucaucgacgcccuccucggcgacccccagugcgacggcuuccagaacaagaagugggaccucuucgucgagcgcuccaaggccuacuccaacugcuaccccuacgacguccccgacuacgccucccuccgcucccucgucgccuccuccggcacccucgaguucaacaacgaguccuucaacuggaccggcgucacccagaacggcaccuccuccgccugcaagcgccgcuccaacaacuccuucuucucccgccucaacuggcucacccacuccaaguucaaguaccccgcccucaacgucaccaugcccaacaacgagaaguucgacaagcucuacaucuggggcguccaccaccccggcaccgacaacgaccagaucuuccucuacgcccaggccuccggccgcaucaccgucuccaccaagcgcucccagcagaccgucauccccaacaucggcucccgcccccgcguccgcaacauccccucccgcaucuccaucuacuggaccaucgucaagcccggcgacauccuccucaucaacuccaccggcaaccucaucgccccccgcggcuacuucaagauccgcuccggcaaguccuccaucaugcgcuccgacgcccccaucggcaagugcaacuccgagugcaucacccccaacggcuccauccccaacgacaagcccuuccagaacgucaaccgcaucaccuacggcgccugcccccgcuacgucaagcagaacacccucaagcucgccaccggcaugcgcaacguccccgagaagcagacccgcggcaucuucggcgccaucgccggcuucaucgagaacggcugggagggcauggucgacggcugguacggcuuccgccaccagaacuccgagggcaucggccaggccgccgaccucaaguccacccaggccgccaucaaccagaucaacggcaagcucaaccgccucaucggcaagaccaacgagaaguuccaccagaucgagaaggaguucuccgaggucgagggccgcauccaggaccucgagaaguacgucgaggacaccaagaucgaccucugguccuacaacgccgagcuccucgucgcccucgagaaccagcacaccaucgaccucaccgacuccgagaugaacaagcucuucgagcgcaccaagaagcagcuccgcgagaacgccgaggacaugggcaacggcugcuucaagaucuaccacaagugcgacaacgccugcaucggcuccauccgcaacggcaccuacgaccacgacgucuaccgcgacgaggcccucaacaaccgcuuccagaucaagggcgucgagcucaaguccggcuacaaggacuggauccucuggaucuccuucgccaucuccugcuuccuccucugcgucguccuccucggcuucaucaugugggccugccagaagggcaacauccgcugcaacaucugcaucuga

SEQ ID NO: 102789 - RNA, 1701 nt, Artificial Sequence; identical to SEQ ID NO: 96087
  derived and/or modified CDS sequence (opt2) from hemagglutinin__InfluenzaA__AEG65142

SEQ ID NO: 102790 - RNA, 1701 nt, Artificial Sequence; identical to SEQ ID NO: 96087
  derived and/or modified CDS sequence (opt2) from hemagglutinin__InfluenzaA__AEG65153

SEQ ID NO: 102791 - RNA, 1701 nt, Artificial Sequence
  derived and/or modified CDS sequence (opt2) from hemagglutinin__InfluenzaA__AEG65164
augaagaccaucaucgcccucuccuacauccucugccucgucuucgcccagaagcuccccggcaacgacaacuccaccgccacccucugccucggccaccacgccguccccaacggcacccucgucaagaccaucaccaacgaccagaucgaggucaccaacgccaccgagcucguccaguccuccuccaccggccgcaucugcgacuccccccaccagauccucgacggcgagaacugcacccucaucgacgcccuccucggcgacccccacugcgacggcuuccagaacaaggagugggaccucuucgucgagcgcuccaaggccuacuccaacugcuaccccuacgacguccccgacuacgucucccuccgcucccucgucgccuccuccggcacccucgaguucaacaacgaguccuucaacuggaccggcgucgcccagaacggcaccuccuccgccugcaagcgccgcuccgacaaguccuucuucucccgccucaacuggcuccaccagcucaaguacaaguaccccgcccucaacgucaccaugcccaacaacgagaaguucgacaagcucuacaucuggggcguccaccaccccggcaccgacuccgaccagaucucccucuacgcccaggccuccggccgcgucaccgucuccaccaagcgcucccagcagaccgucauccccaacaucggcucccgccccuggguccgcggcgucuccucccgcaucuccaucuacuggaccaucgucaagcccggcgacauccuccucaucaacuccaccggcaaccucaucgccccccgcggcuacuucaagauccgcuccggcaaguccuccaucaugcgcuccgacgcccccaucggcaagugcaacuccgagugcaucacccccaacggcuccauccccaacgacaagcccuuccagaacgucaaccgcaucaccuacggccccugcccccgcuacgucaagcagaacacccucaagcucgccaccggcaugcgcaacguccccgagaagcagacccgcggcaucuucggcgccaucgccggcuucaucgagaacggcugggagggcaugauggacggcugguacggcuuccgccaccagaacuccgagggcaccggccaggccgccgaccucaaguccacccaggccgccaucaaccagaucaacggcaagcucaaccgccucaucgagaagaccaacgagaaguuccaccagaucgagaaggaguucuccgaggucgagggccgcauccaggaccucgagaaguacgucgaggacaccaagaucgaccucugguccuacaacgccgaguuccucgucgcccucgagaaccagcacaccaucgaccucaccgacuccgagaugaacaagcucuucgagcgcaccaagaagcagcuccgcgagaacgccgaggacaugggcaacggcugcuucaagaucuaccacaagugcgacaacgccugcaucggcuccauccgcaacggcaccuacgaccacgacgucuaccgcgacgaggcccucaacaaccgcuuccagaucaagggcgucgagcucaaguccggcuacaaggacuggauccucuggaucuccuucgccaucuccugcuuccuccucugcaucguccuccucggcuucaucaugugggccugccagaagggcaacauccgcugcaacaucugcaucuga

SEQ ID NO: 102792 - RNA, 1701 nt, Artificial Sequence
  derived and/or modified CDS sequence (opt2) from hemagglutinin__InfluenzaA__AEG65175
augaagaccaucaucgcccucuccuacauccucugccucgucuucgcccagaagcuccccggcaacgacaacuccaccgccacccucugccucggccaccacgccguccccaacggcaccaucgucaagaccaucaccaacgaccagaucgaggucaccaacgccaccgagcucguccaguccuccuccaccggcggcaucugcgacuccccccaccagauccucgacggcgagaacugcacccucaucgacgcccuccucggcgacccccagugcgacggcuuccagaacaagaagugggaccucuucgucgagcgcuccaaggccuacuccaacugcuaccccuacgacguccccgacuacgccucccuccgcucccucgucgccuccuccggcacccucgaguucaacaacgaguccuucaacuggaccggcgucacccagaacggcaccuccuccgccugcgagcgccgcuccaacaaguccuucuucucccgccucaacuggcucacccaccucaaguacaaguaccccgcccucaacgucaccaugcccaacaacgagaaguucgacaagcucuacaucuggggcguccaccaccccggcaccgacuccgaccagaucucccucuacgcccaggccuccggccgcaucaccgucuccaccaagcgcucccagcagaccgucauccccaacaucggcucccgcccccgcguccgcgacgucuccucccgcaucuccaucuacuggaccaucgucaagcccggcgacauccuccucaucaacuccaccggcaaccucaucgccccccgcggcuacuucaagauccgcaacggcaaguccuccaucaugcgcuccgacgcccccaucggcaagugcaacuccgagugcaucacccccaacggcuccauccccaacgacaagcccuuccagaacgucaaccgcaucaccuacggcgccugcccccgcuacgucaagcagaacacccucaagcucgccaccggcaugcgcaacguccccgagaagcagacccgcggcaucuucggcgccaucgccggcuucaucgagaacggcugggagggcauggucgacggcugguacggcuuccgccaccagaacuccgagggcaccggccaggccgccgaccucaaguccacccaggccgccaucaaccagaucaacggcaagcucaaccgccucaucggcaagaccaacgagaaguuccaccagaucgagaaggaguucuccgaggucgagggccgcauccaggaccucgagaaguacgucgaggacaccaagaucgaccucugguccuacaacgccgagcuccucgucgcccucgagaaccagcacaccaucgaccucaccgacuccgagaugaacaagcucuucgagcgcaccaagaagcagcuccgcgagaacgccgaggacaugggcaacggcugcuucaagaucuaccacaagugcgacaacgccugcaucggcuccauccgcaacggcaccuacgaccacgacgucuaccgcgacgaggcccucaacaaccgcuuccagaucaagggcgucgagcucaaguccggcuacaaggacuggauccucuggaucuccuucgccaucuccugcuuccuccucugcgucgcccuccucggcuucaucaugugggccugccagaagggcaacauccgcugcgacaucugcaucuga

SEQ ID NO: 102793 - RNA, 1701 nt, Artificial Sequence; identical to SEQ ID NO: 96455
  derived and/or modified CDS sequence (opt2) from hemagglutinin__InfluenzaA__AEG65186

SEQ ID NO: 102794 - RNA, 1701 nt, Artificial Sequence
  derived and/or modified CDS sequence (opt2) from hemagglutinin__InfluenzaA__AEG65197
augaagaccaucaucgcccucuccuacauccucugccucgucuucgcccagaagcuccccggcaacgacaacuccaccgccacccucugccucggccaccacgccguccccaacggcaccaucgucaagaccaucaccaacgaccagaucgaggucaccaacgccaccgagcucguccaguccucccccaccggcggcaucugcgacuccccccaccagauccucgacggcgagaacugcacccucaucgacgcccuccucggcgacccccagugcgacggcuuccagaacaagaagugggaccucuucgucgagcgcuccaaggccuacuccaacugcuaccccuacgacguccccgacuacgccucccuccgcucccucgucgccuccuccggcacccucgaguucaacaacgaguccuucaacuggaccggcgucacccagaacggcaccuccuccgccugcaagcgccgcuccaacaacuccuucuucucccgccucaacuggcucacccaccucaaguucaaguaccccgcccucaacgucaccaugcccaacaacgagaaguucgacaagcucuacaucuggggcguccaccaccccggcaccgacaacgaccagaucucccucuacgcccaggccuccggccgcaucaccgucuccaccaagcgcucccagcagaccgucauccccaacaucggcucccgcccccgcguccgcgacauccccucccgcaucuccaucuacuggaccaucgucaagcccggcgacaucauccucaucaacuccaccggcaaccucaucgccccccgcggcuacuucaagauccgcuccggcaaguccuccaucaugcgcuccgacacccccaucggcaagugcaacuccgagugcaucacccccaacggcuccauccccaacgacaagcccuuccagaacgucaaccgcaucaccuacggcgccugcccccgcuacgucaagcagaacacccucaagcucgccaccggcaugcgcaacguccccgagaagcagacccgcggcaucuucggcgccaucgccggcuucaucgagaacggcugggagggcauggucgacggcugguacggcuuccgccaccagaacuccgagggcaucggccaggccgccgaccucaaguccacccaggccgccaucaaccagaucaacggcaagcucaaccgccucaucggcaagaccaacgagaaguuccaccagaucgagaaggaguucuccgaggucgagggccgcauccaggaccucgagaaguacgucgaggacaccaagaucgaccucugguccuacaacgccgagcuccucgucgcccucgagaaccagcacaccaucgaccucaccgacuccgagaugaacaagcucuucgagcgcaccaagaagcagcuccgcgagaacgccgaggacaugggcaacggcugcuucaagaucuaccacaagugcgacaacgccugcaucggcuccauccgcaacggcaccuacgaccacgacgucuaccgcgacgaggcccucaacaaccgcuuccagaucaagggcgucgagcucaaguccggcuacaaggacuggauccucuggaucuccuucgccaucuccugcuuccuccucugcgucgcccuccucggcuucaucaugugggccugccagaagggcaacauccgcugcaacaucugcaucuga

SEQ ID NO: 102795 - RNA, 1701 nt, Artificial Sequence; identical to SEQ ID NO: 96666
  derived and/or modified CDS sequence (opt2) from hemagglutinin__InfluenzaA__AEG65208

SEQ ID NO: 102796 - RNA, 1701 nt, Artificial Sequence
  derived and/or modified CDS sequence (opt2) from hemagglutinin__InfluenzaA__AEG65219
augaagaccaucaucgcccucuccuacauccucugccucgucuucgcccagaagcuccccggcaacgacaacuccaccgccacccucugccucggccaccacgccguccccaacggcaccaucgucaagaccaucaccaacgaccagaucgaggucaccaacgccaccgagcucguccaguccuccuccaccggcggcaucugcgacuccccccaccagauccucgacggcgagaacugcacccucaucgacgcccuccucggcgacccccagugcgacggcuuccagaacaagaagugggaccucuucgucgagcgcuccaaggccuacuccaacugcuaccccuacgacguccccgacuacgccucccuccgcucccucgucgccuccuccggcacccucgaguucaacaacgaguccuucaacuggaccggcgucacccagaacggcaccuccuccgccugcaagcgccgcuccaacaaguccuucuucucccgccucaacuggcucacccaccucaaguucaaguaccccgcccucaacgucaccaugcccaacaacgagaaguucgacaagcucuacaucuggggcguccaccaccccggcaccgacaacgaccagaucucccucuacgcccaggccuccggccgcaucaccgucuccaccaagcgcucccagcagaccgucauccccaacaucggcucccgcccccgcguccgcgacguccccucccgcaucuccaucuacuggaccaucgucaagcccggcgacauccuccucaucaacuccaccggcaaccucaucgccccccgcggcuacuucaagauccgcuccggcaaguccuccaucaugcgcuccgacgcccccaucggcaagugcaacuccgagugcaucacccccaacggcuccauccccaacgacaagcccuuccagaacgucaaccgcaucaccuacggcgccugcccccgcuacgucaagcagaacacccucaagcucgccaccggcaugcgcaacguccccgagaagcagacccgcggcaucuucggcgccaucgccggcuucaucgagaacggcugggagggcauggucgacggcugguacggcuuccgccaccagaacuccgagggcaccggccaggccgccgaccucaaguccacccaggccgccaucaaccagaucaacggcaagcucaaccgccucaucggcaagaccaacgagaaguuccaccagaucgagaaggaguucuccgaggucgagggccgcauccaggaccucgagaaguacgucgaggacaccaagaucgaccucugguccuacaacgccgagcuccucgucgcccucgagaaccagcacaccaucgaccucaccgacuccgagaugaacaagcucuucgagcgcaccaagaagcagcuccgcgagaacgccgaggacaugggcaacggcugcuucaagaucuaccacaagugcgacaacgccugcaucggcuccauccgcaacggcaccuacgaccacgacgucuaccgcgacgaggcccucaacaaccgcuuccagaucaagggcgucgagcucaaguccggcuacaaggacuggauccucuggaucuccuucgccaucuccugcuuccuccucugcgucgcccuccucggcuucaucaugugggccugccagaagggcaacaucaagugcaacaucugcaucuga

SEQ ID NO: 102797 - RNA, 1701 nt, Artificial Sequence; identical to SEQ ID NO: 97831
  derived and/or modified CDS sequence (opt2) from hemagglutinin__InfluenzaA__AEG65230

SEQ ID NO: 102798 - RNA, 1701 nt, Artificial Sequence; identical to SEQ ID NO: 97831
  derived and/or modified CDS sequence (opt2) from hemagglutinin__InfluenzaA__AEG65252

SEQ ID NO: 102799 - RNA, 1701 nt, Artificial Sequence; identical to SEQ ID NO: 96552
  derived and/or modified CDS sequence (opt2) from hemagglutinin__InfluenzaA__AEG65263

SEQ ID NO: 102800 - RNA, 1701 nt, Artificial Sequence; identical to SEQ ID NO: 96552
  derived and/or modified CDS sequence (opt2) from hemagglutinin__InfluenzaA__AEG65274

SEQ ID NO: 102801 - RNA, 1701 nt, Artificial Sequence; identical to SEQ ID NO: 96552
  derived and/or modified CDS sequence (opt2) from hemagglutinin__InfluenzaA__AEG65285

SEQ ID NO: 102802 - RNA, 1701 nt, Artificial Sequence
  derived and/or modified CDS sequence (opt2) from hemagglutinin__InfluenzaA__AEG65296
augaagaccgucaucgcccucuccuacauccucugccucgucuucgcccagaagcuccccggcaacgacaacuccaccgccacccucugccucggccaccacgccguccccaacggcaccaucgucaagaccaucaccaacgaccagaucgaggucaccaacgccaccgagcucguccaguccuccuccaccggcggcaucugcgacuccccccaccagauccucgacggcgagaacugcacccucaucgacgcccuccucggcgacccccagugcgacggcuuccagaacaagaagugggaccucuucgucgagcgcuccaaggccuacuccaacugcuaccccuacgacguccccgaccacgccucccuccgcucccucgucgccuccuccggcacccucgaguucaacaacgaguccuucgacuggaccggcgucacccagaacggcaccuccuccgccugcaagcgccgcuccaacaaguccuucuucucccgccucaacuggcucacccaccucaaguacaaguaccccgcccucaacgucaccaugcccaacaacgagaaguucgacaagcucuacaucuggggcguccaccaccccggcaccgacuccgaccagaucucccucuacgcccaggccuccggccgcaucaccgucuccaccaagcgcucccagcagaccgucauccccaacaucggcucccgcccccgcguccgcgacgucuccucccgcaucuccaucuacuggaccaucgucaagcccggcgacauccuccucaucaacuccaccggcaaccucaucgccccccgcggcuacuucaagauccgcuccggcaaguccuccaucaugcgcuccgacgcccccaucggcaagugcaacuccgagugcaucacccccaacggcuccauccccaacgacaagcccuuccagaacgucaaccgcaucaccuacggcgccugcccccgcuacgucaagcagaacacccucaagcucgccaccggcaugcgcaacguccccgagaagcagacccgcggcaucuucggcgccaucgccggcuucaucgagaacggcugggagggcauggucgacggcugguacggcuuccgccaccagaacuccgagggcaccggccaggccgccgaccucaaguccacccaggccgccaucaaccagaucaacggcaagcucaaccgccucaucggcaagaccaacgagaaguuccaccagaucgagaaggaguucuccgaggucgagggccgcauccaggaccucgagaaguacgucgaggacaccaagaucgaccucugguccuacaacgccgagcuccucgucgcccucgagaaccagcacaccaucgaccucaccgacuccgagaugaacaagcucuucgagcgcaccaagaagcagcuccgcgagaacgccgaggacaugggcaacggcugcuucaagaucuaccacaagugcgacaacgccugcaucggcuccauccgcaacggcaccuacgaccacgacgucuaccgcgacgaggcccucaacaaccgcuuccagaucaagggcgucgagcucaaguccggcuacaaggacuggauccucuggaucuccuucgccaucuccugcuuccuccucugcgucgcccuccucggcuucaucaugugggccugccagaagggcaacauccgcugcaacaucugcaucuga

SEQ ID NO: 102803 - RNA, 1701 nt, Artificial Sequence; identical to SEQ ID NO: 97831
  derived and/or modified CDS sequence (opt2) from hemagglutinin__InfluenzaA__AEG65307

SEQ ID NO: 102804 - RNA, 1701 nt, Artificial Sequence
  derived and/or modified CDS sequence (opt2) from hemagglutinin__InfluenzaA__AEG65318
augaagaccaucaucgcccucuccuacauccucugccucgucuucgcccagaagcuccccggcaacgacaacuccaccgccacccucugccucggccaccacgccguccccaacggcaccaucgucaagaccaucaccaacgaccagaucgaggucaccaacgccaccgagcucguccaguccuccuccaccggcggcaucugcgacuccccccaccagauccucgacggcgagaacugcacccucaucgacgcccuccucggcgacccccagugcgacggcuuccagaacaagaagugggaccucuucgucgagcgcuccaaggccuacuccaacugcuaccccuacgacguccccgacuacgccucccuccgcucccucgucgccuccuccggcacccucgaguucaacaacgaguccuucaacuggaccggcgucacccagaacggcaccuccuccgccugcaagcgccgcuccaacaaguccuucuucucccgccucaacuggcucacccaccucaaguucaaguaccccgcccucaacgucaccaugcccaacaacgagaaguucgacaagcucuacaucuggggcguccaccaccccggcaccgacaacgaccagaucucccucuacgcccaggccuccggccgcaucaccgucuccaccaagcgcucccagcagaccgucauccccaacaucggcucccgcccccgcguccgcgacguccccucccgcaucuccaucuacuggaccaucgucaagcccggcgacauccuccucaucaacuccaccggcaaccucaucgccccccgcggcuacuucaagauccgcuccggcaaguccuccaucaugcgcuccgacgcccccaucggcaagugcaacuccgagugcaucacccccaacggcuccauccccaacgacaagcccuuccagaacgucaaccgcaucaccuacggcgccugcccccgcuacguccgccagaacacccucaagcucgccaccggcaugcgcaacguccccgagaagcagacccgcggcaucuucggcgccaucgccggcuucaucgagaacggcugggagggcauggucgacggcugguacggcuuccgccaccagaacuccgagggcaccggccaggccgccgaccucaaguccacccaggccgccaucaaccagaucaacggcaagcucaaccgccucaucggcaagaccaacgagaaguuccaccagaucgagaaggaguucuccgaggucgagggccgcauccaggaccucgagaaguacgucgaggacaccaagaucgaccucugguccuacaacgccgagcuccucgucgcccucgagaaccagcacaccaucgaccucaccgacuccgagaugaacaagcucuucgagcgcaccaagaagcagcuccgcgagaacgccgaggacaugggcaacggcugcuucaagaucuaccacaagugcgacaacgccugcaucggcuccauccgcaacggcaccuacgaccacgacgucuaccgcgacgaggcccucaacaaccgcuuccagaucaagggcgucgagcucaaguccggcuacaaggacuggauccucuggaucuccuucgccaucuccugcuuccuccucugcgucgcccuccucggcuucaucaugugggccugccagaagggcaacauccgcugcaacaucugcaucuga

SEQ ID NO: 102805 - RNA, 1701 nt, Artificial Sequence; identical to SEQ ID NO: 97831
  derived and/or modified CDS sequence (opt2) from hemagglutinin__InfluenzaA__AEG65329

SEQ ID NO: 102806 - RNA, 1701 nt, Artificial Sequence
  derived and/or modified CDS sequence (opt2) from hemagglutinin__InfluenzaA__AEG65340
augaagaccaucaucgcccucuccuacauccucugccucgucuucgcccagaagcuccccggcaacgacaacuccaccgccacccucugccucggccaccacgccguccccaacggcaccaucgucaagaccaucaccaacgaccagaucgaggucaccaacgccaccgagcucguccaguccuccuccaccggcggcaucugcgacuccccccaccagauccucgacggcgagaacugcacccucaucgacgcccuccucggcgacccccagugcgacggcuuccagaacaagaagugggaccucuucgucgagcgcuccaaggccuacuccaacugcuaccccuacgacguccccgacuacgccucccuccgcucccucgucgccuccuccggcacccucgaguucaacaacgaguccuucaacuggaccggcgucacccagaacggcaccuccuccgccugcgagcgccgcuccaacaaguccuucuucucccgccucaacuggcucacccaccucaaguacaaguaccccgcccucaacgucaccaugcccaacaacgagaaguucgacaagcucuacaucuggggcguccaccaccccggcaccgacuccgaccagaucucccucuacgcccaggccuccggccgcaucaccgucuccaccaagcgcucccagcagaccgucauccccaacaucggcucccgcccccgcguccgcgacgucuccucccgcaucuccaucuacuggaccaucgucaagcccggcgacauccuccucaucaacuccaccggcaaccucaucgccccccgcggcuacuucaagauccgcuccggcaaguccuccaucaugcgcuccgacgcccccaucggcaagugcaacuccgagugcaucacccccaacggcuccauccccaacgacaagcccuuccagaacgucaaccgcaucaccuacggcgccugcccccgcuacgucaagcagaacacccucaagcucgccaccggcaugcgcaacguccccgagaagcagacccgcggcaucuucggcgccaucgccggcuucaucgagaacggcugggagggcauggucgacggcugguacggcuuccgccaccagaacuccgagggcaccggccaggccgccgaccucaaguccacccaggccgccaucaaccagaucaacggcaagcucaaccgccucaucggcaagaccaacgagaaguuccaccagaucgagaaggaguucuccgaggucgagggccgcauccaggaccucgagaaguacgucgaggacaccaagaucgaccucugguccuacaacgccgagcuccucgucgcccucgagaaccagcacaccaucgaccucaccgacuccgagaugaacaagcucuucgagcgcaccaagaagcagcuccgcgagaacgccgaggacaugggcaacggcugcuucaagaucuaccacaagugcgacaacgccugcaucgaguccauccgcaacggcaccuacgaccacgacgucuaccgcgacgaggcccucaacaaccgcuuccagaucaagggcgucgagcucaaguccggcuacaaggacuggauccucuggaucuccuucgccaucuccugcuuccuccucugcgucgcccuccucggcuucaucaugugggccugccagaagggcaacauccgcugcaacaucugcaucuga

SEQ ID NO: 102807 - RNA, 1701 nt, Artificial Sequence; identical to SEQ ID NO: 97831
  derived and/or modified CDS sequence (opt2) from hemagglutinin__InfluenzaA__AEG65351

SEQ ID NO: 102808 - RNA, 1701 nt, Artificial Sequence; identical to SEQ ID NO: 97831
  derived and/or modified CDS sequence (opt2) from hemagglutinin__InfluenzaA__AEG65362

SEQ ID NO: 102809 - RNA, 1701 nt, Artificial Sequence; identical to SEQ ID NO: 102806
  derived and/or modified CDS sequence (opt2) from hemagglutinin__InfluenzaA__AEG65373

SEQ ID NO: 102810 - RNA, 1701 nt, Artificial Sequence; identical to SEQ ID NO: 96552
  derived and/or modified CDS sequence (opt2) from hemagglutinin__InfluenzaA__AEG65384

SEQ ID NO: 102811 - RNA, 1701 nt, Artificial Sequence; identical to SEQ ID NO: 96552
  derived and/or modified CDS sequence (opt2) from hemagglutinin__InfluenzaA__AEG65406

SEQ ID NO: 102812 - RNA, 1701 nt, Artificial Sequence; identical to SEQ ID NO: 96552
  derived and/or modified CDS sequence (opt2) from hemagglutinin__InfluenzaA__AEG65417

SEQ ID NO: 102813 - RNA, 1701 nt, Artificial Sequence; identical to SEQ ID NO: 96552
  derived and/or modified CDS sequence (opt2) from hemagglutinin__InfluenzaA__AEG65428

SEQ ID NO: 102814 - RNA, 1701 nt, Artificial Sequence
  derived and/or modified CDS sequence (opt2) from hemagglutinin__InfluenzaA__AEG65439
augaagaccaucaucgcccucuccuacauccucugccucgucuucgcccagaagcuccccggcaacgacaacuccaccgccacccucugccucggccaccacgccguccccaacggcaccaucgucaagaccaucaccaacgaccagaucgaggucaccaacgccaccgagcucguccaguccuccuccaccggcggcaucugcgacuccccccaccagauccucgacggcgagaacugcacccucaucgacgcccuccucggcgacccccagugcgacggcuuccagaacaagaagugggaccucuucgucgagcgcuccaaggccuacuccaacugcuaccccuacgacguccccgacuacgccucccuccgcucccucgucgccuccuccggcacccucgaguucaacaacgaguccuucaacuggaccggcgucacccagaacggcaccuccuccgccugcaagcgccgcuccaacaacuccuucuucucccgccucaacuggcucacccaccucaaguucaaguaccccgcccucaacgucaccaugcccaacaacgagaaguucgacaagcucuacaucuggggcguccaccaccccggcaccgacaacgaccagaucuuccucuacgcccaggccuccggccgcaucaccgucuccaccaagcgcucccagcagaccgucauccccaacaucggcucccgcccccgcguccgcaacauccccucccgcaucuccaucuacuggaccaucgucaagcccggcgacauccuccucaucaacuccaccggcaaccucaucgccccccgcggcuacuucaagauccgcuccggcaaguccuccaucaugcgcuccgacgcccccaucggcaagugcaacuccgagugcaucacccccaacggcuccauccccaacgacaagcccuuccagaacgucaaccgcaucaccuacggcgccugcccccgcuacgucaagcagaacacccucaagcucgccaccggcaugcgcaacguccccgagaagcagacccgcggcaucuucggcgccaucgccggcuucaucgagaacggcugggagggcauggucgacggcugguacggcuuccgccaccagaacuccgagggcgucggccaggccgccgaccucaaguccacccaggccgccaucaaccagaucaacggcaagcucaaccgccucaucggcaagaccaacgagaaguuccaccagaucgagaaggaguucuccgaggucgagggccgcauccaggaccucgagaaguacgucgaggacaccaagaucgaccucugguccuacaacgccgagcuccucgucgcccucgagaaccagcacaccaucgaccucaccgacuccgagaugaacaagcucuucgagcgcaccaagaagcagcuccgcgagaacgccgaggacaugggcaacggcugcuucaagaucuaccacaagugcgacaacgccugcaucggcuccauccgcaacggcaccuacgaccacgacgucuaccgcgacgaggcccucaacaaccgcuuccagaucaagggcgucgagcucaaguccggcuacaaggacuggauccucuggaucuccuucgccaucuccugcuuccuccucugcgucgcccuccucggcuucaucaugugggccugccagaagggcaacauccgcugcaacaucugcaucuga

SEQ ID NO: 102815 - RNA, 1701 nt, Artificial Sequence
  derived and/or modified CDS sequence (opt2) from hemagglutinin__InfluenzaA__AEG65450
augaagaccaucaucgccugguccuacauccucugccucgucuucgcccagaagcuccccggcaacgacaacuccaccgccacccucugccucggccaccacgccguccccaacggcaccaucgucaagaccaucaccaacgaccagaucgaggucaccaacgccaccgagcucguccaguccuccuccaccggcggcaucugcgacuccccccaccagauccucgacggcgagaacugcacccucaucgacgcccuccucggcgacccccagugcgacggcuuccagaacaagaagugggaccucuucgucgagcgcuccaaggccuacuccaacugcuaccccuacgacguccccgacuacgccucccuccgcucccucaucgccuccuccggcacccucgaguucaacaacgaguccuucaacuggaccggcgucacccagaacggcaccuccuccgccugcaagcgccgcuccaacuccuccuucuucucccgccucaacuggcucacccaccucaaguucaaguaccccgcccucaacgucaccaugcccaacaacgaggaguucgacaagcucuacaucuggggcguccaccaccccggcaccuacaacgaccagaucucccucuacgcccaggccuccggccgcaucaccgucuccaccaagcgcucccagcagaccgucauccccaacaucggcucccgcccccgcguccgcgacauccccucccgcaucuccaucuacuggaccaucgucaagcccggcgacauccuccucaucaacuccaccggcaaccucaucgccccccgcggcuacuucaagauccgcuccggcaaguccuccaucaugcgcuccgacgcccccaucggcaagugcaacuccgagugcaucacccccaacggcuccauccccaacgacaagcccuuccagaacgucaaccgcaucaccuacggcgccugcccccgcuacgucaagcagaacacccucaagcucgccaccggcaugcgcaacguccccgagaagcagacccgcggcaucuucggcgccaucgccggcuucaucgagaacggcugggagggcauggucgacggcugguacggcuuccgccaccagaacuccgagggcaucggccaggccgccgaccucaaguccacccaggccgccaucgaccagaucaacggcaagcucaaccgccucaucggcaagaccaacgagaaguuccaccagaucgagaaggaguucuccgaggucgagggccgcauccaggaccucgagaaguacgucgaggacaccaagaucgaccucugguccuacaacgccgagcuccucgucgcccucgagaaccagcacaccaucgaccucaccgacuccgagaugaacaagcucuucgagcgcaccaagaagcagcuccgcgagaacgccgaggacaugggcaacggcugcuucaagaucuaccacaagugcgacaacgccugcaucggcuccauccgcaacggcaccuacgaccacgacgucuaccgcgacgaggcccucaacaaccgcuuccagaucaagggcgucgagcucaaguccggcuacaaggacuggauccucuggaucuccuucgccaucuccugcuuccuccucugcgucgcccuccucggcuucaucaugugggccugccagaagggcaacauccgcugcaacaucugcaucuga

SEQ ID NO: 102816 - RNA, 1701 nt, Artificial Sequence; identical to SEQ ID NO: 102815
  derived and/or modified CDS sequence (opt2) from hemagglutinin__InfluenzaA__AEG65461

SEQ ID NO: 102817 - RNA, 1701 nt, Artificial Sequence
  derived and/or modified CDS sequence (opt2) from hemagglutinin__InfluenzaA__AEG65472
augaagaccaucaucgccugguccuacauccucugccucgucuucgcccagaagcuccccggcaacgacaacuccaccgccacccucugccucggccaccacgccguccccaacggcaccaucgucaagaccaucaccaacgaccagaucgaggucaccaacgccaccgagcucguccaguccuccuccaccggcggcaucugcgacuccccccaccagauccucgacggcgagaacugcacccucaucgacgcccuccucggcgacccccagugcgacggcuuccagaacaagaagugggaccucuucgucgagcgcuccaaggccuacuccaacugcuaccccuacgacguccccgacuacgccucccuccgcucccucaucgccuccuccggcacccucgaguucaacaacgaguccuucaacuggaccggcgucacccagaacggcaccuccuccgccugcaagcgccgcuccaacuccuccuucuucucccgccucaacuggcucacccaccucaaguucaaguaccccgcccucaacgucaccaugcccaacaacgaggaguucgacaagcucuacaucuggggcguccaccaccccggcaccuacaacgaccagaucucccucuacgcccaggccuccggccgcaucaccgucuccaccaagcgcucccagcagaccgucauccccaacaucggcucccgcccccgcguccgcgacauccccucccgcaucuccaucuacuggaccaucgucaagcccggcgacauccuccucaucaacuccaccggcaaccucaucgccccccgcggcuacuucaagauccgcuccggcaaguccuccaucaugcgcuccgacgcccccaucggcaagugcaacuccgagugcaucacccccaacggcuccauccccaacgacaagcccuuccagaacgucaaccgcaucaccuacggcgccugcccccgcuacgucaagcagaacacccucaagcucgccaccggcaugcgcaacguccccgagaagcagacccgcggcaucuucggcgccaucgccggcuucaucgagaacggcugggagggcauggucgacggcugguacggcuuccgccaccagaacuccgagggcaucggccaggccgccgaccucaaguccacccaggccgccaucgaccagaucaacggcaagcucaaccgccucaucggcaagaccaacgagaaguuccaccagaucgagaaggaguucuccgaggucgagggccgcauccaggaccucgagaaguacgucgaggacaccaagaucgaccucugguccuacaacgccgagcuccucgucgcccucgagaaccagcacaccaucgaccucaccgacuccgagaugaacaagcucuucgagaucaccaagaagcagcuccgcgagaacgccgaggacaugggcaacggcugcuucaagaucuaccacaagugcgacaacgccugcaucggcuccauccgcaacggcaccuacgaccacgacgucuaccgcgacgaggcccucaacaaccgcuuccagaucaagggcgucgagcucaaguccggcuacaaggacuggauccucuggaucuccuucgccaucuccugcuuccuccucugcgucgcccuccucggcuucaucaugugggccugccagaagggcaacauccgcugcaacaucugcaucuga

SEQ ID NO: 102818 - RNA, 1701 nt, Artificial Sequence; identical to SEQ ID NO: 102815
  derived and/or modified CDS sequence (opt2) from hemagglutinin__InfluenzaA__AEG65483

SEQ ID NO: 102819 - RNA, 1701 nt, Artificial Sequence; identical to SEQ ID NO: 102815
  derived and/or modified CDS sequence (opt2) from hemagglutinin__InfluenzaA__AEG65494

SEQ ID NO: 102820 - RNA, 1701 nt, Artificial Sequence; identical to SEQ ID NO: 102815
  derived and/or modified CDS sequence (opt2) from hemagglutinin__InfluenzaA__AEG65505

SEQ ID NO: 102821 - RNA, 1701 nt, Artificial Sequence; identical to SEQ ID NO: 102815
  derived and/or modified CDS sequence (opt2) from hemagglutinin__InfluenzaA__AEG65516

SEQ ID NO: 102822 - RNA, 1701 nt, Artificial Sequence; identical to SEQ ID NO: 102815
  derived and/or modified CDS sequence (opt2) from hemagglutinin__InfluenzaA__AEG65527

SEQ ID NO: 102823 - RNA, 1701 nt, Artificial Sequence; identical to SEQ ID NO: 102815
  derived and/or modified CDS sequence (opt2) from hemagglutinin__InfluenzaA__AEG65538

SEQ ID NO: 102824 - RNA, 1701 nt, Artificial Sequence
  derived and/or modified CDS sequence (opt2) from hemagglutinin__InfluenzaA__AEG65560
augaagaccaucaucgcccucuccuacauccucugccucgucuucgcccagaagcuccccggcaacgacaacuccaccgccacccucugccucggccaccacgccguccccaacggcaccaucgucaagaccaucaccaacgaccagaucgaggucaccaacgccaccgagcucguccaguccuccuccaccggcggcaucugcgacuccccccaccagauccucgacggcgagaacugcacccucaucgacgcccuccucggcgacccccagugcgacggcuuccagaacaagaagugggaccucuucgucgagcgcuccaaggccuacuccaacugcuaccccuacgacguccccgacuacgccucccuccgcucccucaucgccuccuccggcacccucgaguucaacaacgaguccuucaacuggaccggcgucacccagaacggcaccuccuccgccugcaagcgccgcuccaacuccuccuucuucucccgccucaacuggcucacccaccucaaguucaaguaccccgcccucaacgucaccaugcccaacaacgaggaguucgacaagcucuacaucuggggcguccaccaccccggcaccuacaacgaccagaucucccucuacgcccaggccuccggccgcaucaccgucuccaccaagcgcucccagcagaccgucauccccaacaucggcucccgcccccgcguccgcgacauccccucccgcaucuccaucuacuggaccaucgucaagcccggcgacauccuccucaucaacuccaccggcaaccucaucgccccccgcggcuacuucaagauccgcuccggcaaguccuccaucaugaaguccgacgcccccaucggcaagugcaacuccgagugcaucacccccaacggcuccauccccaacgacaagcccuuccagaacgucaaccgcaucaccuacggcgccugcccccgcuacgucaagcagaacacccucaagcucgccaccggcaugcgcaacguccccgagaagcagacccgcggcaucuucggcgccaucgccggcuucaucgagaacggcugggagggcauggucgacggcugguacggcuuccgccaccagaacuccgagggcaucggccaggccgccgaccucaaguccacccaggccgccaucgaccagaucaacggcaagcucaaccgccucaucggcaagaccaacgagaaguuccaccagaucgagaaggaguucuccgaggucgagggccgcauccaggaccucgagaaguacgucgaggacaccaagaucgaccucugguccuacaacgccgagcuccucgucgcccucgagaaccagcacaccaucgaccucaccgacuccgagaugaacaagcucuucgagcgcaccaagaagcagcuccgcgagaacgccgaggacaugggcaacggcugcuucaagaucuaccacaagugcgacaacgccugcaucggcuccauccgcaacggcaccuacgaccacgacgucuaccgcgacgaggcccucaacaaccgcuuccagaucaagggcgucgagcucaaguccggcuacaaggacuggauccucuggaucuccuucgccaucuccugcuuccuccucugcgucgcccuccucggcuucaucaugugggccugccagaagggcaacauccgcugcaacaucugcaucuga

SEQ ID NO: 102825 - RNA, 1701 nt, Artificial Sequence; identical to SEQ ID NO: 102824
  derived and/or modified CDS sequence (opt2) from hemagglutinin__InfluenzaA__AEG65571

SEQ ID NO: 102826 - RNA, 1701 nt, Artificial Sequence; identical to SEQ ID NO: 102824
  derived and/or modified CDS sequence (opt2) from hemagglutinin__InfluenzaA__AEG65582

SEQ ID NO: 102827 - RNA, 1701 nt, Artificial Sequence; identical to SEQ ID NO: 102824
  derived and/or modified CDS sequence (opt2) from hemagglutinin__InfluenzaA__AEG65593

SEQ ID NO: 102828 - RNA, 1701 nt, Artificial Sequence
  derived and/or modified CDS sequence (opt2) from hemagglutinin__InfluenzaA__AEG65604
augaagaccaucaucgcccucuccuacauccucugccucgucuucgcccagaagcuccccggcaacgacaacuccaccgccacccucugccucggccaccacgccguccccaacggcaccaucgucaagaccaucaccaacgaccagaucgaggucaccaacgccaccgagcucguccaguccuccuccaccggcggcaucugcgacuccccccaccagauccucgacggcgagaacugcacccucaucgacgcccuccucggcgacccccagugcgacggcuuccagaacaagaagugggaccucuucgucgagcgcuccaaggccuacuccaacugcuaccccuacgacguccccgacuacgccucccuccgcucccucaucgccuccuccggcacccucgaguucaacaacgaguccuucaacuggaccggcgucacccagaacggcaccuccuccgccugcaagcgccgcuccaacaacuccuucuucucccgccucaacuggcucacccaccucaaguucaaguaccccgcccucaacgucaccaugcccaacaacgaggaguucgacaagcucuacaucuggggcguccaccaccccggcaccgacaacgaccagaucucccucuacgcccaggccuccggcaagaucaccgucuccaccaagcgcucccagcagaccgucauccccaacaucggcucccgcccccgcguccgcgacauccccucccgcaucuccaucuacuggaccaucgucaagcccggcgacauccuccucaucaacuccaccggcaaccucaucgccccccgcggcuacuucaagauccgcuccggcaaguccuccaucaugcgcuccgacgcccccaucggcaagugcaacuccgagugcaucacccccaacggcuccauccccaacgacaagcccuuccagaacgucaaccgcaucaccuacggcgccugcccccgcuacgucaagcagaacacccucaagcucgccaccggcaugcgcaacguccccgagaagcagacccgcggcaucuucggcgccaucgccggcuucaucgagaacggcugggagggcauggucgacggcugguacggcuuccgccaccagaacuccgagggcaucggccaggccgccgaccucaaguccacccaggccgccaucgaccagaucaacggcaagcucaaccgccucaucggcaagaccaacgagaaguuccaccagaucgagaaggaguucuccgaggucgagggccgcauccaggaccucgagaaguacgucgaggacaccaagaucgaccucugguccuacaacgccgagcuccucgucgcccucgagaaccagcacaccaucgaccucaccgacuccgagaugaacaagcucuucgagcgcaccaagaagcagcuccgcgagaacgccgaggacaugggcaacggcugcuucaagaucuaccacaagugcgacaacgccugcaucggcuccauccgcaacggcaccuacgaccacgacgucuaccgcgacgaggcccucaacaaccgcuuccagaucaagggcgucgagcucaaguccggcuacaaggacuggauccucuggaucuccuucgccaucuccugcuuccuccucugcgucgcccuccucggcuucaucaugugggccugccagaagggcaacauccgcugcaacaucugcaucuga

SEQ ID NO: 102829 - RNA, 1701 nt, Artificial Sequence
  derived and/or modified CDS sequence (opt2) from hemagglutinin__InfluenzaA__AEG65626
augaagaccaucaucgcccucuccuacauccucugccucgucuucgcccagaagcuccccggcaacgacaacuccaccgccacccucugccucggccaccacgccguccccaacggcaccaucgucaagaccaucaccaacgaccagaucgaggucaccaacgccaccgagcucguccaguccuccuccaccggcggcaucugcgacuccccccaccagauccucgacggcgagaacugcacccucaucgacgcccuccucggcgacccccagugcgacggcuuccagaacaagaagugggaccucuucgucgagcgcuccaaggccuacuccaacugcuaccccuacgacguccccgacuacgccucccuccgcucccucgucgccuccuccggcacccucgaguucaacaacgaguccuucaacuggaccggcgucacccagaacggcaccuccuccgccugcaagcgcaaguccaacaacuccuucuucucccgccucaacuggcucacccaccucaaguucaaguaccccgcccucaacgucaccaugcccaacaacaagaaguucgacaagcucuacaucuggggcguccaccaccccggcaccgacaacgaccagaucucccucuacgcccaggccuccggccgcaucaccgucuccaccaagcgcucccagcagaccgucauccccaacaucggcucccgcccccgcguccgcgacauccccucccgcaucuccaucuacuggaccaucgucaagcccggcgacaugcuccucaucaacuccaccggcaaccucaucgccccccgcggcuacuucaagauccgcuccggcaaguccuccaucaugcgcuccgacgcccccaucggcaagugcaacuccgagugcaucacccccaacggcuccauccccaacgacaagcccuuccagaacgucaaccgcaucaccuacggcgccugcccccgcuacgucaagcagaacacccucaagcucgccaccggcaugcgcaacguccccgagaagcagacccgcggcaucuucggcgccaucgccggcuucaucgagaacggcugggagggcauggucgacggcugguacggcuuccgccaccagaacuccgagggcaccggccaggccgccgaccucaaguccacccaggccgccaucaaccagaucaacggcaagcucaaccgccucaucggcaagaccaacgagaaguuccaccagaucgagaaggaguucuccgaggucgagggccgcauccaggaccucgagaaguacgucgaggacaccaagaucgaccucugguccuacaacgccgagcuccucgucgcccucgagaaccagcacaccaucgaccucaccgacuccgagaugaacaagcucuucgagcgcaccaagaagcagcuccgcgagaacgccgaggacaugggcaacggcugcuucaagaucuaccacaagugcgacaacgccugcaucggcuccauccgcaacggcaccuacgaccacgacgucuaccgcgacgaggcccucaacaaccgcuuccagaucaagggcgucgagcucaaguccggcuacaaggacuggauccucuggaucuccuucgccaucuccugcuuccuccucugcgucgcccuccucggcuucaucaugugggccugccagaagggcaacauccgcugcaacaucugcaucuga

SEQ ID NO: 102830 - RNA, 1701 nt, Artificial Sequence
  derived and/or modified CDS sequence (opt2) from hemagglutinin__InfluenzaA__AEG65637
augaagaccaucaucgcccucuccuacauccucugccucgucuucgcccagaagcuccccggcaacgacaacuccaccgccacccucugccucggccaccacgccguccccaacggcaccaucgucaagaccaucaccaacgaccagaucgaggucaccaacgccaccgagcucguccaguccuccuccaccggcggcaucugcgacuccccccaccagauccucgacggcgagaacugcacccucaucgacgcccuccucggcgacccccagugcgacggcuuccagaacaagaagugggaccucuucgucgagcgcuccaaggccuacuccaacugcuaccccuacgacguccccgacuacgccucccuccgcucccucgucgccuccuccggcacccucgaguucaacaacgaguccuucaacuggaccggcgucacccagaacggcaccuccuccgccugcaagcgcaaguccaacaacuccuucuucucccgccucaacuggcucacccaccucaaguucaaguaccccgcccucaacgucaccaugcccaacaacaagaaguucgacaagcucuacaucuggggcguccaccaccccggcaccgacaacgaccagaucucccucuacgcccaggccuccggccgcaucaccgucuccaccaagcgcucccagcagaccgucauccccaacaucggcucccgcccccgcguccgcgacauccccucccgcaucuccaucuacuggaccaucgucaagcccggcgacaugcuccucaucaacuccaccggcaaccucaucgccccccgcggcuacuucaagauccgcuccggccgcuccuccaucaugcgcuccgacgcccccaucggcaagugcaacuccgagugcaucacccccaacggcuccauccccaacgacaagcccuuccagaacgucaaccgcaucaccuacggcgccugcccccgcuacgucaagcagaacacccucaagcucgccaccggcaugcgcaacguccccgagaagcagacccgcggcaucuucggcgccaucgccggcuucaucgagaacggcugggagggcauggucgacggcugguacggcuuccgccaccagaacuccgagggcaccggccaggccgccgaccucaaguccacccaggccgccaucaaccagaucaacggcaagcucaaccgccucaucggcaagaccaacgagaaguuccaccagaucgagaaggaguucuccgaggucgagggccgcauccaggaccucgagaaguacgucgaggacaccaagaucgaccucugguccuacaacgccgagcuccucgucgcccucgagaaccagcacaccaucgaccucaccgacuccgagaugaacaagcucuucgagcgcaccaagaagcagcuccgcgagaacgccgaggacaugggcaacggcugcuucaagaucuaccacaagugcgacaacgccugcaucggcuccauccgcaacggcaccuacgaccacgacgucuaccgcgacgaggcccucaacaaccgcuuccagaucaagggcgucgagcucaaguccggcuacaaggacuggauccucuggaucuccuucgccaucuccugcuuccuccucugcgucgcccuccucggcuucaucaugugggccugccagaagggcaacauccgcugcaacaucugcaucuga

SEQ ID NO: 102831 - RNA, 1701 nt, Artificial Sequence; identical to SEQ ID NO: 96067
  derived and/or modified CDS sequence (opt2) from hemagglutinin__InfluenzaA__AEG65648

SEQ ID NO: 102832 - RNA, 1701 nt, Artificial Sequence; identical to SEQ ID NO: 97831
  derived and/or modified CDS sequence (opt2) from hemagglutinin__InfluenzaA__AEG65659

SEQ ID NO: 102833 - RNA, 1701 nt, Artificial Sequence; identical to SEQ ID NO: 97831
  derived and/or modified CDS sequence (opt2) from hemagglutinin__InfluenzaA__AEG65670

SEQ ID NO: 102834 - RNA, 1701 nt, Artificial Sequence; identical to SEQ ID NO: 97831
  derived and/or modified CDS sequence (opt2) from hemagglutinin__InfluenzaA__AEG65681

SEQ ID NO: 102835 - RNA, 1701 nt, Artificial Sequence; identical to SEQ ID NO: 102806
  derived and/or modified CDS sequence (opt2) from hemagglutinin__InfluenzaA__AEG65692

SEQ ID NO: 102836 - RNA, 1701 nt, Artificial Sequence; identical to SEQ ID NO: 96666
  derived and/or modified CDS sequence (opt2) from hemagglutinin__InfluenzaA__AEG65703

SEQ ID NO: 102837 - RNA, 1701 nt, Artificial Sequence
  derived and/or modified CDS sequence (opt2) from hemagglutinin__InfluenzaA__AEG65747
augaagaccaucaucgcccucuccuacauccucugccucgucuucgcccagaagcuccccggcaacgacaacuccaccgccacccucugccucggccaccacaccguccccaacggcaccaucgucaagaccaucaccaacgaccagaucgaggucaccaacgccaccgagcucguccaguccuccuccaccggcgagaucugcgacuccccccaccagauccucgacggcgagaacugcacccucaucgacgcccuccucggcgacccccagugcgacggcuuccagaacaagaagugggaccucuucgucgagcgcuccaaggccuacuccaacugcuaccccuacgacguccccgacuacgccucccuccgcucccucgucgccuccuccggcacccucgaguucaacaacgaguccuucaacuggaccggcgucacccagaacggcaccuccuccgccugcaagcgccgcuccaacaacuccuucuucucccgccucaacuggcucacccaccucaaguucaaguaccccgcccucaacgucaccaugcccaacaacgagaaguucgacaagcucuacaucuggggcguccaccaccccggcaccgacaacgaccagaucuuccucuacgcccaggccuccggccgcaucaccgucuccaccaagcgcucccagcagaccgucauccccaacaucggcucccgcccccgcguccgcaacauccccucccgcaucuccaucuacuggaccaucgucaagcccggcgacauccuccucaucaacuccaccggcaaccucaucgccccccgcggcuacuucaagauccgcuccggcaaguccuccaucaugcgcuccgacgcccccaucggcaagugcaacuccgagugcaucacccccaacggcuccauccccaacgacaagcccuuccagaacgucaaccgcaucaccuacggcgccugcccccgcuacgucaagcagaacacccucaagcucgccaccggcaugcgcaacguccccgagaagcagacccgcggcaucuucggcgccaucgccggcuucaucgagaacggcugggagggcauggucgacggcugguacggcuuccgccaccagaacuccgagggcaccggccaggccgccgaccucaaguccacccaggccgccaucaaccagaucaacggcaagcucaaccgccucaucggcaagaccaacgagaaguuccaccagaucgagaaggaguucuccgaggucgagggccgcauccaggaccucgagaaguacgucgaggacaccaagaucgaccucugguccuacaacgccgagcuccucgucgcccucgagaaccagcacaccaucgaccucaccgacuccgagaugaacaagcucuucgagcgcaccaagaagcagcuccgcgagaacgccgaggacaugggcaacggcugcuucaagaucuaccacaagugcgacaacgccugcaucggcuccauccgcaacggcaccuacgaccacgacgucuaccgcgacgaggcccucaacaaccgcuuccagaucaagggcgucgagcucaaguccggcuacaaggacuggauccucuggaucuccuucgccaucuccugcuuccuccucugcgucgcccuccucggcuucaucaugugggccugccagaagggcaacauccgcugcaacaucugcaucuga

SEQ ID NO: 102838 - RNA, 1701 nt, Artificial Sequence
  derived and/or modified CDS sequence (opt2) from hemagglutinin__InfluenzaA__AEG65758
augaagaccaucaucgcccucuccuacauccucugccucgucuccgcccagaagcuccccggcaacgacaacuccaccgccacccucugccucggccaccacgccguccccaacggcaccaucgucaagaccaucaccaacgaccagaucgaggucaccaacgccaccgagcucguccaguccuccuccaccggcggcaucugcgacuccccccaccagauccucgacggcgagaacugcacccucaucgacgcccuccucggcgacccccagugcgacggcuuccagaacaagaagugggaccucuucgucgagcgcuccaaggccuacuccaacugcuaccccuacgacguccccgacuacgccucccuccgcucccucgucgccuccuccggcacccucgaguucaacaacgaguccuucaacuggaccggcgucacccagaacggcaccuccuccgccugcaagcgccgcuccaacaacuccuucuucucccgccucaacuggcucacccaccucaaguucaaguaccccgcccucaacgucaccaugcccaacaacgagaaguucgacaagcucuacaucuggggcguccaccaccccggcaccgacaacgaccagaucuuccucuacgcccaggccuccggccgcaucaccgucuccaccaagcgcucccagcagaccgucauccccaacaucggcucccgcccccgcguccgcaacauccccucccgcaucuccaucuacuggaccaucgucaagcccggcgacauccuccucaucaacuccaccggcaaccucaucgccccccgcggcuacuucaagauccgcuccggcaaguccuccaucaugcgcuccgacgcccccaucggcaagugcaacuccgagugcaucacccccaacggcuccauccccaacgacaagcccuuccagaacgucaaccgcaucaccuacggcgccugcccccgcuacgucaagcagaacacccucaagcucgccaccggcaugcgcaacguccccgagaagcagacccgcggcaucuucggcgccaucgccggcuucaucgagaacggcugggagggcauggucgacggcugguacggcuuccgccaccagaacuccgagggcaucggccaggccgccgaccucaaguccacccaggccgccaucaaccagaucaacggcaagcucaaccgccucaucggcaagaccaacgagaaguuccaccagaucgagaaggaguucuccgaggucgagggccgcauccaggaccucgagaaguacgucgaggacaccaagaucgaccucugguccuacaacgccgagcuccucgucgcccucgagaaccagcacaccaucgaccucaccgacuccgagaugaacaagcucuucgagcgcaccaagaagcagcuccgcgagaacgccgaggacaugggcaacggcugcuucaagaucuaccacaagugcgacaacgccugcaucggcuccauccgcaacggcaccuacgaccacgacgucuaccgcgacgaggcccucaacaaccgcuuccagaucaagggcgucgagcucaaguccggcuacaaggacuggauccucuggaucuccuucgccaucuccugcuuccuccucugcgucgcccuccucggcuucaucaugugggccugccagaagggcaacauccgcugcaacaucugcaucuga

SEQ ID NO: 102839 - RNA, 1701 nt, Artificial Sequence; identical to SEQ ID NO: 96317
  derived and/or modified CDS sequence (opt2) from hemagglutinin__InfluenzaA__AEG65769

SEQ ID NO: 102840 - RNA, 1701 nt, Artificial Sequence
  derived and/or modified CDS sequence (opt2) from hemagglutinin__InfluenzaA__AEG65780
augaagaccaucaucgcccucuccuacauccucugccucgucuucgcccagaagcuccccggcaacgacaacuccaccgccacccucugccucggccaccacgccguccccaacggcaccaucgucaagaccaucaccaacgacaagaucgaggucaccaacgccaccgagcucguccaguccuccuccaccggcgagaucugcaacuccccccaccagauccucgacggcgagaacugcacccucaucgacgcccuccucggcgacccccagugcgacggcuuccagaacaagaagugggaccucuucgucgagcgcuccaaggcccacuccaacugcuaccccuacgacguccccgacuacgccucccuccgcucccucgucgccgccuccggcacccucgaguucaacaacgaguccuucaacuggaccggcgucacccagaacggcaccuccuccgccugcauccgccgcuccaacaacuccuucuucucccgccucaacuggcucacccaccucaacuucaaguaccccgcccucaacgucaccaugcccaacaacgagcaguucgacaagcucuacaucuggggcguccaccaccccggcaccgacaaggaccagaucuuccucuacgcccaggccgccggccgcaucaccgucuccaccaagcgcucccagcaggccgucauccccaacaucggcucccgcccccgcguccgcaacauccccucccgcgucuccaucuacuggaccaucgucaagcccggcgacauccuccucaucaacuccaccggcaaccucaucgccccccgcggcuacuucaagauccgcuccggcaaguccuccaucaugcgcuccgacgcccccaucggcaagugcaacuccgccugcaucacccccaacggcuccauccccaacgacaagcccuuccagaacgucaaccgcaucaccuacggcgccugcccccgcuacgucaagcagaacacccucaagcucgccaccggcaugcgcaacguccccgagaagcagacccgcggcaucuucggcgccaucgccggcuucaucgagaacggcugggagggcauggucgacggcugguacggcuuccgccaccagaacuccgagggccgcggccaggccgccgaccucaaguccacccaggccgccaucgaccagaucaacggcaagcucaaccgccucaucggcaagaccaacgagaaguuccaccagaucgagaaggaguucuccgaggucgagggccgcauccaggaccucgagaaguacgucgaggacaccaagaucgaccucugguccuacaacgccgagcuccucgucgcccucgagaaccagcacaccaucgaccucaccgacuccgagaugaacaagcucuucgagaagaccaagaagcagcuccgcgagaacgccgaggacaugggcaacggcugcuucaagaucuaccacaagugcgacaacgccugcaucggcuccauccgcaacggcaccuacgaccacgacgucuaccgcgacgaggcccucaacaaccgcuuccagaucaagggcgucgagcucaaguccggcuacaaggacuggauccucuggaucuccuucgccaucuccugcuuccuccucugcgucgcccuccucggcuucaucaugugggccugccagaagggcaacauccgcugcaacaucugcaucuga

SEQ ID NO: 102841 - RNA, 1701 nt, Artificial Sequence
  derived and/or modified CDS sequence (opt2) from hemagglutinin__InfluenzaA__AEG65813
augaagaccaucaucgcccucuccuacauccucugccucgucuucgcccagaagcuccccggcaacgacaacuccaccgccacccucugccucggccaccacgccguccccaacggcaccaucgucaagaccaucaccaacgaccagaucgaggucaccaacgccaccgagcucguccaguccuccuccaccggcgagaucugcaacuccccccaccagauccucgacggcgagaacugcacccucaucgacgcccuccucggcgacccccagugcgacggcuuccagaacaagaagugggaccucuucgucgagcgcuccaaggcccacuccaacugcuaccccuacgacguccccgacuacgccucccuccgcucccucgucgccuccuccggcacccucgaguucaacaacgaguccuucaacuggaccggcgucacccagaacggcaccuccuccgccugcauccgccgcuccaacaacuccuucuucucccgccucaacuggcucacccaccucaacuucaaguaccccgcccucaacgucaccaugcccaacaacgagcaguucgacaagcucuacaucuggggcguccaccaccccggcaccgacaaggaccagaucuuccucuacgcccaggccgccggccgcaucaccgucuccaccaagcgcucccagcaggccgucauccccaacaucggcucccgcccccgcguccgcaacauccccucccgcgucuccaucuacuggaccaucgucaagcccggcgacauccuccucaucaacuccaccggcaaccucaucgccccccgcggcuacuucaagauccgcuccggcaaguccuccaucaugcgcuccgacgcccccaucggcaagugcaacuccgccugcaucacccccaacggcuccauccccaacgacaagcccuuccagaacgucaaccgcaucaccuacggcgccugcccccgcuacgucaagcagaacacccucaagcucgccaccggcaugcgcaacguccccgagaagcagacccgcggcaucuucggcgccaucgccggcuucaucgagaacggcugggagggcauggucgacggcugguacggcuuccgccaccagaacuccgagggccgcggccaggccgccgaccucaaguccacccaggccgccaucgaccagaucaacggcaagcucaaccgccucaucggcaagaccaacgagaaguuccaccagaucgagaaggaguucuccgaggucgagggccgcauccaggaccucgagaaguacgucgaggacaccaagaccgaccucugguccuacaacgccgagcuccucgucgcccucgagaaccagcacaccaucgaccucaccgacuccgagaugaacaagcucuucgagaagaccaagaagcagcuccgcgagaacgccgaggacaugggcaacggcugcuucaagaucuaccacaagugcgacaacgccugcaucggcuccauccgcaacggcaccuacgaccacgacgucuaccgcgacgaggcccucaacaaccgcuuccagaucaagggcgucgagcucaaguccggcuacaaggacuggauccucuggaucuccuucgccaucuccugcuuccuccucugcgucgcccuccucggcuucaucaugugggccugccagaagggcaacauccgcugcaacaucugcaucuga

SEQ ID NO: 102842 - RNA, 1701 nt, Artificial Sequence
  derived and/or modified CDS sequence (opt2) from hemagglutinin__InfluenzaA__AEG79801
augaaggccauccucgucguccuccucuacaccuucgccaccgccaacgccgacacccucugcaucggcuaccacgccaacaacuccaccgacaccgucgacaccguccucgagaagaacgucaccgucacccacuccgucaaccuccucgaggacaagcacaacggcaagcucugcaagcuccgcggcgucgccccccuccaccucggcaagugcaacaucgccggcuggauccucggcaaccccgagugcgagucccucuccaccgccuccuccugguccuacaucgucgagaccuccuccuccgacaacggcaccugcuaccccggcgacuucaucaacuacgaggagcuccgcgagcagcucuccuccgucuccuccuucgagcgcuucgagaucuuccccaagaccuccuccuggcccaaccacgacuccaacaagggcgucaccgccgccugcccccacgccggcgccaaguccuucuacaagaaccucaucuggcucgucaagaagggcaacuccuaccccaagcucuccaaguccuacaucaacgacaagggcaaggagguccucguccucuggggcauccaccaccccuccaccaccgccgaccagcagucccucuaccagaacgccgacgccuacgucuucgucggcaccucccgcuacuccaagaaguucaagcccgagaucgccauccgccccaagguccgcgaccgcgagggccgcaugaacuacuacuggacccucgucgagcccggcgacaagaucaccuucgaggccaccggcaaccucgucgucccccgcuacgccuucgccauggagcgcaacgccggcuccggcaucaucaucuccgacacccccguccacgacugcaacaccaccugccagacccccaagggcgccaucaacaccucccuccccuuccagaacauccaccccaucaccaucggcaagugccccaaguacgucaaguccaccaagcuccgccucgccaccggccuccgcaacguccccuccauccagucccgcggccucuucggcgccaucgccggcuucaucgagggcggcuggaccggcauggucgacggcugguacggcuaccaccaccagaacgagcagggcuccggcuacgccgccgaccucaaguccacccagaacgccaucgacaagaucaccaacaaggucaacuccgucaucgagaagaugaacacccaguucaccgccgucggcaaggaguucaaccaccucgagaagcgcaucgagaaccucaacaagaaggucgacgacggcuuccucgacaucuggaccuacaacgccgagcuccucguccuccucgagaacgagcgcacccucgacuaccacgacuccaacgucaagaaccucuacgagaagguccgcaaccagcucaagaacaacgccaaggagaucggcaacggcugcuucgaguucuaccacaagugcgacaacaccugcauggaguccgucaagaacggcaccuacgacuaccccaaguacuccgaggaggccaagcucaaccgcgaggagaucgacggcgucaagcucgaguccacccgcaucuaccagauccucgccaucuacuccaccgucgccuccucccucguccucgucgucucccucggcgccaucuccuucuggaugugcuccaacggcucccuccagugccgcaucugcaucuga

SEQ ID NO: 102843 - RNA, 1701 nt, Artificial Sequence
  derived and/or modified CDS sequence (opt2) from hemagglutinin__InfluenzaA__AEG79807
augaaggccauccucgucguccuccucuacaccuucgccaccgccaacgccgacacccucugcaucggcuaccacgccaacaacuccaccgacaccgucgacaccguccucgagaagaacgucaccgucacccacuccgucaaccuccucgaggacaagcacaacggcaagcucugcaagcuccgcggcgucgccccccuccaccucggcaagugcaacaucgccggcuggauccucggcaaccccgagugcgagucccucuccaccgccuccuccugguccuacaucgucgagaccuccuccuccgacaacggcaccugcuaccccggcgacuucaucaacuacgaggagcuccgcgagcagcucuccuccgucuccuccuucgagcgcuucgagaucuuccccaagaccuccuccuggcccaaccacgacuccaacaagggcgucaccgccgccugcccccacgccggcgccaaguccuucuacaagaaccucaucuggcucgucaagaaggagaacuccuaccccaagcucuccaaguccuacaucaacgacaagggcaaggagguccucguccucuggggcauccaccaccccuccaccaccgccgaccagcaguccaucuaccagaacgccgacgccuacgucuucgucggcaccucccgcuacuccaagaaguucaagcccgagaucgccauccgccccaagguccgcgaccaggagggccgcaugaacuacuacuggacccucgucgagcccggcgacaagaucaccuucgaggccaccggcaaccucgucgucccccgcuacgccuucgccauggagcgcaacgccggcuccggcaucaucaucuccgacacccccguccacgacugcaacaccaccugccagacccccaagggcgccaucaacaccucccuccccuuccagaacauccaccccaucaccaucggcaagugccccaaguacgucaaguccaccaagcuccgccucgccaccggccuccgcaacguccccuccauccagucccgcggccucuucggcgccaucgccggcuucaucgagggcggcuggaccggcauggucgacggcugguacggcuaccaccaccagaacgagcagggcuccggcuacgccgccgaccucaaguccacccagaacgccaucgacaagaucaccaacaaggucaacuccgucaucgagaagaugaacacccaguucaccgccgucggcaaggaguucaaccaccucgagaagcgcaucgagaaccucaacaagaaggucgacgacggcuuccucgacaucuggaccuacaacgccgagcuccucguccuccucgagaacgagcgcacccucgacuaccacgacuccaacgucaagaaccucuacgagaagguccgcaaccagcucaagaacaacgccaaggagaucggcaacggcugcuucgaguucuaccacaagugcgacaacaccugcauggaguccgucaagaacggcaccuacgacuaccccaaguacuccgaggaggccaagcucaaccgcgaggagaucgacggcgucaagcucgaguccacccgcaucuaccagauccucgccaucuacuccaccgucgccuccucccucguccucgucgucucccucggcgccaucuccuucuggaugugcuccaacggcucccuccagugccgcaucugcaucuga

SEQ ID NO: 102844 - RNA, 1701 nt, Artificial Sequence
  derived and/or modified CDS sequence (opt2) from hemagglutinin__InfluenzaA__AEG79835
augaaggccauccucgucguccuccucuacaccuucgccaccgccaacgccgacacccucugcaucggcuaccacgccaacaacuccaccgacaccgucgacaccguccucgagaagaacgucaccgucacccacuccgucaaccuccucgaggacaagcacaacggcaagcucugcaagcuccgcggcgucgccccccuccaccucggcaagugcaacaucgccggcuggauccucggcaaccccgagugcgagucccucuccaccgccuccuccugguccuacaucgucgagaccuccuccuccgacaacggcaccugcuaccccggcgacuucaucgacuacgaggagcuccgcgagcagcucuccuccgucuccuccuucgagcgcuucgagaucuuccccaagaccuccuccuggcccaaccacgacuccaacaagggcgucaccgccgccugcccccacgccggcgccaagggcuucuacaagaaccucaucuggcucgucaagaagggcaacuccuaccccaagcucuccaaguccuacaucaacgacaagggcaaggagguccucguccucuggggcauccaccaccccuccaccaccgccgaccagcaguccaucuaccagaacgccgacaccuacgucuucgucggcaccucccgcuacuccaagaaguucaagcccgagaucgccauccgccccaagguccgcgaccaggagggccgcaugaacuacuacuggacccucgucgagcccggcgacaagaucaccuucgaggccaccggcaaccucgucgucccccgcuacgccuucgccauggagcgcaacgccggcuccggcaucaucaucuccgacacccccguccacgacugcaacaccaccugccagacccccaagggcgccaucaacaccucccuccccuuccagaacauccaccccaucaccaucggcaagugccccaaguacgucaaguccaccaagcuccgccucgccaccggccuccgcaacguccccuccauccagucccgcggccucuucggcgccaucgccggcuucaucgagggcggcuggaccggcauggucgacggcugguacggcuaccaccaccagaacgagcagggcuccggcuacgccgccgaccucaaguccacccagaacgccaucgacaagaucaccaacaaggucaacuccgucaucgagaagaugaacacccaguucaccgccgucggcaaggaguucaaccaccucgagaagcgcaucgagaaccucaacaagaaggucgacgacggcuuccucgacaucuggaccuacaacgccgagcuccucguccuccucgagaacgagcgcacccucgacuaccacgacuccaacgucaagaaccucuacgagaagguccgcaaccagcucaagaacaacgccaaggagaucggcaacggcugcuucgaguucuaccacaagugcgacaacaccugcauggaguccgucaagaacggcaccuacgacuaccccaaguacuccgaggaggccaagcucaaccgcgaggagaucgacggcgucaagcucgaguccacccgcaucuaccagauccucgccaucuacuccaccgucgccuccucccucguccucgucgucucccucggcgccaucuccuucuggaugugcuccaacggcucccuccagugccgcaucugcaucuga

SEQ ID NO: 102845 - RNA, 1701 nt, Artificial Sequence
  derived and/or modified CDS sequence (opt2) from hemagglutinin__InfluenzaA__AEH59363
augaaggccauccucgucguccuccucuacaccuucgccaccgccaacgccgacacccucugcaucggcuaccacgccaacaacuccaccgacaccgucgacaccguccucgagaagaacgucaccgucacccacuccgucaaccuccucgaggacaagcacaacggcaagcucugcaagcuccgcggcgucgccccccuccaccucggcaagugcaacaucgccggcuggauccucggcaaccccgagugcgagucccucuccaccgccuccuccugguccuacaucgucgagaccuccuccuccgacaacggcaccugcuaccccggcgacuucaucaacuacgaggagcuccgcgagcagcucuccuccgucuccuccuucgagcgcuucgagaucuuccccaagaccuccuccuggcccaaccacgacuccaacaagggcgucaccgccgccugcccccaggccggcgccaaguccuucuacaagaaccucaucuggcucgucaagaagggcaacuccuaccccaagcucuccaaguccuacaucaacgacaagggcaaggagguccucguccucuggggcauccaccaccccuccaccuccgccgaccagcagucccucuaccagaacgccgacgccuacgucuucgucggcaccuccaaguacuccaagaaguucaagcccgagaucgccguccgccccaagguccgcgaccaggagggccgcaugaacuacuacuggacccucgucgagcccggcgacaagaucaccuucgaggccaccggcaaccuccucgucccccgcuacgccuucgccauggagcgcaacgccggcuccggcaucaucaucuccgacacccccguccacgacugcaacaccaccugccagacccccaagggcgccaucaacaccucccuccccuuccagaacauccaccccaucaccaucggcaagugccccaaguacgucaaguccaccaagcuccgccucgccaccggccuccgcaacguccccuccauccagucccgcggccucuucggcgccaucgccggcuucaucgagggcggcuggaccggcauggucgacggcugguacggcuaccaccaccagaacgcccagggcuccggcuacgccgccgaccucaaguccacccagaacgccaucgacaagaucaccaacaaggucaacuccgucaucgagaagaugaacacccaguucaccgccgucggcaaggaguucaaccaccucgagaagcgcaucgagaaccucaacaagaaggucgacgacggcuuccucgacaucuggaccuacaacgccgagcuccucguccuccucgagaacgagcgcacccucgacuaccacgacuccaacgucaagaaccucuacgagaagguccgcucccagcucaagaacaacgccaaggagaucggcaacggcugcuucgaguucuaccacaagugcgacaacaccugcauggaguccgucaagaacggcaccuacgacuaccccaaguacuccgaggaggccaagcucaaccgcgaggagaucgacggcgucaagcucgaguccacccgcaucuaccagauccucgccaucuacuccaccgucgccuccucccucguccucgucgucucccucggcgccaucuccuucuggaugugcuccaacggcucccuccagugccgcaucugcaucuga

SEQ ID NO: 102846 - RNA, 1701 nt, Artificial Sequence
  derived and/or modified CDS sequence (opt2) from hemagglutinin__InfluenzaA__AEH59367
augaaggccauccucgucguccuccucuacaccuucgccaccgccaacgccgacacccucugcaucggcuaccacgccaacaacuccaccgacaccgucgacaccguccucgagaagaacgucaccgucacccacuccgucaaccuccucgaggacaagcacaacggcaagcucugcaagcuccgcggcgucgccccccuccaccucggcaagugcaacaucgccggcuggauccucggcaaccccgagugcgagucccucuccaccgccuccuccugguccuacaucgucgagaccuccuccuccgacaacggcaccugcuaccccggcgacuucaucaacuacgaggagcuccgcgagcagcucuccuccgucuccuccuucgagcgcuucgagaucuuccccaagaccuccuccuggcccaaccacgacuccaacaagggcgucaccgccgccugcccccacgccggcgccaaguccuucuacaagaaccucaucuggcucgucaagaagggcaacuccuaccccaagcucuccaaguccuacaucaacgacaagggcaaggagguccucguccucuggggcauccaccaccccuccaccaccgccgaccagcagucccucuaccagaacgccgacgccuacgucuucgucggcaccucccgcuacuccaagaaguucaagcccgagaucgccauccgccccaagguccgcgaccaggagggccgcaugaacuacuacugggcccucgucgagcccggcgacaagaucaccuucgaggccaccggcaaccucgucgucccccgcuacgccuucgccauggagcgcaacgccggcuccggcaucaucaucuccgacacccccguccacgacugcaacaccaccugccagacccccaagggcgccaucaacaccucccuccccuuccagaacauccaccccaucaccaucggcaagugccccaaguacgucaaguccaccaagcuccgccucgccaccggccuccgcaacguccccuccauccagucccgcggccucuucggcgccaucgccggcuucaucgagggcggcuggaccggcauggucgacggcugguacggcuaccaccaccagaacgagcagggcuccggcuacgccgccgaccucaaguccacccagaacgccaucgacaagaucaccaacaaggucaacuccgucaucgagaagaugaacacccaguucaccgccgucggcaaggaguucaaccaccucgagaagcgcaucgagaaccucaacaagaaggucgacgacggcuuccucgacaucuggaccuacaacgccgagcuccucguccuccucgagaacgagcgcacccucgacuaccacgacuccaacgucaagaaccucuacgagaagguccgcaaccagcucaagaacaacgccaaggagaucggcaacggcugcuucgaguucuaccacaagugcgacaacaccugcauggaguccgucaagaacggcaccuacgacuaccccaaguacuccgaggaggccaagcucaaccgcgaggagaucgacggcgucaagcucgaguccacccgcaucuaccagauccucgccaucuacuccaccgucgccuccucccucguccucgucgucucccucggcgccaucuccuucuggaugugcuccaacggcucccuccagugccgcaucugcaucuga

SEQ ID NO: 102847 - RNA, 1701 nt, Artificial Sequence
  derived and/or modified CDS sequence (opt2) from hemagglutinin__InfluenzaA__AEH59369
augaaggccauccucgucguccuccucuacaccuucgccaccgccaacgccgacacccucugcaucggcuaccacgccaacaacuccaccgacaccgucgacaccguccucgagaagaacgucaccgucacccacuccgucaaccuccucgaggacaagcacaacggcaagcucugcaagcuccgcggcgucgccccccuccaccucggcaagugcaacaucgccggcuggauccucggcaaccccgagugcgagucccucuccaccgccuccuccugguccuacaucgucgagaccuccuccuccgacaacggcaccugcuaccccggcgacuucaucgacuacgaggagcuccgcgagcagcucuccuccgucuccuccuucgagcgcuucgagaucuuccccaaggccuccuccuggcccaaccacgacuccaacaagggcgucaccgccgccugcccccacgccggcgccaagggcuucuacaagaaccucaucuggcucgucaagaagggcaacuccuaccccaagcucuccaaguccuacaucaacgacaagggcaaggagguccucguccucuggggcauccaccaccccuccaccaccgccgaccagcagucccucuaccagaacgccgacaccuacgucuucgucggcaccucccgcuacuccaagaaguucaagcccgagaucgccauccgccccaagguccgcgaccaggagggccgcaugaacuacuacuggacccucgucgagcccggcgacaagaucaccuucgaggccaccggcaaccucgucgucccccgcuacgccuucgccauggagcgcaacgccggcuccggcaucaucaucuccgacacccccguccacgacugcaacaccaccugccagacccccaagggcgccaucaacaccucccuccccuuccagaacauccaccccaucaccaucggcaagugccccaaguacgucaaguccaccaagcuccgccucgccaccggccuccgcaacguccccuccauccagucccgcggccucuucggcgccaucgccggcuucaucgagggcggcuggaccggcauggucgacggcugguacggcuaccaccaccagaacgagcagggcuccggcuacgccgccgaccucaaguccacccagaacgccaucgacaagaucaccaacaaggucaacuccgucaucgagaagaugaacacccaguucaccgccgucggcaaggaguucaaccaccucgagaagcgcaucgagaaccucaacaagaaggucgacgacggcuuccucgacaucuggaccuacaacgccgagcuccucguccuccucgagaacgagcgcacccucgacuaccacgacuccaacgucaagaaccucuacgagaagguccgcaaccagcucaagaacaacgccaaggagaucggcaacggcugcuucgaguucuaccacaagugcgacaacaccugcauggaguccgucaagaacggcaccuacgacuaccccaaguacuccgaggaggccaagcucaaccgcgaggagaucgacggcgucaagcucgaguccacccgcaucuaccagauccucgccaucuacuccaccgucgccuccucccucguccucgucgucucccucggcgccaucuccuucuggaugugcuccaacggcucccuccagugccgcaucugcaucuga

SEQ ID NO: 102848 - RNA, 1701 nt, Artificial Sequence; identical to SEQ ID NO: 102845
  derived and/or modified CDS sequence (opt2) from hemagglutinin__InfluenzaA__AEH59371

SEQ ID NO: 102849 - RNA, 1701 nt, Artificial Sequence
  derived and/or modified CDS sequence (opt2) from hemagglutinin__InfluenzaA__AEH59373
augaaggccauccucgucguccuccucuacaccuucgccaccgccaacgccgacacccucugcaucggcuaccacgccaacaacuccaccgacaccgucgacaccguccucgagaagaacgucaccgucacccacuccgucaaccuccucgaggacaagcacaacggcaagcucugcaagcuccgcgaggucgccccccuccaccucggcaagugcaacaucgccggcuggauccucggcaaccccgagugcgagucccucuccaccgccuccuccugguccuacaucgucgagaccuccuccuccgacaacggcaccugcuaccccggcgacuucaucgacuacgaggagcuccgcgagcagcucuccuccgucuccuccuucgagcgcuucgagaucuuccccaagaccuccuccuggcccaaccacgacuccaacaagggcgucaccgccgccugcccccacgccggcgccaagggcuucuacaagaaccucaucuggcucgucaagaagggcaacuccuaccccaagcucuccaaguccuacaucaacgacaagggcaaggagguccucguccucuggggcauccaccaccccuccaccaccgccgaccagcagucccucuaccagaacgccgacaccuacgucuucgucggcaccucccgcuacuccaagaaguucaagcccgagaucgccauccgccccaagguccgcgaccaggagggccgcaugaacuacuacuggacccucgucgagcccggcgacaagaucaccuucgaggccaccggcaaccucgucgucccccgcuacgccuucgccauggagcgcaacgccggcuccggcaucaucaucuccgacacccccguccacgacugcaacaccaccugccagacccccaagggcgccaucaacaccucccuccccuuccagaacauccaccccaucaccaucggcaagugccccaaguacgucaaguccaccaagcuccgccucgccaccggccuccgcaacguccccuccauccagucccgcggccucuucggcgccaucgccggcuucaucgagggcggcuggaccggcauggucgacggcugguacggcuaccgccaccagaacgagcagggcuccggcuacgccgccgaccucaaguccacccagaacgccaucgacaagaucaccaacaaggucaacuccgucaucgagaagaugaacacccaguucaccgccgucggcaaggaguucaaccaccucgagcgccgcaucgagaaccucaacaagaaggucgacgacggcuuccucgacaucuggaccuacaacgccgagcuccucguccuccucgagaacgagcgcacccucgacuaccacgacuccaacgucaagaaccucuacgagaagguccgcaaccagcucaagaacaacgccaaggagaucggcaacggcugcuucgaguucuaccacaagugcgacaacaccugcauggaguccgucaagaacggcaccuacgacuaccccaaguacuccgaggaggccaagcucaaccgcgaggagaucgacggcgucaagcucgaguccacccgcaucuaccagauccucgccaucuacuccaccgucgccuccucccucguccucgucgucucccucggcgccaucuccuucuggaugugcuccaacggcucccuccagugccgcaucugcaucuga

SEQ ID NO: 102850 - RNA, 1701 nt, Artificial Sequence; identical to SEQ ID NO: 102845
  derived and/or modified CDS sequence (opt2) from hemagglutinin__InfluenzaA__AEH59375

SEQ ID NO: 102851 - RNA, 1701 nt, Artificial Sequence
  derived and/or modified CDS sequence (opt2) from hemagglutinin__InfluenzaA__AEH59379
augaaggccauccucgucguccuccucuacaccuucgccaccgccaacgccgacacccucugcaucggcuaccacgccaacaacuccaccgacaccgucgacaccguccucgagaagaacgucaccgucacccacuccgucaaccuccucgaggacaagcacaacggcaagcucugcaagcuccgcggcgucgccccccuccaccucggcaagugcaacaucgccggcuggauccucggcaaccccgagugcgagucccucuccaccgccuccuccugguccuacaucgucgagaccuccuccuccgacaacggcaccugcuaccccggcgacuucaucgacuacgaggagcuccgcgagcagcucuccuccgucuccuccuucgagcgcuucgagaucuuccccaagaccuccuccuggcccaaccacgacuccaacaagggcgucaccgccgccugcccccacgccggcgccaaguccuucuacaagaaccucaucuggcucgucaagaagggcaacuccuaccccaagcucuccaaguccuacaucaacgacaagggcaaggagguccucguccucuggggcauccaccaccccuccaccaccgccgaccagcagucccucuaccagaacgccgacaccuacgucuucgucggcaccucccgcuacuccaagaaguucaagcccgagaucgccauccgccccaagguccgcgaccaggagggccgcaugaacuacuacuggacccucgucgagcccggcgacaagaucaccuucgaggccaccggcaaccucgucgucccccgcuacgccuucgccauggagcgcaacgccggcuccggcaucaucaucuccgacacccccguccacgacugcaacaccaccugccagacccccaagggcgccaucaacaccucccuccccuuccagaacauccaccccaucaccaucggcaagugccccaaguacgucaaguccaccaagcuccgccucgccaccggccuccgcaacguccccuccauccagucccgcggccucuucggcgccaucgccggcuucaucgagggcggcuggaccggcauggucgacggcugguacggcuaccaccaccagaacgagcagggcuccggcuacgccgccgaccucaaguccacccagaacgccaucgacaagaucaccaacaaggucaacuccgucaucgagaagaugaacacccaguucaccgccgucggcaaggaguucaaccaccucgagaagcgcaucgagaaccucaacaagaaggucgacgacggcuuccucgacaucuggaccuacaacgccgagcuccucguccuccucgagaacgagcgcacccucgacuaccacgacuccaacgucaagaaccucuacgagaagguccgcaaccagcucaagaacaacgccaaggagaccggcaacggcugcuucgaguucuaccacaagugcgacaacaccugcauggaguccgucaagaacggcaccuacgacuaccccaaguacuccgaggaggccaagcucaaccgcgaggagaucgacggcgucaagcucgaguccacccgcaucuaccagauccucgccaucuacuccaccgucgccuccucccucguccucgucgucucccucggcgccaucuccuucuggaugugcuccaacggcucccuccagugccgcaucugcaucuga

SEQ ID NO: 102852 - RNA, 1701 nt, Artificial Sequence; identical to SEQ ID NO: 102845
  derived and/or modified CDS sequence (opt2) from hemagglutinin__InfluenzaA__AEH59381

SEQ ID NO: 102853 - RNA, 1701 nt, Artificial Sequence
  derived and/or modified CDS sequence (opt2) from hemagglutinin__InfluenzaA__AEH59383
augaaggccauccucgucguccuccucuacaccuucgccaccgccaacgccgacacccucugcaucggcuaccacgccaacaacuccaccgacaccgucgacaccguccucgagaagaacgucaccgucacccacuccgucaaccuccucgaggacaagcacaacggcaagcucugcaagcuccgcggcgucgccccccuccaccucggcaagugcaacaucgccggcuggauccucggcaaccccgagugcgagucccucuccaccgccuccuccugguccuacaucgucgagaccuccuccuccgacaacggcaccugcuaccccggcgacuucaucgacuacgaggagcuccgcgagcagcucuccuccgucuccuccuucgagcgcuucgagaucuuccccaagaccuccuccuggcccaaccacgacuccaacaagggcgucaccgccgccugcccccacgccggcgccaagggcuucuacaagaaccucaucuggcucgucaagaagggcaacuccuaccccaagcucuccaucuccuacaucaacgacaagggcaaggagguccucguccucuggggcauccaccaccccuccaccaccgccgaccagcagucccucuaccagaacgccgacaccuacgucuucgucggcaccucccgcuacuccaagaaguucaagcccgagaucgccauccgccccaagguccgcgaccaggagggccgcaugaacuacuacuggacccucgucgagcccggcgacaagaucaccuucgaggccaccggcaaccucgucgucccccgcuacgccuucgccauggagcgcaacgccggcuccggcaucaucaucuccgacacccccguccacgacugcaacaccaccugccagacccccaagggcgccaucaacaccucccuccccuuccagaacauccaccccaucaccaucggcaagugccccaaguacgucaaguccaccaagcuccgccucgccaccggccuccgcaacguccccuccauccagucccgcggccucuucggcgccaucgccggcuucaucgagggcggcuggaccggcauggucgacggcugguacggcuaccaccaccagaacgagcagggcuccggcuacgccgccgaccucaaguccacccagaacgccaucgacaagaucaccaacaaggucaacuccgucaucgagaagaugaacacccaguucaccgccgucggcaaggaguucaaccaccucgagaagcgcaucgagaaccucaacaagaaggucgacgacggcuuccucgacaucuggaccuacaacgccgagcuccucguccuccucgagaacgagcgcacccucgacuaccacgacuccaacgucaagaaccucuacgagaagguccgcaaccagcucaagaacaacgccaaggagaucggcaacggcugcuucgaguucuaccacaagugcgacaacaccugcauggaguccgucaagaacggcaccuacgacuaccccaaguacuccgaggaggccaagcucaaccgcgaggagaucgacggcgucaagcucgaguccacccgcaucuaccagauccucgccaucuacuccaccgucgccuccucccucguccucgucgucucccucggcgccaucuccuucuggaugugcuccaacggcucccuccagugccgcaucugcaucuga

SEQ ID NO: 102854 - RNA, 1701 nt, Artificial Sequence
  derived and/or modified CDS sequence (opt2) from hemagglutinin__InfluenzaA__AEH59385
augaaggccauccucgucguccuccucuacaccuucgccaccgccaacgccgacacccucugcaucggcuaccacgccaacaacuccaccgacaccgucgacaccguccucgagaagaacgucaccgucacccacuccgucaaccuccucgaggacaagcacaacggcaagcucugcaagcuccgcggcgucgccccccuccaccucggcaagugcaacaucgccggcuggauccucggcaaccccgagugcgagucccucuccaccgccuccuccugguccuacaucgucgagaccuccuccuccgacaacggcaccugcuaccccggcgacuucaucgacuacgaggagcuccgcgagcagcucuccuccgucuccuccuucgagcgcuucgagaucuuccccaagaccuccuccuggcccaaccacgacuccaacaagggcgucaccgccgccugcccccacgccggcgccaaguccuucuacaagaaccucaucuggcucgucaagaagggcaacuccuaccccaagcucuccaaguccuacaucaacgacaagggcaaggagguccucguccucuggggcauccaccaccccuccaccaccgccgaccagcagucccucuaccagaacgccgacgccuacaucuucgucggcaccucccgcuacuccaagaaguucaagcccgagaucgccauccgccccaagguccgcgaccaggagggccgcaugaacuacuacuggacccucgucgagcccggcgacaagaucaccuucgaggccaccggcaaccucgucgucccccgcuacgccuucgccauggagcgcaacgccggcuccggcaucaucaucuccgacacccccguccacgacugcaacaccaccugccagacccccaagggcgccaucaacaccucccuccccuuccagaacauccaccccaucaccaucggcaagugccccaaguacgucaaguccaccaagcuccgccucgccaccggccuccgcaacguccccuccauccagucccgcggccucuucggcgccaucgccggcuucaucgagggcggcuggaccggcauggucgacggcugguacggcuaccaccaccagaacgagcagggcuccggcuacgccgccgaccucaaguccacccagaacgccaucgacaagaucaccaacaaggucaacuccgucaucgagaagaugaacacccaguucaccgccgucggcaaggaguucaaccaccucgagaagcgcaucgagaaccucaacaagaaggucgacgacggcuuccucgacaucuggaccuacaacgccgagcuccucguccuccucgagaacgagcgcacccucgacuaccacgacuccaacgucaagaaccucuacgagaagguccgcaaccagcucaagaacaacgccaaggagaucggcaacggcugcuucgaguucuaccacaagugcgacaacaccugcauggaguccgucaagaacggcaccuacgacuaccccaaguacuccgaggaggccaagcucaaccgcgaggagaucgacggcgucaagcucgaguccacccgcaucuaccagauccucgccaucuacuccaccgucgccuccucccucguccucgucgucucccucggcgccaucuccuucuggaugugcuccaacggcucccuccagugccgcaucugcaucuga

SEQ ID NO: 102855 - RNA, 1701 nt, Artificial Sequence; identical to SEQ ID NO: 102845
  derived and/or modified CDS sequence (opt2) from hemagglutinin__InfluenzaA__AEH59387

SEQ ID NO: 102856 - RNA, 1701 nt, Artificial Sequence
  derived and/or modified CDS sequence (opt2) from hemagglutinin__InfluenzaA__AEH59393
augaaggccauccucgucgucauccucuacaccuucgccaccgccaacgccgacacccucugcaucggcuaccacgccaacaacuccaccgacaccgucgacaccguccucgagaagaacgucaccgucacccacuccgucaaccuccucgaggacaagcacaacggcaagcucugcaagcuccgcggcgucgccccccuccaccucggcaagugcaacaucgccggcuggauccucggcaaccccgagugcgagucccucuccaccgccuccuccugguccuacaucgucgagaccuccuccuccgacaacggcaccugcuaccccggcgacuucaucgacuacgaggagcuccgcgagcagcucuccuccgucuccuccuucgagcgcuucgagaucuuccccaagaccuccuccuggcccaaccacgacuccaacaagggcgucaccgccgccugcccccacgccggcgccaagggcuucuacaagaaccucaucuggcucgucaagaagggcaacuccuaccccaagcucuccaaguccuacaucaacgacaagggcaaggagguccucguccucuggggcauccaccaccccuccaccaccgccgaccagcagucccucuaccagaacgccgacaccuacgucuucgucggcaccucccgcuacuccaagaaguucaagcccgagaucgccauccgccccaagguccgcgaccaggagggccgcaugaacuacuacuggacccucgucgagcccggcgacaagaucaccuucgaggccaccggcaaccucgucgucccccgcuacgccuucgccauggagcgcaacgccggcuccggcaucaucaucuccgacacccccguccacgacugcaacaccaccugccagacccccaagggcgccaucaacaccucccuccccuuccagaacauccaccccaucaccaucggcaagugccccaaguacgucaaguccaccaagcuccgccucgccaccggccuccgcaacguccccuccauccagucccgcggccucuucggcgccaucgccggcuucaucgagggcggcuggaccggcauggucgacggcugguacggcuaccaccaccagaacgagcagggcuccggcuacgccgccgaccucaaguccacccagaacgccaucgacaagaucaccaacaaggucaacuccgucaucgagaagaugaacacccaguucaccgccgucggcaaggaguucaaccaccucgagaagcgcaucgagaaccucaacaagaaggucgacgacggcuuccucgacaucuggaccuacaacgccgagcuccucguccuccucgagaacgagcgcacccucgacuaccacgacuccaacgucaagaaccucuacgagaagguccgcaaccagcucaagaacaacgccaaggagaucggcaacggcugcuucgaguucuaccacaagugcgacaacaccugcauggaguccgucaagaacggcaccuacgacuaccccaaguacuccgaggaggccaagcucaaccgcgaggagaucgacggcgucaagcucgaguccacccgcaucuaccagauccucgccaucuacuccaccgucgccuccucccucguccucgucgucucccucggcgccaucuccuucuggaugugcuccaacggcucccuccagugccgcaucugcaucuga

SEQ ID NO: 102857 - RNA, 1701 nt, Artificial Sequence
  derived and/or modified CDS sequence (opt2) from hemagglutinin__InfluenzaA__AEH59397
augaaggccauccucgucguccuccucuacaccuucgccaccgccaacgccgacacccucugcaucggcuaccacgccaacaacuccaccgacaccgucgacaccguccucgagaagaacgucaccgucacccacuccgucaaccuccucgaggacaagcacaacggcaagcucugcaagcuccgcggcgucgccccccuccaccucggcaagugcaacaucgccggcuggauccucggcaaccccgagugcgagucccucuccaccgccuccuccugguccuacaucgucgagaccuccuccuccgacaacggcaccugcuaccccggcgacuucaucaacuacgaggagcuccgcgagcagcucuccuccgucuccuccuucgagcgcuucgagaucuuccccaagaccuccuccuggcccucccacgacuccaacaagggcgucaccgccgccugcccccacgccggcgccaaguccuucuacaagaaccucaucuggcucgucaagaagggcaacuccuaccccaagcucuccaaguccuacaucaacgacaagggcaaggagguccucguccucuggggcauccaccaccccuccaccuccgccgaccagcagucccucuaccagaacgccgacgccuacgucuucgucggcaccuccaaguacuccaagaaguucaagcccgagaucgccguccgccccaagguccgcgaccaggagggccgcaugaacuacuacuggacccucgucgagcccggcgacaagaucaccuucgaggccaccggcaaccuccucgucccccgcuacgccuucgccauggagcgcaacgccggcuccggcaucaucaucuccgacacccccguccacgacugcaacaccaccugccagacccccaagggcgccaucaacaccucccuccccuuccagaacauccaccccaucaccaucggcaagugccccaaguacgucaaguccaccaagcuccgccucgccaccggccuccgcaacguccccuccauccagucccgcggccucuucggcgccaucgccggcuucaucgagggcggcuggaccggcauggucgacggcugguacggcuaccaccaccagaacgagcagggcuccggcuacgccgccgaccucaaguccacccagaacgccaucgacaagaucaccaacaaggucaacuccgucaucgagaagaugaacacccaguucaccgccgucggcaaggaguucaaccaccucgagaagcgcaucgagaaccucaacaagaaggucgacgacggcuuccucgacaucuggaccuacaacgccgagcuccucguccuccucgagaacgagcgcacccucgacuaccacgacuccaacgucaagaaccucuacgagaagguccgcucccagcucaagaacaacgccaaggagaucgagaacggcugcuucgaguucuaccacaagugcgacaacaccugcauggaguccgucaagaacggcaccuacgacuaccccaaguacuccgaggaggccaagcucaaccgcgaggagaucgacggcgucaagcucgaguccacccgcaucuaccagauccucgccaucuacuccaccgucgccuccucccucguccucgucgucucccucggcgccaucuccuucuggaugugcuccaacggcucccuccagugccgcaucugcaucuga

SEQ ID NO: 102858 - RNA, 1701 nt, Artificial Sequence
  derived and/or modified CDS sequence (opt2) from hemagglutinin__InfluenzaA__AEH59399
augaaggccauccucgucguccuccucuacaccuucgccaccgccaacgccgacacccucugcaucggcuaccacgccaacaacuccaccgacaccgucgacaccguccucgagaagaacgucaccgucacccacuccgucaaccuccucgaggacaagcacaacggcaagcucugcaagcuccgcggcgucgccccccuccaccucggcaagugcaacaucgccggcuggauccucggcaaccccgagugcgagucccucuccaccgccuccuccugguccuacaucgucgagaccuccuccuccgacaacggcaccugcuaccccggcgacuucaucgacuacgaggagcuccgcgagcagcucuccuccgucuccuccuucgagcgcuucgagaucuuccccaagaccuccuccuggcccaaccacgacuccaacaagggcgucaccgccgccugcccccacgccggcgccaagggcuucuacaagaaccucaucuggcucgucaagaagggcaacuccuaccccaagcucuccaaguccuacaucaacgacaagggcaaggagguccucguccucuggggcauccaccaccccuccaccaccgccgaccagcagucccucuaccagaacgccgacaccuacgucuucgucggcaccucccgcuacuccaagaaguucaagcccgagaucgccauccgccccaagguccgcgaccaggagggccgcaugaacuacuacuggaccaucgucgagcccggcgacaagaucaccuucgaggccaccggcaaccucgucgucccccgcuacgccuucgccauggagcgcaacgccggcuccggcaucaucaucuccgacacccccguccacgacugcaacaccaccugccagacccccaagggcgccaucaacaccucccuccccuuccagaacauccaccccaucaccaucggcaagugccccaaguacgucaaguccaccaagcuccgccucgccaccggccuccgcaacguccccuccauccagucccgcggccucuucggcgccaucgccggcuucaucgagggcggcuggaccggcauggucgacggcugguacggcuaccaccaccagaacgagcagggcuccggcuacgccgccgaccucaaguccacccagaacgccaucgacaagaucaccaacaaggucaacuccgucaucgagaagaugaacacccaguucaccgccgucggcaaggaguucaaccaccucgagaagcgcaucgagaaccucaacaagaaggucgacgacggcuuccucgacaucuggaccuacaacgccgagcuccucguccuccucgagaacgagcgcacccucgacuaccacgacuccaacgucaagaaccucuacgagaagguccgcaaccagcucaagaacaacgccaaggagaucggcaacggcugcuucgaguucuaccacaagugcgacaacaccugcauggaguccgucaagaacggcaccuacgacuaccccaaguacuccgaggaggccaagcucaaccgcgaggagaucgacggcgucaagcucgaguccacccgcaucuaccagauccucgccaucuacuccaccgucgccuccucccucguccucgucgucucccucggcgccaucuccuucuggaugugcuccaacggcucccuccagugccgcaucugcaucuga

SEQ ID NO: 102859 - RNA, 1701 nt, Artificial Sequence
  derived and/or modified CDS sequence (opt2) from hemagglutinin__InfluenzaA__AEH59403
augaaggccauccucgucguccuccucuacaccuucgccaccgccaacgccgacacccucugcaucggcuaccacgccaacaacuccaccgacaccgucgacaccguccucgagaagaacgucaccgucacccacuccgucaaccuccucgaggacaagcacaacggcaagcucugcaagcuccgcggcgucgccccccuccaccucggcaagugcaacaucgccggcuggauccucggcaaccccgagugcgagucccucuccaccgccuccuccugguccuacaucgucgagaccuccuccuccgacaacggcaccugcuaccccggcgacuucaucgacuacgaggagcuccgcgagcagcucuccuccgucuccuccuucgagcgcuucgagaucuuccccaagaccuccuccuggcccaaccacgacuccaacaagggcgucaccgccgccugcccccacgccggcgccaagggcuucuacaagaaccucaucuggcucgucaagaagggcaacuccuaccccaagcucuccaaguccuacaucaacgacaagggcaaggagguccucguccucuggggcauccaccaccccuccaccaccgccgaccagcagucccucuaccagaacgccgacaccuacgucuucgucggcaccucccgcuacuccaagaaguucaagcccgagaucgccauccgccccaagguccgcgaccaggagggccgcaugaacuacuacuggacccucgucgcccccggcgacaagaucaccuucgaggccaccggcaaccucgucgucccccgcuacgccuucgccauggagcgcaacgccggcuccggcaucaucaucuccgacacccccguccacgacugcaacaccaccugccagacccccaagggcgccaucaacaccucccuccccuuccagaacauccaccccaucaccaucggcaagugccccaaguacgucaaguccaccaagcuccgccucgccaccggccuccgcaacguccccuccauccagucccgcggccucuucggcgccaucgccggcuucaucgagggcggcuggaccggcauggucgacggcugguacggcuaccaccaccagaacgagcagggcuccggcuacgccgccgaccucaaguccacccagaacgccaucgacaagaucaccaacaaggucaacuccgucaucgagaagaugaacacccaguucaccgccgucggcaaggaguucaaccaccucgagaagcgcaucgagaaccucaacaagaaggucgacgacggcuuccucgacaucuggaccuacaacgccgagcuccucguccuccucgagaacgagcgcacccucgacuaccacgacuccaacgucaagaaccucuacgagaagguccgcaaccagcucaagaacaacgccaaggagaucggcaacggcugcuucgaguucuaccacaagugcgacaacaccugcauggaguccgucaagaacggcaccuacgacuaccccaaguacuccgaggaggccaagcucaaccgcgaggagaucgacggcgucaagcucgaguccacccgcaucuaccagauccucgccaucuacuccaccgucgccuccucccucguccucgucgucucccucggcgccaucuccuucuggaugugcuccaacggcucccuccagugccgcaucugcaucuga

SEQ ID NO: 102860 - RNA, 1701 nt, Artificial Sequence
  derived and/or modified CDS sequence (opt2) from hemagglutinin__InfluenzaA__AEH59407
augaaggccauccucgucgucaugcucuacaccuucgccaccgccaacgccgacacccucugcaucggcuaccacgccaacaacuccaccgacaccgucgacaccguccucgagaagaacgucaccgucacccacuccgucaaccuccucgaggacaagcacaacggcaagcucugcaagcuccgcggcgucgccccccuccaccucggcaagugcaacaucgccggcuggauccucggcaaccccgagugcgagucccucuccaccgccuccuccugguccuacaucgucgagaccuccuccuccgacaacggcaccugcuaccccggcgacuucaucgacuacgaggagcuccgcgagcagcucuccuccgucuccuccuucgagcgcuucgagaucuuccccaagaccuccuccuggcccaaccacgacuccaacaagggcgucaccgccgccugcccccacgccggcgccaagggcuucuacaagaaccucaucuggcucgucaagaagggcaacuccuaccccaagcucuccaaguccuacaucaacgacaagggcaaggagguccucguccucuggggcauccaccaccccuccaccaccgccgaccagcagucccucuaccagaacgccgacaccuacgucuucgucggcaccucccgcuacuccaagaaguucaagcccgagaucgccauccgccccaagguccgcgaccaggagggccgcaugaacuacuacuggacccucgucgagcccggcgacaagaucaccuucgaggccaccggcaaccucgucgucccccgcuacgccuucgccauggagcgcaacgccggcuccggcaucaucaucuccgacacccccguccacgacugcaacaccaccugccagacccccaagggcgccaucaacaccucccuccccuuccagaacauccaccccaucaccaucggcaagugccccaaguacgucaaguccaccaagcuccgccucgccaccggccuccgcaacguccccuccauccagucccgcggccucuucggcgccaucgccggcuucaucgagggcggcuggaccggcauggucgacggcugguacggcuaccaccaccagaacgagcagggcuccggcuacgccgccgaccucaaguccacccagaacgccaucgacaagaucaccaacaaggucaacuccgucaucgagaagaugaacacccaguucaccgccgucggcaaggaguucaaccaccucgagaagcgcaucgagaaccucaacaagaaggucgacgacggcuuccucgacaucuggaccuacaacgccgagcuccucguccuccucgagaacgagcgcacccucgacuaccacgacuccaacgucaagaaccucuacgagaagguccgcaaccagcucaagaacaacgccaaggagaucggcaacggcugcuucgaguucuaccacaagugcgacaacaccugcauggaguccgucaagaacggcaccuacgacuaccccaaguacuccgaggaggccaagcucaaccgcgaggagaucgacggcgucaagcucgaguccacccgcaucuaccagauccucgccaucuacuccaccgucgccuccucccucguccucgucgucucccucggcgccaucuccuucuggaugugcuccaacggcucccuccagugccgcaucugcaucuga

SEQ ID NO: 102861 - RNA, 1701 nt, Artificial Sequence; identical to SEQ ID NO: 102860
  derived and/or modified CDS sequence (opt2) from hemagglutinin__InfluenzaA__AEH59409

SEQ ID NO: 102862 - RNA, 1701 nt, Artificial Sequence
  derived and/or modified CDS sequence (opt2) from hemagglutinin__InfluenzaA__AEH59411
augaaggccauccucgucguccuccucuacaccuucgccaccgccaacgccgacacccucugcaucggcuaccacgccaacaacuccaccgacaccgucgacaccguccucgagaagaacgucaccgucacccacuccgucaaccuccucgaggacaagcacaacggcaagcucugcaagcuccgcggcgucgccccccuccaccucggcaagugcaacaucgccggcuggauccucggcaaccccgagugcgagucccucuccaccgccuccuccugguccuacaucgucgagaccuccuccuccgacaacggcaccugcuaccccggcgacuucaucgacuacgaggagcuccgcgagcagcucuccuccgucuccuccuucgagcgcuucgagaucuuccccaagaccuccuccuggcccaaccacgacuccaacaagggcgucaccgccgccugcccccacgccggcgccaagggcuucuacaagaaccucaucuggcucgucaagaagggcaacuccuaccccaagcucuccaaguccuacaucaacgacaagggcaaggagguccucguccucuggggcauccaccaccccuccaccaccgccgaccagcagucccucuaccagaacgccgacaccuacgucuucgucggcaccucccgcuacuccaagaaguucaagcccgagaucgccauccgccccaagguccgcgaccaggagggccgcaugaacuacuacuggacccucgucgagcccggcgacaagaucaccuucgaggccaccggcaaccucgucgucccccgcuacgccuucgccauggaccgcaacgccggcuccggcaucaucaucuccgacacccccguccacgacugcaacaccaccugccagacccccaagggcgccaucaacaccucccuccccuuccagaacauccaccccaucaccaucggcaagugccccaaguacgucaaguccaccaagcuccgccucgccaccggccuccgcaacguccccuccauccagucccgcggccucuucggcgccaucgccggcuucaucgagggcggcuggaccggcauggucgacggcugguacggcuaccaccaccagaacgagcagggcuccggcuacgccgccgaccucaaguccacccagaacgccaucgacaagaucaccaacaaggucaacuccgucaucgagaagaugaacacccaguucaccgccgucggcaaggaguucaaccaccucgagaagcgcaucgagaaccucaacaagaaggucgacgacggcuuccucgacaucuggaccuacaacgccgagcuccucguccuccucgagaacgagcgcacccucgacuaccacgacuccaacgucaagaaccucuacgagaagguccgcaaccagcucaagaacaacgccaaggagaucggcaacggcugcuucgaguucuaccacaagugcgacaacaccugcauggaguccgucaagaacggcaccuacgacuaccccaaguacuccgaggaggccaagcucaaccgcgaggagaucgacggcgucaagcucgaguccacccgcaucuaccagauccucgccaucuacuccaccgucgccuccucccucguccucgucgucucccucggcgccaucuccuucuggaugugcuccaacggcucccuccagugccgcaucugcaucuga

SEQ ID NO: 102863 - RNA, 1701 nt, Artificial Sequence
  derived and/or modified CDS sequence (opt2) from hemagglutinin__InfluenzaA__AEH59413
augaaggccauccucgucguccuccucuacaccuucgccaucgccaacgccgacacccucugcaucggcuaccacgccaacaacuccaccgacaccgucgacaccguccucgagaagaacgucaccgucacccacuccgucaaccuccucgaggacaagcacaacggcaagcucugcaagcuccgcggcgucgccccccuccaccucggcaagugcaacaucgccggcuggauccucggcaaccccgagugcgagucccucuccaccgccuccuccugguccuacaucgucgagaccuccuccuccgacaacggcaccugcuaccccggcgacuucaucaacuacgaggagcuccgcgagcagcucuccuccgucuccuccuucgagcgcuucgagaucuuccccaagaccuccuccuggcccaaccacgacuccaacaagggcgucaccgccgccugcccccacgccggcgccaaguccuucuacaagaaccucaucuggcucgucaagaagggcaacuccuaccccaagcucuccaaguccuacaucaacgacaagggcaaggagguccucguccucuggggcauccaccaccccuccaccuccgccgaccagcagucccucuaccagaacgccgacgccuacgucuucgucggcaccuccaaguacuccaagaaguucaagcccgagaucgccguccgccccaagguccgcgaccaggagggccgcaugaacuacuacuggacccucgucgagcccggcgacaagaucaccuucgaggccaccggcaaccuccucgucccccgcuacgccuucgccauggagcgcaacgccggcuccggcaucaucaucuccgacacccccguccacgacugcaacaccaccugccagacccccgagggcgccaucaacaccucccuccccuuccagaacauccaccccaucaccaucggcaagugccccaaguacgucaaguccaccaagcuccgccucgccaccggccuccgcaacguccccuccauccagucccgcggccucuucggcgccaucgccggcuucaucgagggcggcuggaccggcauggucgacggcugguacggcuaccaccaccagaacgagcagggcuccggcuacgccgccgaccucaaguccacccagaacgccaucgacaagaucaccaacaaggucaacuccgucaucgagaagaugaacacccaguucaccgccgucggcaaggaguucaaccaccucgagaagcgcaucgagaaccucaacaagaaggucgacgacggcuuccucgacaucuggaccuacaacgccgagcuccucguccuccucgagaacgagcgcacccucgacuaccacgacuccaacgucaagaaccucuacgagaagguccgcucccagcucaagaacaacgccaaggagaucggcaacggcugcuucgaguucuaccacaagugcgacaacaccugcauggaguccgucaagaacggcaccuacgacuaccccaaguacuccgaggaggccaagcucaaccgcgaggagaucgacggcgucaagcucgaguccacccgcaucuaccagauccucgccaucuacuccaccgucgccuccucccucguccucgucgucucccucggcgccaucuccuucuggaugugcuccaacggcucccuccagugccgcaucugcaucuga

SEQ ID NO: 102864 - RNA, 1701 nt, Artificial Sequence
  derived and/or modified CDS sequence (opt2) from hemagglutinin__InfluenzaA__AEH59585
augaaggccauccucgucguccuccucuacaccuucgccaccgccaacgccgacacccucugcaucggcuaccacgccaacaacuccaccgacaccgucgacaccguccucgagaagaacgucaccgucacccacuccgucaaccuccucgaggacaagcacaacggcaagcucugcaagcuccgcggcgucgccccccuccaccucggcaagugcaacaucgccggcuggauccucggcaaccccgagugcgagucccucuccaccgccuccuccugguccuacaucgucgagaccuccuccuccgacaacggcaccugcuaccccggcgacuucaucgacuacgaggagcuccgcgagcagcucuccuccgucuccuccuucgagcgcuucgagaucuuccccaagaccuccuccuggcccaaccacgaccccaacaagggcgucaccgccgccugcccccacgccggcgccaaguccuucuacaagaaccucaucuggcucgucaagaagggcaacuccuaccccaagcucuccaaguccuacaucaacgacaagggcaaggagguccucguccucuggggcauccaccaccccuccaccuccgccgaccagcagucccucuaccagaacgccgacgccuacgucuucgucggcaccucccgcuacuccaagaaguucaagcccgagaucgccauccgccccaagguccgcgaccaggagggccgcaugaacuacuacuggacccucgucgagcccggcgacaagaucaccuucgaggccaccggcaaccucgucgucccccgcuacgccuucgccauggagcgcaacgccggcuccggcaucaucaucuccgacacccccguccacgacugcaacaccaccugccagacccccaagggcgccaucaacaccucccuccccuuccagaacauccaccccaucaccaucggcaagugccccaaguacgucaaguccaccaagcuccgccucgccaccggccuccgcaacguccccuccauccagucccgcggccucuucggcgccaucgccggcuucaucgagggcggcuggaccggcauggucgacggcugguacggcuaccaccaccagaacgagcagggcuccggcuacgccgccgaccucaaguccacccagaacgccaucgacgagaucaccaacaaggucaacuccgucaucgagaagaugaacacccaguucaccgucgucggcaaggaguucaaccaccucgagaagcgcaucgagaaccucaacaagaaggucgacgacggcuuccucgacaucuggaccuacaacgccgagcuccucguccuccucgagaacgagcgcacccucgacuaccacgacuccaacgucaagaaccucuacgagaagguccgcucccagcucaagaacaacgccaaggagaucggcaacggcugcuucgaguucuaccacaagugcgacaacaccugcauggaguccgucaagaacggcaccuacgacuaccccaaguacuccgaggaggccaagcucaaccgcgaggagaucgacggcgucaagcucgaguccacccgcaucuaccagauccucgccaucuacuccaccgucgccuccucccucguccucgucgucucccucggcgccaucuccuucuggaugugcuccaacggcucccuccagugccgcaucugcaucuga

SEQ ID NO: 102865 - RNA, 1701 nt, Artificial Sequence
  derived and/or modified CDS sequence (opt2) from hemagglutinin__InfluenzaA__AEH59587
augaaggccauccucgucguccuccucuacaccuucgccaccgccaacgccgacacccucugcaucggcuaccacgccaacaacuccaccgacaccgucgacaccguccucgagaagaacgucaccgucacccacuccgucaaccuccucgaggacaagcacaacggcaagcucugcaagcuccgcggcgucgccccccuccaccucggcaagugcaacaucgccggcuggauccucggcaaccccgagugcgagucccucuccaccgccuccuccugguccuacaucgucgagaccuccuccuccgacaacggcaccugcuaccccggcgacuucaucgacuacgaggagcuccgcgagcagcucuccuccgucuccuccuucgagcgcuucgagaucuuccccaagaccuccuccuggcccaaccacgaguccaacaagggcgucaccgccgccugcccccacgccggcgccaaguccuucuacaagaaccucaucuggcucgucaagaagggcaacuccuaccccaagcucuccaaguccuacaucaacgacaagggcaaggagguccucguccucuggggcauccaccaccccuccaccuccgccgaccagcagucccucuaccagaacgccgacgccuacgucuucgucggcaccucccgcuacuccaagaaguucaagcccgagaucgccauccgccccaagguccgcgaccaggagggccgcaugaacuacuacuggacccucgucgagcccggcgacaagaucaccuucgaggccaccggcaaccucgucgucccccgcuacgccuucgccauggagcgcaacgccggcuccggcaucaucaucuccgacacccccguccacgacugcaacaccaccugccagacccccaagggcgccaucaacaccucccuccccuuccagaacauccaccccaucaccaucggcaagugccccaaguacgucaaguccaccaagcuccgccucgccaccggccuccgcaacguccccuucauccagucccgcggccucuucggcgccaucgccggcuucaucgagggcggcuggaccggcauggucgacggcugguacggcuaccaccaccagaacgagcagggcuccggcuacgccgccgaccucaaguccacccagaacgccaucgacaagaucaccaacaaggucaacuccgucaucgagaagaugaacacccaguucaccgucgucggcaaggaguucaacccccucgagaagcgcaucgagaaccucaacaagaaggucgacgacggcuuccucgacaucuggaccuacaacgccgagcuccucguccuccucgagaacgagcgcacccucgacuaccacgacuccaacgucaagaaccucuacgagaagguccgcucccagcucaagaacaacgccaaggagaucggcaacggcugcuucgaguucuaccacaagugcgacaacaccugcauggaguccgucaagaacggcaccuacgacuaccccaaguacuccgaggaggccaagcucaaccgcgaggagaucgacggcgucaagcucgaguccacccgcaucuaccagauccucgccaucuacuccaccgucgccuccucccucguccucgucgucucccucggcgccaucuccuucuggaugugcuccaacggcucccuccagugccgcaucugcaucuga

SEQ ID NO: 102866 - RNA, 1701 nt, Artificial Sequence; identical to SEQ ID NO: 99869
  derived and/or modified CDS sequence (opt2) from hemagglutinin__InfluenzaA__AEH59589

SEQ ID NO: 102867 - RNA, 1701 nt, Artificial Sequence
  derived and/or modified CDS sequence (opt2) from hemagglutinin__InfluenzaA__AEH59591
augaaggccauccucgucguccuccucuacaccuucgccaccgccaacgccgacacccucugcaucggcuaccacgccaacaacuccaccgacaccgucgacaccguccucgagaagaacgucaccgucacccacuccgucaaccuccucgaggacaagcacaacggcaagcucugcaagcuccgcggcgucgccccccuccaccucggcaagugcaacaucgccggcuggauccucggcaaccccgagugcgagucccucuccaccgccuccuccugguccuacaucgucgagaccuccuccuccgacaacggcaccugcuaccccggcgacuucaucgacuacgaggagcuccgcgagcagcucuccuccgucuccuccuucgagcgcuucgagaucuuccccaagaccuccuccuggcccaaccacgacuccaacaagggcgucaccgccgccugcccccacgccggcgccaaguccuucuacaagaaccucaucuggcucgucaagaagggcaacuccuaccccaagcucuccaaguccuacaucaacgacaagggcaaggagguccucguccucuggggcauccaccaccccuccaccuccgccgaccagcagucccucuaccagaacgccgacgccuacgucuucgucggcaccucccgcuacuccaagaaguucaagcccgagaucgccauccgccccaagguccgcgaccaggagggccgcaugaacuacuacuggacccucgucgagcccggcgacaagaucaccuucgaggccaccggcaaccucgucgucccccgcuacgccuucgccauggagcgcaacgccggcuccggcaucaucaucuccgacacccccguccacgacugcaacaccaccugccagacccccaagggcgccaucaacaccucccuccccuuccagaacauccaccccaucaccaucggcaagugccccaaguacgucaaguccaccaagcuccgccucgccaccggccuccgcaacguccccuccauccagucccgcggccucuucggcgccaucgccggcuucaucgagggcggcuggaccggcauggucgacggcugguacggcuaccaccaccagaacgagcagggcuccggcuacgccgccgaccucaaguccacccagaacgccaucgacaagaucaccaacaaggucaacuccgucaucgagaagaugaacacccaguucaccgucgucggcaaggaguucaaccaccucgagaagcgcaucgagaaccucaacaagaaggucgacgacggcuuccucgacaucuggaccuacaacgccgagcuccucguccuccucgagaacgagcgcacccucgacuaccacgacuccaacgucaagaaccucuacgagaagguccgcucccagcucaagaacaacgccaaggagaucggcaacggcugcuucgaguucuaccacaagugcgacaacaccugcauggaguccgucaagaacggcaccuacgacuaccccaaguacuccgaggaggccaagcucaaccgcgaggagaucgacggcgucaagcucgaguccacccgcaucuaccagauccucgccaucuacuccaccgucgccuccucccucguccucgucgucucccucggcgccaucuccuucuggaugugcuccaacggcucccuccagugccgcaucugcaucuga

SEQ ID NO: 102868 - RNA, 1701 nt, Artificial Sequence
  derived and/or modified CDS sequence (opt2) from hemagglutinin__InfluenzaA__AEH59593
augaaggccauccucgucguccuccucuacaccuucgccaccgccaacgccgacacccucugcaucggcuaccacgccaacaacuccaccgacaccgucgacaccguccucgagaagaacgucaccgucacccacuccgucaaccuccucgaggacaagcacaacggcaagcucugcaagcuccgcggcgucgccccccuccaccucggcaagugcaacaucgccggcuggauccucggcaaccccgagugcgagucccucuccaccgccuccuccugguccuacaucgucgagaccuccuccuccgacaacggcaccugcuaccccggcgacuucaucgacuacgaggagcuccgcgagcagcucuccuccgucuccuccuucgagcgcuucgagaucuuccccaagaccuccuccuggcccaaccacgaguccaacaagggcgucaccgccgccugcccccacgccggcgccaaguccuucuacaagaaccucaucuggcucgucaagaagggcaacuccuaccccaagcucuccaaguccuacaucaacgacaagggcaaggagguccucguccucuggggcauccaccaccccuccaccuccgccgaccagcaguccaucuaccagaacgccgacgccuacgucuucgucggcaccucccgcuacuccaagaaguucaagcccgagaucgccauccgccccaagguccgcgaccaggagggccgcaugaacuacuacuggacccucgucgagcccggcgacaagaucaccuucgaggccaccggcaaccucgucgucccccgcuacgccuucgccauggagcgcaacgccggcuccggcaucaucaucuccgacacccccguccacgacugcaacaccaccugccagacccccaagggcgccaucaacaccucccuccccuuccagaacauccaccccaucaccaucggcaagugccccaaguacgucaaguccaccaagcuccgccucgccaccggccuccgcaacguccccuccauccagucccgcggccucuucggcgccaucgccggcuucaucgagggcggcuggaccggcauggucgacggcugguacggcuaccaccaccagaacgagcagggcuccggcuacgccgccgaccucaaguccacccagaacgccaucgacaagaucaccaacaaggucaacuccgucaucgagaagaugaacacccaguucaccgccgucggcaaggaguucaaccaccucgagaagcgcaucgagaaccucaacaagaaggucgacgacggcuuccucgacaucuggaccuacaacgccgagcuccucguccuccucgagaacgagcgcacccucgacuaccacgacuccaacgucaagaaccucuacgagaagguccgcucccagcucaagaacaacgccaaggagaucggcaacggcugcuucgaguucuaccacaagugcgacaacaccugcauggaguccgucaagaacggcaccuacgacuaccccaaguacuccgaggaggccaagcucaaccgcgaggagaucgacggcgucaagcucgaguccacccgcaucuaccagauccucgccaucuacuccaccgucgccuccucccucguccucgucgucucccucggcgccaucuccuucuggaugugcuccaacggcucccuccagugccgcaucugcaucuga

SEQ ID NO: 102869 - RNA, 1701 nt, Artificial Sequence; identical to SEQ ID NO: 99503
  derived and/or modified CDS sequence (opt2) from hemagglutinin__InfluenzaA__AEH59595

SEQ ID NO: 102870 - RNA, 1701 nt, Artificial Sequence; identical to SEQ ID NO: 99869
  derived and/or modified CDS sequence (opt2) from hemagglutinin__InfluenzaA__AEH59597

SEQ ID NO: 102871 - RNA, 1701 nt, Artificial Sequence; identical to SEQ ID NO: 102864
  derived and/or modified CDS sequence (opt2) from hemagglutinin__InfluenzaA__AEH59599

SEQ ID NO: 102872 - RNA, 1701 nt, Artificial Sequence
  derived and/or modified CDS sequence (opt2) from hemagglutinin__InfluenzaA__AEH59601
augaaggccauccucgucguccuccucuacaccuucgccaccgccaacgccgacacccucugcaucggcuaccacgccaacaacuccaccgacaccgucgacaccguccucgagaagaacgucaccgucacccacuccgucaaccuccucgaggacaagcacaacggcaagcucugcaagcuccgcggcgucgccccccuccaccucggcaacugcaacaucgccggcuggauccucggcaaccccgagugcgagucccucuccaccgccuccuccugguccuacaucgucgagaccuccuccuccgacaacggcaccugcuaccccggcgacuucaucgacuacgaggagcuccgcgagcagcucuccuccgucuccuccuucgagcgcuucgagaucuuccccaagaccuccuccuggcccaaccacgacuccaacaagggcgucaccgccgccugcccccacgccggcgccaaguccuucuacaagaaccucaucuggcucgucaagaagggcaacuccuaccccaagcucuccaaguccuacaucaacgacaagggcaaggagguccucguccucuggggcauccaccaccccuccaccuccgccgaccagcagucccucuaccagaacgccgacgccuacgucuucgucggcaccucccgcuacuccaagaaguucaagcccgagaucgccauccgccccaagguccgcgaccaggagggccgcaugaacuacuacuggacccucgucgagcccggcgacaagaucaccuucgaggccaccggcaaccucgucgucccccgcuacgccuucgccauggagcgcaacgccggcuccggcaucaucaucuccgacacccccguccacgacugcaacaccaccugccagacccccaagggcgccaucaacaccucccuccccuuccagaacauccaccccaucaccaucggcaagugccccaaguacgucaaguccaccaagcuccgccucgccaccggccuccgcaacguccccuccauccagucccgcggccucuucggcgccaucgccggcuucaucgagggcggcuggaccggcauggucgacggcugguacggcuaccaccaccagaacgagcagggcuccggcuacgccgccgaccucaaguccacccagaacgccaucgacaagaucaccaacaaggucaacuccgucaucgagaagaugaacacccaguucaccgucgucggcaaggaguucaaccaccucgagaagcgcaucgagaaccucaacaagaaggucgacgacggcuuccucgacaucuggaccuacaacgccgagcuccucguccuccucgagaacgagcgcacccucgacuaccacgacuccaacgucaagaaccucuacgagaagguccgcucccagcucaagaacaacgccaaggagaucggcaacggcugcuucgaguucuaccacaagugcgacaacaccugcauggaguccgucaagaacggcaccuacgacuaccccaaguacuccgaggaggccaagcucaaccgcgaggagaucgacggcgucaagcucgaguccacccgcaucuaccagauccucgccaucuacuccaccgucgccuccucccucguccucgucgucucccucggcgccaucuccuucuggaugugcuccaacggcucccuccagugccgcaucugcaucuga

SEQ ID NO: 102873 - RNA, 1701 nt, Artificial Sequence; identical to SEQ ID NO: 99503
  derived and/or modified CDS sequence (opt2) from hemagglutinin__InfluenzaA__AEH59604

SEQ ID NO: 102874 - RNA, 1701 nt, Artificial Sequence; identical to SEQ ID NO: 99503
  derived and/or modified CDS sequence (opt2) from hemagglutinin__InfluenzaA__AEH59614

SEQ ID NO: 102875 - RNA, 1701 nt, Artificial Sequence
  derived and/or modified CDS sequence (opt2) from hemagglutinin__InfluenzaA__AEH59624
augaaggccauccucgucguccuccucuacaccuucgccaccgccaacgccgacacccucugcaucggcuaccacgccaacaacuccaccgacaccgucgacaccguccucgagaagaacgucaccgucacccacuccgucaaccuccucgaggacaagcacaacggcaagcucugcaagcuccgcggcgucgccccccuccaccucggcaagugcaacaucgccggcuggauccucggcaaccccgagugcgagucccucuccaccgccuccuccugguccuacaucgucgagaccuccuccuccgacaacggcaccugcuaccccggcgacuucaucgacuacgaggagcuccgcgagcagcucuccuccgucuccuccuucgagcgcuucgagaucuuccccaagaccuccuccuggcccaaccacgaccccaacaagggcgucaccgccgccugcccccacgccggcgccaaguccuucuacaagaaccucaucuggcucgucaagaagggcaacuccuaccccaagcucuccaaguccuacaucaacgacaagggcaaggagguccucguccucuggggcauccaccaccccuccaccuccgccgaccagcaguccuucuaccagaacgccgacgccuacgucuucgucggcaccucccgcuacuccaagaaguucaagcccgagaucgccauccgccccaagguccgcgaccaggagggccgcaugaacuacuacuggacccucgucgagcccggcgacaagaucaccuucgaggccaccggcaaccucgucgucccccgcuacgccuucgccauggagcgcaacgccggcuccggcaucaucaucuccgacacccccguccacgacugcaacaccaccugccagacccccaagggcgccaucaacaccucccuccccuuccagaacauccaccccaucaccaucggcaagugccccaaguacgucaaguccaccaagcuccgccucgccaccggccuccgcaacguccccuccauccagucccgcggccucuucggcgccaucgccggcuucaucgagggcggcuggaccggcauggucgacggcugguacggcuaccaccaccagaacgagcagggcuccggcuacgccgccgaccucaaguccacccagaacgccaucgacgagaucaccaacaaggucaacuccgucaucgagaagaugaacacccaguucaccgccgucggcaaggaguucaaccaccucgagaagcgcaucgagaaccucaacaagaaggucgacgacggcuuccucgacaucuggaccuacaacgccgagcuccucguccuccucgagaacgagcgcacccucgacuaccacgacuccaacgucaagaaccucuacgagaagguccgcucccagcucaagaacaacgccaaggagaucggcaacggcugcuucgaguucuaccacaagugcgacaacaccugcauggaguccgucaagaacggcaccuacgacuaccccaaguacuccgaggaggccaagcucaaccgcgaggagaucgacggcgucaagcucgaguccacccgcaucuaccagauccucgccaucuacuccaccgucgccuccucccucguccucgucgucucccucggcgccaucuccuucuggaugugcuccaacggcucccuccagugccgcaucugcaucuga

SEQ ID NO: 102876 - RNA, 1698 nt, Artificial Sequence
  derived and/or modified CDS sequence (opt2) from hemagglutinin__InfluenzaA__AEH77259
augaaggucaagcuccucguccuccucugcaccuucaccgccaccuacgccgacaccaucugcaucggcuaccacgccaacaacuccaccgacaccgucgacaccguccucgagaagaacgucaccgucacccacuccgucaaccuccucgagaacucccacaacggcaagcucugccuccucaagggcaucgccccccuccagcucggcaacugcuccgucgccggcuggauccucggcaaccccgagugcgagcuccucaucuccaaggaguccugguccuacaucgucgagaagcccaaccccgagaacggcaccugcuaccccggccacuucgccgacuacgaggagcuccgcgagcagcucuccuccgucuccuccuucgagcgcuucgagauguuccccaaggaguccuccuggcccaaccacaccgucaccggcgucuccgccuccugcucccacaacggcgaguccuccuucuaccgcaaccuccucuggcucaccgagaagaacggccucuaccccaaccucuccaaguccuacgccaacaacaaggagaaggagguccucguccucuggggcguccaccacccccccuccaucuccgaccagaagacccucuaccacaccgagaacgccuacgucuccgucgucuccucccacuacucccgcaaguucacccccgagaucgccaagcgccccaagguccgcgaccaggagggccgcaucaacuacuacuggacccuccucgagcccggcgacaccaucaucuucgaggccaacggcaaccucaucgccccccgcuacgccuucgcccucucccgcggcuucggcuccggcaucaucaacuccaacgcccccauggacaagugcgacgccaagugccagaccccccagggcgccaucaacuccucccuccccuuccagaacguccaccccgucaccaucggcgagugccccaaguacguccgcuccgccaagcuccgcauggucaccggccuccgcaacauccccuccauccagucccgcggccucuucggcgccaucgccggcuucaucgagggcggcuggaccggcauggucgacggcugguacggcuaccaccaccagaacgagcagggcuccggcuacgccgccgaccagaaguccacccagaacgccaucaacggcaucaccaacaaggucaacuccgucaucgagaagaugaacacccaguucaccgccgucggcaaggaguucaacaagcucgagcgccgcauggagaaccucaacaagaaggucgacgacggcuucaucgacaucuggaccuacaacgccgagcuccucguccuccucgagaacgagcgcacccucgacuuccacgacuccaacgucaagaaccucuacgagaaggucaagaaccagcucaagaacaacgccaaggagaucggcaacggcugcuucgaguucuaccacaagugcaacgacgagugcauggaguccgucaagaacggcaccuacgacuaccccaaguacuccgaggaguccaagcucaaccgcgagaagaucgacggcgucaagcucgaguccaugggcgucuaccagauccucgccaucuacuccaccgucgccuccucccucgucuuccucgucucccucggcgccaucuccuucuggaugugcuccaacggcucccuccagugccgcaucugcaucuga

SEQ ID NO: 102877 - RNA, 1701 nt, Artificial Sequence; identical to SEQ ID NO: 98692
  derived and/or modified CDS sequence (opt2) from hemagglutinin__InfluenzaA__AEH77270

SEQ ID NO: 102878 - RNA, 1701 nt, Artificial Sequence; identical to SEQ ID NO: 96068
  derived and/or modified CDS sequence (opt2) from hemagglutinin__InfluenzaA__AEH77279

SEQ ID NO: 102879 - RNA, 1701 nt, Artificial Sequence; identical to SEQ ID NO: 99807
  derived and/or modified CDS sequence (opt2) from hemagglutinin__InfluenzaA__AEI29215

SEQ ID NO: 102880 - RNA, 1701 nt, Artificial Sequence; identical to SEQ ID NO: 98705
  derived and/or modified CDS sequence (opt2) from hemagglutinin__InfluenzaA__AEI29225

SEQ ID NO: 102881 - RNA, 1701 nt, Artificial Sequence
  derived and/or modified CDS sequence (opt2) from hemagglutinin__InfluenzaA__AEI29591
augaagaccaucaucgcccucuccuacaucuucugccucgucuucgcccaggaccuccccggcaacgacaacuccaccgccacccucugccucggccaccacgccguccccaacggcacccucgucaagaccaucaccaacgaccagaucgaggucaccaacgccaccgagcucguccaguccuccuccaccggcaagaucugcgacaacccccaccgcauccucgacggcaucaacugcacccucaucgacgcccuccucggcgacccccacugcgacggcuuccagaacgagaagugggaccucuucgucgagcgcuccaaggccuucuccaacugcuaccccuacgacguccccgacuacgccucccuccgcucccucgucgccuccuccggcacccucgaguucaucaacgagggcuucaacuggaccggcgucacccagaacggcggcuccuccgccugcaagcgcggccccgacaacggcuucuucucccgccucaacuggcucuacaaguccggcuccaccuaccccguccagaacgucaccaugcccaacaacgacaacuccgacaagcucuacaucuggggcguccaccaccccuccaccgacaaggagcagaccaaccucuacguccaggccuccggcaaggucaccgucuccaccaagcgcucccagcagaccgucauccccaacgucggcucccgccccuggguccgcggccucuccucccgcgucuccaucuacuggaccaucgucaagcccggcgacauccucgucaucaacuccaacggcaaccucaucgccccccgcggcuacuacaagaugcgcaccggcaaguccuccaucaugcgcuccgacgcccccaucggcaccugcuccuccgagugcaucacccccaacggcuccauccccaacgacaagcccuuccagaacgucaacaagaucaccuacggcgccugccccaaguacgucaagcagaacacccucaagcucgccaccggcaugcgcaacguccccgagaagcagacccgcggcaucuucggcgccaucgccggcuucaucgagaacggcugggagggcaugaucgacggcugguacggcuuccgccaccagaacuccgagggcaccggccaggccgccgaccucaaguccacccaggccgccaucgaccagaucaacggcaagcucaaccgcgucaucgagaagaccaacgagaaguuccaccagaucgagaaggaguucuccgaggucgagggccgcauccaggaccucgagaaguacgucgaggacaccaagaucgaccucugguccuacaacgccgagcuccucgucgcccucgagaaccagcacaccaucgaccucaccgacuccgagaugaacaagcucuucgagaagacccgccgccagcuccgcgagaacgccgaggacaugggcaacggcugcuucaagaucuaccacaagugcgacaacgccugcaucggcuccauccgcaacggcaccuacgaccacgacgucuaccgcgacgaggcccucaacaaccgcuuccagaucaagggcgucgagcucaaguccggcuacaaggacuggauccucuggaucuccuucgccaucuccugcuuccuccucugcgucguccuccucggcuucaucaugugggccugccagaagggcaacauccgcugcaacaucugcaucuga

SEQ ID NO: 102882 - RNA, 1701 nt, Artificial Sequence; identical to SEQ ID NO: 96068
  derived and/or modified CDS sequence (opt2) from hemagglutinin__InfluenzaA__AEI54347

SEQ ID NO: 102883 - RNA, 1701 nt, Artificial Sequence; identical to SEQ ID NO: 96154
  derived and/or modified CDS sequence (opt2) from hemagglutinin__InfluenzaA__AEI54358

SEQ ID NO: 102884 - RNA, 1701 nt, Artificial Sequence; identical to SEQ ID NO: 96669
  derived and/or modified CDS sequence (opt2) from hemagglutinin__InfluenzaA__AEI54369

SEQ ID NO: 102885 - RNA, 1701 nt, Artificial Sequence; identical to SEQ ID NO: 96552
  derived and/or modified CDS sequence (opt2) from hemagglutinin__InfluenzaA__AEI54380

SEQ ID NO: 102886 - RNA, 1701 nt, Artificial Sequence; identical to SEQ ID NO: 102815
  derived and/or modified CDS sequence (opt2) from hemagglutinin__InfluenzaA__AEI54391

SEQ ID NO: 102887 - RNA, 1701 nt, Artificial Sequence
  derived and/or modified CDS sequence (opt2) from hemagglutinin__InfluenzaA__AEI54402
augaagaccaucaucgcccucuccuacauccucugccucgucuucgcccagaagcuccccggcaacgacaacuccaccgccacccucugccucggccaccacgccguccccaacggcaccaucgucaagaccaucaccaacgaccagaucgaggucaccaacgccaccgagcucguccaguccuccuccaccggcgagaucugcuacuccccccaccagauccucgacggcgagaacugcacccucaucgacgcccuccucggcgacccccagugcgacggcuuccagaacaagaagugggaccucuucgucgagcgcuccaaggccuacuccaacugcuaccccuacgacguccccgacuacgccucccuccgcucccucgucgccuccuccggcacccucgaguucaacaacgaguccuucaacuggaccggcgucacccagaacggcaccuccuccgccugcauccgccgcuccaacaacuccuucuucucccgccucaacuggcucacccaccucaaguucaaguaccccgcccucaacgucaccaugcccaacaacgagaaguucgacaagcucuacaucuggggcguccaccaccccggcaccgacaacgaccagaucuuccucuacgcccaggccuccggccgcaucaccgucuccaccaagcgcucccagcagaccgucauccccaacaucggcucccgcccccgcguccgcaacauccccucccgcaucuccaucuacuggaccaucgucaagcccggcgacauccuccucaucaacuccaccggcaaccucaucgccccccgcggcuacuucaagauccgcuccggcaaguccuccaucaugcgcuccgacgcccccaucggcaagugcaacuccgagugcaucacccccaacggcuccauccccaacgacaagcccuuccagaacgucaaccgcaucaccuacggcgccugcccccgcuacgucaagcagaacacccucaagcucgccaccggcaugcgcaacguccccgagaagcagacccgcggcaucuucggcgccaucgccggcuucaucgagaacggcugggagggcauggucgacggcugguacggcuuccgccaccagaacuccgagggcaucggccaggccgccgaccucaaguccacccaggccgccaucgaccagaucaacggcaagcucaaccgccucaucggcaagaccaacgagaaguuccaccagaucgagaaggaguucuccgaggucgagggccgcauccaggaccucgagaaguacgucgaggacaccaagaucgaccucugguccuacaacgccgagcuccucgucgcccucgagaaccagcacaccaucgaccucaccgacuccgagaugaacaagcucuucgagaagaccaagaagcagcuccgcgagaacgccgaggacaugggcaacggcugcuucaagaucuaccacaagugcgacaacgccugcaucggcuccauccgcaacggcaccuacgaccacgacgucuaccgcgacgaggcccucaacaaccgcuuccagaucaagggcgucgagcucaaguccggcuacaaggacuggauccucuggaucuccuucgccaucuccugcuuccuccucugcgucgcccuccucggcuucaucaugugggccugccagaagggcaacauccgcugcaacaucugcaucuga

SEQ ID NO: 102888 - RNA, 1701 nt, Artificial Sequence; identical to SEQ ID NO: 97964
  derived and/or modified CDS sequence (opt2) from hemagglutinin__InfluenzaA__AEI54413

SEQ ID NO: 102889 - RNA, 1701 nt, Artificial Sequence; identical to SEQ ID NO: 96317
  derived and/or modified CDS sequence (opt2) from hemagglutinin__InfluenzaA__AEI54424

SEQ ID NO: 102890 - RNA, 1701 nt, Artificial Sequence
  derived and/or modified CDS sequence (opt2) from hemagglutinin__InfluenzaA__AEI54446
augaagaccaucaucgcccucuccuacauccucugccucgucuucgcccagaagcuccccgagaacgacaacuccaccgccacccucugccucggccaccacgccguccccaacggcaccaucgucaagaccaucaccaacgaccagaucgaggucaccaacgccaccgagcucguccaguccuccuccaccggcgagaucugcaacuccccccaccagauccucgacggcgagaacugcacccucaucgacgcccuccucggcgacccccagugcgacggcuuccagaacaagaagugggaccucuucgucgagcgcuccaaggcccacuccaacugcuaccccuacgacguccccgacuacgccucccuccgcucccucgucgccuccuccggcacccucgaguucaacaacgaguccuucaacuggaccggcgucacccagaacggcaccuccuccgccugcauccgccgcuccaacaacuccuucuucucccgccucaacuggcucacccaccucaacuucaaguaccccgcccucaacgucaccaugcccaacaacgagcaguucgacaagcucuacaucuggggcguccaccaccccggcaccgacaaggaccagaucuuccucuacgcccaggccgccggccgcaucaccgucuccaccaagcgcucccagcaggccgucauccccaacaucggcucccgcccccgcguccgcaacauccccucccgcgucuccaucuacuggaccaucgucaagcccggcgacauccuccucaucaacuccaccggcaaccucaucgccccccgcggcuacuucaagauccgcuccggcaaguccuccaucaugcgcuccgacgcccccaucggcaagugcaacuccgccugcaucacccccaacggcuccauccccaacgacaagcccuuccagaacgucaaccgcaucaccuacggcgccugcccccgcuacgucaagcagaacacccucaagcucgccaccggcaugcgcaacguccccgagaagcagacccgcggcaucuucggcgccaucgccggcuucaucgagaacggcugggagggcauggucgacggcugguacggcuuccgccaccagaacuccgagggccgcggccaggccgccgaccucaaguccacccaggccgccaucgaccagaucaacggcaagcucaaccgccucaucggcaagaccaacgagaaguuccaccagaucgagaaggaguucuccgaggucgagggccgcauccaggaccucgagaaguacgucgaggacaccaagaucgaccucugguccuacaacgccgagcuccucgucgcccucgagaaccagcacaccaucgaccucaccgacuccgagaugaacaagcucuucgagaagaccaagaagcagcuccgcgagaacgccgaggacaugggcaacggcugcuucaagaucuaccacaagugcgacaacgccugcaucggcuccauccgcaacggcaccuacgaccacgacgucuaccgcgacgaggcccucaacaaccgcuuccagaucaagggcgucgagcucaaguccggcuacaaggacuggauccucuggaucuccuucgccaucuccugcuuccuccucugcgucgcccuccucggcuucaucaugugggccugccagaagggcaacauccgcugcaacaucugcaucuga

SEQ ID NO: 102891 - RNA, 1701 nt, Artificial Sequence
  derived and/or modified CDS sequence (opt2) from hemagglutinin__InfluenzaA__AEI54457
augaagaccaucaucgcccucuccuacauccucugccucgucuucgcccagaagcuccccggcaacgacaacuccaccgccacccucugccucggccaccacgccguccccaacggcaccaucgucaagaccaucaccaacgaccagaucgaggucaccaacgccaccgagcucguccaguccuccuccaccggcgagaucugcaacuccccccaccagauccucgacggcgagaacugcacccucaucgacgcccuccucggcgacccccagugcgacggcuuccagaacaagaagugggaccucuucgucgagcgcuccaaggcccacuccaacugcuaccccuacgacguccccgacuacgccucccuccgcucccucgucgccuccuccggcacccucgaguucaacaacgaguccuucaacuggaccggcgucacccagaacggcaccuccuccgccugcauccgccgcuccaacaacuccuucuucucccgccucaacuggcucacccaccucaacuucaaguaccccgcccucaacgucaccaugcccaacaacgagcaguucgacaagcucuacaucuggggcguccaccaccccggcaccgacaaggaccagaucuuccucuacgcccaggccgccggccgcaucaccgucuccaccaagcgcucccagcaggccgucauccccaacaucggcucccgcccccgcguccgcaacauccccucccgcgucuccaucuacuggaccaucgucaagcccggcgacauccuccucaucaacuccaccggcaaccucaucgccccccgcggcuacuucaagauccgcuccggcaaguccuccaucaugcgcuccgacgcccccaucggcaagugcaacuccgccugcaucacccccaacggcuccauccccaacgacaagcccuuccagaacgucaaccgcaucaccuacggcgccugcccccgcuacgucaagcagaacacccucaagcucgccaccggcaugcgcaacguccccgagaagcagacccgcggcaucuucggcgccaucgccggcuucaucgagaacggcugggagggcauggucgacggcugguacggcuuccgccaccagaacuccgagggccgcggccaggccgccgaccucaaguccacccaggccgccaucgaccagaucaacggcaagcucaaccgccucaucggcaagaccaacgagaaguuccaccagaucgagaaggaguucuccgaggucgagggccgcauccaggaccucgagaaguacgucgaggacaccaagaucgaccucugguccuacaacgccgagcuccucgucgcccucgagaaccagcacaccaucgaccucaccgacuccgagaugaacaagcucuucgagaagaccaagaagcagcuccgcgagaacgccgaggacaugggcaacggcugcuucaagaucuaccacaagugcgacaacgccugcaucggcuccauccgcaacggcaccuacgaccacgacgucuaccgcgacgaggcccucaacaaccgcuuccagaucaagggcgucgagcucaaguccggcuacaaggacuggauccucuggaucuccuucgccaucuccugcuuccuccucugcgucgcccuccucggcuucaucaugugggccugccagaagggcaacauccgcugcaacaucugcaucuga

SEQ ID NO: 102892 - RNA, 1701 nt, Artificial Sequence; identical to SEQ ID NO: 101569
  derived and/or modified CDS sequence (opt2) from hemagglutinin__InfluenzaA__AEI54468

SEQ ID NO: 102893 - RNA, 1701 nt, Artificial Sequence; identical to SEQ ID NO: 101569
  derived and/or modified CDS sequence (opt2) from hemagglutinin__InfluenzaA__AEI54479

SEQ ID NO: 102894 - RNA, 1701 nt, Artificial Sequence; identical to SEQ ID NO: 102891
  derived and/or modified CDS sequence (opt2) from hemagglutinin__InfluenzaA__AEI54490

SEQ ID NO: 102895 - RNA, 1701 nt, Artificial Sequence; identical to SEQ ID NO: 102890
  derived and/or modified CDS sequence (opt2) from hemagglutinin__InfluenzaA__AEI54501

SEQ ID NO: 102896 - RNA, 1701 nt, Artificial Sequence
  derived and/or modified CDS sequence (opt2) from hemagglutinin__InfluenzaA__AEI59979
augaagaccaucaucgcccucuccuacauccucugccucgucuucgcccagaagcuccccggcaacgacaacuccaccgccacccucugccucggccaccacgccguccccaacggcaccaucgucaagaccaucaccaacgaccagaucgaggucaccaacgccaccgagcucguccagaucuccuccaccggcgagaucugcgacuccccccaccagauccucgacggcgagaacugcacccucaucgacgcccuccucggcgacccccagugcgacggcuuccagaacaagaagugggaccucuucgucgagcgcuccaaggccuacuccaacugcuaccccuacgacguccccgacuacgccucccuccgcucccucgucgccuccuccggcacccucgaguucaacaacgaguccuucaacuggaccggcgucacccagaacggcaccuccuccgccugcauccgccgcuccaacaacuccuucuucucccgccucaacuggcucacccaccucaaguucaaguaccccgcccucaacgucaccaugcccaacaacgagcaguucgacaagcucuacaucuggggcguccaccaccccggcaccgacaacgaccagaucuuccucuacgcccaggccuccggccgcaucaccgucuccaccaagcgcucccagcagaccgucauccccaacaucggcucccgcccccgcguccgcaacauccccucccgcaucuccaucuacuggaccaucgucaagcccggcgacauccuccucaucaacuccaccggcaaccucaucgccccccgcggcuacuucaagauccgcuccggcaaguccuccaucaugcgcuccgacgcccccaucggcaagugcaacuccgagugcaucacccccaacggcuccauccccaacgacaagcccuuccagaacgucaaccgcaucaccuacggcgccugcccccgcuacgucaagcagaacacccucaagcucgccaccggcaugcgcaacguccccgagaagcagacccgcggcaucuucggcgccaucgccggcuucaucgagaacggcugggagggcauggucgacggcugguacggcuuccgccaccagaacuccgagggccgcggccaggccgccgaccucaaguccacccaggccgccaucgaccagaucaacggcaagcucaaccgccucaucgagaagaccaacgagaaguuccaccagaucgagaaggaguucuccgaggucgagggccgcauccaggaccucgagaaguacgucgaggacaccaagaucgaccucugguccuacaacgccgagcuccucgucgcccucgagaaccagcacaccaucgaccucaccgacuccgagaugaacaagcucuucgagaagaccaagaagcagcuccgcgagaacgccgaggacaugggcaacggcugcuucaagaucuaccacaagugcgacaacgccugcaucggcuccauccgcaacggcaccuacgaccacgacgucuaccgcgacgaggcccucaacaaccgcuuccagaucaagggcgucgagcucaaguccggcuacaaggacuggauccucuggaucuccuucgccaucuccugcuuccuccucugcgucgcccuccucggcuucaucaugugggccugccagaagggcaacauccgcugcaacaucugcaucuga

SEQ ID NO: 102897 - RNA, 1698 nt, Artificial Sequence; identical to SEQ ID NO: 101993
  derived and/or modified CDS sequence (opt2) from hemagglutinin__InfluenzaA__AEI59990

SEQ ID NO: 102898 - RNA, 1698 nt, Artificial Sequence; identical to SEQ ID NO: 101995
  derived and/or modified CDS sequence (opt2) from hemagglutinin__InfluenzaA__AEI60001

SEQ ID NO: 102899 - RNA, 1701 nt, Artificial Sequence
  derived and/or modified CDS sequence (opt2) from hemagglutinin__InfluenzaA__AEI60012
augaagaccaucaucgcccucuccuacauccucugccucgucuucgcccagaagcuccccggcaacgacaacuccaccgccacccucugccucggccaccacgccguccccaacggcaccaucgucaagaccaucaccaacgaccagaucgaggucaccaacgccaccgagcucguccaguccuccuccaccggcgagaucugcgacuccccccaccagauccucgacggcgagaacugcacccucaucgacgcccuccucggcgacccccagugcgacggcuuccagaacaagaagugggaccucuucgucgagcgcuccaaggccuacuccaacugcuaccccuacgacguccccgacuacgccucccuccgcucccucgucgccuccuccggcacccucgaguucaacaacgaguccuucaacuggaccggcgucacccagaacggcaccuccuccgccugcauccgcuccuccaacaacuccuucuucucccgccucaacuggcucacccaccucaaguucaaguaccccgcccucaacgucaccaugcccaacaacgagcaguucgacaagcucuacaucuggggcguccaccaccccggcaccgacaacgaccagaucuuccucuacgcccaggccuccggccgcaucaccgucuccaccaagcgcucccagcagaccgucauccccaacaucggcucccgcccccgcguccgcaacauccccucccgcaucuccaucuacuggaccaucgucaagcccggcgacauccuccucaucaacuccaccggcaaccucaucgccccccgcggcuacuucaagauccgcuccggcaaguccuccaucaugcgcuccgacgcccccaucggcaagugcaacuccgagugcaucacccccaacggcuccauccccaacgacaagcccuuccagaacgucaaccgcaucaccuacggcgccugcccccgcuacgucaagcagaacacccucaagcucgccaccggcaugcgcaacguccccgagaagcagacccgcggcaucuucggcgccaucgccggcuucaucgagaacggcugggagggcauggucgacggcugguacggcuuccgccaccagaacuccgagggccgcggccaggccgccgaccucaaguccacccaggccgccaucgaccagaucaacggcaagcucaaccgccucaucggcaagaccaacgagaaguuccaccagaucgagaaggaguucuccgaggucgagggcaagauccaggaccucgagaaguacgucgaggacaccaagaucgaccucugguccuacaacgccgagcuccucgucgcccucgagaaccagcacaccaucgaccucaccgacuccgagaugaacaagcucuucgagaagaccaagaagcagcuccgcgagaacgccgaggacaugggcaacggcugcuucaagaucuaccacaagugcgacaacgccugcaucggcuccauccgcaacggcaccuacaaccacgacgucuaccgcgacgaggcccucaacaaccgcuuccagaucaagggcgucgagcucaaguccggcuacaaggacuggauccucuggaucuccuucgccaucuccugcuuccuccucugcgucgcccuccucggcuucaucaugugggccugccagaagggcaacauccgcugcaacaucugcaucuga

SEQ ID NO: 102900 - RNA, 1701 nt, Artificial Sequence; identical to SEQ ID NO: 98470
  derived and/or modified CDS sequence (opt2) from hemagglutinin__InfluenzaA__AEI60023

SEQ ID NO: 102901 - RNA, 1701 nt, Artificial Sequence
  derived and/or modified CDS sequence (opt2) from hemagglutinin__InfluenzaA__AEI60034
augaagaccaucaucgcccucuccuacauccucugccucgucuucgcccagaagcuccccggcaacgacaacuccaccgccacccucugccucggccaccacgccguccccaacggcaccaucgucaagaccaucaccaacgaccagaucgaggucaccaacgccaccgagcucguccaguccuccuccaccggcgagaucugcgacuccccccaccagauccucgacggcaagaacugcacccucaucgacgcccuccucggcgacccccagugcgacggcuuccagaacaagaagugggaccucuucgucgagcgcuccaaggccuacuccaacugcuaccccuacgacguccccgacuacgccucccuccgcucccucgucgccuccuccggcacccucgaguucaacaacgaguccuucaacuggaccggcgucacccagaacggcaccuccuccgccugcauccgccgcuccaacaacuccuucuucucccgccucaacuggcucacccaccucaaguucaaguaccccgcccucaacgucaccaugcccaacaacgagcaguucgacaagcucuacaucuggggcguccaccaccccggcaccgacaaggaccagaucuuccucuacgcccaggccuccggccgcaucaccgucuccaccaagcgcucccagcagaccgucauccccaacaucggcucccgcccccgcguccgcaacauccccucccgcaucuccaucuacuggaccaucgucaagcccggcgacauccuccucaucaacuccaccggcaaccucaucgccccccgcggcuacuucaagauccgcuccggcaaguccuccaucaugcgcuccgacgcccccaucggcaagugcaacuccgagugcaucacccccaacggcuccauccccaacgacaagcccuuccagaacgucaaccgcaucaccuacggcgccugcccccgcuacgucaagcagaacacccucaagcucgccaccggcaugcgcaacguccccgagaagcagacccgcggcaucuucggcgccaucgccggcuucaucgagaacggcugggagggcauggucgacggcugguacggcuuccgccaccagaacuccgagggccgcggccaggccgccgaccucaaguccacccaggccgccaucgaccagaucaacggcaagcucaaccgccucaucggcaagaccaacgagaaguuccaccagaucgagaaggaguucuccgaggucgagggccgcauccaggaccucgagaaguacgucgaggacaccaagaucgaccucugguccuacaacgccgagcuccucgucgcccucgagaaccagcacaccaucgaccucaccgacuccgagaugaacaagcucuucgagaagaccaagaagcagcuccgcgagaacgccgaggacaugggcaacggcugcuucaagaucuaccacaagugcgacaacgccugcaucggcuccauccgcaacggcaccuacgaccacgacgucuaccgcgacgaggcccucaacaaccgcuuccagaucaagggcgucgagcucaaguccggcuacaaggacuggauccucuggaucuccuucgccaucuccugcuuccuccucugcgucgcccuccucggcuucaucaugugggccugccagaagggcaacauccgcugcaacaucugcaucuga

SEQ ID NO: 102902 - RNA, 1701 nt, Artificial Sequence
  derived and/or modified CDS sequence (opt2) from hemagglutinin__InfluenzaA__AEI60045
augaagaccaucaucgcccucuccuacauccucugccucgucuucgcccagaagcuccccggcaacgacaacuccaccgccacccucugccucggccaccacgccguccccaacggcaccaucgucaagaccaucaugaacgaccagaucgaggucaccaacgccaccgagcucguccaguccuccuccaccggcgagaucugcgacuccccccaccagauccucgacggcaagaacugcacccucaucgacgcccuccucggcgacccccagugcgacggcuuccagaacaagaagugggaccucuucgucgagcgcuccaaggccuacuccaacugcuaccccuacgacguccccgacuacgccucccuccgcucccucgucgccuccuccggcacccucgaguucaacaacgaguccuucaacuggaccggcgucacccagaacggcaccuccuccgccugcauccgccgcuccaagaacuccuucuucucccgccucaacuggcucacccaccucaacuucaaguaccccgcccucaacgucaccaugcccaacaacgagcaguucgacaagcucuacaucuggggcguccaccaccccggcaccgacaaggaccagaucuuccucuacgcccaggccuccggccgcaucaccgucuccaccaagcgcucccagcagaccgccauccccaacaucggcuaccgcccccgcguccgcaacauccccucccgcaucuccaucuacuggaccaucgucaagcccggcgacauccuccucaucaacuccaccggcaaccucaucgccccccgcggcuacuucaagauccgcuccggcaaguccuccaucaugcgcuccgacgcccccaucggcaagugcaacuccgagugcaucacccccaacggcuccauccccaacgacaagcccuuccagaacgucaaccgcaucaccuacggcgccugcccccgcuacgucaagcagaacacccucaagcucgccaccggcaugcgcaacguccccgagaagcagacccgcggcaucuucggcgccaucgccggcuucaucgagaacggcugggagggcauggucgacggcugguacggcuuccgccaccagaacuccgagggccgcggccaggccgccgaccucaaguccacccaggccgccaucgaccagaucaacggcaagcucaaccgccucaucggcaagaccaacgagaaguuccaccagaucgagaaggaguucuccgaggucgagggccgcauccaggaccucgagaaguacgucgaggacaccaagaucgaccucugguccuacaacgccgagcuccucgucgcccucgagaaccagcacaccaucgaccucaccgacuccgagaugaacaagcucuucgagaagaccaagaagcagcuccgcgagaacgccgaggacaugggcaacggcugcuucaagaucuaccacaagugcgacaacgccugcaucggcuccauccgcaacggcaccuacgaccacgacgucuaccgcgacgaggcccucaacaaccgcuuccagaucaagggcgucgagcucaaguccggcuacaaggacuggauccucuggaucuccuucgccaucuccugcuuccuccucugcgucgcccuccucggcuucaucaugugggccugccagaagggcaacauccgcugcaacaucugcaucuga

SEQ ID NO: 102903 - RNA, 1701 nt, Artificial Sequence
  derived and/or modified CDS sequence (opt2) from hemagglutinin__InfluenzaA__AEI60086
augaaggccauccucgucguccuccucuacaccuucgccaccgccaacgccgacacccucugcaucggcuaccacgccaacaacuccaccgacaccgucgacaccguccucgagaagaacgucaccgucacccacuccgucaaccuccucgaggacaagcacaacggcaagcucugcaagcuccgcggcgucgccccccuccaccucggcaagugcaacaucgccggcuggauccucggcaaccccgagugcgagucccucuccaccgccuccuccugguccuacaucgucgagaccuccuccuccgacaacggcaccugcuaccccggcgacuucaucaacuacgaggagcuccgcgagcagcucuccuccgucuccuccuucgagcgcuucgagaucuuccccaagaccuccuccuggcccaaccacgacuccaacaagggcgucaccgccgccugcccccacgccggcgccaaguccuucuacaagaaccucaucuggcucgucaagaagggcaacuccuaccccaagcucuccaaguccuacaucaacgacaagggcaaggagguccucguccucuggggcauccaccaccccuccaccaccgccgaccagcagucccucuaccagaacgccgacgccuacgucuucgucggcaccucccgcuacuccaagaaguucaagcccgagaucgccauccgccccaagguccgcgaccaggagggccgcaugaacuacuacuggacccucgucgagcccggcgacaagaucaccuucgaggccaccggcaaccucgucgucccccgcuacgccuucgccauggagcgcaacgccggcuccggcaucaucaucuccgacacccccguccacgacugcaacaccaccugccagacccccaagggcgccaucaacaccucccuccccuuccagaacauccaccccaucaccaucggcaagugccccaaguacgucaaguccaccaagcuccgccucgccaccggccuccgcaacguccccuccauccagucccgcggccucuucggcgccaucgccggcuucaucgagggcggcuggaccggcauggucgacggcugguacggcuaccaccaccagaacgagcagggcuccggcuacgccgccgaccucaaguccacccagaacgccaucgacaagaucaccaacaaggucaacuccgucaucgagaagaugaacacccaguucaccgccgucggcaaggaguucaaccaccucgagaagcgcaucgagaaccucaacaagaaggucgacgacggcuuccucgacaucuggaccuacaacgccgagcuccucguccuccucgagaacgagcgcacccucgacuaccacgacuccaacgucaagaaccucuacgagaagguccgcaaccagcucaagaacaacgccaaggagaucggcaacggcugcuucgaguucuaccacaagugcgacaacaccugcauggaguccgucaagaacggcaccuacgacuaccccaaguacuccgaggaggccaagcucaaccgcgaggagaucgacggcgucaagcucgaguccacccgcaucuaccagauccucgccaucuacuccaccgucgccuccucccucguccucgucgucucccucggcgccaucuccuucuggaugugcuccaacggcucccuccagugccgcaucugcaucuga

SEQ ID NO: 102904 - RNA, 1701 nt, Artificial Sequence
  derived and/or modified CDS sequence (opt2) from hemagglutinin__InfluenzaA__AEI60109
augaagaccaccaucgcccucuccuacauccucugccucgucuucgcccagaagcuccccggcaacgacaacuccaccgccacccucugccucggccaccacgccguccccaacggcacccucgucaagaccaucaccaacgaccagaucgaggucaccaacgccaccgagcucguccagaacuccuccaccggccgcaucugcgacuccccccaccagauccucgacggcgagaacugcacccucaucgacgcccuccucggcgacccccacugcgacggcuuccagaacaaggagugggaccucuucgucgagcgcuccaaggccuacuccaacugcuaccccuacaacguccccgacuacgucucccuccgcucccucgucgccuccuccggcacccucgaguucaacaacgaguccuucaacuggaccggcgucgcccaggacggcuccuccuacgccugcaagcgccgcuccaacaaguccuucuucucccgccucaacuggcuccaccagcucaacuacaaguaccccgcccucaacgucaccaugcccaacaacgagaacuucgacaagcucuacaucuggggcguccaccaccccggcaccgacuccgaccagaucucccucuacgcccaggccuccggccgcgucaccgucuccaccaagcgcucccagcagaccgucauccccaacaucggcuaccgccccuggguccgcggcgucuccuccaucaucuccaucuacuggaccaucgucaagcccggcgacauccuccucaucaacuccaccggcaaccucaucgccccccgcggcuacuucaagauccgcuccggcaaguccuccaucaugcgcuccgacgcccccaucggcaagugcaacuccgagugcaucacccccaacggcuccauccccaacgacaagcccuuccagaacgucaaccgcaucaccuacggccccugcccccgcuacgucaagcagaacacccucaagcucgccaccggcaugcgcaacguccccgagaagcagacccgcggcaucuucggcgccaucgccggcuucaucgagaacggcugggagggcaugaaggacggcugguacggcuuccgccaccagaacuccgagggcaccggccaggccgccgacaucaaguccacccaggccgccaucaaccagaucaacggcaagcucaaccgccucaucgagaagaccaacgagaaguuccaccagaucgagaaggaguucuccgaggucgagggccgcauccaggaccucgagaaguacgucgaggacaccaagaucgaccucugguccuacaacgccgagcuccucgucgcccucgagaaccagcacaccaucgaccucaccgacuccgagaugaacaagcucuucgagcgcaccaagaagcagcuccgcgagaacgccgaggacaugggcaacggcugcuucaagaucuaccacaagugcgacaacaccugcaucggcuccauccgcaacggcaccuacgaccacgacgucuaccgcgacgaggcccucaacaaccgcuuccacaucaagggcgucgagcucaaguccggcuacaaggacuggauccucuggaucuccuucgccaccuccugcuuccuccucugcaucguccuccucggcuucaucaugugggccugccagaagggcaacauccgcugcaacaucugcaucuga

SEQ ID NO: 102905 - RNA, 1701 nt, Artificial Sequence
  derived and/or modified CDS sequence (opt2) from hemagglutinin__InfluenzaA__AEI86734
augaaggccauccucgucguccuccucuacaccuucgccaccgccaacgccgacacccucugcgucggcuaccacgccaacaacuccaccgacaccgucgacaccguccucgagaagaacgucaccgucacccacuccgucaaccuccucgaggacaagcacaacggcaagcucugcaagcuccgcggcgucgccccccuccaccucggcaagugcaacaucgccggcuggauccucggcaaccccgagugcgagucccucuccaccgccuccuccugguccuacaucgucgagaccuccaacuccgacaacggcaccugcuaccccggcgacuucaucgacuacgaggagcuccgcgagcagcucuccuccgucuccuccuucgagcgcuucgagaucuuccccaagaccuccuccuggcccaaccacgacuccaacaagggcgucaccgccgccugcccccacgccggcgccaaguccuucuaccgcaaccucaucuggcucgucaagaagggcaacuccuaccccaagcucuccaaguccuacaucaacgacaagggcaaggagguccucguccucuggggcauccaccaccccuccaccuccgccgaccagcagucccucuaccagaacgccgacaccuacgucuucgucggcaccucccgcuacuccaagaaguucaagcccgagaucgccauccgccccaagguccgcgaccaggagggccgcaugaacuacuacuggacccucgucgagcccggcgacaagaucaccuucgaggccaccggcaaccucgucgucccccgcuacgccuucgccauggagcgcaacgccggcuccggcaucaucaucuccgacacccccguccacgacugcaacaccaccugccagacccccaagggcgccaucaacaccucccuccccuuccagaacauccaccccaucaccaucggcaagugccccaaguacgucaaguccaccaagcuccgccucgccaccggccuccgcaacguccccuccauccagucccgcggccucuucggcgccaucgccggcuucaucgagggcggcuggaccggcauggucgacggcugguacggcuaccaccaccagaacgagcagggcuccggcuacgccgccgaccucaaguccacccagaacgccaucgacgagaucaccaacaaggucaacuccgucaucgagaagaugaacacccaguucaccgccgucggcaaggaguucaaccaccucgagaagcgcaucgagaaccucaacaagaaggucgacgacggcuuccucgacaucuggaccuacaacgccgagcuccucguccuccucgagaacgagcgcacccucgacuaccacgacuccaacgucaagaaccucuacgagaagguccgcucccagcucaagaacaacgccaaggagaucggcaacggcugcuucgaguucuaccacaagugcgacaacaccugcauggaguccgucaagaacggcaccuacgacuaccccaaguacuccgaggaggccaagcucaaccgcgaggagaucgacggcgucaagcucgaguccacccgcaucuaccagauccucgccaucuacuccaccgucgccuccucccucguccucgucgucucccucggcgccaucuccuucuggaugugcuccaacggcucccuccagugccgcaucugcaucuga

SEQ ID NO: 102906 - RNA, 1701 nt, Artificial Sequence
  derived and/or modified CDS sequence (opt2) from hemagglutinin__InfluenzaA__AEI86764
augaaggccauccucgucguccuccucuacaccuucgccaccgccaacgccgacacccucugcaucggcuaccacgccaacaacuccaccgacaccgucgacaccguccucgagaagaacgucaccgucacccacuccgucaaccuccucgaggacaagcacaacggcaagcucugcaagcuccgcggcgucgccccccuccaccucggcaagugcaacaucgccggcuggauccucggcaaccccgagugcgagucccucuccaccgccuccuccugguccuacaucgucgagaccuccuccuccgacaacggcaccugcuaccccggcgacuucaucgacuacgaggagcuccgcgagcagcucuccuccgucuccuccuucgagcgcuucgagaucuuccccaagaccuccuccuggcccgaccacgacuccaacaagggcgucaccgccgccugcccccacgccggcgccaaguccuucuacaagaaccucaucuggcucgucaagaagggcaacuccuaccccaagcucuccaaguccuacaucaacgacaagggcaaggagguccucguccucuggggcauccaccaccccuccaccuccgccgaccagcagucccucuaccagaacgccgacgccuacgucuucgucggcaccucccgcuacuccaagaaguucaagcccgagaucgccauccgccccaagguccgcgaccaggagggccgcaugaacuacuacuggacccucgucgagcccggcgacaagaucaccuucgaggccaccggcaaccucgucgucccccgcuacgccuucgccauggagcgcaacgccggcuccggcaucaucaucuccgacacccccguccacgacugcaacaccaccugccagacccccaagggcgccaucaacaccucccuccccuuccagaacauccaccccaucaccaucggcaagugccccaaguacgucaaguccaccaagcuccgccucgccaccggccuccgcaacguccccuccauccagucccgcggccucuucggcgccaucgccggcuucaucgagggcggcuggaccggcauggucgacggcugguacggcuaccaccaccagaacgagcagggcuccggcuacgccgccgaccucaaguccacccagaacgccaucgacaagaucaccaacaaggucaacuccgucaucgagaagaugaacacccaguucaccgccgucggcaaggaguucaaccaccucgagaagcgcaucgagaaccucaacaagaaggucgacgacggcuuccucgacaucuggaccuacaacgccgagcuccucguccuccucgagaacgagcgcacccucgacuaccacgacuccaacgucaagaaccucuacgagaagguccgcucccagcucaagaacaacgccaaggagaucggcaacggcugcuucgaguucuaccacaagugcgacaacaccugcauggaguccgucaagaacggcaccuacgacuaccccaaguacuccgaggaggccaagcucaaccgcgagaagaucgacggcgucaagcucgaguccacccgcaucuaccagauccucgccaucuacuccaccgucgccuccucccucguccucgucgucucccucggcgccaucuccuucuggaugugcuccaacggcucccuccagugccgcaucugcaucuga

SEQ ID NO: 102907 - RNA, 1701 nt, Artificial Sequence; identical to SEQ ID NO: 102906
  derived and/or modified CDS sequence (opt2) from hemagglutinin__InfluenzaA__AEI86774

SEQ ID NO: 102908 - RNA, 1701 nt, Artificial Sequence
  derived and/or modified CDS sequence (opt2) from hemagglutinin__InfluenzaA__AEI86784
augaaggucauccucgucguccuccucuacaccuucgccaccgccaacgccgacacccucugcaucggcuaccacgccaacaacuccaccgacaccgucgacaccguccucgagaagaacgucaccgucacccacuccgucaaccuccucgaggacaagcacaacggcaagcucugcaagcuccgcggcgucgccccccuccaccucggcaagugcaacaucgccggcuggauccucggcaaccccgagugcgagucccucuccaccgccuccuccugguccuacaucgucgagaccuccuccuccgacaacggcaccugcuaccccggcgacuucaucgacuacgaggagcuccgcgagcagcucuccuccgucuccuccuucaagcgcuucgagaucuuccccaagaccuccuccuggcccaaccacgacuccaacaagggcgucaccgccgccugcccccacgccggcgccaaguccuucuacaagaaccucaucuggcucgucaagaagggcaacuccuaccccaagcucuccaaguccuacaucaacgacaagggcaaggagguccucguccucuggggcauccaccaccccuccaccuccgccgaccagcagucccucuaccagaacgccgacgccuacgucuucgucggcaccucccgcuacuccaagaaguucaagcccgagaucgccauccgccccaagguccgcgaccaggagggccgcaugaacuacuacuggacccucgucgagcccggcgacaagaucaccuucgaggccaccggcaaccucgucgucccccgcuacgccuucgccauggagcgcaacgccggcuccggcaucaucaucuccgacacccccguccacgacugcaacaccaccugccagacccccaagggcgccaucaacaccucccuccccuuccagaacauccaccccaucaccaucggcaagugccccaaguacgucaaguccaccaagcuccgccucgccaccggccuccgcaacguccccuccauccagucccgcggccucuucggcgccaucgccggcuucaucgagggcggcuggaccggcauggucgacggcugguacggcuaccaccaccagaacgagcagggcuccggcuacgccgccgaccucaaguccacccagaacgccaucgacaagaucaccaacaaggucaacuccgucaucgagaagaugaacacccaguucaccgccgucggcaaggaguucaaccaccucgagaagcgcaucgagaaccucaacaagaaggucgacgacggcuuccucgacaucuggaccuacaacgccgagcuccucguccuccucgagaacgagcgcacccucgacuaccacgacuccaacgucaagaaccucuacgagaagguccgcucccagcucaagaacaacgccaaggagaucggcaacggcugcuucgaguucuaccacaagugcgacaacaccugcauggaguccgucaagaacggcaccuacgacuaccccaaguacuccgaggaggccaagcucaaccgcgaggagaucgacggcgucaagcucgaguccacccgcaucuaccagauccucgccaucuacuccaccgucgccuccucccucguccucgucgucucccucggcgccaucuccuucuggaugugcuccaacggcucccuccagugccgcaucugcaucuga

SEQ ID NO: 102909 - RNA, 1701 nt, Artificial Sequence
  derived and/or modified CDS sequence (opt2) from hemagglutinin__InfluenzaA__AEI86794
augaagaccauccucgucguccuccucuacaccuucgccaccgccaacgccgacacccucugcaucggcuaccacgccaacaacuccaccgacaccgucgacaccguccucgagaagaacgucaccgucacccacuccgucaaccuccucgaggacaagcacaacggcaagcucugcaagcuccgcggcgucgccccccuccaccucggcaagugcaacaucgccggcuggauccucggcaaccccgagugcgagucccucuccaccgccuccuccugguccuacaucgucgagaccuccuccuccgacaacggcaccugcuaccccggcaacuucaucgacuacgaggagcuccgcgagcagcucuccuccgucuccuccuucgagcgcuucgagaucuuccccaagaccuccuccuggcccgaccacgacuccaacaagggcgucaccgccgccugcccccacgccggcgccaaguccuucuacaagaaccucaucuggcucgucaagaagggcaacuccuaccccaagcucuccaaguccuacaucaacgacaagggcaaggagguccucguccucuggggcauccaccaccccuccaccuccgccgaccagcagucccucuaccagaacgccgacgccuacgucuucgucggcaccuccaaguacuccaagaaguucaagcccgagaucgccauccgccccaagguccgcgaccaggagggccgcaugaacuacuacuggacccucgucgagcccggcgacaagaucaccuucgaggccaccggcaaccucgucgccccccgcuacgccuucgccauggagcgcaacgccggcuccggcaucaucaucuccgacacccccguccacgacugcaacaccaccugccagacccccaagggcgccaucaacaccucccuccccuuccagaacauccaccccaucaccaucggcaagugccccaaguacgucaaguccaccaagcuccgccucgccaccggccuccgcaacguccccuccauccagucccgcggccucuucggcgccaucgccggcuucaucgagggcggcuggaccggcauggucgacggcugguacggcuaccaccaccagaacgagcagggcuccggcuacgccgccgaccucaaguccacccagaacgccaucgacaagaucaccaacaaggucaacuccgucaucgagaagaugaacacccaguucaccgccgucggcaaggaguucaaccaccucgagaagcgcaucgagaaccucaacaagaaggucgacgacggcuuccucgacaucuggaccuacaacgccgagcuccucguccuccucgagaacgagcgcacccucgacuaccacgacuccaacgucaagaaccucuacgagaagguccgcucccagcucaagaacaacgccaaggagaucggcaacggcugcuucgaguucuaccacaagugcgacaacaccugcauggaguccgucaagaacggcaccuacgacuaccccaaguacuccgaggaggccaagcucaaccgcgaggagaucgacggcgucaagcucgaguccacccgcaucuaccagauccucgccaucuacuccaccgucgccuccucccucguccucgucgucucccucggcgccaucuccuucuggaugugcuccaacggcucccuccagugccgcaucugcaucuga

SEQ ID NO: 102910 - RNA, 1701 nt, Artificial Sequence
  derived and/or modified CDS sequence (opt2) from hemagglutinin__InfluenzaA__AEI86804
augaaggccauccucgucguccuccucuacaccuucgccaccgccaacgccgacacccucugcaucggcuaccacgccaacaacuccaccgacaccgucgacaccguccucgagaagaacgucaccgucacccacuccgucaaccuccucgaggacaagcacaacggcaagcucugcaagcuccgcggcgucgccccccuccaccucggcaagugcaacaucgccggcuggauccucggcaaccccgagugcgagucccucuccaccgccuccuccugguccuacaucgucgagaccuccuccuccgacaacggcaccugcuaccccggcgacuucaucaacuacgaggagcuccgcgagcagcucuccuccgucuccuccuucgagcgcuucgagaucuuccccaagaccuccuccuggcccgaccacgacuccaacaagggcgucaccgccgccugcccccacgccggcgccaaguccuucuacaagaaccucauguggcucgucaagaagggcaacuccuaccccaagcucuccaaguccuacaucaacgacaagggcaaggagguccucguccucuggggcauccaccaccccuccaccuccgccgaccagcagucccucuaccagaacgccgacgccuacgucuucgucggcaccucccgcuacuccaagaaguucaagcccgagaucgccauccgccccaagguccgcgaccaggagggccgcaugaacuacuacuggacccucgucgagcccggcgacaagaucaccuucgaggccaccggcaaccucgucgucccccgcuacgccuucgccauggagcgcaacgccggcuccggcaucaucaucuccgacacccccguccacgacugcaacaccaccugccagacccccaagggcgccaucaacaccucccuccccuuccagaacauccaccccaucaccaucggcaagugccccaaguacgucaaguccaccaagcuccgccucgccaccggccuccgcaacguccccuccauccagucccgcggccucuucggcgccaucgccggcuucaucgagggcggcuggaccggcauggucgacggcugguacggcuaccaccaccagaacgagcagggcuccggcuacgccgccgaccucaaguccacccagaacgccaucgacaagaucaccaacaaggucaacuccgucaucgagaagaugaacacccaguucaccgccgucggcaaggaguucaaccaccucgagaagcgcaucgagaaccucaacaagaaggucgacgacggcuuccucgacaucuggaccuacaacgccgagcuccucguccuccucgagaacgagcgcacccucgacuaccacgacuccaacgucaagaaccucuacgagaagguccgcucccagcucaagaacaacgccaaggagaucggcaacggcugcuucgaguucuaccacaagugcgacaacaccugcauggaguccgucaagaacggcaccuacgacuaccccaaguacuccgaggaggccaagcucaaccgcgaggagaucgacggcgucaagcucgaguccacccgcaucuaccagauccucgccaucuacuccgccgucgccuccucccucguccucgucgucucccucggcgccaucuccuucuggaugugcuccaacggcucccuccagugccgcaucugcaucuga

SEQ ID NO: 102911 - RNA, 1701 nt, Artificial Sequence; identical to SEQ ID NO: 102906
  derived and/or modified CDS sequence (opt2) from hemagglutinin__InfluenzaA__AEI86814

SEQ ID NO: 102912 - RNA, 1701 nt, Artificial Sequence
  derived and/or modified CDS sequence (opt2) from hemagglutinin__InfluenzaA__AEI86824
augaaggccauccucgucguccuccucuacaccuucgccaccgccaacgccgacacccucugcaucggcuaccacgccaacaacuccaccgacaccgucgacaccguccucgagaagaacgucaccgucacccacuccgucaaccuccucgaggacaagcacaacggcaagcucugcaagcuccgcggcgucgccccccuccaccucggcaagugcaacaucgccggcuggauccucggcaaccccgagugcgagucccucuccaccgccuccuccugguccuacaucgucgagaccuccuccuccgacaacggcaccugcuaccccggcgacuucaucgacuacgaggagcuccgcgagcagcucuccuccgucuccuccuucgagcgcuucgagaucuuccccaagaccuccuccuggcccgaccacgacuccaacaagggcgucaccgccgccugcccccacgccggcgccaaguccuucuacaagaaccucaucuggcucgucaagaagggcaacuccuaccccaagcucuccaaguccuacaucaacgacaagggcaaggagguccucguccucuggggcauccaccaccccuccaccuccgccgaccagcagucccucuaccagaacgccgacgccuacgucuucgucggcaccucccgcuacuccaagaaguucaagcccgagaucgccauccgccccaagguccgcgaccaggagggccgcaugaacuacuacuggacccucgucgagcccggcgacaagaucaccuucgaggccaccggcaaccucgucgucccccgcuacgccuucgccauggagcgcaacgccggcuccggcaucaucaucuccgacacccccguccacgacugcaacaccaccugccagacccccaagggcgccaucaacaccucccuccccuuccagaacauccaccccaucaccaucggcaagugccccaaguacgucaaguccaccaagcuccgccucgccaccggccuccgcaacguccccuccauccagucccgcggccucuucggcgccaucgccggcuucaucgagggcggcuggaccggcauggucgacggcugguacggcuaccaccaccagaacgagcagggcuccggcuacgccgccgaccucaaguccacccaggacgccaucgacaagaucaccaacaaggucaacuccgucaucgagaagaugaacacccaguucaccgccgucggcaaggaguucaaccaccucgagaagcgcaucgagaaccucaacaagaaggucgacgacggcuuccucgacaucuggaccuacaacgccgagcuccucguccuccucgagaacgagcgcacccucgacuaccacgacuccaacgucaagaaccucuacgagaagguccgcucccagcucaagaacaacgccaaggagaucggcaacggcugcuucgaguucuaccacaagugcgacaacaccugcauggaguccgucaagaacggcaccuacgacuaccccaaguacuccgaggaggccaagcucaaccgcgagaagaucgacggcgucaagcucgaguccacccgcaucuaccagauccucgccaucuacuccaccgucgccuccucccucguccucgucgucucccucggcgccaucuccuucuggaugugcuccaacggcucccuccagugccgcaucugcaucuga

SEQ ID NO: 102913 - RNA, 1701 nt, Artificial Sequence
  derived and/or modified CDS sequence (opt2) from hemagglutinin__InfluenzaA__AEI86834
augaaggccauccucgucguccuccucuacaccuucgccaccgccaacgccgacacccucugcaucggcuaccacgccaacaacuccaccgacaccgucgacaccguccucgagaagaacgucaccgucacccacuccgucaaccuccucgaggacaagcacaacggcaagcucugcaagcuccgcggcgucgccccccuccaccucggcaagugcaacaucgccggcuggauccucggcaaccccgagugcgagucccucuccaccgccuccuccugguccuacaucgucgagaccuccuccuccgacaacggcaccugcuaccccggcaacuucaucgacuacgaggagcuccgcgagcagcucuccuccgucuccuccuucgagcgcuucgagaucuuccccaagaccuccuccuggcccgaccacgacuccaacaagggcgucaccgccgccugcccccacgccggcgccaaguccuucuacaagaaccucaucuggcucgucaagaagggcaacuccuaccccaagcucuccaaguccuacaucaacgacaagggcaaggagguccucguccucuggggcauccaccaccccuccaccuccgccgaccagcagucccucuaccagaacgccgacgccuacgucuucgucggcaccucccgcuacucccgcaaguucaagcccgagaucgccauccgccccaagguccgcgaccaggagggccgcaugaacuacuacuggacccucgucgagcccggcgacaagaucaccuucgaggccaccggcaaccucgucgccccccgcuacgccuucgccauggagcgcaacgccggcuccggcaucaucaucuccgacacccccguccacgacugcaacaccaccugccagacccccaagggcgccaucaacaccucccuccccuuccagaacauccaccccaucaccaucggcaagugccccaaguacgucaaguccaccaagcuccgccucgccaccggccuccgcaacguccccuccauccagucccgcggccucuucggcgccaucgccggcuucaucgagggcggcuggaccggcauggucgacggcugguacggcuaccaccaccagaacgagcagggcuccggcuacgccgccgaccucaaguccacccagaacgccaucgacaagaucaccaacaaggucaacuccgucaucgagaagaugaacacccaguucaccgccgucggcaaggaguucaaccaccucgagaagcgcaucgagaaccucaacaagaaggucgacgacggcuuccucgacaucuggaccuacaacgccgagcuccucguccuccucgagaacgagcgcacccucgacuaccacgacuccaacgucaagaaccucuacgagaagguccgcucccagcucaagaacaacgccaaggagaucggcaacggcugcuucgaguucuaccacaagugcgacaacaccugcauggaguccgucaagaacggcaccuacgacuaccccaaguacuccgaggaggccaagcucaaccgcgaggagaucgacggcgucaagcucgaguccacccgcaucuaccagauccucgccaucuacuccaccgucgccuccucccucguccucgucgucucccucggcgccaucuccuucuggaugugcuccaacggcucccuccagugccgcaucugcaucuga

SEQ ID NO: 102914 - RNA, 1701 nt, Artificial Sequence; identical to SEQ ID NO: 101620
  derived and/or modified CDS sequence (opt2) from hemagglutinin__InfluenzaA__AEI86854

SEQ ID NO: 102915 - RNA, 1701 nt, Artificial Sequence
  derived and/or modified CDS sequence (opt2) from hemagglutinin__InfluenzaA__AEI86864
augaaggccauccucgucgcccuccucuacaccuucgccaccgccaacgccgacacccucugcaucggcuaccacgccaacaacuccaccgacaccgucgacaccguccucgagaagaacgucaccgucacccacuccgucaaccuccucgaggacaagcacaacggcaagcucugcaagcuccgcggcgucgccccccuccaccucggcaagugcaacaucgccggcuggauccucggcaaccccgagugcgagucccucuccaccgccuccuccugguccuacaucgucgagaccuccuccuccgacaacggcaccugcuaccccggcgacuucaucaacuacgaggagcuccgcgagcagcucuccuccgucuccuccuucgagcgcuucgagaucuuccccaagaccuccuccuggcccaaccacgacuccaacaagggcgucaccgccgccugcccccacgccggcgccaaguccuucuacaagaaccucaucuggcucgucaagaagggcaacuccuaccccaagcucuccaaguccuacaucaacgacaagggcaaggagguccucguccucuggggcauccaccaccccuccaccaccgccgaccagcagucccucuaccagaacgccgacgccuacgucuucgucggcaccucccgcuacuccaagaaguucaagcccgagaucgccauccgccccaagguccgcgaccaggagggccgcaugaacuacuacuggacccucgucgagcccggcgacaagaucaccuucgaggccaccggcaaccucgucgucccccgcuacgccuucgccauggagcgcaacgccggcuccggcaucaucaucuccgacacccccguccacgacugcaacaccaccugccagacccccaagggcgccaucaacaccucccuccccuuccagaacauccaccccaucaccaucggcaagugccccaaguacgucaaguccaccaagcuccgccucgccaccggccuccgcaacguccccuccauccagucccgcggccucuucggcgccaucgccggcuucaucgagggcggcuggaccggcauggucgacggcugguacggcuaccaccaccagaacgagcagggcuccggcuacgccgccgaccucaaguccacccagaacgccaucgacaagaucaccaacaaggucaacuccgucaucgagaagaugaacacccaguucaccgccgucggcaaggaguucaaccaccucgagaagcgcaucgagaaccucaacaagaaggucgacgacggcuuccucgacaucuggaccuacaacgccgagcuccucguccuccucgagaacgagcgcacccucgacuaccacgacuccaacgucaagaaccucuacgagaagguccgcaaccagcucaagaacaacgccaaggagaucggcaacggcugcuucgaguucuaccacaagugcgacaacaccugcauggaguccgucaagaacggcaccuacgacuaccccaaguacuccgaggaggccaagcucaaccgcgaggagaucgacggcgucaagcucgaguccacccgcaucuaccagauccucgccaucuacuccaccgucgccuccucccucguccucgucgucucccucggcgccaucuccuucuggaugugcuccaacggcucccuccagugccgcaucugcaucuga

SEQ ID NO: 102916 - RNA, 1701 nt, Artificial Sequence; identical to SEQ ID NO: 102906
  derived and/or modified CDS sequence (opt2) from hemagglutinin__InfluenzaA__AEI86874

SEQ ID NO: 102917 - RNA, 1701 nt, Artificial Sequence
  derived and/or modified CDS sequence (opt2) from hemagglutinin__InfluenzaA__AEI86894
augaaggccauccucgucguccuccucuacaccuucgccaccgccaacgccgacacccucugcaucggcuaccacgccaacaacuccaccgacaccgucgacaccguccucgagaagaacgucaccgucacccacuccgucaaccuccucgaggacaagcacaacggcaagcucugcaagcuccgcggcgucgccccccuccaccucggcaagugcaacaucgccggcuggauccucggcaaccccgagugcgagucccucuccaccgccuccuccugguccuacaucgucgagaccuccuccuccgacaacggcaccugcuaccccggcaacuucaucgacuacgaggagcuccgcgagcagcucuccuccgucuccuccuucgagcgcuucgagaucuuccccaagaccuccuccuggcccgaccacgacuccaacaagggcgucaccgccgccugcccccacgccggcgccaaguccuucuacaagaaccucaucuggcucgucaagaagggcaacuccuaccccaagcucuccaaguccuacaucaacgacaagggcaaggagguccucguccucuggggcauccaccaccccuccaccuccgccgaccagcagucccucuaccagaacgccgacgccuacgucuucgucggcaccucccgcuacuccaagaaguucaagcccgagaucgccauccgccccaagguccgcgaccaggagggccgcaugaacuacuacuggacccucgucgagcccggcgacaagaucaccuucgaggccaccggcaaccucgucgccccccgcuacgccuucgccauggagcgcaacgccggcuccggcaucaucaucuccgacacccccguccacgacugcaacaccaccugccagacccccaagggcgccaucaacaccucccuccccuuccagaacauccaccccaucaccaucggcaagugccccaaguacgucaaguccaccaagcuccgccucgccaccggccuccgcaacguccccuccauccagucccgcggccucuucggcgccaucgccggcuucaucgagggcggcuggaccggcauggucgacggcugguacggcuaccaccaccagaacgagcagggcuccggcuacgccgccgaccucaaguccacccagaacgccaucgacaagaucaccaacaaggucaacuccgucaucgagaagaugaacacccaguucaccgccgucggcaaggaguucaaccaccucgagaagcgcaucgagaaccucaacaagaaggucgacgacggcuuccucgacaucuggaccuacaacgccgagcuccucguccuccucgagaacgagcgcacccucgacuaccacgacuccaacgucaagaaccucuacgagaagguccgcucccagcucaagaacaacgccaaggagaucggcaacggcugcuucgaguucuaccacaagugcgacaacaccugcauggaguccgucaagaacggcaccuacgacuaccccaaguacuccgaggaggccaagcucaaccgcgaggagaucgacggcgucaagcucgaguccacccgcaucuaccagauccucgccaucuacuccaccgucgccuccucccucguccucgucgucucccucggcgccaucuccuucuggaugugcuccaacggcucccuccagugccgcaucugcaucuga

SEQ ID NO: 102918 - RNA, 1701 nt, Artificial Sequence
  derived and/or modified CDS sequence (opt2) from hemagglutinin__InfluenzaA__AEI86904
augaaggccauccucgucguccuccucuacaccuucaccaccgccaacgccgacacccucugcaucggcuaccacgccaacaacuccaccgacaccgucgacaccguccucgagaagaacgucaccgucacccacuccgucaaccuccucgaggacaagcacaacggcaagcucugcaagcuccgcggcgucgccccccuccaccucggcaagugcaacaucgccggcuggauccucggcaaccccgagugcgagucccucuccaccgccuccuccugguccuacaucgucgagaccuccuccuccgacaacggcaccugcuaccccggcgacuucaucgacuacgaggagcuccgcgagcagcucuccuccgucuccuccuucgagcgcuucgagaucuuccccaagaccuccuccuggcccaaccacgacuccaacaagggcgucaccgccgccugcccccacgccggcgccaaguccuucuacaagaaccucaucuggcucgucaagaagggcaacuccuaccccaagcucuccaaguccuacaucaacgacaagggcaaggagguccucguccucuggggcauccaccaccccuccaccaccgccgaccagcagucccucuaccagaacgccgacgccuacgucuucgucggcaccucccgcuacuccaagaaguucaagcccgagaucgccauccgccccaagguccgcgaccaggagggccgcaugaacuacuacuggacccucgucgagcccggcgacaagaucaccuucgaggccaccggcaaccucgucgucccccgcuacgccuucgccauggagcgcaacgccggcuccggcaucaucaucuccgacacccccguccacgacugcaacaccaccugccagacccccaagggcgccaucaacaccucccuccccuuccagaacauccaccccaucaccaucggcaagugccccaaguacgucaaguccaccaagcuccgccucgccaccggccuccgcaacguccccuccauccagucccgcggccucuucggcgccaucgccggcuucaucgagggcggcuggaccggcauggucgacggcugguacggcuaccaccaccagaacgagcagggcuccggcuacgccgccgaccucaaguccacccagaacgccaucgacaagaucaccaacaaggucaacuccgucaucgagaagaugaacacccaguucaccgccgucggcaaggaguucaaccaccucgagaagcgcaucgagaaccucaacaagaaggucgacgacggcuuccucgacaucuggaccuacaacgccgagcuccucguccuccucgagaacgagcgcacccucgacuaccacgacuccaacgucaagaaccucuacgagaagguccgcaaccagcucaagaacaacgccaaggagaucggcaacggcugcuucgaguucuaccacaagugcgacaacaccugcauggaguccgucaagaacggcaccuacgacuaccccaaguacuccgaggaggccaagcucaaccgcgaggagaucgacggcgucaagcucgaguccacccgcaucuaccagauccucgccaucuacuccaccgucgccuccucccucguccucgucgucucccucggcgccaucuccuucuggaugugcuccaacggcucccuccagugccgcaucugcaucuga

SEQ ID NO: 102919 - RNA, 1701 nt, Artificial Sequence
  derived and/or modified CDS sequence (opt2) from hemagglutinin__InfluenzaA__AEI86914
augaaggccauccucgucguccuccucuacaccuucgccaccgccaacgccgacacccucugcaucggcuaccacgccaacaacuccaccgacaccgucgacaccguccucgagaagaacgucaccgucacccacuccgucaaccuccucgaggacaagcacaacggcaagcucugcaagcuccgcggcgucgccccccuccaccucggcaagugcaacaucgccggcuggauccucggcaaccccgagugcgagucccucuccaccgccuccuccugguccuacaucgucgagaccuccuccuccgacaacggcaccugcuaccccggcgacuucaucaacuacgaggagcuccgcgagcagcucuccuccgucuccuccuucgagcgcuucgagaucuuccccaagaccuccuccuggcccaaccacgacuccaacaagggcgucaccgccgccugcccccacgccggcgccaaguccuucuacaagaaccucaucuggcucgucaagaagggcaacuccuacccccgccucuccaaguccuacaucaacgacaagggcaaggagguccucguccucuggggcauccaccaccccuccaccaccgccgaccagcagucccucuaccagaacgccgacgccuacgucuucgucggcaccucccgcuacuccaagaaguucaagcccgagaucgccauccgccccaagguccgcgaccaggagggccgcaugaacuacuacuggacccucgucgagcccggcgacaagaucaccuucgaggccaccggcaaccucgucgucccccgcuacgccuucgccauggagcgcaacgccggcuccggcaucaucaucuccgacacccccguccacgacugcaacaccaccugccagacccccaagggcgccaucaacaccucccuccccuuccagaacauccaccccaucaccaucggcaagugccccaaguacgucaaguccaccaagcuccgccucgccaccggccuccgcaacguccccuccauccagucccgcggccucuucggcgccaucgccggcuucaucgagggcggcuggaccggcauggucgacggcugguacggcuaccaccaccagaacgagcagggcuccggcuacgccgccgaccucaaguccacccagaacgccaucgacaagaucaccaacaaggucaacuccgucaucgagaagaugaacacccaguucaccgccgucggcaaggaguucaaccaccucgagaagcgcaucgagaaccucaacaagaaggucgacgacggcuuccucgacaucuggaccuacaacgccgagcuccucguccuccucgagaacgagcgcacccucgacuaccacgacuccaacgucaagaaccucuacgagaagguccgcaaccagcucaagaacaacgccaaggagaucggcaacggcugcuucgaguucuaccacaagugcgacaacaccugcauggaguccgucaagaacggcaccuacgacuaccccaaguacuccgaggaggccaagcucaaccgcgaggagaucgacggcgucaagcucgaguccacccgcaucuaccagauccucgccaucuacuccaccgucgccuccucccucguccucgucgucucccucggcgccaucuccuucuggaugugcuccaacggcucccuccagugccgcaucugcaucuga

SEQ ID NO: 102920 - RNA, 1701 nt, Artificial Sequence
  derived and/or modified CDS sequence (opt2) from hemagglutinin__InfluenzaA__AEI86924
augaaggccauccucgucguccuccucuacaccuucgccaccgccaacgccgacacccucugcaucggcuaccacgccaacaacuccaccgacaccgucgacaccguccucgagaagaacgucaccgucacccacuccgucaaccuccucgaggacaagcacaacggcaagcucugcaagcuccgcggcgucgccccccuccaccucggcaagugcaacaucgccggcuggauccucggcaaccccgagugcgagucccucuccaccgccuccuccugguccuacaucgucgagaccuccuccuccgacaacggcaccugcuaccccggcgucuucaucgacuacgaggagcuccgcgagcagcucuccuccgucuccuccuucgagcgcuucgagaucuuccccaagaccuccuccuggcccaaccacgacuccaacaagggcgucaccgccgccugcccccacgccggcgccaaguccuucuacaagaaccucaucuggcucaucaagaagggcaacuccuaccccaagcucuccaaguccuacaucaacgacaagggcaaggagguccucguccucuggggcauccaccaccccuccaccaccgccgaccagcagucccucuaccagaacgccgacgccuacgucuucgucggcaccucccgcuacuccaagaaguucaagcccgagaucgccguccgccccaagguccgcgaccaggagggccgcaugaacuacuacuggacccucgucgagcccggcgacaagaucaccuucgaggccaccggcaaccucgucgucccccgcuacgccuucgccauggagcgcaacgccggcuccggcaucaucaucuccgacacccccguccacgacugcaacaccaccugccagacccccaagggcgccaucaacaccucccuccccuuccagaacauccaccccaucaccaucggcaagugccccaaguacgucaaguccaccaagcuccgccucgccaccggccuccgcaacguccccuccauccagucccgcggccucuucggcgccaucgccggcuucaucgagggcggcuggaccggcauggucgacggcugguacggcuaccaccaccagaacgagcagggcuccggcuacgccgccgaccucaaguccacccagaacgccaucgacaagaucaccaacaaggucaacuccgucaucgagaagaugaacacccaguucaccgccgucggcaaggaguucaaccaccucgagaagcgcaucgagaaccucaacaagaaggucgacgacggcuuccucgacaucuggaccuacaacgccgagcuccucguccuccucgagaacgagcgcacccucgacuaccacgacuccaacgucaagaaccucuacgagaagguccgcaaccagcucaagaacaacgccaaggagaucggcaacggcugcuucgaguucuaccacaagugcgacaacaccugcauggaguccgucaagaacggcaccuacgacuaccccaaguacuccgaggaggccaagcucaaccgcgaggagaucgacggcgucaagcucgaguccacccgcaucuaccagauccucgccaucuacuccaccgucgccuccucccucguccucgucgucucccucggcgccaucuccuucuggaugugcuccaacggcucccuccagugccgcaucugcaucuga

SEQ ID NO: 102921 - RNA, 1701 nt, Artificial Sequence; identical to SEQ ID NO: 102906
  derived and/or modified CDS sequence (opt2) from hemagglutinin__InfluenzaA__AEI86934

SEQ ID NO: 102922 - RNA, 1701 nt, Artificial Sequence; identical to SEQ ID NO: 101620
  derived and/or modified CDS sequence (opt2) from hemagglutinin__InfluenzaA__AEI86944

SEQ ID NO: 102923 - RNA, 1701 nt, Artificial Sequence
  derived and/or modified CDS sequence (opt2) from hemagglutinin__InfluenzaA__AEI86964
augaaggccauccucgucguccuccucuacaccuucgccaccgccaacgccgacacccucugcaucggcuaccacgccaacaacuccaccgacaccgucgacaccguccucgagaagaacgucaccgucacccacuccgucaaccuccucgaggacaagcacaacggcaagcucugcaagcuccgcggcgucgccccccuccaccucggcaagugcaacaucgccggcuggauccucggcaaccccgagugcgagucccucuccaccgccuccuccugguccuacaucgucgagaccuccuccuccgacaacggcaccugcuaccccggcgucuucaucgacuacgaggagcuccgcgagcagcucuccuccgucuccuccuucgagcgcuucgagaucuuccccaagaccuccuccuggcccaaccacgacuccaacaagggcgucaccgccgccugcccccacgccggcgccaaguccuucuacaagaaccucaucuggcucgucaagaagggcaacuccuaccccaagcucuccaaguccuacaucaacgacaagggcaaggagguccucguccucuggggcauccaccaccccuccaccaccgccgaccagcagucccucuaccagaacgccgacgccuacgucuucgucggcaccucccgcuacuccaagaaguucaagcccgagaucgccguccgccccaagguccgcgaccaggagggccgcaugaacuacuacuggacccucgucgagcccggcgacaagaucaccuucgaggccaccggcaaccucgucgucccccgcuacgccuucgccauggagcgcaacgccggcuccggcaucaucaucuccgacacccccguccacgacugcaacaccaccugccagacccccaagggcgccaucaacaccucccuccccuuccagaacauccaccccaucaccaucggcaagugccccaaguacgucaaguccaccaagcuccgccucgccaccggccuccgcaacguccccuccauccagucccgcggccucuucggcgccaucgccggcuucaucgagggcggcuggaccggcauggucgacggcugguacggcuaccaccaccagaacgagcagggcuccggcuacgccgccgaccucaaguccacccagaacgccaucgacaagaucaccaacaaggucaacuccgucaucgagaagaugaacacccaguucaccgccgucggcaaggaguucaaccaccucgagaagcgcaucgagaaccucaacaagaaggucgacgacggcuuccucgacaucuggaccuacaacgccgagcuccucguccuccucgagaacgagcgcacccucgacuaccacgacuccaacgucaagaaccucuacgagaagguccgcaaccagcucaagaacaacgccaaggagaucggcaacggcugcuucgaguucuaccacaagugcgacaacaugugcauggaguccgucaagaacggcaccuacgacuaccccaaguacuccgaggaggccaagcucaaccgcgaggagaucgacggcgucaagcucgaguccacccgcaucuaccagauccucgccaucuacuccaccgucgccuccucccucguccucgucgucucccucggcgccaucuccuucuggaugugcuccaacggcucccuccagugccgcaucugcaucuga

SEQ ID NO: 102924 - RNA, 1701 nt, Artificial Sequence; identical to SEQ ID NO: 101862
  derived and/or modified CDS sequence (opt2) from hemagglutinin__InfluenzaA__AEI86974

SEQ ID NO: 102925 - RNA, 1701 nt, Artificial Sequence; identical to SEQ ID NO: 101620
  derived and/or modified CDS sequence (opt2) from hemagglutinin__InfluenzaA__AEI86984

SEQ ID NO: 102926 - RNA, 1701 nt, Artificial Sequence; identical to SEQ ID NO: 101620
  derived and/or modified CDS sequence (opt2) from hemagglutinin__InfluenzaA__AEI86994

SEQ ID NO: 102927 - RNA, 1701 nt, Artificial Sequence
  derived and/or modified CDS sequence (opt2) from hemagglutinin__InfluenzaA__AEI87004
augaaggccauccucgucguccuccucuacaccuucgccaccgccaacgccgacacccucugcaucggcuaccacgccaacaacuccaccgacaccgucgacaccguccucgagaagaacgucaccgucacccacuccgucaaccuccucgaggacaagcacaacggcaagcucugcaagcucaagggcgucgccccccuccaccucggcaagugcaacaucgccggcuggauccucggcaaccccgagugcgagucccucuccaccgccuccuccugguccuacaucgucgagaccuccuccuccgacaacggcaccugcuaccccggcaacuucaucgacuacgaggagcuccgcgagcagcucuccuccgucuccuccuucgagcgcuucgagaucuuccccaagaccuccuccuggcccgaccacgacuccaacaagggcgucaccgccgccugcccccacgccggcgccaaguccuucuacaagaaccucaucuggcucgucaagaagggcaacuccuaccccaagcucuccaaguccuacaucaacgacaagggcaaggagguccucguccucuggggcauccaccaccccuccaccuccgccgaccagcagggccucuaccagaacgccgacgccuacgucuucgucggcaccucccgcuacuccaagaaguucaagcccgagaucgccauccgccccaagguccgcgaccaggagggccgcaugaacuacuacuggacccucgucgagcccggcgacaagaucaccuucgaggccaccggcaaccucgucgccccccgcuacgccuucgccauggagcgcaacgccggcuccggcaucaucaucuccgacacccccguccacgacugcaacaccaccugccagacccccaagggcgccaucaacaccucccuccccuuccagaacauccaccccaucaccaucggcaagugccccaaguacgucaaguccaccaagcuccgccucgccaccggccuccgcaacguccccuccauccagucccgcggccucuucggcgccaucgccggcuucaucgagggcggcuggaccggcauggucgacggcugguacggcuaccaccaccagaacgagcagggcuccggcuacgccgccgaccucaaguccacccagaacgccaucgacaagaucaccaacaaggucaacuccgucaucgagaagaugaacacccaguucaccgccgucggcaaggaguucaaccaccucgagaagcgcaucgagaaccucaacaagaaggucgacgacggcuuccucgacaucuggaccuacaacgccgagcuccucguccuccucgagaacgagcgcacccucgacuaccacgacuccaacgucaagaaccucuacgagaagguccgcucccagcucaagaacaacgccaaggagaucggcaacggcugcuucgaguucuaccacaagugcgacaacaccugcauggaguccgucaagaacggcaccuacgacuaccccaaguacuccgaggaggccaagcucaaccgcgaggagaucgacggcgucaagcucgaguccacccgcaucuaccagauccucgccaucuacuccaccgucgccuccucccucguccucgucgucucccucggcgccaucuccuucuggaugugcuccaacggcucccuccagugccgcaucugcaucuga

SEQ ID NO: 102928 - RNA, 1701 nt, Artificial Sequence
  derived and/or modified CDS sequence (opt2) from hemagglutinin__InfluenzaA__AEI87014
augaaggccauccucgucguccuccucuacaccuucgccaccgccaacgccgacacccucugcaucggcuaccacgccaacaacuccaccgacaccgucgacaccguccucgagaagaacgucaccgucacccacuccgucaaccuccucgaggacaagcacaacggcaagcucugcaagcuccgcggcgucgccccccuccaccucggcaagugcaacaucgccggcuggauccucggcaaccccgagugcgagucccucuccaccgccuccuccugguccuacaucgucgagaccuccuccuccgacaacggcaccugcuaccccggcgacuucaucgacuacgaggagcuccgcgagcagcucuccuccgucuccuccuucgagcgcuucgagaucuuccccaagaccuccuccuggcccaaccacgacuccaacaagggcgucaccgccgccugcccccacgccggcgccaaguccuucuacaagaaccucaucuggcucgucaagaagggcaacuccuaccccaagcucuccaaguccuacaucaacgacaagggcaaggagguccucguccucuggggcauccaccaccccuccaccuccgccgaccagcagucccucuaccagaacgccgacgccuacgucuucgucggcaccucccgcuacuccaagaaguucaagcccgagaucgccauccgccccaagguccgcgaccaggagggccgcaugaacuacuacuggacccucgucgagcccggcgacaagaucaccuucgaggccaccggcaaccucgucgucccccgcuacgccuucgccauggagcgcaacgccggcuccggcaucaucaucuccgacacccccguccacgacugcaacaccaccugccagacccccaagggcgccaucaacaccucccuccccuuccagaacauccaccccaucaccaucggcaagugccccaaguacgucaaguccaccaagcuccgccucgccaccggccuccgcaacguccccuccauccagucccgcggccucuucggcgccaucgccggcuucaucgagggcggcuggaccggcauggucgacggcugguacggcuaccaccaccagaacgagcagggcuccggcuacgccgccgaccucaaguccacccagaacgccaucgacaagaucaccaacaaggucaacuccgucaucgagaagaugaacacccaguucaccgccgucggcaaggaguucaaccaccucgagaagcgcaucgagaaccucaacaagaaggucgacgacggcuuccucgacaucuggaccuacaacgccgagcuccucguccuccucgagaacgagcgcacccucgacuaccacgacuccaacgucaagaaccucuacgagaagguccgcucccagcucaagaacaacgccaaggagaucggcaacggcugcuucgaguucuaccacaagugcgacaacaccugcauggaguccgucaagaacggcaccuacgacuaccccaaguacuccggcgaggccaagcucaaccgcgaggagaucgacggcgucaagcucgaguccacccgcaucuaccagauccucgccaucuacuccaccgucgccuccucccucguccucgucgucucccucggcgccaucuccuucuggaugugcuccaacggcucccuccagugccgcaucugcaucuga

SEQ ID NO: 102929 - RNA, 1701 nt, Artificial Sequence
  derived and/or modified CDS sequence (opt2) from hemagglutinin__InfluenzaA__AEI87034
augaaggccauccucgucguccuccucuacaccuucgccaccgccaacgccgacacccucugcaucggcuaccacgccaacaacuccaccgacaccgucgacaccguccucgagaagaacgucaccgucacccacuccgucaaccuccucgaggacaagcacaacggcaagcucugcaagcuccgcggcgucgccccccuccaccucggcaagugcaacaucgccggcuggauccucggcaaccccgagugcgagucccucuccaccgccuccuccugguccuacaucgucgagaccuccuccuccgacaacggcaccugcuaccccggcgacuucaucgacuacgaggagcuccgcgagcagcucuccuccgucuccuccuucgagcgcuucgagaucuuccccaagaccuccuccuggcccgaccacgacuccaacaagggcgucaccgccgccugcccccacgccggcgccaaguccuucuacaagaaccucaucuggcucgucaagaagggcaacuccuaccccaagcucuccaaguccuacaucaacgacaagggcaaggagguccucguccucuggggcauccaccaccccuccaccuccgccgaccagcagucccucuaccagaacgccgacgccuacgucuucgucggcaccucccgcuacuccaagaaguucaagcccgagaucgccauccgccccaagguccgcgaccaggagggccgcaugaacuacuacuggacccucgucgagcccggcgacaagaucaccuucgaggccaccggcaaccucgucgucccccgcuacgccuucgccauggagcgcaacgccggcuccggcaucaucaucuccgacacccccguccacgacugcaacaccaccugccagacccccaagggcgccaucaacaccucccuccccuuccagaacauccaccccaucaccaucggcaagugccccaaguacgucaaguccaccaagcuccgccucgccaccggccuccgcaacguccccuccauccagucccgcggccucuucggcgccaucgccggcuucaucgagggcggcuggaccggcauggucgacggcugguacggcuaccaccaccagaacgagcagggcuccggcuacgccgccgaccucaaguccacccagaacgccaucgacaagaucaccaacaaggucaacuccgucaucgagaagaugaacacccaguucaccgccaucggcaaggaguucaaccaccucgagaagcgcaucgagaaccucaacaagaaggucgacgacggcuuccucgacaucuggaccuacaacgccgagcuccucguccuccucgagaacgagcgcacccucgacuaccacgacuccaacgucaagaaccucuacgagaagguccgcucccagcucaagaacaacgccaaggagaucggcaacggcugcuucgaguucuaccacaagugcgacaacaccugcauggaguccgucaagaacggcaccuacgacuaccccaaguacuccgaggaggccaagcucaaccgcgaggagaucgacggcgucaagcucgaguccacccgcaucuaccagauccucgccaucuacuccaccgucgccuccucccucguccucgucgucucccucggcgccaucuccuucuggaugugcuccaacggcucccuccagugccgcaucugcaucuga

SEQ ID NO: 102930 - RNA, 1701 nt, Artificial Sequence; identical to SEQ ID NO: 101620
  derived and/or modified CDS sequence (opt2) from hemagglutinin__InfluenzaA__AEI87044

SEQ ID NO: 102931 - RNA, 1701 nt, Artificial Sequence; identical to SEQ ID NO: 99869
  derived and/or modified CDS sequence (opt2) from hemagglutinin__InfluenzaA__AEI87054

SEQ ID NO: 102932 - RNA, 1701 nt, Artificial Sequence
  derived and/or modified CDS sequence (opt2) from hemagglutinin__InfluenzaA__AEI87064
augaaggccauccucgucguccuccucuacaccuucgccaccgccaacgccgacacccucugcaucggcuaccacgccaacaacuccaccgacaccgucgacaccguccucgagaagaacgucaccgucacccacuccgucaaccuccucgaggacaagcacaacggcaagcucugcaagcuccgcggcgucgccccccuccaccucggcaagugcaacaucgccggcuggauccucggcaaccccgagugcgagucccucuccaccgccuccuccugguccuacaucgucgagaccuccuccuccgacaacggcaccugcuaccccggcgacuucaucgacuacgaggagcuccgcgagcagcucuccuccgucuccuccuucgagcgcuucgagaucuuccccaagaccuccuccuggcccaaccacgacuccaacaagggcgucaccgccgccugcccccacgccggcgccaaguccuucuacaagaaccucaucuggcucgucaagaagggcaacuccuaccccaagcucuccaaguccuacaucaacgacaagggcaaggagguccucguccucuggggcauccaccaccccuccaccaccgccgaccagcagucccucuaccagaacgccgacaccuacgucuucgucggcaccucccgcuacuccaagaaguucaagcccgagaucgccauccgccccaagguccgcgaccaggagggccgcaugaacuacuacuggacccucgucgagcccggcgacaagaucaccuucgaggccaccggcaaccucgucgucccccgcuacgccuucgccauggagcgcaacgccggcuccggcaucaucaucuccgacacccccguccacgacugcaacaccaccugccagacccccaagggcgccaucaacaccucccuccccuuccagaacauccaccccaucaccaucggcaagugccccaaguacgucaaguccaccaagcuccgccucgccaccggccuccgcaacguccccuccauccagucccgcggccucuucggcgccaucgccggcuucaucgagggcggcuggaccggcauggucgacggcugguacggcuaccaccaccagaacgagcagggcuccggcuacgccgccgaccucaaguccacccagaacgccaucgacaagaucaccaacaaggucaacuccgucaucgagaagaugaacacccaguucaccgccgucggcaaggaguucaaccaccucgagaagcgcaucgagaaccucaacaagaaggucgacgacggcuuccucgacaucuggaccuacaacgccgagcuccucguccuccucgagaacgagcgcacccucgacuaccacgacuccaacgucaagaaccucuacgagaagguccgcaaccagcucaagaacaacgccaaggagaucggcaacggcugcuucgaguucuaccacaagugcgacaacaccugcauggaguccgucaagaacggcaccuacgacuaccccaaguacuccgaggaggccaagcucaaccgcgaggagaucgacggcgucaagcucgaguccacccgcaucuaccagauccucgccaucuacuccaccgccgccuccucccucguccucgucgucucccucggcgccaucuccuucuggaugugcuccaacggcucccuccagugccgcaucugcaucuga

SEQ ID NO: 102933 - RNA, 1701 nt, Artificial Sequence
  derived and/or modified CDS sequence (opt2) from hemagglutinin__InfluenzaA__AEI87074
augaaggccacccucgucguccuccucuacaccuucgccaccgccaacgccgacacccucugcaucggcuaccacgccaacaacuccaccgacaccgucgacaccguccucgagaagaacgucaccgucacccacuccgucaaccuccucgaggacaagcacaacggcaagcucugcaagcuccgcggcgucgccccccuccaccucggcaagugcaacaucgccggcuggauccucggcaaccccgagugcgagucccucuccaccgccuccuccugguccuacaucgucgagaccuccuccuccgacaacggcaccugcuaccccggcgacuucaucaacuacgaggagcuccgcgagcagcucuccuccgucuccuccuucgagcgcuucgagaucuuccccaagaccuccuccuggcccaaccacgacuccaacaagggcgucaccgccgccugcccccacgccggcgccaaguccuucuacaagaaccucaucuggcucgucaagaagggcaacuccuaccccaagcucuccaaguccuacaucaacgacaagggcaaggagguccucguccucuggggcauccaccaccccuccaccaccgccgaccagcagucccucuaccagaacgccgacgccuacgucuucgucggcaccucccgcuacuccaagaaguucaagcccgagaucgccauccgccccaagguccgcgaccaggagggccgcaugaacuacuacuggacccucgucgagcccggcgacaagaucaccuucgaggccaccggcaaccucgucgucccccgcuacgccuucgccauggagcgcaacgccggcuccggcaucaucaucuccgacacccccguccacgacugcaacaccaccugccagacccccaagggcgccaucaacaccucccuccccuuccagaacauccaccccaucaccaucggcaagugccccaaguacgucaaguccaccaagcuccgccucgccaccggccuccgcaacguccccuccauccagucccgcggccucuucggcgccaucgccggcuucaucgagggcggcuggaccggcauggucgacggcugguacggcuaccaccaccagaacgagcagggcuccggcuacgccgccgaccucaaguccacccagaacgccaucgacaagaucaccaacaaggucaacuccgucaucgagaagaugaacacccaguucaccgccgucggcaaggaguucaaccaccucgagaagcgcaucgagaaccucaacaagaaggucgacgacggcuuccucgacaucuggaccuacaacgccgagcuccucguccuccucgagaacgagcgcacccucgacuaccacgacuccaacgucaagaaccucuacgagaagguccgcaaccagcucaagaacaacgccaaggagaucggcaacggcugcuucgaguucuaccacaagugcgacaacaccugcauggaguccgucaagaacggcaccuacgacuaccccaaguacuccgaggaggccaagcucaaccgcgaggagaucgacggcgucaagcucgaguccacccgcaucuaccagauccucgccaucuacuccaccgucgccuccucccucguccucgucgucucccucggcgccaucuccuucuggaugugcuccaacggcucccuccagugccgcaucugcaucuga

SEQ ID NO: 102934 - RNA, 1701 nt, Artificial Sequence
  derived and/or modified CDS sequence (opt2) from hemagglutinin__InfluenzaA__AEI87094
augaaggccauccucgucguccuccucuacaccuucgccaccgccaacgccgacacccucugcaucggcuaccacgccaacaacuccaccgacaccgucgacaccguccucgagaagaacgucaccgucacccacuccgucaaccuccucgaggacaagcacaacggcaagcucugcaagcuccgcggcgucgccccccuccaccucggcaagugcaacaucgccggcuggauccucggcaaccccgagugcgagucccucuccaccgccuccuccugguccuacaucgucgagaccuccuccuccgacaacggcaccugcuaccccggcgacuucaucgacuacgaggagcuccgcgagcagcucuccuccgucuccuccuucgagcgcuucgagaucuuccccaagaccuccuccuggcccgaccacgacuccaacaagggcgucaccgccgccugcccccacgccggcgccaaguccuucuacaagaaccucaucuggcucgucaagaagggcaacuccuaccccaagcucuccaaguccuacaucaacgacaagggcaaggagguccucguccucuggggcauccaccaccccuccaccuccgccgaccagcagucccucuaccagaacgccgacgccuacgucuucgucggcaccucccgcuacuccaagaaguucaagcccgagaucgccauccgccccaagguccgcgaccaggagggccgcaugaacuacuacuggacccucgucgagcccggcgacaagaucaccuucgaggccaccggcaaccucgucgucccccgcuacgccuucgccauggagcgcaacaccggcuccggcaucaucaucuccgacacccccguccacgacugcaacaccaccugccagacccccaagggcgccaucaacaccucccuccccuuccagaacauccaccccaucaccaucggcaagugccccaaguacgucaaguccaccaagcuccgccucgccaccggccuccgcaacguccccuccauccagucccgcggccucuucggcgccaucgccggcuucaucgagggcggcuggaccggcauggucgacggcugguacggcuaccaccaccagaacgagcagggcuccggcuacgccgccgaccucaaguccacccagaacgccaucgacaagaucaccaacaaggucaacuccgucaucgagaagaugaacacccaguucaccgccgucggcaaggaguucaaccaccucgagaagcgcaucgagaaccucaacaagaaggucgacgacggcuuccucgacaucuggaccuacaacgccgagcuccucguccuccucgagaacgagcgcacccucgacuaccacgacuccaacgucaagaaccucuacgagaagguccgcucccagcucaagaacaacgccaaggagaucggcaacggcugcuucgaguucuaccacaagugcgacaacaccugcauggaguccgucaagaacggcaccuacgacuaccccaaguacuccgaggaggccaagcucaaccgcgagaagaucgacggcaucaagcucgaguccacccgcaucuaccagauccucgccaucuacuccaccgucgccuccucccucguccucgucgucucccucggcgccaucuccuucuggaugugcuccaacggcucccuccagugccgcaucugcaucuga

SEQ ID NO: 102935 - RNA, 1701 nt, Artificial Sequence; identical to SEQ ID NO: 102934
  derived and/or modified CDS sequence (opt2) from hemagglutinin__InfluenzaA__AEI87104

SEQ ID NO: 102936 - RNA, 1698 nt, Artificial Sequence; identical to SEQ ID NO: 99662
  derived and/or modified CDS sequence (opt2) from hemagglutinin__InfluenzaA__AEI91963

SEQ ID NO: 102937 - RNA, 1701 nt, Artificial Sequence; identical to SEQ ID NO: 99869
  derived and/or modified CDS sequence (opt2) from hemagglutinin__InfluenzaA__AEI91977

SEQ ID NO: 102938 - RNA, 1701 nt, Artificial Sequence; identical to SEQ ID NO: 101393
  derived and/or modified CDS sequence (opt2) from hemagglutinin__InfluenzaA__AEI91978

SEQ ID NO: 102939 - RNA, 1701 nt, Artificial Sequence; identical to SEQ ID NO: 100335
  derived and/or modified CDS sequence (opt2) from hemagglutinin__InfluenzaA__AEI91998

SEQ ID NO: 102940 - RNA, 1701 nt, Artificial Sequence
  derived and/or modified CDS sequence (opt2) from hemagglutinin__InfluenzaA__AEI91999
augaagaccaucaucgcccucuccuacauccucugccucgucuucgcccagaagcuccccggcaacgacaacuccaccgccacccucugccucggccaccacgccguccccaacggcaccaucgucaagaccaucaccaacgaccagaucgaggucaccaacgccaccgagcucguccaguccuccuccaccggcgagaucugcaacuccccccaccagauccucgacggcgagaacugcacccucaucgacgcccuccucggcgacccccagugcgacggcuuccagaacaagaagugggaccucuucgucgagcgcuccaaggccuacuccaacugcuaccccuacgacguccccgacuacgccucccuccgcucccucgucgccuccuccggcacccucgaguucaacaacgaguccuucaacuggaccggcgucacccagaacggcaccuccuccgccugcauccgccgcuccaacaacuccuucuucucccgccucaacuggcucacccaccucaacuucaaguaccccgcccucaacgucaccaugcccaacaacgagcaguucgacaagcucuacaucuggggcguccaccaccccggcaccgacaaggaccagaucuuccucuacgcccaggccuccggccgcaucaccgucuccaccaagcgcucccagcaggccgucauccccaacaucggcucccgcccccgcguccgcaacauccccucccgcaucuccaucuacuggaccaucgucaagcccggcgacauccuccucaucaacuccaccggcaaccucaucgccccccgcggcuacuucaagauccgcuccggcaaguccuccaucaugcgcuccgacgcccccaucggcaagugcaacuccgagugcaucacccccaacggcuccauccucaacgacaagcccuuccagaacgucaaccgcaucaccuacggcgccugcccccgcuacgucaagcagaacacccucaagcucgccaccggcaugcgcaacguccccgagaagcagacccgcggcaucuucggcgccaucgccggcuucaucgagaacggcugggagggcauggucgacggcugguacggcuuccgccaccagaacuccgagggccgcggccaggccgccgaccucaaguccacccaggccgccaucgaccagaucaacggcaagcucaaccgccucaucggcaagaccaacgagaaguuccaccagaucgagaaggaguucuccgaggucgagggccgcauccaggaccucgagaaguacgucgaggacaccaagaucgaccucugguccuacaacgccgagcuccucgucgcccucgagaaccagcacaccaucgaccucaccgacuccgagaugaacaagcucuucgagaagaccaagaagcagcuccgcgagaacgccgaggacaugggcaacggcugcuucaagaucuaccacaagugcgacaacgccugcaucggcuccauccgcaacggcaccuacgaccacgacgucuaccgcgacgaggcccucaacaaccgcuuccagaucaagggcgucgagcucaaguccggcuacaaggacuggauccucuggaucuccuucgccaucuccugcuuccuccucugcgucgcccuccucggcuucaucaugugggccugccagaagggcaacauccgcugcaacaucugcaucuga

SEQ ID NO: 102941 - RNA, 1698 nt, Artificial Sequence
  derived and/or modified CDS sequence (opt2) from hemagglutinin__InfluenzaA__AEI92018
augaaggucaagcuccucguccuccucugcaccuucaccgccaccuacgccgacaccaucugcaucggcuaccacgccaacaacuccaccgacaccgucgacaccguccucgagaagaacgucaccgucacccacuccgucaaccuccucgagaacucccacaacggcaagcucugccuccucaagggcaucgccccccuccagcucggcaacugcuccgucgccggcuggauccucggcaaccccgagugcgagcuccucaucuccaaggaguccugguccuacaucgucgagaagcccaaccccgagaacggcaccugcuaccccggccacuucgccgacuacgaggagcuccgcgagcagcucuccuccgucuccuccuucgagcgcuucgagaucuuccccaaggaguccuccuggcccaaccacaccgucaccggcgucuccgccuccugcucccacaacggcgaguccuccuucuaccgcaaccuccucuggcucaccggcaagaacggccucuaccccaaccucuccaaguccuacgccaacaacaaggagaaggagguccucguccucuggggcguccaccacccccccaacaucgccgaccagaagacccucuaccacaccgagaacgccuacgucuccgucgucuccucccacuacucccgcaaguucacccccgagaucgccaagcgccccaagguccgcgaccaggagggccgcaucaacuacuacuggacccuccucgagcccggcgacaccaucaucuucgaggccaacggcaaccucaucgccccccgcuacgccuucgcccucucccgcggcuucggcuccggcaucaucaacuccaacgcccccauggacaagugcgacgccaagugccagaccccccagggcgccaucaacuccucccuccccuuccagaacguccaccccgucaccaucggcgagugccccaaguacguccgcuccgccaagcuccgcauggucaccggccuccgcaacauccccuccauccagucccgcggccucuucggcgccaucgccggcuucaucgagggcggcuggaccggcauggucgacggcugguacggcuaccaccaccagaacgagcagggcuccggcuacgccgccgaccagaaguccacccagaacgccaucaacggcaucaccaacaaggucaacuccgucaucgagaagaugaacacccaguucaccgccgucggcaaggaguucaacaagcucgagcgccgcauggagaaccucaacaagaaggucgacgacggcuucaucgacaucuggaccuacaacgccgagcuccucguccuccucgagaacgagcgcacccucgacuuccacgacuccaacgucaagaaccucuacgagaaggucaagucccagcucaagaacaacgccaaggagaucggcaacggcugcuucgaguucuaccacaagugcaacgacgagugcauggaguccgucaagaacggcaccuacgacuaccccaaguacuccgaggaguccaagcucaaccgcgagaagaucgacggcgucaagcucgaguccaugggcgucuaccagauccucgccaucuacuccaccgucgccuccucccucguccuccucgucucccucggcgccaucuccuucuggaugugcuccaacggcucccuccagugccgcaucugcaucuga

SEQ ID NO: 102942 - RNA, 1701 nt, Artificial Sequence; identical to SEQ ID NO: 102917
  derived and/or modified CDS sequence (opt2) from hemagglutinin__InfluenzaA__AEJ10400

SEQ ID NO: 102943 - RNA, 1701 nt, Artificial Sequence
  derived and/or modified CDS sequence (opt2) from hemagglutinin__InfluenzaA__AEJ10410
augaagaccauccucgucguccuccucuacaccuucgccaccgccaacgccgacacccucugcaucggcuaccacgccaacaacuccaccgacaccaucgacaccguccucgagaagaacgucaccgucacccacuccgucaaccuccucgaggacaagcacaacggcaagcucugcaagcuccgcggcgucgccccccuccaccucggcaagugcaacaucgccggcuggauccucggcaaccccgagugcgagucccucuccaccgccuccuccugguccuacaucgucgagaccuccuccuccgacaacggcaccugcuaccccggcaacuucaucgacuacgaggagcuccgcgagcagcucuccuccgucuccuccuucgagcgcuucgagaucuuccccaagaccuccuccugguccgaccacgacuccaacaagggcgucaccgccgccugcccccacgccggcgccaaguccuucuacaagaaccucaucuggcucgucaagaagggcaacuccuaccccaagcucuccaaguccuacaucaacgacaagggcaaggagguccucguccucuggggcauccaccaccccuccaccuccgccgaccagcagucccucuaccagaacgccgacgccuacgucuucgucggcaccucccgcuacuccaagaaguucaagcccgagaucgccauccgccccaagguccgcgaccaggagggccgcaugaacuacuacuggacccucgucgagcccggcgacaagaucaccuucgaggccaccggcaaccucgucgccccccgcuacgccuucgccauggagcgcaacgccggcuccggcaucaucaucuccgacacccccguccacgacugcaacaccaccugccagacccccaagggcgccaucaacaccucccuccccuuccagaacauccaccccaucaccaucggcaagugccccaaguacgucaaguccaccaagcuccgccucgccaccggccuccgcaacguccccuccauccagucccgcggccucuucggcgccaucgccggcuucaucgagggcggcuggaccggcauggucgacggcugguacggcuaccaccaccagaacgagcagggcuccggcuacgccgccgaccucaaguccacccagaacgccaucgacaagaucaccaacaaggucaacuccgucaucgagaagaugaacacccaguucaccgccgucggcaaggaguucaaccaccucgagaagcgcaucgagaaccucaacaagaaggucgacgacggcuuccucgacaucuggaccuacaacgccgagcuccucguccuccucgagaacgagcgcacccucgacuaccacgacuccaacgucaagaaccucuacgagaagguccgcucccagcucaagaacaacgccaaggagaucggcaacggcugcuucgaguucuaccacaagugcgacaacaccugcauggaguccgucaagaacggcaccuacgacuaccccaaguacuccgaggaggccaagcucaaccgcgaggagaucgacggcgucaagcucgaguccacccgcaucuaccagauccucgccaucuacuccaccgucgccuccucccucguccucgucgucucccucggcgccaucuccuucuggaugugcuccaacggcucccuccagugccgcaucugcaucuga

SEQ ID NO: 102944 - RNA, 1701 nt, Artificial Sequence
  derived and/or modified CDS sequence (opt2) from hemagglutinin__InfluenzaA__AEJ10420
augaaggccauccucgucguccuccucuacaccuucgccaccgccaacgccgacacccucugcaucggcuaccacgccaacaacuccaccgacaccgucgacaccguccucgagaagaacgucaccgucacccacuccgucaaccuccucgaggaccgccacaacggcaagcucugcaagcuccgcggcgucgccccccuccaccucggcaagugcaacaucgccggcuggauccucggcaaccccgagugcgagucccucuccaccgccuccuccugguccuacaucgucgagaccuccuccuccgacaacggcaccugcuaccccggcgacuucaucgacuacgaggagcuccgcgagcagcucuccuccgucuccuccuucgagcgcuucgagaucuuccccaagaccuccuccuggcccgaccacgacuccaacaagggcgucaccgccgccugcccccacgccggcgccaaguccuucuacaagaaccucaucuggcucgucaagaagggcaacuccuaccccaagcucuccaaguccuacaucaacgacaagggcaaggagguccucguccucuggggcauccaccaccccuccaccuccgccgaccagcagucccucuaccagaacgccgacgccuacgucuucgucggcaccucccgcuacuccaagaaguucaagcccgagaucgccauccgccccaagguccgcgaccaggagggccgcaugaacuacuacuggacccucgucgagcccggcgacaagaucaccuucgaggccaccggcaaccucgucgucccccgcuacgccuucgccauggagcgcaacgccggcuccggcaucaucaucuccgacacccccguccacgacugcaacaccaccugccagacccccaagggcgccaucaacaccucccuccccuuccagaacauccaccccaucaccaucggcaagugccccaaguacgucaaguccaccaagcuccgccucgccaccggccuccgcaacguccccuccauccagucccgcggccucuucggcgccaucgccggcuucaucgagggcggcuggaccggcauggucgacggcugguacggcuaccaccaccagaacgagcagggcuccggcuacgccgccgaccucaaguccacccagaacgccaucgacaagaucaccaacaaggucaacuccgucaucgagaagaugaacacccaguucaccgccgucggcaaggaguucaaccaccucgagaagcgcaucgagaaccucaacaagaaggucgacgacggcuuccucgacaucuggaccuacaacgccgagcuccucguccuccucgagaacgagcgcacccucgacuaccacgacuccaacgucaagaaccucuacgagaagguccgcucccagcucaagaacaacgccaaggagaucggcaacggcugcuucgaguucuaccacaagugcgacaacaccugcauggaguccgucaagaacggcaccuacgacuaccccaaguacuccgaggaggccaagcucaaccgcgaggagaucgacggcgucaagcucgaguccacccgcaucuaccagauccucgccaucuacuccaccgucgccuccucccucguccucgucgucucccucggcgccaucuccuucuggaugugcuccaacggcucccuccagugccgcaucugcaucuga

SEQ ID NO: 102945 - RNA, 1701 nt, Artificial Sequence
  derived and/or modified CDS sequence (opt2) from hemagglutinin__InfluenzaA__AEJ10430
augaaggccauccucgucguccuccucuacaccuucgccaccgccaacgccgacacccucugcaucggcuaccacgccaacaacuccaccgacaccgucgacaccguccucgagaagaacgucaccgucacccacuccgucaaccuccucgaggacaagcacaacggcaagcucugcaagcuccgcggcgucgccccccuccaccucggcaagugcaacaucgccggcuggauccucggcaaccccgagugcgagucccucuccaccgccuccuccugguccuacaucgucgagaccuccuccuccgacaacggcaccugcuaccccggcgacuucaucgacuacgaggagcuccgcgagcagcucuccuccgucuccuccuucgagcgcuucgagaucuuccccaagaccuccuccuggcccaaccacgacuccaacaagggcgucaccaccgccugcccccacgccggcgccaaguccuucuacaagaaccucaucuggcucgucaagaagggcaacuccuaccccaagcucuccaaguccuacaucaacgacaagggcaaggagguccucguccucuggggcauccaccacccccccaccuccgccgaccagcagucccucuaccagaacgccgacgccuacgucuucgucggcaccucccgcuacuccaagaaguucaagcccgagaucgccauccgccccaagguccgcgaccaggagggccgcaugaacuacuacuggacccucgucgagcccggcgacaagaucaccuucgaggccaccggcaaccucgucgucccccgcuacgccuucgccauggagcgcaacgccggcuccggcaucaucaucuccgacacccccguccacgacugcaacaccaccugccagacccccaagggcgccaucaacaccucccuccccuuccagaacauccaccccaucaccaucggcaagugccccaaguacgucaaguccaccaagcuccgccucgccaccggccuccgcaacguccccuccauccagucccgcggccucuucggcgccaucgccggcuucaucgagggcggcuggaccggcauggucgacggcugguacggcuaccaccaccagaacgagcagggcuccggcuacgccgccgaccucaaguccacccagaacgccaucgacgagaucaccaacaaggucaacuccgucaucgagaagaugaacacccaguucaccgccgucggcaaggaguucaaccaccucgagaagcgcaucgagaaccucaacaagaaggucgacgacggcuuccucgacaucuggaccuacaacgccgagcuccucguccuccucgagaacgagcgcacccucgacuaccacgacuccaacgucaagaaccucuacgagaagguccgcucccagcucaagaacaacgccaaggagaucggcaacggcugcuucgaguucuaccacaagugcgacaacaccugcauggaguccgucaagaacggcaccuacgacuaccccaaguacuccgaggaggccaagcucaaccgcgaggagaucgacggcgucaagcucgaguccacccgcaucuaccagauccucgccaucuacuccaccgucgccuccucccucguccucgucgucucccucggcgccaucuccuucuggaugugcuccaacggcucccuccagugccgcaucugcaucuga

SEQ ID NO: 102946 - RNA, 1701 nt, Artificial Sequence
  derived and/or modified CDS sequence (opt2) from hemagglutinin__InfluenzaA__AEJ10440
augaaggccauccucgucguccuccucuacaccuucgccaccgccaacgccgacacccucugcaucggcuaccacgccaacaacuccaccgacaccgucgacaccguccucgagaagaacgucaccgucacccacuccgucaaccuccucgaggacaagcacaacggcaagcucugcaagcuccgcggcgucgccccccuccaccucggcaagugcaacaucgccggcuggauccucggcaaccccgagugcgagucccucuccaccgccuccuccugguccuacaucgucgagaccuccuccuccgacaacggcaccugcuaccccggcgacuucaucgacuacgaggagcuccgcgagcagcucuccuccgucuccuccuucgagcgcuucgagaucuuccccaagaccuccuccuggcccaaccacgacuccaacaagggcgucaccgccgccugcccccacgccggcgccaaguccuucuacaagaaccucaucuggcucgucaagaagggcaacuccuaccccaagcucuccaaguccuacaucaacgacaagggcaaggagguccucguccucuggggcauccaccaccccuccaccaccgccgaccagcagauccucuaccagaacgccgacaccuacgucuucgucggcaccucccgcuacuccaagaaguucaagcccgagaucgccauccgccccaagguccgcgaccaggagggccgcaugaacuacuacuggacccucgucgagcccggcgacaagaucaccuucgaggccaccggcaaccucgucgucccccgcuacgccuucgccauggagcgcaacgccggcuccggcaucaucaucuccgacacccccguccacgacugcaacaccaccugccagacccccaagggcgccaucaacaccucccuccccuuccagaacauccaccccaucaccaucggcaagugccccaaguacgucaaguccaccaagcuccgccucgccaccggccuccgcaacguccccuccauccagucccgcggccucuucggcgccaucgccggcuucaucgagggcggcuggaccggcauggucgacggcugguacggcuaccaccaccagaacgagcagggcuccggcuacgccgccgaccucaaguccacccagaacgccaucgacaagaucaccaacaaggucaacuccgucaucgagaagaugaacacccaguucaccgccgucggcaaggaguucaaccaccucgagaagcgcaucgagaaccucaacaagaaggucgacgacggcuuccucgacaucuggaccuacaacgccgagcuccucguccuccucgagaacgagcgcacccucgacuaccacgacuccaacgucaagaaccucuacgagaagguccgcaaccagcucaagaacaacgccaaggagaucggcaacggcugcuucgaguucuaccacaagugcgacaacaccugcauggaguccgucaagaacggcaccuacgacuaccccaaguacuccgaggaggccaagcucaaccgcgaggagaucgacggcgucaagcucgaguccacccgcaucuaccagauccucgccaucuacuccaccgucgccuccucccucguccucgucgucucccucggcgccaucuccuucuggaugugcuccaacggcucccuccagugccgcaucugcaucuga

SEQ ID NO: 102947 - RNA, 1701 nt, Artificial Sequence; identical to SEQ ID NO: 102860
  derived and/or modified CDS sequence (opt2) from hemagglutinin__InfluenzaA__AEJ10450

SEQ ID NO: 102948 - RNA, 1701 nt, Artificial Sequence
  derived and/or modified CDS sequence (opt2) from hemagglutinin__InfluenzaA__AEJ10480
augaaggccauccucgucguccuccucuacaccuucgccaccgccaacgccgacacccucugcaucggcuaccacgccaacaacuccaccgacaccgucgacaccguccucgagaagaacgucaccgucacccacuccgucaaccuccucgaggacaagcacaacggcaagcucugcaagcuccgcggcgucgccccccuccaccucggcaagugcaacaucgccggcuggauccucggcaaccccgagugcgagucccucuccaccgccuccuccugguccuacaucgucgagaccuccuccuccgacaacggcaccugcuaccccggcgacuucaucaacuacgaggagcuccgcgagcagcucuccuccgucuccuccuucgagcgcuucgagaucuuccccaagaccuccuccuggcccaaccacgacuccaacaagggcgucaccgccgccugcccccaggccggcgccaaguccuucuacaagaaccucaucuggcucgucaagaagggcaacuccuaccccaagcucuccaaguccuacaucaacgacaagggcaaggagguccucguccucuggggcauccaccaccccuccaccuccgccgaccagcagucccucuaccaguccgccgacgccuacgucuucgucggcaccuccaaguacuccaagaaguucaagcccgagaucgccguccgccccaagguccgcgaccaggagggccgcaugaacuacuacuggacccucgucgagcccggcgacaagaucaccuucgaggccaccggcaaccuccucgucccccgcuacgccuucgccauggagcgcaacgccggcuccggcaucaucaucuccgacacccccguccacgacugcaacaccaccugccagacccccaagggcgccaucaacaccucccuccccuuccagaacauccaccccaucaccaucggcaagugccccaaguacgucaaguccaccaagcuccgccucgccaccggccuccgcaacguccccuccauccagucccgcggccucuucggcgccaucgccggcuucaucgagggcggcuggaccggcauggucgacggcugguacggcuaccaccaccagaacgcccagggcuccggcuacgccgccgaccucaaguccacccagaacgccaucgacaagaucaccaacaaggucaacuccgucaucgagaagaugaacacccaguucaccgccgucggcaaggaguucaaccaccucgagaagcgcaucgagaaccucaacaagaaggucgacgacggcuuccucgacaucuggaccuacaacgccgagcuccucguccuccucgagaacgagcgcacccucgacuaccacgacuccaacgucaagaaccucuacgagaagguccgcucccagcucaagaacaacgccaaggagaucggcaacggcugcuucgaguucuaccacaagugcgacaacaccugcauggaguccgucaagaacggcaccuacgacuaccccaaguacuccgaggaggccaagcucaaccgcgaggagaucgacggcgucaagcucgaguccacccgcaucuaccagauccucgccaucuacuccaccgucgccuccucccucguccucgucgucucccucggcgccaucuccuucuggaugugcuccaacggcucccuccagugccgcaucugcaucuga

SEQ ID NO: 102949 - RNA, 1701 nt, Artificial Sequence
  derived and/or modified CDS sequence (opt2) from hemagglutinin__InfluenzaA__AEJ10490
augaaggccauccucgucguccuccucuacaccuucgccaccgccaacgccgacacccucugcaucggcuaccacgccaacaacuccaccgacaccgucgacaccguccucgagaagaacgucaccgucacccacuccgucaaccuccucgaggacaagcacaacggcaagcucugcaagcuccgcggcgucgccccccuccaccucggcaagugcaacaucgccggcuggauccucggcaaccccgagugcgagucccucuccaccgccuccuccugguccuacaucgucgagaccuccuccuccgacaacggcaccugcuaccccggcgacuucaucgacuacgaggagcuccgcgagcagcucuccuccgucuccuccuucgagcgcuucgagaucuuccccaagaccuccuccuggcccaaccacgacuccaacaagggcgucaccaccgccugcccccacgccggcgccaaguccuucuacaagaaccucaucuggcucgucaagaagggcaacuccuaccccaagcucuccaaguccuacaucaacgacaagggcaaggagguccucguccucuggggcauccaccacccccccaccuccgccgaccagcagucccucuaccagaacgccgacgccuacgucuucgucggcaccucccgcuacuccaagaaguucaagcccgagaucgccauccgccccaagguccgcgaccaggagggccgcaugaacuacuacuggacccucgucgagcccggcgacaagaucaccuucgaggccaccggcaaccucgucgucccccgcuacgccuucgccauggagcgcaacgccggcuccggcaucaucaucuccgacacccccguccacgacugcaacaccaccugccagacccccaagggcgccaucaacaccucccuccccuuccagaacauccaccccaucaccaucggccgcugccccaaguacgucaaguccaccaagcuccgccucgccaccggccuccgcaacguccccuccauccagucccgcggccucuucggcgccaucgccggcuucaucgagggcggcuggaccggcauggucgacggcugguacggcuaccaccaccagaacgagcagggcuccggcuacgccgccgaccucaaguccacccagaacgccaucgacggcaucaccaacaaggucaacuccgucaucgagaagaugaacacccaguucaccgccgucggcaaggaguucaaccaccucgagaagcgcaucgagaaccucaacaagaaggucgacgacggcuuccucgacaucuggaccuacaacgccgagcuccucguccuccucgagaacgagcgcacccucgacuaccacgacuccaacgucaagaaccucuacgagaagguccgcucccagcucaagaacaacgccaaggagaucggcaacggcugcuucgaguucuaccacaagugcgacaacaccugcauggaguccgucaagaacggcaccuacgacuaccccaaguacuccgaggaggccaagcucaaccgcgaggagaucgacggcgucaagcucgaguccaccaugaucuaccagauccucgccaucuacuccaccgucgccuccucccucguccucaucgucucccucggcgccaucuccuucuggaugugcuccaacggcucccuccagugccgcaucugcaucuga

SEQ ID NO: 102950 - RNA, 1701 nt, Artificial Sequence
  derived and/or modified CDS sequence (opt2) from hemagglutinin__InfluenzaA__AEJ10500
augaaggccauccucgucguccuccucuacaccuucgccaccgccaacgccgacacccucugcaucggcuaccacgccaacaacuccaccgacaccgucgacaccguccucgagaagaacgucaccgucacccacuccgucaaccuccucgagggcaagcacaacggcaagcucugcaagcuccgcggcgucgccccccuccaccucggcaagugcaacaucgccggcuggauccucggcaaccccgagugcgagucccucuccaccgccuccuccugguccuacaucgucgagaccuccuccuccgacaacggcaccugcuaccccggcgacuucaucgacuacgaggagcuccgcgagcagcucuccuccgucuccuccuucgagcgcuucgagaucuuccccaagaccuccuccuggcccaaccacgacuccaacaagggcgucaccgccgccugcccccacgccggcgccaagggcuucuacaagaaccucaucuggcucgucaagaagggcaacuccuaccccaagcucaacaaguccuacaucaacgacaagggcaaggagguccucguccucuggggcauccaccaccccuccaccaccgccgaccagcagucccucuaccagaacgccgacaccuacgucuucgucggcaccucccgcuacuccaagaaguucaagcccgagaucgccauccgccccaagguccgcgaccaggagggccgcaugaacuacuacuggacccucgucgagcccggcgacaagaucaccuucgaggccaccggcaaccucgucgucccccgcuacgccuucgccauggagcgcaacgccggcuccggcaucaucaucuccgacacccccguccacgacugcaacaccaccugccagacccccaagggcgccaucaacaccucccuccccuuccagaacauccaccccaucaccaucggcaagugccccaaguacgucaaguccaccaagcuccgccucgccaccggccuccgcaacguccccuccauccagucccgcggccucuucggcgccaucgccggcuucaucgagggcggcuggaccggcauggucgacggcugguacggcuaccaccaccagaacgagcagggcuccggcuacgccgccgaccucaaguccacccagaacgccaucgacaagaucaccaacaaggucaacuccgucaucgagaagaugaacacccaguucaccgccgucggcaaggaguucaaccaccucgagaagcgcaucgagaaccucaacaagaaggucgacgacggcuuccucgacaucuggaccuacaacgccgagcuccucguccuccucgagaacgagcgcacccucgacuaccacgacuccaacgucaagaaccucuacgagaagguccgcaaccagcucaagaacaacgccaaggagaucggcaacggcugcuucgaguucuaccacaagugcgacaacaccugcauggaguccgucaagaacggcaccuacgacuaccccaaguacuccgaggaggccaagcucaaccgcgaggagaucgacggcgucaagcucgaguccacccgcaucuaccagauccucgccaucuacuccaccgucgccuccucccucguccucgucgucucccucggcgccaucuccuucuggaugugcuccaacggcucccuccagugccgcaucugcaucuga

SEQ ID NO: 102951 - RNA, 1701 nt, Artificial Sequence; identical to SEQ ID NO: 102903
  derived and/or modified CDS sequence (opt2) from hemagglutinin__InfluenzaA__AEJ10510

SEQ ID NO: 102952 - RNA, 1701 nt, Artificial Sequence
  derived and/or modified CDS sequence (opt2) from hemagglutinin__InfluenzaA__AEJ10520
augaaggccauccucgucguccuccucuacaccuucgccaccgccaacgccgacacccucugcaucggcuaccacgccaacaacuccaccgacaccgucgacaccguccucgagaagaacgucaccgucacccacuccgucaaccuccucgaggacaagcacaacggcaagcucugcaagcuccgcggcgucgccccccuccaccucggcaagugcaacaucgccggcuggauccucggcaaccccgagugcgagucccucuccaccgccuccuccugguccuacaucgucgagaccuccuccuccgacaacggcaccugcuaccccggcgacuucaucgacuacgaggagcuccgcgagcagcucuccuccgucuccuccuucgagcgcuucgagaucuuccccaagaccuccuccuggcccaacuacgacuccaacaagggcgucaccgccgccugcccccacgccggcgccaaguccuucuacaagaaccucaucuggcucgucaagaagggcaacuccuaccccaagcucuccaaguccuacaucaacgacaagggcaaggagguccucguccucuggggcauccaccaccccuccaccuccgccgaccagcagucccucuaccagaacgccgacgccuacgucuucgucggcaccucccgcuacuccaagaaguucaagcccgagaucgccauccgccccaagguccgcgaccaggagggccgcaugaacuacuacuggacccucgucgagcccggcgacaagaucaccuucgaggccaccggcaaccucgucgucccccgcuacgccuucgccauggagcgcaacgccggcuccggcaucaucaucuccgacacccccguccacgacugcaacaccaccugccagacccccaagggcgccaucaacaccucccuccccuuccagaacauccaccccaucaccaucggcaagugcuccaaguacgucaaguccaccaagcuccgccucgccaccggccuccgcaacguccccuccauccagucccgcggccucuucggcgccaucgccggcuucaucgagggcggcuggaccggcauggucgacggcugguacggcuaccaccaccagaacgagcagggcuccggcuacgccgccgaccucaaguccacccagaacgccaucgacgagaucaccaacaaggucaacuccgucaucgagaagaugaacacccaguucaccgccgucggcaaggaguucaaccaccucgagaagcgcaucgagaaccucaacaagaaggucgacgacggcuuccucgacaucuggaccuacaacgccgagcuccucguccuccucgagaacgagcgcacccucgacuaccacgacuccaacgucaagaaccucuacgagaagguccgcucccagcucaagaacaacgccaaggagaucggcaacggcugcuucgaguucuaccacaagugcgacaacaccugcauggaguccgucaagaacggcaccuacgacuaccccaaguacuccgaggaggccaagcucaaccgcgaggagaucgacggcgucaagcucgaguccacccgcaucuaccagauccucgccaucuacuccaccgucgccuccucccucguccucgucgucucccucggcgccaucuccuucuggaugugcuccaacggcucccuccagugccgcaucugcaucuga

SEQ ID NO: 102953 - RNA, 1701 nt, Artificial Sequence; identical to SEQ ID NO: 98705
  derived and/or modified CDS sequence (opt2) from hemagglutinin__InfluenzaA__AEJ10530

SEQ ID NO: 102954 - RNA, 1701 nt, Artificial Sequence; identical to SEQ ID NO: 98705
  derived and/or modified CDS sequence (opt2) from hemagglutinin__InfluenzaA__AEJ10540

SEQ ID NO: 102955 - RNA, 1701 nt, Artificial Sequence; identical to SEQ ID NO: 98705
  derived and/or modified CDS sequence (opt2) from hemagglutinin__InfluenzaA__AEJ10550

SEQ ID NO: 102956 - RNA, 1701 nt, Artificial Sequence
  derived and/or modified CDS sequence (opt2) from hemagglutinin__InfluenzaA__AEJ10570
augaaggccauccucgucguccuccucuacacccucgccaccgccaacgccgacacccucugcaucggcuaccacgccaacaacuccaccgacaccgucgacaccguccucgagaagaacgucaccgucacccacuccgucaaccuccucgaggacaagcacgacggcaagcucugcaagcuccgcggcgucgccccccuccaccucggcaagugcaacaucgccggcuggauccucggcaaccccgagugcgagucccucuccaccgccuccuccugguccuacaucgucgagaccuccuccuccgacaacggcaccugcuaccccggcgacuucaucgacuacgaggagcuccgcgagcagcucuccuccgucuccuccuucgagcgcuucgagaucuuccccaagaccuccuccuggcccaaccacgacuccaacaagggcgucaccgccgccugcccccacgccggcgccaaguccuucuacaagaaccucaucuggcucgucaagaagggcaacuccuaccccaagcucuccaaguccuacaucaacgacaagggcaaggagguccucguccucuggggcauccaccaccccuccaccuccgccgaccagcagucccucuaccagaacgccgacgccuacgucuucgucggcaccucccgcuacuccaagaaguucaagcccgagaucgccauccgccccaagguccgcgaccaggagggccgcaugaacuacuacuggacccucgucgagcccggcgacaagaucaccuucgaggccaccggcaaccucgucgucccccgcuacgccuucgccauggagcgcaacgccggcuccggcaucaucaucuccgacacccccguccacgacugcaacgccaccugccagacccccaagggcgccaucaacaccucccuccccuuccagaacauccaccccaucaccaucggcaagugccccaaguacgucaaguccaccaagcuccgccucgccaccggccuccgcaacguccccuccauccagucccgcggccucuucggcgccaucgccggcuucaucgagggcggcuggaccggcauggucgacggcugguacggcuaccaccaccagaacgagcagggcuccggcuacgccgccgaccucaaguccacccagaacgccaucgacaagaucaccaacaaggucaacuccgucaucgagaagaugaacacccaguucaccgccgucggcaaggaguucaaccaccucgagaagcgcaucgagaaccucaacaagaaggucgacgacggcuuccucgacaucuggaccuacaacgccgagcuccucguccuccucgagaacgagcgcacccucgacuaccacgacuccaacgucaagaaccucuacgagaagguccgcucccagcucaagaacaacgccaaggagaucggcaacggcugcuucgaguucuaccacaagugcgacaacaccugcauggaguccgucaagaacggcaccuacgacuaccccaaguacuccgaggaggccaagcucaaccgcgaggagaucgacggcgucaagcucgaguccacccgcaucuaccagauccucgccaucuacuccaccgucgccuccucccucguccucgucgucucccucggcgccaucuccuucuggaugugcuccaacggcucccuccagugccgcaucugcaucuga

SEQ ID NO: 102957 - RNA, 1701 nt, Artificial Sequence; identical to SEQ ID NO: 102956
  derived and/or modified CDS sequence (opt2) from hemagglutinin__InfluenzaA__AEJ10580

SEQ ID NO: 102958 - RNA, 1701 nt, Artificial Sequence
  derived and/or modified CDS sequence (opt2) from hemagglutinin__InfluenzaA__AEJ36302
augaaggccauccucgucguccuccucuacaccuucgccaccgccaacgccgacacccucugcaucggcuaccacgccaacaacuccaccgacaccgucgacaccguccucgagaagaacgucaccgucacccacuccgucaaccuccucgaggacaagcacaacggcaagcucugcaagcuccgcggcgucgccccccuccaccucggcaagugcaacaucgccggcuggauccucggcaaccccgagugcgagucccucuccaccgccuccuccugguccuacaucgucgagaccuccuccuccuacaacggcaccugcuaccccggcgacuucaucgacuacgaggagcuccgcgagcagcucuccuccgucuccuccuucgagcgcuucgagaucuuccccaagaccuccuccuggcccaaccacgaccccaacaagggcgucaccgccgccugcccccacgccggcgccaaguccuucuacaagaaccucaucuggcucgucaagaagggcaacuccuaccccaagcucuccaaguccuacaucaacgacaagggcaaggagguccucguccucuggggcauccaccaccccuccaccuccgccgaccagcagcgccucuaccagaacgccgacgccuacgccuucgucggcaccucccgcuacuccaagaaguucaagcccgagaucgccauccgccccaagguccgcgaccaggagggccgcaugaacuacuacuggacccucgucgagcccggcgacaagaucaccuucgaggccaccggcaaccucgucgucccccgcuacgccuucgccauggagcgcaacgccggcuccggcaucaucaucuccgacacccccgcccacgacugcaacaccaccugccagacccccaagggcgccaucaacaccucccuccccuuccagaacguccaccccaucaccaucggcaagugccccaaguacgucaaguccaccaagcuccgccucgccaccggccuccgcaacguccccuccauccagucccgcggccucuucggcgccaucgccggcuucaucgagggcggcuggaccggcauggucgacggcugguacggcuaccaccaccagaacgagcagggcuccggcuacgccgccgaccucaaguccacccagaacgccuucgacgagaucaccaacaaggucaacuccgucaucgagaagaugaacacccaguucaccgccgucggcaaggaguucaaccaccucgagaagcgcaucgagaaccucaacaagaaggucgacgacggcuuccucgacaucuggaccuacaacgccgagcuccucguccuccucgagaacgagcgcacccucgacuaccacgacuccaacgucaagaaccucuacgagaagguccgcucccagcucaagaacaacgccaaggagaccggcaacggcugcuucgaguucuaccacaagugcgacaacaccugcauggaguccgucaagaacggcaccuacgacuaccccaaguacuccgaggaggccaagcucaaccgcgaggagaucgacggcgucaagcucgaguccacccgcaucuaccagauccucgccaucuacuccaccgucgccuccucccucguccucgucgucucccucggcgccaucuccuucuggaugugcuccaacggcucccuccagugccgcaucugcaucuga

SEQ ID NO: 102959 - RNA, 1701 nt, Artificial Sequence
  derived and/or modified CDS sequence (opt2) from hemagglutinin__InfluenzaA__AEJ36312
augaaggccauccucgucguccuccucuacaccuucgccaccgccaacgccgacacccucugcaucggcuaccacgccaacaacuccaccgacaccgucgacaccguccucgagaagaacgucaccgucacccacuccgucaaccuccucgaggacaagcacaacggcaagcucugcaagcuccgcggcgucgccccccuccaccucggcaagugcaacaucgccggcuggauccucggcaaccccgagugcgagucccucuccaccgccuccuccugguccuacaucgucgagaccuccuccuccgacaacggcaccugcuaccccggcgacuucaucgacuacgaggagcuccgcgagcagcucuccuccgucuccuccuucgagcgcuucgagaucuuccccaagaccuccuccuggcccgaccacgacuccaacaagggcgucaccgccgccugcccccacgccggcgccaaguccuucuacaagaaccucaucuggcucgucaagaagggcaacuccuaccccaagcucuccaaguccuacaucaacgacaagggcaaggagguccucguccucuggggcauccaccaccccuccaccuccgccgaccagcagucccucuaccagaacgccgacgccuacgucuucgucggcaccucccgcuacuccaagaaguucaagcccgagaucgccauccgccccaagguccgcgaccaggagggccgcaugaacuacuacuggacccucgucgagcccggcgacaagaucaccuucgaggccaccggcaaccucgucgucccccgcuacgccuucgccauggagcgcaacgccggcuccggcaucaucaucuccgacacccccguccacgacugcaacaccaccugccagacccccaagggcgccaucaacaccucccuccccuuccagaacauccaccccaucaccaucggcaagugccccaaguacgucaaguccaccaagcuccgccucgccaccggccuccgcaacguccccuccauccagucccgcggccucuucggcgccaucgccggcuucaucgagggcggcuggaccggcauggucgacggcugguacggcuaccaccaccagaacgagcagggcuccggcuacgccgccgaccucaaguccacccagaacgccaucgacaagaucaccaacaaggucaacuccgucaucgagaagaugaacauccaguucaccgccgucggcaaggaguucaaccaccucgagaagcgcaucgagaaccucaacaagaaggucgacgacggcuuccucgacaucuggaccuacaacgccgagcuccucguccuccucgagaacgagcgcacccucgacuaccacgacuccaacgucaagaaccucuacgagaagguccgcucccagcucaagaacaacgccaaggagaucggcaacggcugcuucgaguucuaccacaagugcgacaacaccugcauggaguccgucaagaacggcaccuacgacuaccccaaguacuccgaggaggccaagcucaaccgcgaggagaucgacggcgucaagcucgaguccacccgcaucuaccagauccucgccaucuacuccaccgucgccuccucccucguccucgucgucucccucggcgccaucuccuucuggaugugcuccaacggcucccuccagugccgcaucugcaucuga

SEQ ID NO: 102960 - RNA, 1701 nt, Artificial Sequence
  derived and/or modified CDS sequence (opt2) from hemagglutinin__InfluenzaA__AEJ37853
augaaggccauccucgucguccuccucuacaccuucgccaccgccaacgccgacacccucugcaucggcuaccacgccaacaacuccaccgacaccgucgacaccguccucgagaagaacgucaccgucacccacuccgucaaccuccucgaggacaagcacaacggcaagcucugcaagcuccgcggcgucgccccccuccaccucggcaagugcaacaucgccggcuggauccucggcaaccccgagugcgagucccucuccaccgccuccuccugguccuacaucgucgaggccuccuccuccgacaacggcaccugcuaccccggcgacuucaucgacuacgaggagcuccgcgagcagcucuccuccgucuccuccuucgagcgcuucgagaucuuccccaagaccuccuccuggcccaaccacgacuccaacaagggcgucaccgccgccugcccccacgccggcgccaaguccuucuacaagaaccucaucuggcucgucaagaagggcaacuccuaccccaagcucuccaaguccuacaucaacgacaagggcaaggagguccucguccucuggggcauccaccaccccuccaccuccgccgaccagcagucccucuaccagaacgccgacgccuacgucuucgucggcaccucccgcuacuccaagaaguucaagcccgagaucgccauccgccccaagguccgcgaccaggagggccgcaugaacuacuacuggacccucgucgagcccggcgacaagaucaccuucgaggccaccggcaaccucgucgucccccgcuacgccuucgccauggagcgcaacgccggcuccggcaucaucaucuccgacacccccguccacgacugcaacaccaccugccagacccccaagggcgccaucaacaccucccuccccuuccagaacauccaccccaucaccaucggcaagugccccaaguacgucaaguccaccaagcuccgccucgccaccggccuccgcaacguccccuccauccagucccgcggccucuucggcgccaucgccggcuucaucgagggcggcuggaccggcauggucgacggcugguacggcuaccaccaccagaacgagcagggcuccggcuacgccgccgaccucaaguccacccagaacgccaucgacaagaucaccaacaaggucaacuccgucaucgagaagaugaacacccaguucaccgccgucggcaaggaguucaaccaccucgagaagcgcaucgagaaccucaacaagaaggucgacgacggcuuccucgacaucuggaccuacaacgccgagcuccucguccuccucgagaacgagcgcacccucgacuaccacgacuccaacgucaagaaccucuacgagaagguccgcucccagcucaagaacaacgccaaggagaucggcaacggcugcuucgaguucuaccacaagugcgacaacaugugcauggaguccgucaagaacggcaccuacgacuaccccaaguacuccgaggaggccaagcucaaccgcgaggagaucgacggcgucaagcucgaguccacccgcaucuaccagauccucgccaucuacuccaccgucgccuccucccucguccucgucgucucccucggcgccaucuccuucuggaugugcuccaacggcucccuccagugccgcaucugcaucuga

SEQ ID NO: 102961 - RNA, 1701 nt, Artificial Sequence
  derived and/or modified CDS sequence (opt2) from hemagglutinin__InfluenzaA__AEJ37863
augaaggccauccucgucguccuccucuacaccuucgccaccgccaacgccgacacccucugcaucggcuaccacgccaacaacuccaccgacaccgucgacaccguccucgagaagaacgucaccgucacccacuccgucaaccuccucgaggacaagcacaacggcaagcucugcaagcuccgcggcgucgccccccuccaccucggcaagugcaacaucgccggcuggauccucggcaaccccgagugcgagucccucuccaccgccuccuccugguccuacaucgucgagaccuccuccuccgacaacggcaccugcuaccccggcgacuucaucgacuacgaggagcuccgcgagcagcucuccuccgucuccuccuucgagcgcuucgagaucuuccccaagaccuccuccuggcccaaccacgacuccaacaagggcgucaccgccgccugcccccacgccggcgccaaguccuucuacaagaaccucaucuggcucgucaagaagggcaacuccuaccccaagcucuccaaguccuacaucaacgacaagggcaaggagguccucguccucuggggcauccaccaccccuccaccuccgccgaccagcagucccucuaccagaacgccgacgccuacgucuucgucggcaccucccgcuacuccaagaaguucaagcccgagaucgccauccgccccaagcuccgcgaccaggagggccgcaugaacuacuacuggacccucgucgagcccggcgacaagaucaccuucgaggccaccggcaaccucgucgucccccgcuacgccuucgccauggagcgcaacgccggcuccggcaucaucaucuccgacacccccguccacgacugcaacaccaccugccagacccccaagggcgccaucaacaccucccuccccuuccagaacauccaccccaucaccaucggcaagugccccaaguacgucaaguccaccaagcuccgccucgccaccggccuccgcaacguccccuccauccagucccgcggccucuucggcgccaucgccggcuucaucgagggcggcuggaccggcauggucgacggcugguacggcuaccaccaccagaacgagcagggcuccggcuacgccgccgaccucaaguccacccagaacgccaucgacaagaucaccaacaaggucaacuccgucaucgagaagaugaacacccaguucaccgccgucggcaaggaguucaaccaccucgagaagcgcaucgagaaccucaacaagaaggucgacgacggcuuccucgacaucuggaccuacaacgccgagcuccucguccuccucgagaacgagcgcacccucgacuaccacgacuccaacgucaagaaccucuacgagaagguccgcucccagcucaagaacaacgccaaggagaucggcaacggcugcuucgaguucuaccacaagugcgacaacaccugcauggaguccgucaagaacggcaccuacgacuaccccaaguacuccgaggaggccaagcucaaccgcgaggagaucgacggcgucaagcucgaguccacccgcaucuaccagauccucgccaucuacuccaccgucgccuccucccucguccucgucgucucccucggcgccaucuccuucuggaugugcuccaacggcucccuccagugccgcaucugcaucuga

SEQ ID NO: 102962 - RNA, 1701 nt, Artificial Sequence; identical to SEQ ID NO: 99869
  derived and/or modified CDS sequence (opt2) from hemagglutinin__InfluenzaA__AEJ37873

SEQ ID NO: 102963 - RNA, 1701 nt, Artificial Sequence; identical to SEQ ID NO: 102917
  derived and/or modified CDS sequence (opt2) from hemagglutinin__InfluenzaA__AEJ37883

SEQ ID NO: 102964 - RNA, 1701 nt, Artificial Sequence
  derived and/or modified CDS sequence (opt2) from hemagglutinin__InfluenzaA__AEJ37893
augaaggccauccucgucguccuccucuacaccuucgccaccaccaacgccgacacccucugcaucggcuaccacgccaacaacuccaccgacaccgucgacaccguccucgagaagaacgucaccgucacccacuccgucaaccuccucgaggacaagcacaacggcaagcucugcaagcuccgcggcgucgccccccuccaccucggcaagugcaacaucgccggcuggauccucggcaaccccgagugcgagucccucuccaccgccuccuccugguccuacaucgucgagaccuccuccuccgacaacggcaccugcuaccccggcaacuucaucgacuacgaggagcuccgcgagcagcucuccuccgucuccuccuucgagcgcuucgagaucuuccccaagaccuccuccuggcccgaccacgacuccaacaagggcgucaccgccgccugcccccacgccggcgccaaguccuucuacaagaaccucaucuggcucgucaagaagggcaacuccuaccccaagcucuccaaguccuacaucaacgacaagggcaaggagguccucguccucuggggcauccaccaccccuccaccuccgccgaccagcagucccucuaccagaacgccgacgccuacgucuucgucggcaccucccgcuacuccaagaaguucaagcccgagaucgccauccgccccaagguccgcgaccaggagggccgcaugaacuacuacuggacccucgucgagcccggcgacaagaucaccuucgaggccaccggcaaccucgucgccccccgcuacgccuucgccauggagcgcaacgccggcuccggcaucaucaucuccgacaagcccguccacgacugcaacaccaccugccagacccccaagggcgccaucaacaccucccuccccuuccagaacauccaccccaucaccaucggcaagugccccaaguacgucaaguccaccaagcuccgccucgccaccggccuccgcaacguccccuccauccagucccgcggccucuucggcgccaucgccggcuucaucgagggcggcuggaccggcauggucgacggcugguacggcuaccaccaccagaacgagcagggcuccggcuacgccgccgaccucaaguccacccagaacgccaucgacaagaucaccaacaaggucaacuccgucaucgagaagaugaacacccaguucaccgccgucggcaaggaguucaaccaccucgagaagcgcaucgagaaccucaacaagaaggucgacgacggcuuccucgacaucuggaccuacaacgccgagcuccucguccuccucgagaacgagcgcacccucgacuaccacgacuccaacgucaagaaccucuacgagaagguccgcucccagcucaagaacaacgccaaggagaucggcaacggcugcuucgaguucuaccacaagugcgacaacaccugcauggaguccgucaagaacggcaccuacgacuaccccaaguacuccgaggaggccaagcucaaccgcgaggagaucgacggcgucaagcucgaguccacccgcaucuaccagauccucgccaucuacuccaccgucgccuccucccucguccucgucgucucccucggcgccaucuccuucuggaugugcuccaacggcucccuccagugccgcaucugcaucuga

SEQ ID NO: 102965 - RNA, 1701 nt, Artificial Sequence; identical to SEQ ID NO: 102917
  derived and/or modified CDS sequence (opt2) from hemagglutinin__InfluenzaA__AEJ37903

SEQ ID NO: 102966 - RNA, 1701 nt, Artificial Sequence
  derived and/or modified CDS sequence (opt2) from hemagglutinin__InfluenzaA__AEJ37923
augaaggccauccucgucguccuccucuacaccuucgccaccgccaacgccgacacccucugcaucggcuaccacgccaacaacuccaccgacaccgucgacaccguccucgagaagaacgucaccgucacccacuccgucaaccuccucgaggacaagcacaacggcaagcucugcaagcuccgcggcgucgccccccuccaccucggcaagugcaacaucgccggcuggauccucggcaaccccgagugcgagucccucuccaccgccuccuccugguccuacaucgucgagaccuccuccuccgacaacggcaccugcuaccccggcaacuucaucgacuacgaggagcuccgcgagcagcucuccuccgucuccuccuucgagcgcuucgagaucuuccccaagaccuccuccuggcccgaccacgacuccaacaagggcgucaccgccgccugcccccacgccggcgccaaguccuucuacaagaaccucaucuggcucgucaagaagggcaacuccuaccccaagcucuccaaguccuacaucaacgacaagggcaaggagguccucguccucuggggcauccaccaccccuccaccuccgccgaccagcagucccucuaccagaacgccgacgccuacgucuucgucggcaccucccgcuacuccaagaaguucaagcccgagaucgccauccgccccaagguccgcgaccaggagggccgcaugaacuacuacuggacccucgucgagcccggcgacaagaucaccuucgaggccaccggcaaccucgucgccccccgcuacgccuucgccaucgagcgcauggccggcuccggcaucaucaucuccgacacccccguccacgacugcaacaccaccugccagacccccaagggcgccaucaacaccucccuccccuuccagaacauccaccccaucaccaucggcaagugccccaaguacgucaaguccaccaagcuccgccucgccaccggccuccgcaacguccccuccauccagucccgcggccucuucggcgccaucgccggcuucaucgagggcggcuggaccggcauggucgacggcugguacggcuaccaccaccagaacgagcagggcuccggcuacgccgccgaccucaaguccacccagaacgccaucgacaagaucaccaacaaggucaacuccgucaucgagaagaugaacacccaguucaccgccgucggcaaggaguucaaccaccucgagaagcgcaucgagaaccucaacaagaaggucgacgacggcuuccucgacaucuggaccuacaacgccgagcuccucguccuccucgagaacgagcgcacccucgacuaccacgacuccaacgucaagaaccucuacgagaagguccgcucccagcucaagaacaacgccaaggagaucggcaacggcugcuucgaguucuaccacaagugcgacaacaccugcauggaguccgucaagaacggcaccuacgacuaccccaaguacuccgaggaggccaagcucaaccgcgaggagaucgacggcgucaagcucgaguccacccgcaucuaccagauccucgccaucuacuccaccgucgccuccucccucguccucgucgucucccucggcgccaucuccuucuggaugugcuccaacggcucccuccagugccgcaucugcaucuga

SEQ ID NO: 102967 - RNA, 1701 nt, Artificial Sequence
  derived and/or modified CDS sequence (opt2) from hemagglutinin__InfluenzaA__AEJ37943
augaaggccauccucgucguccuccucuacaccuucgccaccgccaacgccgacacccucugcaucggcuaccacgccaacaacuccaccgacaccgucgacaccguccucgagaagaacgucaccgucacccacuccgucaaccuccucgaggacaagcacaacggcaagcucugcaagcuccgcggcgucgccccccuccaccucggcaagugcaacaucgccggcuggauccucggcaaccccgagugcgagucccucuccaccgccuccuccugguccuacaucgucgagaccuccuccuccgacaacggcaccugcuaccccggcgacuucaucgacuacgaggagcuccgcgagcagcucuccuccgucuccuccuucgagcgcuucgagaucuuccccaagaccuccuccuggcccaaccacgacuccaacaagggcgucaccgccgccugcccccacgccggcgccaaguccuucuacaagaaccucaucuggcucgucaagaagggcaacuccuaccccaagcucuccaaguccuacaucaacgacaagggcaaggagguccucguccucuggggcauccaccaccccuccaccuccgccgaccagcagucccucuaccagaacgccgacgccuacgucuucgucggcaccucccgcuacuccaagaaguucaagcccgagaucgccauccgccccaagguccgcgaccaggagggccgcaugaacuaccacuggacccucgucgagcccggcgacaagaucaccuucgaggccaccggcaaccucgucgucccccgcuacgccuucgccauggagcgcaacgccggcuccggcaucaucaucuccgacacccccguccacgacugcaacaccaccugccagacccccaagggcgccaucaacaccucccuccccuuccagaacauccaccccaucaccaucggcaagugccccaaguacgucaaguccaccaagcuccgccucgccaccggccuccgcaacguccccuccauccagucccgcggccucuucggcgccaucgccggcuucaucgagggcggcuggaccggcauggucgacggcugguacggcuaccaccaccagaacgagcagggcuccggcuacgccgccgaccucaaguccacccagaacgccaucgacaagaucaccaacaaggucaacuccgucaucgagaagaugaacacccaguucaccgccgucggcaaggaguucaaccaccucgagaagcgcaucgagaaccucaacaagaaggucgacgacggcuuccucgacaucuggaccuacaacgccgagcuccucguccuccucgagaacgagcgcacccucgacuaccacgacuccaacgucaagaaccucuacgagaagguccgcucccagcucaagaacaacgccaaggagaucggcaacggcugcuucgaguucuaccacaagugcgacaacaccugcauggaguccgucaagaacggcaccuacgacuaccccaaguacuccgaggaggccaagcucaaccgcgaggagaucgacggcgucaagcucgaguccacccgcaucuaccagauccucgccaucuacuccaccgucgccuccucccucguccucgucgucucccucggcgccaucuccuucuggaugugcuccaacggcucccuccagugccgcaucugcaucuga

SEQ ID NO: 102968 - RNA, 1701 nt, Artificial Sequence; identical to SEQ ID NO: 102917
  derived and/or modified CDS sequence (opt2) from hemagglutinin__InfluenzaA__AEJ37953

SEQ ID NO: 102969 - RNA, 1701 nt, Artificial Sequence
  derived and/or modified CDS sequence (opt2) from hemagglutinin__InfluenzaA__AEJ37963
augaaggccauccucgucguccuccucuacaccuucgccaccgccaacgccgacacccucugcaucggcuaccacgccaacaacuccaccgacaccgucgacaccguccucgagaagaacgucaccgucacccacuccgucaaccuccucgaggacaagcacaacggcaagcucugcaagcuccgcggcgucgccccccuccaccucggcaagugcaacaucgccggcuggauccucggcaaccccgagugcgagucccucuccaccgccuccuccugguccuacaucgucgagaccuccuccuccgacaacggcaccugcuaccccggcaacuucaucgacuacgaggagcuccgcgagcagcucuccuccgucuccuccuucgagcgcuucgagaucuuccccaagaccuccuccuggcccgaccacgacuccaacaagggcgucaccgccgccugcccccacgccggcgccaaguccuucuacaagaaccucaucuggcucgucaagaagggcaacuccuaccccaagcucuccaaguccuacaucaacgacaagggcaaggagguccucguccucuggggcauccaccaccccuccaccuccgccgaccagcagucccucuaccagaacgccgacgccuacgucuucgucggcaccucccgcuacuccaagaaguucaagcccgagaucgccauccgccccaagguccgcgaccaggagggccgcaugaacuacuacuggacccucgucgagcccggcgacaagaucaccuucgaggccaccggcaaccucgucgccccccgcuacgccuucgccauggagcgcaacgccggcuccggcaucaucaucuccgacacccccguccacgacugcaacaccaccugccagacccccaagggcgccaccaacaccucccuccccuuccagaacauccaccccaucaccaucggcaagugccccaaguacgucaaguccaccaagcuccgccucgccaccggccuccgcaacguccccuccauccagucccgcggccucuucggcgccaucgccggcuucaucgagggcggcuggaccggcauggucgacggcugguacggcuaccaccaccagaacgagcagggcuccggcuacgccgccgaccucaaguccacccagaacgccaucgacaagaucaccaacaaggucaacuccgucaucgagaagaugaacacccaguucaccgccgucggcaaggaguucaaccaccucgagaagcgcaucgagaaccucaacaagaaggucgacgacggcuuccucgacaucuggaccuacaacgccgagcuccucguccuccucgagaacgagcgcacccucgacuaccacgacuccaacgucaagaaccucuacgagaagguccgcucccagcucaagaacaacgccaaggagaucggcaacggcugcuucgaguucuaccacaagugcgacaacaccugcauggaguccgucaagaacggcaccuacgacuaccccaaguacuccgaggaggccaagcucaaccgcgaggagaucgacggcgucaagcucgaguccacccgcaucuaccagauccucgccaucuacuccaccgucgccuccucccucguccucgucgucucccucggcgccaucuccuucuggaugugcuccaacggcucccuccagugccgcaucugcaucuga

SEQ ID NO: 102970 - RNA, 1701 nt, Artificial Sequence; identical to SEQ ID NO: 99869
  derived and/or modified CDS sequence (opt2) from hemagglutinin__InfluenzaA__AEJ37973

SEQ ID NO: 102971 - RNA, 1701 nt, Artificial Sequence; identical to SEQ ID NO: 102917
  derived and/or modified CDS sequence (opt2) from hemagglutinin__InfluenzaA__AEJ37983

SEQ ID NO: 102972 - RNA, 1701 nt, Artificial Sequence; identical to SEQ ID NO: 101569
  derived and/or modified CDS sequence (opt2) from hemagglutinin__InfluenzaA__AEK21369

SEQ ID NO: 102973 - RNA, 1698 nt, Artificial Sequence; identical to SEQ ID NO: 99652
  derived and/or modified CDS sequence (opt2) from hemagglutinin__InfluenzaA__AEK21380

SEQ ID NO: 102974 - RNA, 1701 nt, Artificial Sequence
  derived and/or modified CDS sequence (opt2) from hemagglutinin__InfluenzaA__AEK21396
augaaggccauccucgucguccuccucuacaccuucgccaccgccaacgccgacacccucugcaucggcuaccacgccaacaacuccaccgacaccgucgacaccguccucgagaagaacgucaccgucacccacuccgucgaccuccucgaggacaagcacaacggcaagcucugcaagcuccgcggcgucgccccccuccaccucggcaagugcaacaucgccggcuggauccucggcaaccccgagugcgagucccucuccaccgccuccuccugguccuacaucgucgagaccuccuccuccgacaacggcaccugcuaccccggcgacuucaucgacuacgaggagcuccgcgagcagcucuccuccgucuccuccuucgagcgcuucgagaucuuccccaagaccuccuccuggcccaaccacgacuccaacaagggcgucaccgccgccugcccccacgccggcgccaaguccuucuacaagaaccucaucuggcucgucaagaagggcaacuccuaccccaagcucuccaaguccuacaucaacgacaagggcaaggagguccucguccucuggggcauccaccaccccuccaccuccgccgaccagcagucccucuaccagaacgccgacgccuacgucuucgucggcaccuccaaguacuccaagaaguucaagcccgagaucgccauccgccccaagguccgcgaccaggagggccgcaugaacuacuacuggacccucgucgagcccggcgacaagaucaccuucgaggccaccggcaaccuccucgucccccgcuacgccuucgagauggagcgcaaguccggcuccggcaucaucaucuccgacacccccguccacgacugcaacaccaccugccagacccccaagggcgccaucaacaccucccuccccuuccagaacauccaccccaucaccaucggcaagugccccaaguacgucaaguccaccaagcuccgccucgccaccggccuccgcaacguccccuccauccagucccgcggccucuucggcgccaucgccggcuucaucgagggcggcuggaccggcauggucgacggcugguacggcuaccaccaccagaacgagcagggcuccggcuacgccgccgaccucaaguccacccagaacgccaucgacgagaucaccaacaaggucaacuccgucaucgagaagaugaacacccaguucaccgccgucggcaaggaguucaaccaccucgagaagcgcaucgagaaccucaacaagaaggucgacgacggcuuccucgacaucuggaccuacaacgccgagcuccucguccuccucgagaacgagcgcacccucgacuaccacgacuccaacgucaagaaccucuacgagaagguccgcucccagcucaagaacaacgccaaggagaucggcaacggcugcuucgaguucuaccacaagugcgacaacaccugcauggaguccgucaagaacggcaccuacgacuaccccaaguacuccgaggaggccaagcucaaccgcgagaagaucgacggcgucaagcucgaguccacccgcaucuaccagauccucgccaucuacuccaccgucgccuccucccucguccucgucgucucccucggcgccaucuccuucuggaugugcuccaacggcucccuccagugccgcaucugcaucuga

SEQ ID NO: 102975 - RNA, 1701 nt, Artificial Sequence
  derived and/or modified CDS sequence (opt2) from hemagglutinin__InfluenzaA__AEK21406
augaaggccauccucgucguccuccucuacaccuucgccaccgccaacgccgacacccucugcaucggcuaccacgccaacaacuccaccgacaccgucgacaccguccucgagaagaacgucaccgucacccacuccgucaaccuccucgaggacaagcacaacggcaagcucugcaagcuccgcggcgucgccccccuccaccucggcaagugcaacaucgccggcuggauccucggcaaccccgagugcgagucccucuccaccgccuccuccugguccuacaucgucgagaccuccuccuccgacaacggcaccugcuaccccggcgacuucaucgacuacgaggagcuccgcgagcagcucuccuccauguccuccuucgagcgcuucgagaucuuccccaagaccuccuccuggcccgaccacgacuccaacaagggcgucaccgccgccugcccccacgccggcgccaaguccuucuacaagaaccucaucuggcucgucaagaagggcaacuccuaccccaagcucuccaaguccuacaucaacgacaagggcaaggagguccucguccucuggggcauccaccaccccuccaccuccgccgaccagcagucccucuaccagaacgccgacgccuacgucuucgucggcaccucccgcuacuccaagaaguucaagcccgagaucgccauccgccccaagguccgcgaccaggagggccgcaugaacuacuacuggacccucgucgagcccggcgacaagaucaccuucgaggccaccggcaaccucgucgucccccgcuacgccuucgccauggagcgcaacgccggcuccggcaucaucaucuccgacacccccguccacgacugcaacaccaccugccagacccccaagggcgccaucaacaccucccuccccuuccagaacauccaccccaucaccaucggcaagugccccaaguacgucaaguccaccaagcuccgccucgccaccggccuccgcaacguccccuccauccagucccgcggccucuucggcgccaucgccggcuucaucgagggcggcuggaccggcauggucgacggcugguacggcuaccaccaccagaacgagcagggcuccggcuacgccgccgaccucaaguccacccagaacgccaucgacaagaucaccaacaaggucaacuccgucaucgagaagaugaacacccaguucaccgccgucggcaaggaguucaaccaccucgagaagcgcaucgagaaccucaacaagaaggucgacgacggcuuccucgacaucuggaccuacaacgccgagcuccucguccuccucgagaacgagcgcacccucgacuaccacgacuccaacgucaagaaccucuacgagaagguccgcucccagcucaagaacaacgccaaggagaucggcaacggcugcuucgaguucuaccacaagugcgacaacaccugcauggaguccgucaagaacggcaccuacgacuaccccaaguacuccgaggaggccaagcucaaccgcgaggagaucgacggcgucaagcucgaguccacccgcaucuaccagauccucgccaucuacuccaccgucgccuccucccucguccucgucgucucccucggcgccaucuccuucuggaugugcuccaacggcucccuccagugccgcaucugcaucuga

SEQ ID NO: 102976 - RNA, 1701 nt, Artificial Sequence
  derived and/or modified CDS sequence (opt2) from hemagglutinin__InfluenzaA__AEK21416
augaaggccauccucgucguccuccucuacaccuucgccaccgccaacgccgacacccucugcaucggcuaccacgccaacaacuccaccgacaccgucgacaccguccucgagaagaacgucaccgucacccacuccgucaaccuccucgaggacaagcacaacggcaagcucugcaagcuccgcggcgucgccccccuccaccucggcaagugcaacaucgccggcuggauccucggcaaccccgagugcgagucccucuccaccgccuccuccugguccuacaucgucgagaccuccuccuccgacaacggcaccugcuaccccggcgucuucaucgacuacgaggagcuccgcgagcagcucuccuccgucuccuccuucgagcgcuucgagaucuuccccaagaccuccuccuggcccaaccacgacuccaacaagggcgucaccgccgccugcccccacgccggcgccaaguccuucuacaagaaccucaucuggcucgucaagaagggcaacuccuaccccaagcucuccaaguccuacaucaacgacaagggcaaggagguccucguccucuggggcauccaccaccccuccaccaccgccgaccagcagucccucuaccagaacgccgacgccuacgucuucgucggcaccucccgcuacuccaagaaguucaagcccgagaucgccguccgccccaagguccgcgaccaggagggccgcaugaacuacuacuggacccucgucgagcccggcgacaagaucaccuucgaggccaccggcaaccucgucgucccccgcuacgccuucgccauggagcgcaacgccggcuccggcaucaucaucuccgacacccccguccacgacugcaacaccaccugccagacccccaagggcgccaucaacaccucccuccccuuccagaacauccaccccaucaccaucggcaagugccccaaguacgucaaguccaccaagcuccgccucgccaccggccuccgcaacguccccuccauccagucccgcggccucuucggcgccaucgccggcuucaucgagggcggcuggaccggcauggucgacggcugguacggcuaccaccaccagaacgagcagggcuccggcuacgccgccgaccucaaguccacccagaacgccaucgacaagaucaccaacaaggucaacuccgucaucgagaagaugaacacccaguucaccgccgucggcaaggaguucaaccaccucgagaagcgcaucgagaaccucaacaagaaggucgacgacggcuuccucgacaucuggaccuacaacgccgagcuccucguccuccucgagaacgagcgcacccucgacuaccacgacuccaacgucaagaaccucuacgagaagguccgcaaccagcucaagaacaacgccaaggagaucggcaacggcugcuucgaguucuaccacaagugcgacaacaccugcauggaguccgucaagaacggcaccuacgacuaccccaaguacuccgaggaggccaagcucaaccgcgaggagaucgacggcgucaagcucgaguccacccgcaucuaccagauccucgccaucuacuccaccgucgccuccucccucguccucgucgucucccucggcgccaucuccuucuggaugugcuccaacggcucccuccagugccgcaucugcaucuga

SEQ ID NO: 102977 - RNA, 1701 nt, Artificial Sequence
  derived and/or modified CDS sequence (opt2) from hemagglutinin__InfluenzaA__AEK21426
augaaggccauccucgucguccuccucuacaccuucgccaccgccaacgccgacacccucugcaucggcuaccacgccaacaacuccaccgacaccgucgacaccguccucgagaagaacgucaccgucacccacuccgucaaccuccucgaggacaagcacaacggcaagcucugcaagcuccgcggcgucgccccccuccaccucggcaagugcaacaucgccggcuggauccucggcaaccccgagugcgagucccucuccaccgccuccuccugguccuacaucgucgagaccuccuccuccgacaacggcaccugcuaccccggcaacuucaucgacuacgaggagcuccgcgagcagcucuccuccgucuccuccuucgagcgcuucgagaucuuccccaagaccuccuccuggcccgaccacgacuccaacaagggcgucaccgccgccugcccccacgccggcgccaaguccuucuacaagaaccucaucuggcucgucaagaagggcaacuccuaccccaagcucuccaaguccuacaucaacgacaagggcaaggagguccucguccucuggggcauccaccaccccuccaccuccgccgaccagcagucccucuaccagaacgccgacgccuacgucuucgucggcaccucccgcuacuccaagaaguucaagcccgagaucgccauccgccccaagguccgcgaccaggagggccgcaugaacuacuacuggacccucgucgagcccggcgacaagaucaccuucgaggccaccggcaaccucgucgccccccgcuacgccuucgccauggagcgcaacgccggcuccggcaucaucaucuccgacacccccguccacgacugcaacaccaccugccagacccccaagggcgccaucaacaccucccuccccuuccagaacauccaccccaucaccaucggcaagugccccaaguacguccgcuccaccaagcuccgccucgccaccggccuccgcaacguccccuccauccagucccgcggccucuucggcgccaucgccggcuucaucgagggcggcuggaccggcauggucgacggcugguacggcuaccaccaccagaacgagcagggcuccggcuacgccgccgaccucaaguccacccagaacgccaucgacaagaucaccaacaaggucaacuccgucaucgagaagaugaacacccaguucaccgccgucggcaaggaguucaaccaccucgagaagcgcaucgagaaccucaacaagaaggucgacgacggcuuccucgacaucuggaccuacaacgccgagcuccucguccuccucgagaacgagcgcacccucgacuaccacgacuccaacgucaagaaccucuacgagaagguccgcucccagcucaagaacaacgccaaggagaucggcaacggcugcuucgaguucuaccacaagugcgacaacaccugcauggaguccgucaagaacggcaccuacgacuaccccaaguacuccgaggaggccaagcucaaccgcgaggagaucgacggcgucaagcucgaguccacccgcaucuaccagauccucgccaucuacuccaccgucgccuccucccucguccucgucgucucccucggcgccaucuccuucuggaugugcuccaacggcucccuccagugccgcaucugcaucuga

SEQ ID NO: 102978 - RNA, 1701 nt, Artificial Sequence; identical to SEQ ID NO: 99869
  derived and/or modified CDS sequence (opt2) from hemagglutinin__InfluenzaA__AEK21436

SEQ ID NO: 102979 - RNA, 1701 nt, Artificial Sequence
  derived and/or modified CDS sequence (opt2) from hemagglutinin__InfluenzaA__AEK21456
augaaggccauccucgucguccuccucuacaccuucgccaccgccaacgccgacacccucugcaucggcuaccacgccaacaacuccaccgacaccgucgacaccguccucgagaagaacgucaccgucacccacuccgucaaccuccucgaggacaagcacaacggcaagcucugcaagcuccgcggcgucgccccccuccaccucggcaagugcaacaucgccggcuggauccucggcaaccccgagugcgagucccucuccaccgccuccuccugguccuacaucgucgagaccuccuccuccgacaacggcaccugcuaccccggcgacuucaucgacuacgaggagcuccgcgagcagcucuccuccgucuccuccuucgagcgcuucgagaucuuccccaagaccuccuccuggcccaaccacgacuccaacaagggcgucaccgccgccugcccccacgccggcgccaaguccuucuacaagaaccucaucuggcucgucaagaagggcaacuccuaccccaagcucuccaaguccuacaucaacgacaagggcaaggagguccucguccucuggggcauccaccaccccuccaccuccgccgaccagcagucccucuaccagaacgccgacgccuacgucuucgucggcaccucccgcuacuccaagaaguucaagcccgagaucgccauccgccccaagguccgcgaccaggagggccgcaugaacuacuacuggacccucgucgagcccggcgacaagaucaccuucgaggccaccggcaaccucgucgucccccgcuacgccuucgccauggagcgcaacgccggcuccggcaucaucaucuccgacacccccguccacgacugcaacaccaccugccagacccccaagggcgccaucaacaccucccuccccuuccagaacauccaccccaucaccaucggcaagugccccaaguacgucaaguccaccaagcuccgccucgccaccggccuccgcaacguccccuccauccagucccgcggccucuucggcgccaucgccggcuucaucgagggcggcuggaccggcauggucgacggcugguacggcuaccaccaccagaacgagcagggcuccggcuacgccgccgaccucaaguccacccagaacgccaucgacaagaucaccaacaaggucaacuccgucaucgagaagaugaacacccaguucaccgccgucggcaaggaguucaaccaccucgagaagcgcaucgagaaccucaacaagaaggucgacgacggcuuccucgacaucuggaccuacaacgccgagcuccucguccuccucgagaacgagcgcacccucgacuaccacgacuccaacgucaagaaccucuacgagaagguccgcucccagcucaagaacaacgccaaggagaucggcaacggcugcuucgaguucuaccacaagugcgacaacaccugcauggagaacgucaagaacggcaccuacgacuaccccaaguacuccgaggaggccaagcucaaccgcgaggagaucgacggcgucaagcucgaguccacccgcaucuaccagauccucgccaucuacuccaccgucgccuccucccucguccucgucgucucccucggcgccaucuccuucuggaugugcuccaacggcucccuccagugccgcaucugcaucuga

SEQ ID NO: 102980 - RNA, 1701 nt, Artificial Sequence; identical to SEQ ID NO: 102917
  derived and/or modified CDS sequence (opt2) from hemagglutinin__InfluenzaA__AEK21466

SEQ ID NO: 102981 - RNA, 1701 nt, Artificial Sequence; identical to SEQ ID NO: 102917
  derived and/or modified CDS sequence (opt2) from hemagglutinin__InfluenzaA__AEK21476

SEQ ID NO: 102982 - RNA, 1701 nt, Artificial Sequence; identical to SEQ ID NO: 99869
  derived and/or modified CDS sequence (opt2) from hemagglutinin__InfluenzaA__AEK21486

SEQ ID NO: 102983 - RNA, 1701 nt, Artificial Sequence
  derived and/or modified CDS sequence (opt2) from hemagglutinin__InfluenzaA__AEK28774
augaagaccaucaucgcccucuccuacauccucugccucgucuucgcccagaagcuccccggcaacgacaacuccaccgccacccucugccucggccaccacgccguccccaacggcaccaucgucaagaccaucaccaacgaccagaucgaggucaccaacgccaccgagcucguccaguccuccuccaccggcgagaucugcgacuccccccaccagauccucgacggcaagaacugcacccucaucgacgcccuccucggcgacccccagugcgacggcuuccagaacaagaagugggaccucuucgucgagcgcuccaaggccuacuccaacugcuaccccuacgacguccccgacuacgccucccuccgcucccucgucgccuccuccggcacccucgaguucaacaacgaguccuucaacuggaccggcgucacccagaacggcaccuccuccgccugcauccgccgcuccaagaacuccuucuucucccgccucaacuggcucacccaccucaacuucaaguaccccgcccucaacgucaccaugcccaacaacgagcaguucgacaagcucuacaucuggggcguccaccaccccggcaccgacaaggaccagaucuuccucuacgcccaggccuccggccgcaucaccgucuccaccaagcgcucccagcagaccgccauccccaacaucggcucccgcccccgcguccgcaacauccccucccgcaucuccaucuacuggaccaucgucaagcccggcgacauccuccucaucaacuccaccggcaaccucaucgccccccgcggcuacuucaagauccgcuccggcaaguccuccaucaugcgcuccgacgcccccaucggcaagugcaacuccgagugcaucacccccaacggcuccauccccaacgacaagcccuuccagaacgucaaccgcaucaccuacggcgccugcccccgcuacgucaagcagaacacccucaagcucgccaccggcaugcgcaacguccccgagaagcagacccgcggcaucuucggcgccaucgccggcuucaucgagaacggcugggagggcauggucgacggcugguacggcuuccgccaccagaacuccgagggccgcggccaggccgccgaccucaaguccacccaggccgccaucgaccagaucaacggcaagcucaaccgccucaucggcaagaccaacgagaaguuccaccagaucgagaaggaguucuccgaggucgagggccgcauccaggaccucgagaaguacgucgaggacaccaagaucgaccucugguccuacaacgccgagcuccucgucgcccucgagaaccagcacaccauccaccucaccgacuccgagaugaacaagcucuucgagaagaccaagaagcagcuccgcgagaacgccgaggacaugggcaacggcugcuucaagaucuaccacaagugcgacaacgccugcaucggcuccauccgcaacggcaccuacgaccacgacgucuaccgcgacgaggcccucaacaaccgcuuccagaucaagggcgucgagcucaaguccggcuacaaggacuggauccucuggaucuccuucgccaucuccugcuuccuccucugcgucgcccuccucggcuucaucaugugggccugccagaagggcaacauccgcugcaacaucugcaucuga

SEQ ID NO: 102984 - RNA, 1701 nt, Artificial Sequence
  derived and/or modified CDS sequence (opt2) from hemagglutinin__InfluenzaA__AEK28785
augaagaccaucaucgcccucuccuacauccucugccucgucuucgcccagaaccuccccggcaacgacaacuccgccgccacccucugccucggccaccacgccguccccaacggcaccaucgucaagaccaucaccaacgaccaggucgaggucaccaacgccaccgagcucguccagaacuccuccaccggcgagaucugcgacuccccccaccagauccucgacggcgagaacugcacccucaucgacgcccuccucggcgacccccagugcgacggcuuccagaacaagaagugggaccucuucgucgagcgcuccaaggccuacuccaacugcuaccccuacgacguccccgacuacgccucccuccgcucccucgucgccuccuccggcacccucgaguucaacaacgaguccuucaacuggaccggcgucacccagaacggcaccuccuccgccugcauccgccgcuccaacaacuccuucuucucccgccucaacuggcucacccaccucaacuucaaguaccccgcccucaacgucaccaugcccaacaacgagcaguucgacaagcucuacaucuggggcguccaccaccccggcaccgacaaggaccagaucuuccucuacgcccaggccuccggccgcaucaccgucuccaccaagcgcucccagcaggccgucauccccaacaucggcucccgcccccgcguccgcaacauccccucccgcaucuccaucuacuggaccaucgucaagcccggcgacauccuccucaucaacuccaccggcaaccucaucgccccccgcggcuacuucaagauccgcuccggcaaguccuccaucaugcgcuccgacgcccccaucggcaagugcaacuccgagugcaucacccccaacggcuccauccccaacgacaagcccuuccagaacgucaaccgcaucaccuacggcgccugcccccgcuacgucaagcagaacacccucaagcucgccaccggcaugcgcaacguccccgagaagcagacccgcggcaucuucggcgccaucgccggcuucaucgagaacggcugggagggcauggucgacggcugguacggcuuccgccaccagaacuccgagggccgcggccaggccgccgaccucaaguccacccaggccgccaucgaccagaucaacggcaagcucaaccgccucaucggcaagaccaacgagaaguuccaccagaucgagaaggaguucuccgaggucgagggccgcauccaggaccucgagaaguacgucgaggacaccaagaucgaccucugguccuacaacgccgagcuccucgucgcccucgagaaccagcacaccauccaccucaccgacuccgagaugaacaagcucuucgagaagaccaagaagcagcuccgcgagaacgccgaggacaugggcaacggcugcuucaagaucuaccacaagugcgacaacgccugcaucggcuccauccgcaacggcaccuacgaccacgacgucuaccgcgacgaggcccucaacaaccgcuuccagaucaagggcgucgagcucaaguccggcuacaaggacuggauccucuggaucuccuucgccaucuccugcuuccuccucugcgucgcccuccucggcuucaucaugugggccugccagaagggcaacauccgcugcaacaucugcaucuga

SEQ ID NO: 102985 - RNA, 1701 nt, Artificial Sequence
  derived and/or modified CDS sequence (opt2) from hemagglutinin__InfluenzaA__AEK28796
augaagaccaucaucgcccucuccuacauccucugccucgucuucgcccagaagcuccccggcaacgacaacuccaccgccacccucugccucggccaccacgccguccccaacggcaccaucgucaagaccaucaccaacgacaagaucgaggucaccaacgccaccgagcucguccaguccuccuccaccggcgagaucugcgacuccccccaccagauccucgacggcaagaacugcacccucaucgacgcccuccucggcgacccccagugcgacggcuuccagaacaagaagugggaccucuucgucgagcgcuccaaggccuacuccaacugcuaccccuacgacguccccgacuacgccucccuccgcucccucgucgccuccuccggcacccucgaguucaacaacgaguccuucaacuggaccggcgucacccaggacggcaccuccuccgccugcauccgcggcuccaagaacuccuucuucucccgccucaacuggcucacccaccucaacuucaaguaccccgcccucaacgucaccaugcccaacaacgagcaguucgacaagcucuacaucuggggcguccaccaccccggcaccgacaaggaccagaucuuccucuacgcccaggccuccggccgcaucaccgucuccaccaagcgcucccagcaggccgccauccccaacaucggcucccgcccccgcguccgcaacauccccucccgcaucuccaucuacuggaccaucgucaagcccggcgacauccuccucaucaacuccaccggcaaccucaucgccccccgcggcuacuucaagauccgcuccggcaaguccuccaucaugcgcuccgacgcccccaucggcaagugcaacuccgagugcaucacccccaacggcuccauccccaacgacaagcccuuccagaacgucaaccgcaucaccuacggcgccugcccccgcuacgucaagcagaacacccucaagcucgccaccggcaugcgcaacguccccgagaagcagacccgcggcaucuucggcgccaucgccggcuucaucgagaacggcugggagggcauggucgacggcugguacggcuuccgccaccagaacuccgagggccgcggccaggccgccgaccucaaguccacccaggccgccaucgaccagaucaacggcaagcucaaccgccucaucggcaagaccaacgagaaguuccaccagaucgagaaggaguucuccgaggucgagggccgcauccaggaccucgagaaguacgucgaggacaccaagaucgaccucugguccuacaacgccgagcuccucgucgcccucgagaaccagcacaccauccaccucaccgacuccgagaugaacaagcucuucgagaagaccaagaagcagcuccgcgagaacgccgaggacaugggcaacggcugcuucaagaucuaccacaagugcgacaacgccugcaucggcuccauccgcaacggcaccuacgaccacgacgucuaccgcgacgaggcccucaacaaccgcuuccagaucaagggcgucgagcucaaguccggcuacaaggacuggauccucuggaucuccuucgccaucuccugcuuccuccucugcgucgcccuccucggcuucaucaugugggccugccagaagggcaacauccgcugcaacaucugcaucuga

SEQ ID NO: 102986 - RNA, 1701 nt, Artificial Sequence
  derived and/or modified CDS sequence (opt2) from hemagglutinin__InfluenzaA__AEK28807
augaagaccaucaucgcccucuccuacauccucugccucgucuucgcccagaagcuccccggcaacgacaacuccaccgccacccucugccucggccaccacgccguccccaacggcaccaucgucaagaccaucaccaacgaccagaucgaggucaccaacgccaccgagcucguccaguccuccuccaccggcgagaucugcgacuccccccaccagauccucgacggcgagaacugcacccucaucgacgcccuccucggcgacccccagugcgacggcuuccagaacaagaagugggaccucuucgucgagcgcuccaaggccuacggcaacugcuaccccuacgacguccccgacuacgccucccuccgcucccucgucgccuccuccggcacccucgaguucaacaacgaguccuucaacuggaccggcgucacccagaacggcaccuccuccgccugcauccgcaaguccaacaacuccuucuucucccgccucaacuggcucacccaccucaaguucaaguaccccgcccucaacgucaccaugcccaacaacgagcaguucgacaagcucuacaucuggggcguccaccaccccggcaccgacaacgaccagaucuuccucuacgcccaggccuccggccgcaucaccgucuccaccaagcgcucccagcagaccgucauccccaacaucggcucccgcccccgcguccgcaacauccccucccgcaucuccaucuacuggaccaucgucaagcccggcgacauccuccucaucaacuccaccggcaaccucaucgccccccgcggcuacuucaagauccgcuccggcaaguccuccaucaugcgcuccgacgcccccaucggcaagugcaacuccgagugcaucacccccaacggcuccauccccaacgacaagcccuuccagaacgucaaccgcaucaccuacggcgccugcccccgcuacgucaagcagaacacccucaagcucgccaccggcaugcgcaacguccccgagaagcagacccgcggcaucuucggcgccaucgccggcuucaucgagaacggcugggagggcauggucgacggcugguacggcuuccgccaccagaacuccgagggccgcggccaggccgccgaccucaaguccacccaggccgccaucgaccagaucaacggcaagcucaaccgccucaucggcaagaccaacgagaaguuccaccagaucgagaaggaguucuccgaggucgagggccgcauccaggaccucgagaaguacgucgaggacaccaagaucgaccucugguccuacaacgccgagcuccucgucgcccucgagaaccagcacaccauccaccucaccgacuccgagaugaacaagcucuucgagaagaccaagaagcagcuccgcgagaacgccgaggacaugggcaacggcugcuucaagaucuaccacaagugcgacaacgccugcaucggcuccauccgcaacggcaccuacgaccacgacgucuaccgcgacgaggcccucaacaaccgcuuccagaucaagggcgucgagcucaaguccggcuacaaggacuggauccucuggaucuccuucgccaucuccugcuuccuccucugcgucgcccuccucggcuucaucaugugggccugccagaagggcaacauccgcugcaacaucugcaucuga

SEQ ID NO: 102987 - RNA, 1701 nt, Artificial Sequence
  derived and/or modified CDS sequence (opt2) from hemagglutinin__InfluenzaA__AEK28818
augaagaccaucaucgcccucuccuacauccucugccucgucuucgcccagaagcuccccggcaacgacaacuccaccgccacccucugccucggccaccacgccguccccaacggcaccaucgucaagaccaucaccaacgaccagaucgaggucaccaacgccaccgagcucguccaguccuccuccaccggcgagaucugcgacuccccccaccagauccucgacggcaagaacugcacccucaucgacgcccuccucggcgacccccagugcgacggcuuccagaacaagaagugggaccucuucgucgagcgcuccaaggccuacuccaacugcuaccccuacgacguccccgacuacgccucccuccgcucccucgucgccuccuccggcacccucgaguucaacaacgaguccuucaacuggaccggcgucacccagaacggcaccuccuccgccugcauccgccgcuccaagaacuccuucuucucccgccucaacuggcucacccaccucaacuucaaguaccccgcccucaacgucaccaugcccaacaacgagcaguucgacaagcucuacaucuggggcguccaccaccccggcaccgacaaggaccagaucuuccucuacgcccaggccuccggccgcaucaccgucuccaccaagcgcucccagcagaccgucauccccaacaucggcucccgcccccgcguccgcaacauccccucccgcaucuccaucuacuggaccaucgucaagcccggcgacauccuccucaucaacaacaccggcaaccucaucgccccccgcggcuacuucaagauccgcuccggcaaguccuccaucaugcgcuccgacgcccccaucggcaagugcaacuccgagugcaucacccccaacggcuccauccccaacgacaagcccuuccagaacgucaaccgcaucaccuacggcgccugcccccgcuacgucaagcagaacacccucaagcucgccaccggcaugcgcaacguccccgagaagcagacccgcggcaucuucggcgccaucgccggcuucaucgagaacggcugggagggcauggucgacggcugguacggcuuccgccaccagaacuccgagggccgcggccaggccgccgaccucaaguccacccaggccgccaucgaccagaucaacggcaagcucaaccgccucaucggcaagaccaacgagaaguuccaccagaucgagaaggaguucuccgaggucgagggccgcauccaggaccucgagaaguacgucgaggacaccaagaucgaccucugguccuacaacgccgagcuccucgucgcccucgagaaccagcacaccauccaccucaccgacuccgagaugaacaagcucuucgagaagaccaagaagcagcuccgcgagaacgccgaggacaugggcaacggcugcuucaagaucuaccacaagugcgacaacgccugcaucggcuccauccgcaacggcaccuacgaccacgacgucuaccgcgacgaggcccucaacaaccgcuuccagaucaagggcgucgagcucaaguccggcuacaaggacuggauccucuggaucuccuucgccaucuccugcuuccuccucugcgucgcccuccucggcuucaucaugugggccugccagaagggcaacauccgcugcaacaucugcaucuga

SEQ ID NO: 102988 - RNA, 1701 nt, Artificial Sequence
  derived and/or modified CDS sequence (opt2) from hemagglutinin__InfluenzaA__AEK28828
augaagaccaucaucgcccucuccuacauccucugccucgucuucgcccagaagcuccccggcaacgacaacuccaccgccacccucugccucggccaccacgccguccccaacggcaccaucgucaagaccaucaccaacgaccagaucgaggucaccaacgccaccgagcucguccaguccuccuccaccggcgagaucugcgacuccccccaccagauccucgacggcaagaacugcacccucaucgacgcccuccucggcgacccccagugcgacggcuuccagaacaagaagugggaccucuucgucgagcgcuccaaggccuacuccaacugcuaccccuacgacguccccgacuacgccucccuccgcucccucgucgccuccuccggcacccucgaguucaacaacgaguccuucaacuggaccggcgucacccagaacggcaccuccuccgccugcauccgccgcuccaagaacuccuucuucucccgccucaacuggcucacccaccucaacuucaaguaccccgcccucaacgucaccaugcccaacaacgagcaguucgacaagcucuacaucuggggcguccaccaccccggcaccgacaaggaccagaucuuccucuacgcccaggccuccggccgcaucaccgucuccaccaagcgcucccagcagaccgucauccccaacaucggcucccgcccccgcguccgcgacauccccucccgcaucuccaucuacuggaccaucgucaagcccggcgacauccuccucaucaacuccaccggcaaccucaucgccccccgcggcuacuucaagauccgcuccggcaaguccuccaucaugcgcuccgacgcccccaucggcaagugcaacuccgagugcaucacccccaacggcuccauccccaacgacaagcccuuccagaacgucaaccgcaucaccuacggcgccugcccccgcuacgucaagcagaacacccucaagcucgccaccggcaugcgcaacguccccgagaagcagacccgcggcaucuucggcgccaucgccggcuucaucgagaacggcugggagggcauggucgacggcugguacggcuuccgccaccagaacuccgagggccgcggccaggccgccgaccucaaguccacccaggccgccaucgaccagaucaacggcaagcucaaccgccucaucggcaagaccaacgagaaguuccaccagaucgagaaggaguucuccgaggucgagggccgcauccaggaccucgagaaguacgucgaggacaccaagaucgaccucugguccuacaacgccgagcuccucgucgcccucgagaaccagcacaccauccaccucaccgacuccgagaugaacaagcucuucgagaagaccaagaagcagcuccgcgagaacgccgaggacaugggcaacggcugcuucaagaucuaccacaagugcgacaacgccugcaucggcuccauccgcaacggcaccuacgaccacgacgucuaccgcgacgaggcccucaacaaccgcuuccagaucaagggcgucgagcucaaguccggcuacaaggacuggauccucuggaucuccuucgccaucuccugcuuccuccucugcgucgcccuccucggcuucaucaugugggucugccagaagggcaacauccgcugcaacaucugcaucuga

SEQ ID NO: 102989 - RNA, 1701 nt, Artificial Sequence; identical to SEQ ID NO: 98470
  derived and/or modified CDS sequence (opt2) from hemagglutinin__InfluenzaA__AEK28839

SEQ ID NO: 102990 - RNA, 1701 nt, Artificial Sequence
  derived and/or modified CDS sequence (opt2) from hemagglutinin__InfluenzaA__AEK28850
augaagaccaucaucgcccucuccuacauccucugccucgucuucgcccagaagcuccccggcaacgacaacuccaccgccacccucugccucggccaccacgccguccccaacggcaccaucgucaagaccaucaccaacgaccagaucgaggucaccaacgccaccgagcucguccaguccuccuccaccggcgagaucugcgacuccccccaccagauccucgacggcgagaacugcacccucaucgacgcccuccucggcgacccccagugcgacggcuuccagaacaagaagugggaccucuucgucgagcgcuccaaggccuacuccaacugcuaccccuacgacguccccgacuacgccucccuccgcucccucgucgccuccuccggcacccucgaguucaacaacgaguccuucaacuggaccggcgucacccagaacggcaccuccuccgccugcauccgccgcuccaacaacuccuucuucucccgccucaacuggcucacccaccucaaguucaaguaccccgcccucaacgucaccaugcccaacaacgagcaguucgacaagcucuacaucuggggcguccaccaccccggcaccgacaacgaccagaucuuccucuacgcccaggccuccggccgcaucaccgucuccaccaagcgcucccagcagaccgucauccccaacaucggcucccgccuccgcguccgcaacauccccucccgcaucuccaucuacuggaccaucgucaagcccggcgacauccuccucaucaacuccaccggcaaccucaucgccccccgcggcuacuucaagauccgcuccggcaaguccuccaucaugcgcuccgacgcccccaucggcaagugcaacuccgagugcaucacccccaacggcuccauccccaacgacaagcccuuccagaacgucaaccgcaucaccuacggcgccugcccccgcuacgucaagcagaacacccucaagcucgccaccggcaugcgcaacguccccgagaagcagacccgcggcaucuucggcgccaucgccggcuucaucgagaacggcugggagggcauggucgacggcugguacggcuuccgccaccagaacuccgagggccgcggccaggccgccgaccucaaguccacccaggccgccaucgaccagaucaacggcaagcucaaccgccucaucggcaagaccaacgagaaguuccaccagaucgagaaggaguucuccgaggucgagggccgcauccaggaccucgagaaguacgucgaggacaccaagaucgaccucugguccuacaacgccgagcuccucgucgcccucgagaaccagcacaccaucgaccucaccgacuccgagaugaacaagcucuucgagaagaccaagaagcagcuccgcgagaacgccgaggacaugggcaacggcugcuucaagaucuaccacaagugcgacaacgccugcaucggcuccauccgcaacggcaccuacgaccacgacgucuaccgcgacgaggcccucaacaaccgcuuccagaucaagggcgucgagcucaaguccggcuacaaggacuggauccucuggaucuccuucgccaucuccugcuuccuccucugcgucgcccuccucggcuucaucaugugggccugccagaagggcaacauccgcugcaacaucugcaucuga

SEQ ID NO: 102991 - RNA, 1701 nt, Artificial Sequence
  derived and/or modified CDS sequence (opt2) from hemagglutinin__InfluenzaA__AEK28861
augaagaccaucaucgcccucuccuacauccucugccucgucuucgcccagaagcuccccggcaacgacaacuccaccgccacccucugccucggccaccacgccguccccaacggcaccaucgucaagaccaucaccaacgaccagaucgaggucaccaacgccaccgagcucguccaguccuccuccaccggcgagaucugcgacuccccccaccagauccucgacggcgagaacugcacccucaucgacgcccuccucggcgacccccagugcgacggcuuccagaacaagaagugggaccucuucgucgagcgcuccaaggccuacuccaacugcuaccccuacgacguccccgacuacgccucccuccgcucccucgucgccuccuccggcacccucgaguucaacaacgaguccuucaacuggaccggcgucacccagaacggcaccuccuccgccugcauccgccgcuccaacaacuccuucuucucccgccucaacuggcucacccaccucaaguucaaguaccccgcccucaacgucaccaugcccaacaacgagcaguucgacaagcucuacaucuggggcguccaccaccccggcaccgacaacgaccagaucuuccucuacgcccaggccuccggccgcaucaccgucuccaccaagcgcucccagcagaccgucauccccaacaucggcucccgcccccgcguccgcaacauccccucccgcaucuccaucuacuggaccaucgucaagcccggcgacauccuccucaucaacuccaccggcaaccucaucgccccccgcggcuacuucaagauccgcuccggcaaguccuccaucaugcgcuccgacgcccccaucggcaagugcaacuccgagugcaucacccccaacggcuccauccccaacgacaagcccuuccagaacgucaaccgcaucaccuacggcgccugcccccgcuacgucaagcagaacacccucaagcucgccaccggcaugcgcaacguccccgagaagcagacccgcggcaucuucggcgccaucgccggcuucaucgagaacggcugggagggcauggucgacggcugguacggcuuccgccaccagaacuccgagggccgcggccaggccgccgaccucaaguccacccaggccgccaucgaccagaucaacggcaagcucaaccgccucaucggcaagaccaacgagaaguuccaccagaucgagaaggaguucuccgaggucgagggccgcauccaggaccucgagaaguacgucgaggacaccaagaucgaccucugguccuacaacgccgagcuccucgucgcccucgagaaccagcacaccaucgaccucaccgacuccgagaugaacaagcucuucgagaagaccaagaagcagcucaaggagaacgccgaggacaugggcaacggcugcuucaagaucuaccacaagugcgacaacgccugcaucggcuccauccgcaacggcaccuacgaccacgacgucuaccgcgacgaggcccucaacaaccgcuuccacaucaagggcgucgagcucaaguccggcuacaaggacuggauccucuggaucuccuucgccaccuccugcuuccuccucugcgucgcccuccucggcuucaucaugugggccugccagaagggcaacauccgcugcaacaucugcaucuga

SEQ ID NO: 102992 - RNA, 1701 nt, Artificial Sequence
  derived and/or modified CDS sequence (opt2) from hemagglutinin__InfluenzaA__AEK28872
augaagaccaucaucgcccucuccuacauccucugccucgucuucgcccagaagcuccccggcaacgacaacuccaccgccacccucugccucggccaccacgccguccccaacggcaccaucgucaagaccaucaccaacgaccagaucgaggucaccaacgccaccgagcucguccaguccuccuccaccggcgagaucugcgacuccccccaccagauccucgacggcgagaacugcacccucaucgacgcccuccucggcgacccccagugcgacggcuuccagaacaagaagugggaccucuucgucgagcgcuccaaggccuacuccaacugcuaccccuacgacguccccgacuacgccucccuccgcucccucgucgccuccuccggcacccucgaguucaacaacgaguccuucaacuggaccggcgucacccagaacggcaccuccuccgccugcauccgccgcuccaacaacuccuucuucucccgccucaacuggcucacccaccucaaguucaaguaccccgcccucaacgucaccaugcccaacaacgagcaguucgacaagcucuacaucuggggcguccaccaccccggcaccgacaacgaccagaucuuccucuacgcccaggccuccggccgcaucaccgucuccaccaagcgcucccagcagaccgucauccccaacaucggcucccgcccccgcguccgcgacauccccucccgcaucuccaucuacuggaccaucgucaagcccggcgacauccuccucaucaacuccaccggcaaccucaucgccccccgcggcuacuucaagauccgcuccggcaaguccuccaucaugcgcuccgacgcccccaucggcaagugcaacuccgagugcaucacccccaacggcuccauccccaacgacaagcccuuccagaacgucaaccgcaucaccuacggcgccugcccccgcuacgucaagcagaacacccucaagcucgccaccggcaugcgcaacguccccgagaagcagacccgcggcaucuucggcgccaucgccggcuucaucgagaacggcugggagggcauggucgacggcugguacggcuuccgccaccagaacuccgagggccgcggccaggccgccgaccucaaguccacccaggccgccaucgaccagaucaacggcaagcucaaccgccucaucggcaagaccaacgagaaguuccaccagaucgagaaggaguucuccgaggucgagggccgcauccaggaccucgagaaguacgucgaggacaccaagaucgaccucugguccuacaacgccgagcuccucgucgcccucgagaaccagcacaccauccaccucaccgacuccgagaugaacaagcucuucgagaagaccaagaagcagcuccgcgagaacgccgaggacaugggcaacggcugcuucaagaucuaccacaagugcgacaacgccugcaucggcuccauccgcaacggcaccuacgaccacgacgucuaccgcgacgaggcccucaacaaccgcuuccagaucaagggcgucgagcucaaguccggcuacaaggacuggauccucuggaucuccuucgccaucuccugcuuccuccucugcgucgcccuccucggcuucaucaugugggccugccagaagggcaacauccgcugcaacaucugcaucuga

SEQ ID NO: 102993 - RNA, 1701 nt, Artificial Sequence
  derived and/or modified CDS sequence (opt2) from hemagglutinin__InfluenzaA__AEK28883
augaagaccaucaucgcccucuccuacauccucugccucgucuucgcccagaagcuccccggcaacgacaacuccaccgccacccucugccucggccaccacgccguccccaacggcaccaucgucaagaccaucaccaacgaccagaucgaggucaccaacgccaccgagcucguccaguccuccuccaccggcgagaucugcgacuccccccaccagauccucgacggcgagaacugcacccucaucgacgcccuccucggcgacccccagugcgacggcuuccagaacaagaagugggaccucuucgucgagcgcuccaaggccuacuccaacugcuaccccuacgacguccccgacuacgccucccuccgcucccucaucgccuccuccggcacccucgaguucaacaacgaguccuucaacuggaccggcgucacccagaacggcaccuccuccgccugcauccgccgcuccuccaacuccuucuucucccgccucaacuggcucacccaccucaaguucaaguaccccgcccucaacgucaccaugcccaacaacgagcaguucgacaagcucuacaucuggggcguccaccaccccggcaccgacaacgaccagaucuuccucuacgcccaggccuccggccgcaucaccgucuccaccaagcgcucccagcagaccgucauccccaacaucggcucccgcccccgcguccgcaacauccccucccgcaucuccaucuacuggaccaucgucaagcccggcgacauccuccucaucaacuccaccggcaaccucaucgccccccgcggcuacuucaagauccgcuccggcaaguccuccaucaugcgcuccgacgcccccaucggcaagugcaacuccgagugcaucacccccaacggcuccauccccaacgacaagcccuuccagaacgucaaccgcaucaccuacggcgccugcccccgcuacgucaagcagaacacccucaagcucgccaccggcaugcgcaacguccccgagaagcagacccgcggcaucuucggcgccaucgccggcuucaucgagaacggcugggagggcauggucgacggcugguacggcuuccgccaccagaacuccgagggccgcggccaggccgccgaccucaaguccacccaggccgccaucgaccagaucaacggcaagcucaaccgccucaucggcaagaccaacgagaaguuccaccagaucgagaaggaguucuccgaggucgagggccgcauccaggaccucgagaaguacgucgaggacaccaagaucgaccucugguccuacaacgccgagcuccucgucgcccucgagaaccagcacaccauccaccucaccgacuccgagaugaacaagcucuucgagaagaccaagaagcagcuccgcgagaacgccgaggacaugggcaacggcugcuucaagaucuaccacaagugcgacaacgccugcaucggcuccauccgcaacggcaccuacgaccacgacgucuaccgcgacgaggcccucaacaaccgcuuccagaucaagggcgucgagcucaaguccggcuacaaggacuggauccucuggaucuccuucgccaucuccugcuuccuccucugcgucgcccuccucggcuucaucaugugggccugccagaagggcaacauccgcugcaacaucugcaucuga

SEQ ID NO: 102994 - RNA, 1701 nt, Artificial Sequence
  derived and/or modified CDS sequence (opt2) from hemagglutinin__InfluenzaA__AEK28894
augaagaccaucaucgcccucuccuacauccucugccucgucuucgcccagaagcuccccggcaacgacaacuccaccgccacccucugccucggccaccacgccguccccaacggcaccaucgucaagaccaucaccaacgaccagaucgaggucaccaacgccaccgagcucguccaguccuccuccaccggcgagaucugcgacuccccccaccagauccucgacggcgagaacugcacccucaucgacgcccuccucggcgacccccagugcgacggcuuccagaacaagaagugggaccucuucgucgagcgcuccaaggccuacuccaacugcuaccccuacgacguccccgacuacgccucccuccgcucccucgucgccuccuccggcacccucgaguucaacaacgaguccuucaacuggaccggcgucacccagaacggcaccuccuccgccugcauccgccgcuccaacaacuccuucuucucccgccucaacuggcucacccaccucaaguucaaguaccccgcccucaacgucaccaugcccaacaacgagcaguucgacaagcucuacaucuggggcguccaccaccccggcaccgacaacgaccagaucuuccucuacgcccaggccuccggccgcaucaccgucuccaccaagcgcucccagcagaccgucauccccaacaucggcucccgcccccgcguccgcaacauccccucccgcaucuccaucuacuggaccaucgucaagcccggcgacauccuccucaucaacuccaccggcaaccucaucgccccccgcggcuacuucaagauccgcuccggcaaguccuccaucaugcgcuccgacgcccccaucggcaagugcaacuccgagugcaucacccccaacggcuccauccccaacgacaagcccuuccagaacgucaaccgcaucaccuacggcgccugcccccgcuacgucaagcagaacacccucaagcucgccaccggcaugcgcaacguccccgagaagcagacccgcggcaucuucggcgccaucgccggcuucaucgagaacggcugggagggcauggucgacggcugguacggcuuccgccaccagaacuccgagggccgcggccaggccgccgaccucaaguccacccaggccgccaucgaccagaucaacggcaagcucaaccgccucaucggcaagaccaacgagaaguuccaccagaucgagaaggaguucuccgaggucgagggccgcauccaggaccucgagaaguacgucgaggacaccaagaucgaccucugguccuacaacgccgagcuccucgucgcccucgagaaccagcacaccauccaccucaccgacuccgagaugaacaagcucuucgagaagaccaagaagcagcuccgcgagaacgccgaggacaugggcaacggcugcuucaagaucuaccacaagugcgacaacgccugcaucggcuccauccgcaacggcaccuacgaccacgacgucuaccgcgacgaggcccucaacaaccgcuuccagaucaagggcgucgagcucaaguccggcuacaaggacuggauccucuggaucuccuucgccaucuccugcuuccuccucugcgucgcccuccucggcuucaucaugugggccugccagaagggcaacauccgcugcaacaucugcaucuga

SEQ ID NO: 102995 - RNA, 1701 nt, Artificial Sequence
  derived and/or modified CDS sequence (opt2) from hemagglutinin__InfluenzaA__AEK28905
augaagaccaucaucgcccucuccuacauccucugccucgucuucgcccagaagcuccccggcaacgacaacuccaccgccacccucugccucggccaccacgccguccccaacggcaccaucgucaagaccaucaccaacgaccagaucgaggucaccaacgccaccgagcucguccaguccuccuccaccggcgagaucugcgacuccccccaccagauccucgacggcgagaacugcacccucaucgacgcccuccucggcgacccccagugcgacggcuuccagaacaagaagugggaccucuucgucgagcgcuccaaggccuacuccaacugcuaccccuacgacguccccgacuacgccucccuccgcucccucgucgccuccuccggcacccucgaguucaacaacgaguccuucaacuggaccggcgucacccagaacggcaccuccuccgccugcauccgccgcuccaacaacuccuucuucucccgccucaacuggcucacccaccuccgcuucaaguaccccgcccucaacgucaccaugcccaacaacgagcaguucgacaagcucuacaucuggggcguccaccaccccggcaccgacaacgaccagaucuuccccuacgcccaggccuccggccgcaucaccgucuccaccaagcgcucccagcagaccgucauccccaacaucggcucccgcccccgcguccgcaacauccccucccgcaucuccaucuacuggaccaucgucaagcccggcgacauccuccucaucaacuccaccggcaaccucaucgccccccgcggcuacuucaagauccgcuccggcaaguccuccaucaugcgcuccgacgcccccaucggcaagugcaacuccgagugcaucacccccaacggcuccauccccaacgacaagcccuuccagaacgucaaccgcaucaccuacggcgccugcccccgcuacgucaagcagaacacccucaagcucgccaccggcaugcgcaacguccccgagaagcagacccgcggcaucuucggcgccaucgccggcuucaucgagaacggcugggagggcauggucgacggcugguacggcuuccgccaccagaacuccgagggccgcggccaggccgccgaccucaaguccacccaggccgccaucgaccagaucaacggcaagcucaaccgccucaucggcaagaccaacgagaaguuccaccagaucgagaaggaguucuccgaggucgagggccgcauccaggaccucgagaaguacgucgaggacaccaagaucgaccucugguccuacaacgccgagcuccucgucgcccucgagaaccagcacaccaucgaccucaccgacuccgagaugaacaagcucuucgagaagaccaagaagcagcuccgcgagaacgccgaggacaugggcaacggcugcuucaagaucuaccacaagugcgacaacgccugcaucggcuccauccgcaacggcaccuacgaccacgacgucuaccgcgacgaggcccucaacaaccgcuuccagaucaagggcgucgagcucaaguccggcuacaaggacuggauccucuggaucuccuucgccaucuccugcuuccuccucugcgucgcccuccucggcuucaucaugugggccugccagaagggcaacauccgcugcaacaucugcaucuga

SEQ ID NO: 102996 - RNA, 1701 nt, Artificial Sequence
  derived and/or modified CDS sequence (opt2) from hemagglutinin__InfluenzaA__AEK28916
augaagaccaucaucgcccucuccuacauccucugccucgucuucgcccagaagcuccccggcaacgacaacuccaccgccacccucugccucggccaccacgccguccccaacggcaccaucgucaagaccaucaccaacgaccagaucgaggucaccaacgccaccgagcucguccaguccuccuccaccggcgagaucugcgacuccccccaccagauccucgacggcgagaacugcacccucaucgacgcccuccucggcgacccccagugcgacggcuuccagaacaagaagugggaccucuucgucgagcgcuccaaggccuacuccaacugcuaccccuacgacguccccgacuacgccucccuccgcucccucgucgccuccuccggcacccucgaguucaacaacgaguccuucaacuggaccggcgucacccagaacggcaccuccuccgccugcauccgccgcuccaacaacuccuucuucucccgccucaacuggcucacccaccucaaguucaaguaccccgcccucaacgucaccaugcccaacaacgagcaguucgacaagcucuacaucuggggcguccaccaccccggcaccgacaacgaccagaucuuccucuacgcccaggccuccggccgcaucaccgucuccaccaagcgcucccagcagaccgucauccccaacaucggcucccgcccccgcauccgcaacauccccucccgcaucuccaucuacuggaccaucgucaagcccggcgacauccuccucaucaacuccaccggcaaccucaucgccccccgcggcuacuucaagauccgcuccggcaaguccuccgucaugcgcuccgacgcccccaucggcaagugcaacuccgagugcaucacccccaacggcuccauccccaacgacaagcccuuccagaacgucaaccgcaucaccuacggcgccugcccccgcuacgucaagcagaacacccucaagcucgccaccggcaugcgcaacguccccgagaagcagacccgcggcaucuucggcgccaucgccggcuucaucgagaacggcugggagggcauggucgacggcugguacggcuuccgccaccagaacuccgagggccgcggccaggccgccgaccucaaguccacccaggccgccaucgaccagaucaacggcaagcucaaccgccucaucggcaagaccaacgagaaguuccaccagaucgagaaggaguucuccgaggucgagggccgcauccaggaccucgagaaguacgucgaggacaccaagaucgaccucugguccuacaacgccgagcuccucgucgcccucgagaaccagcacaccaucgaccucaccgacuccgagaugaacaagcucuucgagaagaccaagaagcagcuccgcgagaacgccgaggacaugggcaacggcugcuucaagaucuaccacaagugcgacaacgccugcaucggcuccauccgcaacggcaccuacgaccacgacgucuaccgcgacgaggcccucaacaaccgcuuccagaucaagggcgucgagcucaaguccggcuacaaggacuggauccucuggaucuccuucgccaucuccugcuuccuccucugcgucgcccuccucggcuucaucaugugggccugccagaagggcaacauccgcugcaacaucugcaucuga

SEQ ID NO: 102997 - RNA, 1701 nt, Artificial Sequence
  derived and/or modified CDS sequence (opt2) from hemagglutinin__InfluenzaA__AEK28927
augaagaccaucaucgcccucuccuacauccucugccucgucuucgcccagaagcuccccggcaacgacaacuccaccgccacccucugccucggccaccacgccguccccaacggcaccaucgucaagaccaucaccaacgaccagaucgaggucaccaacgccaccgagcucguccaguccuccuccaccggcgagaucugcgacuccccccaccagauccucgacggcgagaacugcacccucaucgacgcccuccucggcgacccccagugcgacggcuuccagaacaagaagugggaccucuucgucgagcgcuccaaggccuacuccaacugcuaccccuacgacguccccgacuacgccucccuccgcucccucaucgccuccuccggcacccucgaguucaacaacgaguccuucaacuggaccggcgucacccagaacggcaccuccuccgccugcauccgccgcuccaacaacuccuucuucucccgccucaacuggcucacccaccucaaguucaaguaccccgcccucaacgucaccaugcccaacaacgagcaguucgacaagcucuacaucuggggcguccaccaccccggcaccgacaacgaccagaucuuccucuacgcccaggccuccggccgcaucaccgucuccaccaagcgcucccagcagaccgucauccccaacaucggcucccgcccccgcguccgcaacauccccucccgcaucuccaucuacuggaccaucgucaagcccggcgacauccuccucaucaacuccaccggcaaccucaucgccccccgcggcuacuucaagauccgcuccggcaaguccuccaucaugcgcuccgacgcccccaucggcaagugcaacuccgagugcaucacccccaacggcuccauccccaacgacaagcccuuccagaacgucaaccgcaucaccuacggcgccugcccccgcuacgucaagcagaacacccucaagcucgccaccggcaugcgcaacguccccgagaagcagacccgcggcaucuucggcgccaucgccggcuucaucgagaacggcugggagggcauggucgacggcugguacggcuuccgccaccagaacuccgagggccgcggccaggccgccgaccucaaguccacccaggccgccaucgaccagaucaacggcaagcucaaccgccucaucggcaagaccaacgagaaguuccaccagaucgagaaggaguucuccgaggucgagggccgcauccaggaccucgagaaguacgucgaggacaccaagaucgaccucugguccuacaacgccgagcuccucgucgcccucgagaaccagcacaccauccaccucaccgacuccgagaugaacaagcucuucgagaagaccaagaagcagcuccgcgagaacgccgaggacaugggcaacggcugcuucaagaucuaccacaagugcgacaacgccugcaucggcuccauccgcaacggcaccuacgaccacgacgucuaccgcgacgaggcccucaacaaccgcuuccagaucaagggcgucgagcucaaguccggcuacaaggacuggauccucuggaucuccuucgccaucuccugcuuccuccucugcgucgcccuccucggcuucaucaugugggccugccagaagggcaacauccgcugcaacaucugcaucuga

SEQ ID NO: 102998 - RNA, 1701 nt, Artificial Sequence
  derived and/or modified CDS sequence (opt2) from hemagglutinin__InfluenzaA__AEK28949
augaagaccaucaucgcccucuccuacauccucugccucgucuucgcccagaagcuccccggcaacgacaacuccaccgccacccucugccucggccaccacgccguccccaacggcaccaucgucaagaccaucaccaacgaccagaucgaggucaccaacgccaccgagcucguccaguccuccuccaccggcgagaucugcgacuccccccaccagauccucgacggcgagaacugcacccucaucgacgcccuccucggcgacccccagugcgacggcuuccagaacaagaagugggaccucuucgucgagcgcuccaaggccuacuccaacugcuaccccuacgacguccccgacuacgccucccuccgcucccucgucgccuccuccggcacccucgaguucaacaacgaguccuucaacuggaccggcgucacccagaacggcaccuccuccgccugcauccgccgcuccaacaacuccuucuucucccgccucaacuggcucacccaccucaaguucaaguaccccgcccucaacgucaccaugcccaacaacgagcaguucgacaagcucuacaucuggggcguccaccaccccggcaccgacaacgaccagaucuuccucuacgcccaggccuccggccgcaucaccgucuccaccaagcgcucccagcagaccgucauccccaacaucggcucccgcccccgcguccgcaacauccccucccgcaucuccaucuacuggaccaucgucaagcccggcgacauccuccucaucaacuccaccggcaaccucaucgccccccgcggcuacuucaagauccgcuccggcaaguccuccaucaugcgcuccgacgcccccaucggcaagugcaacuccgagugcaucacccccaacggcuccauccccaacgacaagcccuuccagaacgucaaccgcaucaccuacggcgccugcccccgcuacgucaagcagaacacccucaagcucgccaccggcaugcgcaacguccccgagaagcagacccgcggcaucuucggcgccaucgccggcuucaucgagaacggcugggagggcauggucgacggcugguacggcuuccgccaccagaacuccgagggccgcggccaggccgccgaccucaaguccacccaggccgccaucgaccagaucaacggcaagcucaaccgccucaucggcaagaccaacgagaaguuccaccagaucgagaaggaguucuccgaggucgagggccgcauccaggaccucgagaaguacgucgaggacaccaagaucgaccucugguccuacaacgccgagcuccucgucgcccucgagaaccagcacaccaucgaccucaccgacuccgagaugaacaagcucuucgagaagaccaagaagcagcuccgcgagaacgccgaggacaugggcaacggcugccucaagaucuaccacaagugcgacaacgccugcaucggcuccauccgcaacggcaccuacgaccacgacgucuaccgcgacgaggcccucaacaaccgcuuccagaucaagggcgucgagcucaaguccggcuacaaggacuggauccucuggaucuccuucgccaucuccugcuuccuccucugcgucgcccuccucggcuucaucaugugggccugccagaagggcaacauccgcugcaacaucugcaucuga

SEQ ID NO: 102999 - RNA, 1701 nt, Artificial Sequence; identical to SEQ ID NO: 98470
  derived and/or modified CDS sequence (opt2) from hemagglutinin__InfluenzaA__AEK28960

SEQ ID NO: 103000 - RNA, 1701 nt, Artificial Sequence; identical to SEQ ID NO: 98470
  derived and/or modified CDS sequence (opt2) from hemagglutinin__InfluenzaA__AEK28971

SEQ ID NO: 103001 - RNA, 1701 nt, Artificial Sequence
  derived and/or modified CDS sequence (opt2) from hemagglutinin__InfluenzaA__AEK28982
augaagaccaucaucgcccucuccuacauccucugccucgucuucgcccagaagcuccccggcaacuacaacuccaccgccacccucugccucggccaccacgccguccccaacggcaccaucgucaagaccaucaccaacgaccagaucgaggucaccaacgccaccgagcucguccaguccuccuccaccggcgagaucugcgacuccccccaccagauccucgacggcgagaacugcacccucaucgacgcccuccucggcgacccccagugcgacggcuuccagaacaagaagugggaccucuucgucgagcgcuccaaggccuacuccaacugcuaccccuacgacguccccgacuacgccucccuccgcucccucgucgccuccuccggcacccucgaguucaacaacgaguccuucaacuggaccggcgucacccagaacggcaccuccuccgccugcauccgccgcuccaacaacuccuucuucucccgccucaacuggcucacccaccucaaguucaaguaccccgcccucaacgucaccaugcccaacaacgagcaguucgacaagcucuacaucuggggcguccaccaccccggcaccgacaacgaccagaucuuccucuacgcccaggccuccggccgcaucaccgucuccaccaagcgcucccagcagaccgucauccccaacaucggcucccgcccccgcguccgcaacauccccucccgcaucuccaucuacuggaccaucgucaagcccggcgacauccuccucaucaacuccaccggcaaccucaucgccccccgcggcuacuucaagauccgcuccggcaaguccuccaucaugcgcuccgacgcccccaucggcaagugcaacuccgagugcaucacccccaacggcuccauccccaacgacaagcccuuccagaacgucaaccgcaucaccuacggcgccugcccccgcuacgucaagcagaacacccucaagcucgccaccggcaugcgcaacguccccgagaagcagacccgcggcaucuucggcgccaucgccggcuucaucgagaacggcugggagggcauggucgacggcugguacggcuuccgccaccagaacuccgagggccgcggccaggccgccgaccucaaguccacccaggccgccaucgaccagaucaacggcaagcucaaccgccucaucggcaagaccaacgagaaguuccaccagaucgagaaggaguucuccgaggucgagggccgcauccaggaccucgagaaguacgucgaggacaccaagaucgaccucugguccuacaacgccgagcuccucgucgcccucgagaaccagcacaccauccaccucaccgacuccgagaugaacaagcucuucgagaagaccaagaagcagcuccgcgagaacgccgaggacaugggcaacggcugcuucaagaucuaccacaagugcgacaacgccugcaucggcuccauccgcaacggcaccuacgaccacgacgucuaccgcgacgaggcccucaacaaccgcuuccagaucaagggcgucgagcucaaguccggcuacaaggacuggauccucuggaucuccuucgccaucuccugcuuccuccucugcgucgcccuccucggcuucaucaugugggccugccagaagggcaacauccgcugcaacaucugcaucuga

SEQ ID NO: 103002 - RNA, 1701 nt, Artificial Sequence
  derived and/or modified CDS sequence (opt2) from hemagglutinin__InfluenzaA__AEK28993
augaagaccaucaucgcccucuccuacauccucugccucgucuucgcccagaagcuccccggcaacuacaacuccaccgccacccucugccucggccaccacgccguccccaacggcaccaucgucaagaccaucaccaacgaccagaucgaggucaccaacgccaccgagcucguccaguccuccuccaccggcgagaucugcgacuccccccaccagauccucgacggcgagaacugcacccucaucgacgcccuccucggcgacccccagugcgacggcuuccagaacaagaagugggaccucuucgucgagcgcuccaaggccuacuccaacugcuaccccuacgacguccccgacuacgccucccuccgcucccucgucgccuccuccggcacccucgaguucaacaacgaguccuucaacuggaccggcgucacccagaacggcaccuccuccgccugcauccgccgcuccaacaacuccuucuucucccgccucaacuggcucacccaccucaaguucaaguaccccgcccucaacgucaccaugcccaacaacgagcaguucgacaagcucuacaucuggggcguccaccaccccggcaccgacaacgaccagaucuuccucuacgcccaggccuccggccgcaucaccgucuccaccaagcgcucccagcagaccgucauccccaacaucggcucccgcccccgcguccgcaacauccccucccgcaucuccaucuacuggaccaucgucaagcccggcgacauccuccucaucaacuccaccggcaaccucaucgccccccgcggcuacuucaagauccgcuccggcaaguccuccaucaugcgcuccgacgcccccaucggcaagugcaacuccgagugcaucacccccaacggcuccauccccaacgacaagcccuuccagaacgucaaccgcaucaccuacggcgccugcccccgcuacgucaagcagaacacccucaagcucgccaccggcaugcgcaacguccccgagaagcagacccgcggcaucuucggcgccaucgccggcuucaucgagaacggcugggagggcauggucgacggcugguacggcuuccgccaccagaacuccgagggccgcggccaggccgccgaccucaaguccacccaggccgccaucgaccagaucaacggcaagcucaaccgccucaucggcaagaccaacgagaaguuccaccagaucgagaaggaguucuccgaggucgagggccgcauccaggaccucgagaaguacgucgaggacaccaagaucgaccucugguccuacaacgccgagcuccucgucgcccucgagaaccagcacaccaucgaccucaccgacuccgagaugaacaagcucuucgagaagaccaagaagcagcuccgcgagaacgccgaggacaugggcaacggcugcuucaagaucuaccacaagugcgacaacgccugcaucggcuccauccgcaacggcaccuacgaccacgacgucuaccgcgacgaggcccucaacaaccgcuuccagaucaagggcgucgagcucaaguccggcuacaaggacuggauccucuggaucuccuucgccaucuccugcuuccuccucugcgucgcccuccucggcuucaucaugugggccugccagaagggcaacauccgcugcaacaucugcaucuga

SEQ ID NO: 103003 - RNA, 1701 nt, Artificial Sequence
  derived and/or modified CDS sequence (opt2) from hemagglutinin__InfluenzaA__AEK29004
augaagaccaucaucgcccucuccuacauccucugccucgucuucgcccagaagcuccccggcaacgacaacuccaccgccacccucugccucggccaccacgccguccccaacggcaccaucgucaagaccaucaccaacgaccagaucgaggucaccaacgccaccgagcucguccaguccuccuccaccggcgagaucugcaacuccccccaccagauccucgacggcgagaacugcacccucaucgacgcccuccucggcgacccccagugcgacggcuuccagaacaagaagugggaccucuucgucgagcgcuccaaggcccacuccaacugcuaccccuacgacguccccgacuacgucucccuccgcucccucgucgccuccuccggcacccucgaguucaacaacgaguccuucaacuggaccggcgucacccagaacggcaccuccuccgccugcauccgccgcuccaacaacuccuucuucucccgccucaacuggcucacccaccucaacuucaaguaccccgcccucaacgucaccaugcccaacaacgagcaguucgacaagcucuacaucuggggcguccaccaccccggcaccgacaaggaccagaucuuccucuacgcccaggccuccggccgcaucaccgucuccaccaagcgcucccagcaggccgucauccccaacaucggcucccgcccccgcguccgcaacauccccucccgcgucuccaucuacuggaccaucgucaagcccggcgacauccuccucaucaacuccaccggcaaccucaucgccccccgcggcuacuucaagauccgcuccggcaaguccuccaucaugcgcuccgacgcccccaucggcaagugcaacuccgccugcaucacccccaacggcuccauccccaacgacaagcccuuccagaacgucaaccgcaucaccuacggcgccugcccccgcuacgucaagcagaacacccucaagcucgccaccggcaugcgcaacguccccgagaagcagacccgcggcaucuucggcgccaucgccggcuucaucgagaacggcugggagggcauggucgacggcugguacggcuuccgccaccagaacuccgagggccgcggccaggccgccgaccucaaguccacccaggccgccaucgaccagaucaacggcaagcucaaccgccucaucggcaagaccaacgagaaguuccaccagaucgagaaggaguucuccgaggucgagggccgcauccaggaccucgagaaguacgucgaggacaccaagaucgaccucugguccuacaacgccgagcuccucgucgcccucgagaaccagcacaccaucgaccucaccgacuccgagaugaacaagcucuucgagaagaccaagaagcagcuccgcgagaacgccgaggacaugggcaacggcugcuucaagaucuaccacaagugcgacaacgccugcaucggcuccauccgcaacggcaccuacgaccacgacgucuaccgcgacgaggcccucaacaaccgcuuccagaucaagggcgucgagcucaaguccggcuacaaggacuggauccucuggaucuccuucgccaucuccugcuuccuccucugcgucgcccuccucggcuucaucaugugggccugccagaagggcaacauccgcugcaacaucugcaucuga

SEQ ID NO: 103004 - RNA, 1701 nt, Artificial Sequence
  derived and/or modified CDS sequence (opt2) from hemagglutinin__InfluenzaA__AEK29026
augaagaccaucaucgcccucuccuacauccucugccucgucuucgcccagaagcuccccggcaacgacaacuccaccgccacccucugccucggccaccacgccguccccaacggcaccaucgucaagaccaucaccaacgaccagaucgaggucaccaacgccaccgagcucguccaguccuccuccaccggcgagaucugcgacuccccccaccagauccucgacggcaagaacugcacccucaucgacgcccuccucggcgacccccagugcgacggcuuccaggacaagaagugggaccucuucgucgagcgcuccaaggccuacuccaacugcuaccccuacgacguccccgacuacgccucccuccgcucccucgucgccuccuccggcacccucgaguucaacaacgaguccuucaacuggaccggcgucacccagaacggcaccuccuccgccugcauccgccgcuccaagaacuccuucuucucccgccucaacuggcucacccaccucaacuucaaguacuccgcccucaacgucaccaugcccaacaacgagcaguucgacaagcucuacaucuggggcguccaccaccccggcaccgacaaggaccagaucuuccucuacgcccaggccuccggccgcaucaccgucuccaccaagcgcucccagcagaccgucauccccaacaucggcucccgcccccgcguccgcaacauccccucccgcaucuccaucuacuggaccaucgucaagcccggcgacauccuccucaucaacuccaccggcaaccucaucgccccccgcggcuacuucaagaugcaguccggcaaguccuccaucaugcgcuccgacgcccccaucggcaagugcaacuccgagugcaucacccccaacggcuccauccccaacgacaagcccuuccagaacgucaaccgcaucaccuacggcgccugcccccgcuacgucaagcagaacacccucaagcucgccaccggcaugcgcaacguccccgagaagcagacccgcggcaucuucggcgccaucgccggcuucaucgagaacggcugggagggcauggucgacggcugguacggcuuccgccaccagaacuccgagggccgcggccaggccgccgaccucaaguccacccaggccgccaucgaccagaucaacggcaagcucaaccgccucaucggcaagaccaacgagaaguuccaccagaucgagaaggaguucuccgaggucgagggccgcauccaggaccucgagaaguacgucgaggacaccaagaucgaccucugguccuacaacgccgagcuccucgucgcccucgagaaccagcacaccaucgaccucaccgacuccgagaugaacaagcucuucgagaagaccaagaagcagcuccgcgagaacgccgaggacaugggcaacggcugcuucaagaucuaccacaagugcgacaacgccugcaucggcuccauccgcaacggcaccuacgaccacgacgucuaccgcgacgaggcccucaacaaccgcuuccagaucaagggcgucgagcucaaguccggcuacaaggacuggauccucuggaucuccuucgccaucuccugcuuccuccucugcgucgcccuccucggcuucaucaugugggccugccagaagggcaacauccgcugcaacaucugcaucuga

SEQ ID NO: 103005 - RNA, 1701 nt, Artificial Sequence
  derived and/or modified CDS sequence (opt2) from hemagglutinin__InfluenzaA__AEK29048
augaagaccaucaucgcccucuccuacauccucugccucgucuucgcccagaagcuccccggcaacgacaacuccaccgccacccucugccucggccaccacgccguccccaacggcaccaucgucaagaccaucaccaacgaccagaucgaggucaccaacgccaccgagcucguccaguccuccuccaccggcgagaucugcaacuccccccaccagauccucgacggcgagaacugcacccucaucgacgcccuccucggcgacccccagugcgacggcuuccagaacaagaagugggaccucuucgucgagcgcuccaaggcccacuccaacugcuaccccuacgacguccccgacuacgccucccuccgcucccucgucgccuccuccggcacccucgaguucaacaacgaguccuucaacuggaccggcgucgcccagaacggcaccuccuccgccugcauccgccgcuccaacaacuccuucuucucccgccucaacuggcucacccaccucaacuucaaguaccccgcccucaacgucaccaugcccaacaacgagcaguucgacaagcucuacaucuggggcguccaccaccccggcaccgacaaggaccagaucuuccucuacgcccaggccgccggccgcaucaccgucuccaccaagcgcucccagcaggccgucauccccaacaucggcucccgcccccgcguccgcaacauccccucccgcgucuccaucuacuggaccaucgucaagcccggcgacauccuccucaucaacuccaccggcaaccucaucgccccccgcggcuacuucaagauccgcuccggcaaguccuccaucaugcgcuccgacgcccccaucggcaagugcaacuccgccugcaucacccccaacggcuccauccccaacgacaagcccuuccagaacgucaaccgcaucaccuacggcgccugcccccgcuacgucaagcagaacacccucaagcucgccaccggcaugcgcaacguccccgagaagcagacccgcggcaucuucggcgccaucgccggcuucaucgagaacggcugggagggcauggucgacggcugguacggcuuccgccaccagaacuccgagggccgcggccaggccgccgaccucaaguccacccaggccgccaucgaccagaucaacggcaagcucaaccgccucaucggcaagaccaacgagaaguuccaccagaucgagaaggaguucuccgaggucgagggccgcauccaggaccucgagaaguacgucgaggacaccaagaucgaccucugguccuacaacgccgagcuccucgucgcccucgagaaccagcacaccaucgaccucaccgacuccgagaugaacaagcucuucgagaagaccaagaagcagcuccgcgagaacgccgaggacaugggcaacggcugcuucaagaucuaccacaagugcgacaacgccugcaucggcuccauccgcaacggcaccuacgaccacgacgucuaccgcgacgaggcccucaacaaccgcuuccagaucaagggcgucgagcucaaguccggcuacaaggacuggauccucuggaucuccuucgccaucuccugcuuccuccucugcgucgcccuccucggcuucaucaugugggccugccagaagggcaacauccgcugcaacaucugcaucuga

SEQ ID NO: 103006 - RNA, 1701 nt, Artificial Sequence
  derived and/or modified CDS sequence (opt2) from hemagglutinin__InfluenzaA__AEK29070
augaagaccaucaucgcccucuccuacauccucugccucgucuucgcccagaagcuccccggcaacgacaacuccaccgccacccucugccucggccaccacgccguccccaacggcaccaucgucaagaccaucaccaacgaccagaucgaggucaccaacgccaccgagcucguccaguccuccuccaccggcgagaucugcgacuccccccaccagauccucgacggcgagaacugcacccucaucgacgcccuccucggcgacccccagugcgacggcuuccagaacaagaagugggaccucuucgucgagcgcuccaaggccuacuccaacugcuaccccuacgacguccccgacuacgccucccuccgcucccucgucgccuccuccggcacccucgaguucaacaacgaguccuucaacuggaccggcgucacccagaacggcaccuccuccgccugcauccgccgcuccaacaacuccuucuucucccgccucaacuggcucacccaccucaacuucaaguaccccgcccucaacgucaccaugcccaacaacgagcaguucgacaagcucuacaucuggggcguccaccaccccggcaccgacaaggaccagaucuuccucuacgcccaggccuccggccgcaucaccgucuccaccaagcgcucccagcaggccgucauccccaacaucggcucccgcccccgcguccgcaacauccccucccgcaucuccaucuacuggaccaucgucaagcccggcgacauccuccucaucaacuccaccggcaaccucaucgccccccgcggcuacuucaagauccgcuccggcaaguccuccaucaugcgcuccgacgcccccaucggcaagugcaacuccgagugcaucacccccaacggcuccauccccaacgacaagcccuuccagaacgucaaccgcaucaccuacggcgccugcccccgcuacgucaagcagaacacccucaagcucgccaccggcaugcgcaacguccccgagaagcagacccgcggcaucuucggcgccaucgccggcuucaucgagaacggcugggagggcauggucgacggcugguacggcuuccgccaccagaacuccgagggccgcggccaggccgccgaccucaaguccacccaggccgccaucgaccagaucaacggcaagcucaaccgccucaucggcaagaccaacgagaaguuccaccagaucgagaaggaguucuccgaggucgagggccgcauccaggaccucgagaaguacgucgaggacaccaagaucgaccucugguccuacaacgccgagcuccucgucgcccucgagaaccagcacaccauccaccucaccgacuccgagaugaacaagcucuucgagaagaccaagaagcagcuccgcgagaacgccgaggacaugggcaacggcugcuucaagaucuaccacaagugcgacaacgccugcaucggcuccauccgcaacggcaccuacgaccacgacgucuaccgcgacgaggcccucaacaaccgcuuccagaucaagggcgucgagcucaaguccggcuacaaggacuggauccucuggaucuccuucgccaucuccugcuuccuccucugcgucgcccuccucggcuucaucaugugggccugccagaagggcaacauccgcugcaacaucugcaucuga

SEQ ID NO: 103007 - RNA, 1701 nt, Artificial Sequence
  derived and/or modified CDS sequence (opt2) from hemagglutinin__InfluenzaA__AEK29081
augaagaccaucaucgcccucuccuacauccucugccucgucuucgcccagaagcuccccggcaacgacaacuccaccgccacccucugccucggccaccacgccguccccaacggcaccaucgucaagaccaucaccaacgaccagaucgaggucaccaacgccaccgagcucguccaguccuccuccaccggcgagaucugcgacuccccccaccagauccucgacggcgagaacugcacccucaucgacgcccuccucggcgacccccagugcgacggcuuccagaacaagaagugggaccucuucgucgagcgcuccaaggccuacuccaacugcuaccccuacgacguccccgacuacgccucccuccgcucccucgucgccuccuccggcacccucgaguucaacaacgaguccuucaacuggaccggcgucacccagaacggcaccuccuccuccugcauccgccgcuccaacaacuccuucuucucccgccucaacuggcucacccaccucaacuucaaguaccccgcccucaacgucaccaugcccaacaacgagcaguucgacaagcucuacaucuggggcguccaccaccccggcaccgacaaggaccagaucuuccucuacgcccaggccuccggccgcaucaccgucuccaccaagcgcucccagcaggccgucauccccaacaucggcucccgcccccgcguccgcaacauccccucccgcaucuccaucuacuggaccaucgucaagcccggcgacauccuccucaucaacuccaccggcaaccucaucgccccccgcggcuacuucaagauccgcuccggcaaguccuccaucaugcgcuccgacgcccccaucggcaagugcaacuccgagugcaucacccccaacggcuccauccccaacgacaagcccuuccagaacgucaaccgcaucaccuacggcgccugcccccgcuacgucaagcagaacacccucaagcucgccaccggcaugcgcaacguccccgagaagcagacccgcggcaucuucggcgccaucgccggcuucaucgagaacggcugggagggcauggucgacggcugguacggcuuccgccaccagaacuccgagggccgcggccaggccgccgaccucaaguccacccaggccgccaucgaccagaucaacggcaagcucaaccgccucaucggcaagaccaacgagaaguuccaccagaucgagaaggaguucuccgaggucgagggccgcauccaggaccucgagaaguacgucgaggacaccaagaucgaccucugguccuacaacgccgagcuccucgucgcccucgagaaccagcacaccauccaccucaccgacuccgagaugaacaagcucuucgagaagaccaagaagcagcuccgcgagaacgccgaggacaugggcaacggcugcuucaagaucuaccacaagugcgacaacgccugcaucggcuccauccgcaacggcaccuacgaccacgacgucuaccgcgacgaggcccucaacaaccgcuuccagaucaagggcgucgagcucaaguccggcuacaaggacuggauccucuggaucuccuucgccaucuccugcuuccuccucugcgucgcccuccucggcuucaucaugugggccugccagaagggcaacauccgcugcaacaucugcaucuga

SEQ ID NO: 103008 - RNA, 1701 nt, Artificial Sequence; identical to SEQ ID NO: 101569
  derived and/or modified CDS sequence (opt2) from hemagglutinin__InfluenzaA__AEK29092

SEQ ID NO: 103009 - RNA, 1701 nt, Artificial Sequence; identical to SEQ ID NO: 102891
  derived and/or modified CDS sequence (opt2) from hemagglutinin__InfluenzaA__AEK29125

SEQ ID NO: 103010 - RNA, 1701 nt, Artificial Sequence; identical to SEQ ID NO: 102891
  derived and/or modified CDS sequence (opt2) from hemagglutinin__InfluenzaA__AEK29136

SEQ ID NO: 103011 - RNA, 1701 nt, Artificial Sequence; identical to SEQ ID NO: 102891
  derived and/or modified CDS sequence (opt2) from hemagglutinin__InfluenzaA__AEK29169

SEQ ID NO: 103012 - RNA, 1701 nt, Artificial Sequence; identical to SEQ ID NO: 102891
  derived and/or modified CDS sequence (opt2) from hemagglutinin__InfluenzaA__AEK29180

SEQ ID NO: 103013 - RNA, 1701 nt, Artificial Sequence; identical to SEQ ID NO: 102891
  derived and/or modified CDS sequence (opt2) from hemagglutinin__InfluenzaA__AEK29191

SEQ ID NO: 103014 - RNA, 1701 nt, Artificial Sequence; identical to SEQ ID NO: 102891
  derived and/or modified CDS sequence (opt2) from hemagglutinin__InfluenzaA__AEK29202

SEQ ID NO: 103015 - RNA, 1701 nt, Artificial Sequence; identical to SEQ ID NO: 102891
  derived and/or modified CDS sequence (opt2) from hemagglutinin__InfluenzaA__AEK29213

SEQ ID NO: 103016 - RNA, 1701 nt, Artificial Sequence; identical to SEQ ID NO: 102891
  derived and/or modified CDS sequence (opt2) from hemagglutinin__InfluenzaA__AEK29224

SEQ ID NO: 103017 - RNA, 1701 nt, Artificial Sequence; identical to SEQ ID NO: 102891
  derived and/or modified CDS sequence (opt2) from hemagglutinin__InfluenzaA__AEK29235

SEQ ID NO: 103018 - RNA, 1701 nt, Artificial Sequence
  derived and/or modified CDS sequence (opt2) from hemagglutinin__InfluenzaA__AEK29268
augaagaccaucaucgcccucuccuacauccucugccucgucuucgcccagaagcuccccggcaacgacaacuccaccgccacccucugccucggccaccacgccguccccaacggcaccaucgucaagaccaucaccaacgaccagaucgaggucaccaacgccaccgagcucguccaguccuccuccaccggcgagaucugcaacuccccccaccagauccucgacggcgagaacugcacccucaucgacgcccuccucggcgacccccagugcgacggcuuccagaacaagaagugggaccucuucgucgagcgcuccaaggcccacuccaacugcuaccccuacgacguccccgacuacgccucccuccgcucccucgucgccuccuccggcacccucgaguucaacaacgaguccuucaacuggaccggcgucacccagaacggcaccuccuccgccugcauccgccgcuccaacaacuccuucuucucccgccucaacuggcucacccaccucaacuucaaguaccccgcccucaacgucaccaugcccaacaacgagcaguucgacaagcucuacaucuggggcguccaccaccccggcaccgacaaggaccagaucuuccucuacgcccaggccuccggccgcaucaccgucuccaccaagcgcucccagcaggccgucauccccaacaucggcucccgcccccgcguccgcaacauccccucccgcgucuccaucuacuggaccaucgucaagcccggcgacauccuccucaucaacuccaccggcaaccucaucgccccccgcggcuacuucaagauccgcuccggcaaguccuccaucaugcgcuccgacgcccccaucggcaagugcaacuccgccugcaucacccccaacggcuccauccccaacgacaagcccuuccagaacgucaaccgcaucaccuacggcgccugcccccgcuacgucaagcagaacacccucaagcucgccaccggcaugcgcaacguccccgagaagcagacccgcggcaucuucggcgccaucgccggcuucaucgagaacggcugggagggcauggucgacggcugguacggcuuccgccaccagaacuccgagggccgcggccaggccgccgaccucaaguccacccaggccgccaucgaccagaucaacggcaagcucaaccgccucaucggcaagaccaacgagaaguuccaccagaucgagaaggaguucuccgaggucgagggccgcauccaggaccucgagaaguacgucgaggacaccaagaucgaccucugguccuacaacgccgagcuccucgucgcccucgagaaccagcacaccaucgaccucaccgacuccgagaugaacaagcucuucgagaagaccaagaagcagcuccgcgagaacgccgaggacaugggcaacggcugcuucaagaucuaccacaagugcgacaacgccugcaucggcuccauccgcaacggcaccuacgaccacgacgucuaccgcgacgaggcccucaacaaccgcuuccagaucaagggcgucgagcucaaguccggcuacaaggacuggauccucuggaucuccuucgccaucuccugcuuccuccucugcgucgcccuccucggcuucaucaugugggccugccagaagggcaacauccgcugcaacaucugcaucuga

SEQ ID NO: 103019 - RNA, 1698 nt, Artificial Sequence
  derived and/or modified CDS sequence (opt2) from hemagglutinin__InfluenzaA__AEK59838
augaaggucaagcuccucguccuccucugcaccuucaccgccaccuacgccgacaccaucugcaucggcuaccacgccaacaacuccaccgacaccgucgacaccguccucgagaagaacgucaccgucacccacuccgucaaccuccucgaggacucccacaacggcaagcucugccuccucaagggcaucgccccccuccagcucggcaacugcuccgucgccggcuggauccucggcaaccccgagugcgagcuccucaucuccaaggaguccugguccuacaucgucgagaagcccgaccccgagaacggcaccugcuaccccggccacuucgccgacuacgaggagcuccgcgagcagcucuccuccgucuccuccuucgagcgcuucgagaucuuccccaaggaguccuccuggcccaaccacaccgucaccggcgucuccgccuccugcucccacaacggcaaguccuccuucuacaagaaccuccucuggcucaccggcaagaacggccucuaccccaaccucuccaaguccuacgccaacaacaaggagaaggagguccucguccucuggggcguccaccacccccccaacaucggcgaccagaaggcccucuaccacaccgagaacgccuacgucuccgucgucuccucccacuacuccaagaaguucacccccgagaucgccaagcgccccaagguccgcgaccaggagggccgcaucaacuacuacuggacccuccucgagcccggcaacaccaucaucuucgaggccaacggcaaccucaucgccccccgcuacgccuucgcccucucccgcggcuucggcuccggcaucaucaacuccaacgcccccauggacaagugcgacgccaagugccagaccccccagggcgccaucaacuccucccuccccuuccagaacguccaccccgucaccaucggcgagugccccaaguacguccgcuccgccaagcuccgcauggucaccggccuccgcaacauccccuccauccagucccgcggccucuucggcgccaucgccggcuucaucgagggcggcuggaccggcauggucgacggcugguacggcuaccaccaccagaacgagcagggcuccggcuacgccgccgaccagaaguccacccagaacgccaucaacggcaucaccaacaaggucaacuccgucaucgagaagaugaacacccaguucaccgccgucggcaaggaguucaacaagcucgagcgccgcauggagaaccucaacaagaaggucgacgacggcuucaucgacaucuggaccuacaacgccgagcuccucguccuccucgagaacgagcgcacccucgacuuccacgacuccaacgucaagaaccucuacgagaaggucaagucccagcucaagaacaacgccaaggagaucggcaacggcugcuucgaguucuaccacaagugcaacgacgagugcauggaguccgucaagaacggcaccuacgacuaccccaaguacuccgaggaguccaagcucaaccgcgagaagaucgacggcgucaagcucgaguccaugggcgucuaccagauccucgccaucuacuccaccgucgccuccucccucguccuccucgucucccucggcgccaucuccuucuggaugugcuccaacggcucccuccagugccgcaucugcaucuga

SEQ ID NO: 103020 - RNA, 1701 nt, Artificial Sequence
  derived and/or modified CDS sequence (opt2) from hemagglutinin__InfluenzaA__AEK98378
augaagaccaucaucgcccucuccuacauccucugccucgucuucgcccagaagcuccccggcaacgacaacuccaccgccacccucugccucggccaccacgccguccccaacggcaccaucgucaagaccaucaccaacgaccagaucgaggucaccaacgccaccgagcucguccaguccuccuccaccggcgagaucugcgacuccccccaccagauccucgacggcgagaacugcacccucaucgacgcccuccucggcgacccccagugcgacggcuuccagaacaagaagugggaccucuucgucgagcgcuccaaggccuacuccaacugcuaccccuacgacguccccgacuacgccucccuccgcucccucgucgccuccuccggcacccucgaguucaacaacgaguccuucaacuggaccggcgucacccagaacggcaccuccuccgccugcauccgccgcuccaacaacuccuucuucucccgccucaacuggcucacccaccucaaguucaaguaccccgcccucaacgucaccaugcccaacaacgagaaguucgacaagcucuacaucuggggcguccaccaccccggcaccgacaacgaccagaucuuccccuacgcccaggccuccggccgcaucaccgucuccaccaagcgcucccagcagaccgucauccccaacaucggcucccgcccccgcguccgcaacauccccucccgcaucuccaucuacuggaccaucgucaagcccggcgacauccuccucaucaacuccaccggcaaccucaucgccccccgcggcuacuucaagauccaguccggcaaguccuccaucaugcgcuccgacgcccccaucggcaagugcaacuccgagugcaucacccccaacggcuccauccccaacgacaagcccuuccagaacgucaaccgcaucaccuacggcgccugcccccgcuacgucaagcagaacacccucaagcucgccaccggcaugcgcaacguccccgagaagcagacccgcggcaucuucggcgccaucgccggcuucaucgagaacggcugggagggcauggucgacggcugguacggcuuccgccaccagaacuccgagggcaucggccaggccgccgaccucaaguccacccaggccgccaucgaccagaucaacggcaagcucaaccgccucaucggcaagaccaacgagaaguuccaccagaucgagaaggaguucuccgaggucgagggccgcauccaggaccucgagaaguacgucgaggacaccaagaucgaccucugguccuacaacgccgagcuccucgucgcccucgagaaccagcacaccaucgaccucaccgacuccgagaugaacaagcucuucgagaagaccaagaagcagcuccgcgagaacgccgaggacaugggcaacggcugcuucaagaucuaccacaagugcgacaacgccugcaucggcuccauccgcaacggcaccuacgaccacgacgucuaccgcgacgaggcccucaacaaccgcuuccagaucaagggcgucgagcucaaguccggcuacaaggacuggauccucuggaucuccuucgccaucuccugcuuccuccucugcgucgcccuccucggcuucaucaugugggccugccagaagggcaacauccgcugcaacaucugcaucuga

SEQ ID NO: 103021 - RNA, 1701 nt, Artificial Sequence; identical to SEQ ID NO: 97951
  derived and/or modified CDS sequence (opt2) from hemagglutinin__InfluenzaA__AEK98380

SEQ ID NO: 103022 - RNA, 1701 nt, Artificial Sequence
  derived and/or modified CDS sequence (opt2) from hemagglutinin__InfluenzaA__AEK98382
augaagaccaucaucgcccucuccuacauccucugccucgucuucgcccagaagcuccccggcaacgacaacuccaccgccacccucugccucggccaccacgccguccccaacggcaccaucgucaagaccaucaccaacgaccagaucgaggucaccaacgccaccgagcucguccagaacuccuccaccggcgagaucugcgacuccccccaccagauccucgacggcgagaacugcacccucaucgacgcccuccucggcgacccccagugcgacggcuuccagaacaagaagugggaccucuucgucgagcgcuccaaggccuacuccaacugcuaccccuacgacguccccgacuacgccucccuccgcucccucgucgccuccuccggcacccucgaguucaacaacgaguccuucaacuggaccggcgucacccagaacggcaccuccuccgccugcauccgccgcuccaacaacuccuucuucucccgccucaacuggcucacccaccucaaguucaaguaccccgcccucaacgucaccaugcccaacaacgagaaguucgacaagcucuacaucuggggcguccaccaccccggcaccgacaacgaccagaucuuccucuacgcccaggccuccggccgcaucaccgucuccaccaagcgcucccagcagaccgucauccccaacaucggcucccgcccccgcauccgcaacauccccucccgcaucuccaucuacuggaccaucgucaagcccggcgacauccuccucaucaacuccaccggcaaccucaucgccccccgcggcuacuucaagauccagaucggcaaguccuccaucaugcgcuccgacgcccccaucggcaagugcaacuccgagugcaucacccccaacggcuccauccccaacgacaagcccuuccagaacgucaaccgcaucaccuacggcgccugcccccgcuacgucaagcagaacacccucaagcucgccaccggcaugcgcaacguccccgagaagcagacccgcggcaucuucggcgccaucgccggcuucaucgagaacggcugggagggcauggucgacggcugguacggcuuccgccaccagaacuccgagggcaucggccaggccgccgaccucaaguccacccaggccgccaucgaccagaucaacggcaagcucaaccgccucaucggcaagaccaacgagaaguuccaccagaucgagaaggaguucuccgaggucgagggccgcauccaggaccucgagaaguacgucgaggacaccaagaucgaccucugguccuacaacgccgagcuccucgucgcccucgagaaccagcacaccaucgaccucaccgacuccgagaugaacaagcucuucgagaagaccaagaagcagcuccgcgagaacgccgaggacaugggcaacggcugcuucaagaucuaccacaagugcgacaacgccugcaucggcuccauccgcaacggcaccuacgaccacgacgucuaccgcgacgaggcccucaacaaccgcuuccagaucaagggcgucgagcucaaguccggcuacaaggacuggauccucuggaucuccuucgccaucuccugcuuccuccucugcgucgcccuccucggcuucaucaugugggccugccagaagggcaacauccgcugcaacaucugcaucuga

SEQ ID NO: 103023 - RNA, 1701 nt, Artificial Sequence
  derived and/or modified CDS sequence (opt2) from hemagglutinin__InfluenzaA__AEK98386
augaagaccaucaucgcccucuccuacauccucugccucgucuucgcccagaagcuccccggcaacgacaacuccaccgccacccucugccucggccaccacgccguccccaacggcaccaucgucaagaccaucaccaacgaccagaucgaggucaccaacgccaccgagcucguccaguccuccuccaccggcgagaucugcaacuccccccaccagauccucgacggcgagaacugcacccucaucgacgcccuccucggcgacccccagugcgacggcuuccagaacaagaagugggaccucuucgucgagcgcuccaaggcccacuccaacugcuaccccuacgacguccccgacuacgccucccuccgcucccucgucgccuccuccggcacccucgaguucaacaacgaguccuucaacuggaccggcgucacccagaacggcaccuccuccgccugcauccgccgcuccaacaacuccuucuucucccgccucaacuggcucacccaccucaacuucaaguaccccgcccucaacgucaccaugcccaacaacgagcaguucgacaagcucuacaucuggggcguccaccaccccggcaccgacaaggaccagaucuuccucuacgcccaggccuccggccgcaucaccgucuccaccaagcgcucccagcaggccgucauccccaacaucggcucccgcacccgcguccgcaacauccccucccgcgucuccaucuacuggaccaucgucaagcccggcgacauccuccucaucaacuccaccggcaaccucaucgccccccgcggcuacuucaagauccgcuccggcaaguccuccaucaugcgcuccgacgcccccaucggcaagugcaacuccgccugcaucacccccaacggcuccauccccaacgacaagcccuuccagaacgucaaccgcaucaccuacggcgccugcccccgcuacgucaagcagaacacccucaagcucgccaccggcaugcgcaacguccccgagaagcagacccgcggcaucuucggcgccaucgccggcuucaucgagaacggcugggagggcauggucgacggcugguacggcuuccgccaccagaacuccgagggccgcggccaggccgccgaccucaaguccacccaggccgccaucgaccagaucaacggcaagcucaaccgccucaucggcaagaccaacgagaaguuccaccagaucgagaaggaguucuccgaggucgagggccgcauccaggaccucgagaaguacgucgaggacaccaagaucgaccucugguccuacaacgccgagcuccucgucgcccucgagaaccagcacaccaucgaccucaccgacuccgagaugaacaagcucuucgagaagaccaagaagcagcuccgcgagaacgccgaggacaugggcaacggcugcuucaagaucuaccacaagugcgacaacgccugcaucggcuccauccgcaacggcaccuacgaccacgacgucuaccgcgacgaggcccucaacaaccgcuuccagaucaagggcgucgagcucaaguccggcuacaaggacuggauccucuggaucuccuucgccaucuccugcuuccuccucugcgucgcccuccucggcuucaucaugugggccugccagaagggcaacauccgcugcaacaucugcaucuga

SEQ ID NO: 103024 - RNA, 1701 nt, Artificial Sequence
  derived and/or modified CDS sequence (opt2) from hemagglutinin__InfluenzaA__AEK98388
augaagaccaucaucgcccucuccuacauccucugccucgucuucgcccagaagcuccccggcaacgacaacuccaccgccacccucugccucggccaccacgccguccccaacggcaccaucgucaagaccaucaccaacgaccagaucgaggucaccaacgccaccgagcucguccaguccuccuccaccggcgagaucugcgacuccccccaccagauccucgacggcaagaacugcacccucaucgacgcccuccucggcgacccccagugcgacggccuccagaacaagaagugggaccucuucgucgagcgcuccaaggccuacuccaacugcuaccccuacgacguccccgacuacgccucccuccgcucccucgucgccuccuccggcacccucgaguucaacaacgaguccuucaacuggaccggcgucacccagaacggcaccuccuccgccugcauccgccgcuccaagaacuccuucuucucccgccucaacuggcucacccaccucaacuucaaguaccccgcccucaacgucaccaugcccaacaacgagcaguucgacaagcucuacaucuggggcguccaccaccccggcaccgacaaggaccagaucuuccucuacgcccaggccuccggccgcaucaccgucuccaccaagcgcucccagcagaccgccauccccaacaucggcucccgcccccgcguccgcaacauccccucccgcaucuccaucuacuggaccaucgucaagcccggcgacauccuccucaucaacuccaccggcaaccucaucgccccccgcggcuacuucaagauccgcuccggcaaguccuccaucaugcgcuccgacgcccccaucggcaagugcaacuccgagugcaucacccccaacggcuccauccccaacgacaagcccuuccagaacgucaaccgcaucaccuacggcgccugcccccgcuacgucaagcagaacacccucaagcucgccaccggcaugcgcaacguccccgagaagcagacccgcggcaucuucggcgccaucgccggcuucaucgagaacggcugggagggcauggucgacggcugguacggcuuccgccaccagaacuccgagggccgcggccaggccgccgaccucaaguccacccaggccgccaucgaccagaucaacggcaagcucaaccgccucaucggcaagaccaacgagaaguuccaccagaucgagaaggaguucuccgaggucgagggccgcauccaggaccucgagaaguacgucgaggacaccaagaucgaccucugguccuacaacgccgagcuccucgucgcccucgagaaccagcacaccaucgaccucaccgacuccgagaugaacaagcucuucgagaagaccaagaagcagcuccgcgagaacgccgaggacaugggcaacggcugcuucaagaucuaccacaagugcgacaacgccugcaucggcuccauccgcaacggcaccuacgaccacgacgucuaccgcgacgaggcccucaacaaccgcuuccagaucaagggcgucgagcucaaguccggcuacaaggacuggauccucuggaucuccuucgccaucuccugcuuccuccucugcgucgcccuccucggcuucaucaugugggccugccagaagggcaacauccgcugcaacaucugcaucuga

SEQ ID NO: 103025 - RNA, 1701 nt, Artificial Sequence
  derived and/or modified CDS sequence (opt2) from hemagglutinin__InfluenzaA__AEK98390
augaagaccaucaucgcccucuccuacauccucugccucgucuucgcccaggagcuccccggcaacgacaacuccaccgccacccucugccucggccaccacgccguccccaacggcaccaucgucaagaccaucaccaacgaccagaucgaggucaccaacgccaccgagcucguccaguccuccuccaccggcgagaucugcaacuccccccaccagauccucgacggcgagaacugcacccucaucgacgcccuccucggcgacccccagugcgacggcuuccagaacaagaagugggaccucuucgucgagcgcuccaaggcccacuccaacugcuaccccuacgacguccccgacuacgccucccuccgcucccucgucgccuccuccggcacccucgaguucaacaacgaguccuucaacuggaccggcgucacccagaacggcaccuccuccgccugcauccgccgcuccaacaacuccuucuucucccgccucaacuggcucacccaccucaacuucaaguaccccgcccucaacgucaccaugcccaacaacgagcaguucgacaagcucuacaucuggggcguccaccaccccggcaccgacaaggaccagaucuuccucuacgcccaggccuccggccgcaucaccgucuccaccaagcgcucccagcaggccgucauccccaacaucggcucccgcccccgcguccgcaacauccccucccgcgucuccaucuacuggaccaucgucaagcccggcgacauccuccucaucaacuccaccggcaaccucaucgccccccgcggcuacuucaagauccgcuccggcaaguccuccaucaugcgcuccgacgcccccaucggcaagugcaaguccgccugcaucacccccaacggcuccauccccaacgacaagaccuuccagaacgucaaccgcaucaccuacggcgccugcccccgcuacgucaagcagaacacccucaagcucgccaccggcaugcgcaacguccccgagaagcagacccgcggcaucuucggcgccaucgccggcuucaucgagaacggcugggagggcauggucgacggcugguacggcuuccgccaccagaacuccgagggccgcggccaggccgccgaccucaaguccacccaggccgccaucgaccagaucaacggcaagcucaaccgccucaucggcaagaccaacgagaaguuccaccagaucgagaaggaguucuccgaggucgagggccgcauccaggaccucgagaaguacgucgaggacaccaagaucgaccucugguccuacaacgccgagcuccucgucgcccucgagaaccagcacaccaucgaccucaccgacuccgagaugaacaagcucuucgagaagaccaagaagcagcuccgcgagaacgccgaggacaugggcaacggcugcuucaagaucuaccacaagugcgacaacgccugcaucggcuccauccgcaacggcaccuacgaccacgacgucuaccgcgacgaggcccucaacaaccgcuuccagaucaagggcgucgagcucaaguccggcuacaaggacuggauccucuggaucuccuucgccaucuccugcuuccuccucugcgucgcccuccucggcuucaucaugugggccugccagaagggcaacauccgcugcaacaucugcaucuga

SEQ ID NO: 103026 - RNA, 1701 nt, Artificial Sequence
  derived and/or modified CDS sequence (opt2) from hemagglutinin__InfluenzaA__AEK98392
augaagaccaucaucgcccucuccuacauccucugccucgucuucgcccagaagcuccccggcaacgacaacuccaccgccacccucugccucggccaccacgccguccccaacggcaccaucgucaagaccaucaccgacgaccagaucgaggucaccaacgccaccgagcucguccaguccuccuccaccggcgagaucugcaacuccccccaccagauccucgacggcgagaacugcacccucaucgacgcccuccucggcgacccccagugcgacggcuuccagaacaagaagugggaccucuucgucgagcgcuccaaggcccacuccaacugcuaccccuacgacguccccgacuacgccucccuccgcucccucgucgccuccuccggcacccucgaguucaacaacgagaacuucaacuggaccggcgucacccagaacggcaccuccuccgccugcauccgccgcuccaacaacuccuucuucucccgccucaacuggcucacccaccucaacuucaaguaccccgcccucaacgucaccaugcccaacaacgagcaguucgacaagcucuacaucuggggcguccaccaccccggcaccgacaaggaccagaucuuccucuacgcccaggccuccggccgcaucaccgucuccaccaagcgcucccagcaggccgucauccccaacaucggcucccgccuccgcguccgcaacauccccucccgcgucuccaucuacuggaccaucgucaagcccggcgacauccuccucaucaacuccaccggcaaccucaucgccccccgcggcuacuucaagauccgcuccggcaaguccuccaucaugcgcuccgacgcccccaucggcaagugcaacuccgccugcaucacccccaacggcuccauccccaacgacaagcccuuccagaacgucaaccgcaucaccuacggcgccugcccccgcuacgucaagcagaacacccucaagcucgccaccggcaugcgcaacguccccgagaagcagacccgcggcaucuucggcgccaucgccggcuucaucgagaacggcugggagggcauggucgacggcugguacggcuuccgccaccagaacuccgagggccgcggccaggccgccgaccucaaguccacccaggccgccaucgaccagaucaacggcaagcucaaccgccucaucggcaagaccaacgagaaguuccaccagaucgagaaggaguucuccgaggucgagggccgcauccaggaccucgagaaguacgucgaggacaccaagaucgaccucugguccuacaacgccgagcuccucgucgcccucgagaaccagcacaccaucgaccucaccgacuccgagaugaacaagcucuucgagaagaccaagaagcagcuccgcgagaacgccgaggacaugggcaacggcugcuucaagaucuaccacaagugcgacaacgccugcaucggcuccauccgcaacggcaccuacgaccacgacgucuaccgcgacgaggcccucaacaaccgcuuccagaucaagggcgucgagcucaaguccggcuacaaggacuggauccucuggaucuccuucgccaucuccugcuuccuccucugcgucgcccuccucggcuucaucaugugggccugccagaagggcaacauccgcugcaacaucugcaucuga

SEQ ID NO: 103027 - RNA, 1701 nt, Artificial Sequence
  derived and/or modified CDS sequence (opt2) from hemagglutinin__InfluenzaA__AEK98394
augaagaccaucaucgcccucuccuacauccucugccucgucuucgcccagaagcuccccggcaacgacaacuccaccgccacccucugccucggccaccacgccguccccaacggcaccaucgucaagaccaucaccaacgaccagaucgaggucaccaacgccaccgagcucguccaguccuccuccaccggcgagaucugcaacuccccccaccagauccucgacggcgagaacugcacccucaucgacgcccuccucggcgacccccagugcgacggcuuccagaacaagaagugggaccucuucgucgagcgcuccaaggcccacuccaacugcuaccccuacgacguccccgacuacgccucccuccgcucccucgucgccuccuccggcacccucgaguucaacaacgaguccuucaacuggaccggcgucacccagaacggcaccuccuccgccugcauccgccgcuccaacaacuccuucuucucccgccucaacuggcucacccaccucaacuucaaguaccccgcccucaacgucaccaugcccaacaacgagcaguucgacaagcucuacaucuggggcguccaccaccccggcaccgacaaggaccagaucuuccucuacgcccaggccuccggccgcaucaccgucuccaccaagcgcucccagcaggccgucauccccaacaucggcucccgccuccgcguccgcaacauccccucccgcgucuccaucuacuggaccaucgucaagcccggcgacauccuccucaucaacuccaccggcaaccucaucgccccccgcggcuacuucaagauccgcuccggcaaguccuccaucaugcgcuccgacgcccccaucggcaagugcaacuccgccugcaucacccccaacggcuccauccccaacgacaagcccuuccagaacgucaaccgcaucaccuacggcgccugcccccgcuacgucaagcagaacacccucaagcucgccaccggcaugcgcaacguccccgagaagcagacccgcggcaucuucggcgccaucgccggcuucaucgagaacggcugggagggcauggucgacggcugguacggcuuccgccaccagaacuccgagggccgcggccaggccgccgaccucaaguccacccaggccgccaucgaccagaucaacggcaagcucaaccgccucaucggcaagaccaacgagaaguuccaccagaucgagaaggaguucuccgaggucgagggccgcauccaggaccucgagaaguacgucgaggacaccaagaucgaccucugguccuacaacgccgagcuccucgucgcccucgagaaccagcacaccaucgaccucaccgacuccgagaugaacaagcucuucgagaagaccaagaagcagcuccgcgagaacgccgaggacaugggcaacggcugcuucaagaucuaccacaagugcgacaacgccugcaucggcuccauccgcaacggcaccuacgaccacgacgucuaccgcgacgaggcccucaacaaccgcuuccagaucaagggcgucgagcucaaguccggcuacaaggacuggauccucuggaucuccuucgccaucuccugcuuccuccucugcgucgcccuccucggcuucaucaugugggccugccagaagggcaacauccgcugcaacaucugcaucuga

SEQ ID NO: 103028 - RNA, 1701 nt, Artificial Sequence
  derived and/or modified CDS sequence (opt2) from hemagglutinin__InfluenzaA__AEK98396
augaagaccaucaucgcccucuccuacauccucugccucgucuucgcccagaagcuccccggcaacgacaacuccaccgccacccucugccucggccaccacgccguccccaacggcaccaucgucaagaccaucaccaacgaccagaucgaggucaccaacgccaccgagcucguccaguccuccuccaccggcgagaucugcgacuccccccaccagauccucgacggcgagaacugcacccucaucgacgcccuccucggcgacccccagugcgacggcuuccagaacaagaagugggaccucuucgucgagcgcuccaaggccuacuccaacugcuaccccuacgacguccccgacuacgccucccuccgcucccucgucgccuccuccggcacccucgaguucaacaacgaguccuucaacuggaccggcgucacccagaacggcaccuccuccgccugcauccgccgcuccaacaaguccuucuucucccgccucaacuggcucacccaccucaaguucaaguaccccgcccucaacgucaccaugcccaacaacgagcaguucgacaagcucuacaucuggggcguccaccaccccggcaccgacaacgaccagaucucccucuacgcccaggccuccggccgcaucaccgucuccaccaagcgcucccagcagaccgucauccccaacaucggcucccgcccccgcguccgcaacauccccucccgcaucuccaucuacuggaccaucgucaagcccggcgacauccuccucaucaacuccaccggcaaccucaucgccccccgcggcuacuucaagauccgcuccggcaaguccuccaucaugcgcuccgacgcccccaucggcaagugcaacuccgagugcaucacccccaacggcuccauccccaacgacaagcccuuccagaacgucaaccgcaucaccuacggcgccugcccccgcuacgucaagcagaacacccucaagcucgccaccggcaugcgcaacguccccgagaagcagacccgcggcaucuucggcgccaucgccggcuucaucgagaacggcugggagggcauggucgacggcugguacggcuuccgccaccagaacuccgagggccgcggccaggccgccgaccucaaguccacccaggccgccaucgaccagaucaacggcaagcucaaccgccucaucggcaagaccaacgagaaguuccaccagaucgagaaggaguucuccgaggucgagggccgcauccaggaccucgagaaguacgucgaggacaccaagaucgaccucugguccuacaacgccgagcuccucgucgcccucgagaaccagcacaccaucgaccucaccgacuccgagaugaacaagcucuucgagaagaccaagaagcagcuccgcgagaacgccgaggacaugggcaacggcugcuucaagaucuaccacaagugcgacaacgccugcaucggcuccauccgcaacggcaccuacgaccacgacgucuaccgcgacgaggcccucaacaaccgcuuccagaucaagggcgucgagcucaaguccggcuacaaggacuggauccucuggaucuccuucgccaucuccugcuuccuccucugcaucgcccuccucggcuucaucaugugggccugccagaagggcaacauccgcugcaacaucugcaucuga

SEQ ID NO: 103029 - RNA, 1701 nt, Artificial Sequence
  derived and/or modified CDS sequence (opt2) from hemagglutinin__InfluenzaA__AEK98398
augaagaccaucaucgcccucuccuacauccucugccucgucuucgcccagaagcuccccggcaacgacaacuccaccgccacccucugccucggccaccacgccguccccaacggcaccaucgucaagaccaucaccaacgaccagaucgaggucaccaacgccaccgagcucguccaguccuccuccaccggcgagaucugcgacuccccccaccagauccucgacggcaagaacugcacccucaucgacgcccuccucggcgacccccagugcgacggccuccagaacaagaagugggaccucuucgucgagcgcuccaaggccuacuccaacugcuaccccuacgacguccccgacuacgccucccuccgcucccucgucgccuccuccggcacccucgaguucaacaacgaguccuucaacuggaccggcgucacccagaacggcaccuccuccgccugcauccgccgcuccaagaacuccuucuucucccgccucaacuggcucacccaccucaacuucaaguaccccgcccucaacgucaccaugcccaacaacgagcaguucgacaagcucuacaucuggggcguccaccaccccggcaccgacaaggaccagaucuuccucuacgcccaggccuccggccgcaucaccgucuccaccaagcgcucccagcagaccgccauccccaacaucggcucccgcccccgcguccgcaacauccccucccgcaucuccaucuacuggaccaucgucaagcccggcgacauccuccucaucaacuccaccggcaaccucaucgccccccgcggcuacuucaagauccgcuccggcaaguccuccaucaugcgcuccgacgcccccaucggcaagugcaacuccgagugcaucacccccaacggcuccauccccaacgacaagcccuuccagaacgucaaccgcaucaccuacggcgccugcccccgcuacgucaagcagaacacccucaagcucgccaccggcaugcgcaacauccccgagaagcagacccgcggcaucuucggcgccaucgccggcuucaucgagaacggcugggagggcauggucgacggcugguacggcuuccgccaccagaacuccgagggccgcggccaggccgccgaccucaaguccacccaggccgccaucgaccagaucaacggcaagcucaaccgccucaucggcaagaccaacgagaaguuccaccagaucgagaaggaguucuccgaggucgagggccgcauccaggaccucgagaaguacgucgaggacaccaagaucgaccucugguccuacaacgccgagcuccucgucgcccucgagaaccagcacaccaucgaccucaccgacuccgagaugaacaagcucuucgagaagaccaagaagcagcuccgcgagaacgccgaggacaugggcaacggcugcuucaagaucuaccacaagugcgacaacgccugcaucggcuccauccgcaacggcaccuacgaccacgacgucuaccgcgacgaggcccucaacaaccgcuuccagaucaagggcgucgagcucaaguccggcuacaaggacuggaucaucuggaucuccuucgccaucuccugcuuccuccucugcgucgcccuccucggcuucaucaugugggccugccagaagggcaacauccgcugcaacaucugcaucuga

SEQ ID NO: 103030 - RNA, 1701 nt, Artificial Sequence
  derived and/or modified CDS sequence (opt2) from hemagglutinin__InfluenzaA__AEK98400
auggagaccaucaucgcccucuccuacauccucucccucgucuucgcccagaagcuccccggcaacgacaacuccaccgccacccucugccucggccaccacgccguccccaacggcaccaucgucaagaccaucaccaacgaccagaucgaggucaccaacgccaccgagcucguccaguccuccuccaccggcgagaucugcgacuccccccaccagauccucgacggcgagaacugcacccucaucgacgcccuccucggcgacccccagugcgacggcuuccagaacaagaagugggaccucuucgucgagcgcuccaaggccuacuccaacugcuaccccuacgacguccccgacuacgccucccuccgcucccucgucgccuccuccggcacccucgaguucaacaacgagaacuucaacuggaccggcgucacccagaacggcaccuccuccgccugcauccgccgcuccaacaacuccuucuucucccgccucaacuggcucacccaccuccgcuucaaguaccccgcccucaacgucaccaugcccaacaacgaggaguucgacaagcucuacaucuggggcguccaccaccccggcaccgacaacgaccagaucuuccucuacgcccaggccuccggccgcaucaccgucuccaccaagcgcucccagcagaccgucauccccaacaucggcucccgcccccgcguccgcaacauccccucccgcaucuccaucuacuggaccaucgucaagcccggcgacauccuccucaucaacuccaccggcaaccucaucgccccccgcggcuacuucaagauccgcuccggcaaguccuccaucaugcgcuccgacgcccccaucggcaagugcuccuccgagugcaucacccccaacggcuccauccccaacgacaagcccuuccagaacgucaaccgcaucaccuacggcgccugcccccgcuacgucaagcagaacacccucaagcucgccaccggcaugcgcaacguccccgagaagcagacccgcggcaucuucggcgccaucgccggcuucaucgagaacggcugggagggcauggucgacggcugguacggcuuccgccaccagaacuccgagggcaucggccaggccgccgaccucaaguccacccaggccgccaucgaccagaucaacggcaagcucaaccgccucaucggcaagaccaacgagaaguuccaccagaucgagaaggaguucuccgagaucgagggccgcauccaggaccucgagaaguacgucgaggacaccaagaucgaccucugguccuacaacgccgagcuccucgucgcccucgagaaccagcacaccaucgaccucaccgacuccgagaugaacaagcucuucgagaagaccaagaagcagcuccgcgagaacgccgaggacaugggcaacggcugcuucaagaucuaccacaagugcgacaacgccugcaucggcuccauccgcaacggcaccuacgaccacgacgucuaccgcgacgaggcccucaacaaccgcuuccagaucaagggcgucgagcucaaguccggcuacaaggacuggauccucuggaucuccuucgccaucuccugcuuccuccucugcgucgcccuccucggcuucaucaugugggccugccagaagggcaacauccgcugcaacaucugcaucuga

SEQ ID NO: 103031 - RNA, 1701 nt, Artificial Sequence
  derived and/or modified CDS sequence (opt2) from hemagglutinin__InfluenzaA__AEK98402
augaagaccaucaucgcccucuccuacauccucugccucggcuucgcccagaagcuccccggcaacgacaacuccaccgccacccucugccucggccaccacgccguccccaacggcaccaucgucaagaccaucaccaacgaccagaucgaggucaccaacgccaccgagcucguccaguccuccuccaccggcgagaucugcgacuccccccaccagauccucgacggcaagaacugcacccucaucgacgcccuccucggcgacccccagugcgacggcuuccagaacaagaagugggaccucuucgucgagcgcuccaaggccuacuccaacugcuaccccuacgacguccccgacuacgccucccuccgcucccucgucgccuccuccggcacccucgaguucaacaacgaguccuucaacuggaccggcgucacccagaacggcaccuccuccgccugcauccgccgcuccaagaacuccuucuucucccgccucaacuggcucacccaccucaacuucaaguaccccgcccucaacgucaccaugcccaacaacgagcaguucgacaagcucuacaucuggggcguccaccaccccggcaccgacaaggaccagaucuuccucuacgcccaggccuccggccgcaucaccgucuccaccaagcgcucccagcagaccgccauccccaacaucggcucccgcccccgcguccgcaacauccccucccgcaucuccaucuacuggaccaucgucaagcccggcgacauccuccucaucaacuccaccggcaaccucaucgccccccgcggcuacuucaagauccgcuccggcaaguccuccaucaugcgcuccgacgcccccaucggcaagugcaacuccgagugcaucacccccaacggcuccauccccaacgacaagcccuuccagaacgucaaccgcaucaccuacggcgccugcccccgcuacgucaagcagaacacccucaagcucgccaccggcaugcgcaacguccccgagaagcagacccgcggcaucuucggcgccaucgccggcuucaucgagaacggcugggagggcauggucgacggcugguacggcuuccgccaccagaacuccgagggccgcggccaggccgccgaccucaaguccacccaggccgccaucaaccagaucaacggcaagcucaaccgccucaucggcaagaccaacgagaaguuccaccagaucgagaaggaguucuccgaggucgagggccgcauccaggaccucgagaaguacgucgaggacaccaagaucgaccucugguccuacaacgccgagcuccucgucgcccucgagaaccagcacaccaucgaccucaccgacuccgagaugaacaagcucuucgagaagaccaagaagcagcuccgcgagaacgccgaggacaugggcaacggcugcuucaagaucuaccacaagugcgacaacgccugcaucggcuccauccgcaacggcaccuacgaccacgacgucuaccgcgacgaggcccucaacaaccgcuuccagaucaagggcgucgagcucaaguccggcuacaaggacuggauccucuggaucuccuucgccaucuccugcuuccuccucugcgucgcccuccucggcuucaucaugugggccugccagaagggcaacauccgcugcaacaucugcaucuga

SEQ ID NO: 103032 - RNA, 1701 nt, Artificial Sequence
  derived and/or modified CDS sequence (opt2) from hemagglutinin__InfluenzaA__AEK98404
augaagaccaucaucgcccucuccuacauccucucccucgucuucgcccagaagcuccccggcaacgacaacuccaccgccacccucugccucggccaccacgccguccccaacggcaccaucgucaagaccaucaccaacgaccagaucgaggucaccaacgccaccgagcucguccaguccuccuccaccggcgagaucugcgacuccccccaccagauccucgacggcgagaacugcacccucaucgacgcccuccucggcgacccccagugcgacggcuuccagaacaagaagugggaccucuucgucgagcgcuccaaggccuacuccaacugcuaccccuacgacguccccgacuacgccucccuccgcucccucgucgccuccuccggcacccucgaguucaacaacgagaacuucaacuggaccggcgucacccagaacggcaccuccuccgccugcauccgccgcuccaacaacuccuucuucucccgccucaacuggcucacccaccuccgcuucaaguaccccgcccucaacgucaccaugcccaacaacgaggaguucgacaagcucuacaucuggggcguccaccaccccggcaccgacaacgaccagaucuuccucuacgcccaggccuccggccgcaucaccgucuccaccaagcgcucccagcagaccgucauccccaacaucggcucccgcccccgcguccgcaacauccccucccgcaucuccaucuacuggaccaucgucaagcccggcgacauccuccucaucaacuccaccggcaaccucaucgccccccgcggcuacuucaagaugcgcuccggcaaguccuccaucaugcgcuccgacgcccccaucggcaagugcaacuccgagugcaucacccccaacggcuccauccccaacgacaagcccuuccagaacgucaaccgcaucaccuacggcgccugcccccgcuacgucaagcagaacacccucaagcucgccaccggcaugcgcaacguccccgagaagcagacccgcggcaucuucggcgccaucgccggcuucaucgagaacggcugggagggcauggucgacggcugguacggcuuccgccaccagaacuccgagggcaucggccaggccgccgaccucaaguccacccaggccgccaucgaccagaucaacggcaagcucaaccgccucaucggcaagaccaacgagaaguuccaccagaucgagaaggaguucuccgaggucgagggccgcauccaggaccucgagaaguacgucgaggacaccaagaucgaccucugguccuacaacgccgagcuccucgucgcccucgagaaccagcacaccaucgaccucaccgacuccgagaugaacaagcucuucgagaagaccaagaagcagcuccgcgagaacgccgaggacaugggcaacggcugcuucaagaucuaccacaagugcgacaacgccugcaucggcuccauccgcaacggcaccuacgaccacgacgucuaccgcgacgaggcccucaacaaccgcuuccagaucaagggcgucgagcucaaguccggcuacaaggacuggauccucuggaucuccuucgccaucuccugcuuccuccucugcgucgcccuccucggcuucaucaugugggccugccagaagggcaacauccgcugcaacaucugcaucuga

SEQ ID NO: 103033 - RNA, 1701 nt, Artificial Sequence
  derived and/or modified CDS sequence (opt2) from hemagglutinin__InfluenzaA__AEK98406
augaagaccaucaucgcccucuccuacauccucucccucgucuucgcccagaagcuccccggcaacgacaacuccaccgccacccucugccucggccaccacgccguccccaacggcaccaucgucaagaccaucaccaacgaccagaucgaggucaccaacgccaccgagcucguccaguccuccuccaccggcgagaucugcgacuccccccaccagauccucgacggcgagaacugcacccucaucgacgcccuccucggcgacccccagugcgacggcuuccagaacaagaagugggaccucuucgucgagcgcuccaaggccuacuccaacugcuaccccuacgacguccccgacuacgccucccuccgcucccucgucgccuccuccggcacccucgaguucaacaacgagaacuucaacuggaccggcgucacccagaacggcaccuccuccgccugcauccgccgcuccaacaacuccuucuucucccgccucaacuggcucacccaccuccgcuucaaguaccccgcccucaacgucaccaugcccaacaacgaggagcucgacaagcucuacaucuggggcguccaccaccccggcaccgacaacgaccagaucuuccucuacgcccaggccuccggccgcaucaccgucuccaccaagcgcucccagcagaccgucauccccaacaucggcucccgcccccgcguccgcaacauccccucccgcaucuccaucuacuggaccaucgucaagcccggcgacauccuccucaucaacuccaccggcaaccucaucgccccccgcggcuacuucaagauccgcuccggcaaguccuccaucaugcgcuccgacgcccccaucggcaagugcaacuccgagugcaucacccccaacggcuccauccccaacgacaagcccuuccagaacgucaaccgcaucaccuacggcgccugcccccgcuacgucaagcagaacacccucaagcucgccaccggcaugcgcaacguccccgagaagcagacccgcggcaucuucggcgccaucgccggcuucaucgagaacggcugggagggcauggucgacggcugguacggcuuccgccaccagaacuccgagggcaucggccaggccgccgaccucaaguccacccaggccgccaucgaccagaucaacggcaagcucaaccgccucaucggcaagaccaacgagaaguuccaccagaucgagaaggaguucuccgaggucgagggccgcauccaggaccucgagaaguacgucgaggacaccaagaucgaccucugguccuacaacgccgagcuccucgucgcccucgagaaccagcacaccaucgaccucaccgacuccgagaugaacaagcucuucgagaagaccaagaagcagcuccgcgagaacgccgaggacaugggcaacggcugcuucaagaucuaccacaagugcgacaacgccugcaucggcuccauccgcaacggcaccuacgaccacgacgucuaccgcgacgaggcccucaacaaccgcuuccagaucaagggcgucgagcucaaguccggcuacaaggacuggauccucuggaucuccuucgccaucuccugcuuccuccucugcgucgcccuccucggcuucgucaugugggccugccagaagggcaacauccgcugcaacaucugcaucuga

SEQ ID NO: 103034 - RNA, 1701 nt, Artificial Sequence
  derived and/or modified CDS sequence (opt2) from hemagglutinin__InfluenzaA__AEL11687
augaagaccaucaucgcccucuccuacauccucugccucgucuucgcccagaagcuccccggcaacgacaacuccaccgccacccucugccucggccaccacgccguccccaacggcaccaucgucaagaccaucaccaacgaccagaucgaggucaccaacgccaccgagcucguccaguccuccuccaccggcggcaucugcgacuccccccaccagauccucgacggcgagaacugcacccucaucgacgcccuccucggcgacccccagugcgacggcuuccagaacaagaagugggaccucuucgucgagcgcuccaaggccuacuccaacugcuaccccuacgacguccccgacuacgccucccuccgcucccucgucgccuccuccggcacccucgaguucaacaacgaguccuucaacuggaccggcgucacccagaacggcaccuccuccuccugcaagcgccgcuccaacaacuccuucuucucccgccucaacuggcucacccaccucaaguucaaguaccccgcccucaacgucaccaugcccaacaacgagaaguucgacaagcucuacaucuggggcguccaccaccccgucaccgacaacgaccagauccgccucuacgcccaggccuccggccgcaucaccgucuccaccaagcgcucccagcagaccgucauccccaacaucggcuaccgcccccgcguccgcgacauccccucccgcaucuccaucuacuggaccaucgucaagcccggcgacauccuccucaucaacuccaccggcaaccucaucgccccccgcggcuacuucaagauccgcuccggcaaguccuccaucaugcgcuccgacgcccccaucggcaagugcaacuccgagugcaucacccccaacggcuccauccccaacgacaagcccuuccagaacgucaaccgcaucaccuacggcgccugcccccgcuacgucaagcagaacacccucaagcucgccaccggcaugcgcaacguccccgagaagcagacccgcggcaucuucggcgccaucgccggcuucaucgagaacggcugggagggcauggucgacggcugguacggcuuccgccaccagaacuccgagggcaucggccaggccgccgaccucaaguccacccaggccgccaucaaccagaucaacggcaagcucaaccgccucaucggcaagaccaacgagaaguuccaccagaucgagaaggaguucuccgaggucgagggccgcauccaggaccucgagaaguacgucgaggacaccaagaucgaccucugguccuacaacgccgagcuccucgucgcccucgagaaccagcacaccaucgaccucaccgacuccgagaugaacaagcucuucgagcgcaccaagaagcagcuccgcgagaacgccgaggacaugggcaacggcugcuucaagaucuaccacaagugcgacaacgccugcaucggcuccauccgcaacggcaccuacgaccacgacgucuaccgcgacgaggcccucaacaaccgcuuccagaucaagggcgucgagcucaaguccggcuacaaggacuggauccucuggaucuccuucgccaucuccugcuuccuccucugcgucguccuccucggcuucaucaugugggccugccagaagggcaacauccgcugcaacaucugcaucuga

SEQ ID NO: 103035 - RNA, 1692 nt, Artificial Sequence
  derived and/or modified CDS sequence (opt2) from hemagglutinin__InfluenzaA__AEL31632
auggagaagaucguccuccuccucgccaucgucucccucgucaaguccgaccagaucugcaucggcuaccacgccaacaacuccaccgagcaggucgacaccaucauggagaagaacgucaccgucacccacgcccaggacauccucgagaagacccacaacggcaagcucugcaaccucgacggcgucaagccccucauccuccgcgacugcuccgucgccggcuggcuccucggcaaccccaugugcgacgaguuccucaacguccccgagugguccuacaucgucgagaagaucaaccccgccaacgaccucugcuaccccggcaacuucaacgacuacgaggagcucaagcaccuccucucccgcaucaaccacuucgagaagauccagaucauccccaaguccuccugguccgaccacgaggccuccggcgucuccuccgucugccccuaccagggccgcuccuccuucuuccgcaacgucgucuggcucaccaagaaggacaacgccuaccccaccaucaagcgcuccuacaacaacaccaaccaggaggaccuccucguccucuggggcauccaccaccccaacgacgccgccgagcagacccgccucuaccagaaccccaccaccuacaucuccgucggcaccuccacccucaaccagcgccucguccccaagaucgccacccgcuccaaggucaacggccaguccggccgcauggaguucuucuggaccauccucaaguccaacgacgccaucaacuucgaguccaacggcaacuucaucgcccccgagaacgccuacaagaucgucaagaagggcgacuccaccaucaugaaguccgagcucgaguacggcaacugcaacaccaagugccagacccccaucggcgccaucaacuccuccaugcccuuccacaacauccacccccucaccaucggcgagugccccaaguacgucaaguccaaccgccucguccucgccaccggccuccgcaacuccccccagggcgagacccgcggccucuucggcgccaucgccggcuucaucgagggcggcuggcagggcauggucgacggcugguacggcuaccaccacuccaacgagcagggcuccggcuacgccgccgacaaggaguccacccagaaggccaucgacggcgucaccaacaaggucaacuccaucaucgacaagaugaacacccaguucgaggccgucggccgcgaguucaacaaccucgagcgccgcaucgagaaccucaacaagaagauggaggacggcuuccucgacgucuggaccuacaacgccgagcuccucguccucauggagaacgagcgcacccucgacuuccacgacuccaacgucaagaaccucuacgacaagguccgccuccagcuccgcgacaacgccaaggagcucggcaacggcugcuucgaguucuaccaccgcugcgacaacgagugcauggaguccguccgcaacggcaccuacgacuacccccaguacuccgaggaggcccgccucaagcgcgaggagaucuccggcgucaagcucgaguccaucggcaccuaccagauccucuccaucuacuccaccgucgccuccucccucgcccucgccaucauggucgccggccucuuccucuggaugugcuccaacggcucccuccagugccgcaucugcaucuga

SEQ ID NO: 103036 - RNA, 1701 nt, Artificial Sequence; identical to SEQ ID NO: 102956
  derived and/or modified CDS sequence (opt2) from hemagglutinin__InfluenzaA__AEL89297

SEQ ID NO: 103037 - RNA, 1701 nt, Artificial Sequence; identical to SEQ ID NO: 102956
  derived and/or modified CDS sequence (opt2) from hemagglutinin__InfluenzaA__AEL89307

SEQ ID NO: 103038 - RNA, 1701 nt, Artificial Sequence; identical to SEQ ID NO: 102956
  derived and/or modified CDS sequence (opt2) from hemagglutinin__InfluenzaA__AEL89317

SEQ ID NO: 103039 - RNA, 1701 nt, Artificial Sequence; identical to SEQ ID NO: 102956
  derived and/or modified CDS sequence (opt2) from hemagglutinin__InfluenzaA__AEL89327

SEQ ID NO: 103040 - RNA, 1701 nt, Artificial Sequence; identical to SEQ ID NO: 102956
  derived and/or modified CDS sequence (opt2) from hemagglutinin__InfluenzaA__AEL89337

SEQ ID NO: 103041 - RNA, 1701 nt, Artificial Sequence; identical to SEQ ID NO: 102956
  derived and/or modified CDS sequence (opt2) from hemagglutinin__InfluenzaA__AEL89347

SEQ ID NO: 103042 - RNA, 1701 nt, Artificial Sequence; identical to SEQ ID NO: 102956
  derived and/or modified CDS sequence (opt2) from hemagglutinin__InfluenzaA__AEL89357

SEQ ID NO: 103043 - RNA, 1701 nt, Artificial Sequence; identical to SEQ ID NO: 102956
  derived and/or modified CDS sequence (opt2) from hemagglutinin__InfluenzaA__AEL89367

SEQ ID NO: 103044 - RNA, 1701 nt, Artificial Sequence; identical to SEQ ID NO: 102956
  derived and/or modified CDS sequence (opt2) from hemagglutinin__InfluenzaA__AEL89391

SEQ ID NO: 103045 - RNA, 1701 nt, Artificial Sequence; identical to SEQ ID NO: 102956
  derived and/or modified CDS sequence (opt2) from hemagglutinin__InfluenzaA__AEL89401

SEQ ID NO: 103046 - RNA, 1701 nt, Artificial Sequence; identical to SEQ ID NO: 102956
  derived and/or modified CDS sequence (opt2) from hemagglutinin__InfluenzaA__AEL89411

SEQ ID NO: 103047 - RNA, 1701 nt, Artificial Sequence; identical to SEQ ID NO: 102956
  derived and/or modified CDS sequence (opt2) from hemagglutinin__InfluenzaA__AEL89421

SEQ ID NO: 103048 - RNA, 1701 nt, Artificial Sequence; identical to SEQ ID NO: 102956
  derived and/or modified CDS sequence (opt2) from hemagglutinin__InfluenzaA__AEL89441

SEQ ID NO: 103049 - RNA, 1701 nt, Artificial Sequence; identical to SEQ ID NO: 102956
  derived and/or modified CDS sequence (opt2) from hemagglutinin__InfluenzaA__AEL89451

SEQ ID NO: 103050 - RNA, 1701 nt, Artificial Sequence; identical to SEQ ID NO: 102956
  derived and/or modified CDS sequence (opt2) from hemagglutinin__InfluenzaA__AEL89461

SEQ ID NO: 103051 - RNA, 1701 nt, Artificial Sequence; identical to SEQ ID NO: 102956
  derived and/or modified CDS sequence (opt2) from hemagglutinin__InfluenzaA__AEL89471

SEQ ID NO: 103052 - RNA, 1701 nt, Artificial Sequence
  derived and/or modified CDS sequence (opt2) from hemagglutinin__InfluenzaA__AEL89481
augaaggucauccucgucguccuccucuacaccuucgccaccgccaacgccgacacccucugcaucggcuaccacgccaacaacuccaccgacaccgucgacaccguccucgagaagaacgucaccgucacccacuccgucaaccuccucgaggacaagcacaacggcaagcucugcaagcuccgcggcgucgccccccuccaccucggcaagugcaacaucgccggcuggauccucggcaaccccgagugcgagucccucuccaccgccuccuccugguccuacaucgucgagaccuccuccuccgacaacggcaccugcuaccccggcgacuucaucgacuacgaggagcuccgcgagcagcucuccuccgucuccuccuucgagcgcuucgagaucuuccccaagaccuccuccuggcccaaccacgacuccaacaagggcgucaccgccgccugcccccacgccggcgccaaguccuucuacaagaaccucaucuggcucgucaagaagggcaacuccuaccccaagcucuccaaguccuacaucaacgacaagggcaaggagguccucguccucuggggcauccaccaccccuccaccuccgccgaccagcagucccucuaccagaacgccgacgccuacgucuucgucggcaccucccgcuacuccaagaaguucaagcccgagaucgccauccgccccaagguccgcgaccaggagggccgcaugaacuacuacuggacccucgucgagcccggcgacaagaucaccuucgaggccaccggcaaccucgucgucccccgcuacgccuucgccauggagcgcaacgccggcuccggcaucaucaucuccgacacccccguccacgacugcaacaccaccugccagacccccaagggcgccaucaacaccucccuccccuuccagaacauccaccccaucaccaucggcaagugccccaaguacgucaaguccaccaagcuccgccucgccaccggccuccgcaacguccccuccauccagucccgcggccucuucggcgccaucgccggcuucaucgagggcggcuggaccggcauggucgacggcugguacggcuaccaccaccagaacgagcagggcuccggcuacgccgccgaccucaaguccacccagaacgccaucgacaagaucaccaacaaggucaacuccgucaucgagaagaugaacacccaguucaccgccgucggcaaggaguucaaccaccucgagaagcgcaucgagaaccucaacaagaaggucgacgacggcuuccucgacaucuggaccuacaacgccgagcuccucguccuccucgagaacgagcgcacccucgacuaccacgacuccaacgucaagaaccucuacgagaagguccgcucccagcucaagaacaacgccaaggagaucggcaacggcugcuucgaguucuaccacaagugcgacaacaccugcauggaguccgucaagaacggcaccuacgacuaccccaaguacuccgaggaggccaagcucaaccgcgaggagaucgacggcgucaagcucgaguccacccgcaucuaccagauccucgccaucuacuccaccgucgccuccucccucguccucgucgucucccucggcgccaucuccuucuggaugugcuccaacggcucccuccagugccgcaucugcaucuga

SEQ ID NO: 103053 - RNA, 1701 nt, Artificial Sequence; identical to SEQ ID NO: 101620
  derived and/or modified CDS sequence (opt2) from hemagglutinin__InfluenzaA__AEL89491

SEQ ID NO: 103054 - RNA, 1701 nt, Artificial Sequence
  derived and/or modified CDS sequence (opt2) from hemagglutinin__InfluenzaA__AEL89501
augaaggccauccucgucguccuccucuacaccuucgccaccgccaacgccgacacccucugcaucggcuaccacgccaacaacuccaccgacaccgucgacaccguccucgagaagaacgucaccgucacccacuccgucaaccuccucgaggacaagcacaacggcaagcucugcaagcuccgcggcgucgccccccuccaccucggcaagugcaacaucgccggcuggauccucggcaaccccgagugcgagucccucuccaccgccuccuccugguccuacaucgucgagaccuccuccuccgacaacggcaccugcuaccccggcgacuucaucgacuacgaggagcuccgcgagcagcucuccuccgucuccuccuucgagcgcuucgagaucuuccccaagaccuccuccuggcccgaccacgacuccaacaagggcgucaccgccgccugcccccacgccggcgccaaguccuucuacaagaaccucaucuggcucgucaagaagggcaacuccuaccccaagcucuccaaguccuacaucaacgacgagggcaaggagguccucguccucuggggcauccaccaccccuccaccuccgccgaccagcagucccucuaccagaacgccgacgccuacgucuucgucggcaccucccgcuacuccaagaaguucaagcccgagaucgccauccgccccaagguccgcgaccaggagggccgcaugaacuacuacuggacccucgucgagcccggcgacaagaucaccuucgaggccaccggcaaccucgucgucccccgcuacgccuucgccauggagcgcaacgccggcuccggcaucaucaucuccgacacccccguccacgacugcaacaccaccugccagacccccaagggcgccaucaacaccucccuccccuuccagaacauccaccccaucaccaucggcaagugccccaaguacgucaaguccaccaagcuccgccucgccaccggccuccgcaacguccccuccauccagucccgcggccucuucggcgccaucgccggcuucaucgagggcggcuggaccggcauggucgacggcugguacggcuaccaccaccagaacgagcagggcuccggcuacgccgccgaccucaaguccacccagaacgccaucgacaagaucaccaacaaggucaacuccgucaucgagaagaugaacacccaguucaccgccgucggcaaggaguucaaccaccucgagaagcgcaucgagaaccucaacaagaaggucgacgacggcuuccucgacaucuggaccuacaacgccgagcuccucguccuccucgagaacgagcgcacccucgacuaccacgacuccaacgucaagaaccucuacgagaagguccgcucccagcucaagaacaacgccaaggagaucggcaacggcugcuucgaguucuaccacaagugcgacaacaccugcauggaguccgucaagaacggcaccuacgacuaccccaaguacuccgaggaggccaagcucaaccgcgaggagaucgacggcgucaagcucgaguccacccgcaucuaccagauccucgccaucuacuccaccgucgccuccucccucguccucgucgucucccucggcgccaucuccuucuggaugugcuccaacggcucccuccagugccgcaucugcaucuga

SEQ ID NO: 103055 - RNA, 1701 nt, Artificial Sequence; identical to SEQ ID NO: 99869
  derived and/or modified CDS sequence (opt2) from hemagglutinin__InfluenzaA__AEL89511

SEQ ID NO: 103056 - RNA, 1701 nt, Artificial Sequence; identical to SEQ ID NO: 101620
  derived and/or modified CDS sequence (opt2) from hemagglutinin__InfluenzaA__AEL89521

SEQ ID NO: 103057 - RNA, 1701 nt, Artificial Sequence
  derived and/or modified CDS sequence (opt2) from hemagglutinin__InfluenzaA__AEL89531
augaaggccauccucgucguccuccucuacaccuucaccaccgccaacgccgacacccucugcaucggcuaccacgccaacaacuccaccgacaccgucgacaccguccucgagaagaacgucaccgucacccacuccgucaaccuccucgaggacaagcacaacggcaagcucugccagcuccgcggcgucgccccccuccaccucggcaagugcaacaucgccggcuggauccucggcaaccccgagugcgagucccucuccaccgccuccuccugguccuacaucgucgagaccuccuccuccgacaacggcaccugcuaccccggcgacuucaucgacuacgaggagcuccgcgagcagcucuccuccgucuccuccuucgagcgcuucgagauguuccccaagaccuccuccuggcccaaccacgacuccaacaagggcgucaccgccgccugcccccacgccggcgccaaguccuucuacaagaaccucaucuggcucgucaagaagggcaacuccuaccccaagcucuccaaguccuacaucaacgacaagggcaaggagguccucguccucuggggcauccaccaccccuccaccuccgccgaccagcagucccucuaccagaacgccgacgccuacgucuucgucggcaccucccgcuacuccaagaaguucaagcccgagaucgccauccgccccaagguccgcgaccaggagggccgcaugaacuacuacuggacccucgucgagcccggcgacaagaucaccuucgaggccaccggcaaccucgucgucccccgcuacgccuucgccauggagcgcaacgccggcuccggcaucaucaucuccgacacccccguccacgacugcaacaccaccugccagacccccaagggcgccaucaacaccucccuccccuuccagaacauccaccccaucaccaucggcaagugccccaaguacgucaaguccaccaagcuccgccucgccaccggccuccgcaacguccccuccauccagucccgcggccucuucggcgccaucgccggcuucaucgagggcggcuggaccggcauggucgacggcugguacggcuaccaccaccagaacgagcagggcuccggcuacgccgccgaccucaaguccacccagaacgccaucgacaagaucaccaacaaggucaacuccgucaucgagaagaugaacacccaguucaccgccgucggcaaggaguucaaccaccucgagaagcgcaucgagaaccucaacaagaaggucgacgacggcuuccucgacaucuggaccuacaacgccgagcuccucguccuccucgagaacgagcgcacccucgacuaccacgacuccaacgucaagaaccucuacgagaagguccgcucccagcucaagaacaacgccaaggagaucggcaacggcugcuucgaguucuaccacaagugcgacaacaccugcauggaguccgucaagaacggcaccuacgacuaccccaaguacuccgaggaggccaagcucaaccgcgaggagaucgacggcgucaagcucgaguccacccgcaucuaccagauccucgccaucuacuccaccgucgccuccucccucguccucgucgucucccucggcgccaucuccuucuggaugugcuccaacggcucccuccagugccgcaucugcaucuga

SEQ ID NO: 103058 - RNA, 1701 nt, Artificial Sequence; identical to SEQ ID NO: 101620
  derived and/or modified CDS sequence (opt2) from hemagglutinin__InfluenzaA__AEL89541

SEQ ID NO: 103059 - RNA, 1701 nt, Artificial Sequence
  derived and/or modified CDS sequence (opt2) from hemagglutinin__InfluenzaA__AEL89551
augaaggccauccucgucguccuccucuacaccuucgccaccgccaacgccgacacccucugcaucggcuaccacgccaacaacuccaccgacaccgucgacaccguccucgagaagaacgucaccgucacccacuccgucaaccuccucgaggacaagcacaacggcaagcucugcaagcuccgcggcgucgccccccuccaccucggcaagugcaacaucgccggcuggauccucggcaaccccgagugcgagucccucuccaccgccuccuccugguccuacaucgucgagaccuccuccuccgacaacggcaccugcuaccccggcgacuucaucgacuacgaggagcuccgcgagcagcucuccuccgucuccuccuucgagcgcuucgagaucuuccccaagaccuccuccuggcccgaccacgacuccaacaagggcgucaccgccgccugcccccacgccggcgccaaguccuucuacaagaaccucaucuggcucgucaagaagggcaacuccuaccccaagcucuccaaguccuacaucaacgacaagggcaaggagguccucguccucuggggcauccaccaccccuccaccuccgccgaccagcagucccucuaccagaacgccgacgccuacgucuucgucggcaccucccgcuacuccaagaaguucaagcccgagaucgccauccgccccaagguccgcgaccaggagggccgcaugaacuacuacuggacccucgucgagcccggcgacaagaucaccuucgaggccaccggcaaccucgucgucccccgcuacgccuucgccauggagcgcaacgccggcuccggcaucaucaucuccgacacccccgcccacgacugcaacaccaccugccagacccccaagggcgccaucaacaccucccuccccuuccagaacauccaccccaucaccaucggcaagugccccaaguacgucaaguccaccaagcuccgccucgccaccggccuccgcaacguccccuccauccagucccgcggccucuucggcgccaucgccggcuucaucgagggcggcuggaccggcauggucgacggcugguacggcuaccaccaccagaacgagcagggcuccggcuacgccgccgaccucaaguccacccagaacgccaucgacaagaucaccaacaaggucaacuccgucaucgagaagaugaacacccaguucaccgccgucggcaaggaguucaaccaccucgagaagcgcaucgagaaccucaacaagaaggucgacgacggcuuccucgacaucuggaccuacaacgccgagcuccucguccuccucgagaacgagcgcacccucgacuaccacgacuccaacgucaagaaccucuacgagaagguccgcucccagcucaagaacaacgccaaggagaucggcaacggcugcuucgaguucuaccacaagugcgacaacaccugcauggaguccgucaagaacggcaccuacgacuaccccaaguacuccgaggaggccaagcucaaccgcgaggagaucgacggcgucaagcucgaguccacccgcaucuaccagauccucgccaucuacuccaccgucgccuccucccucguccucgucgucucccucggcgccaucuccuucuggaugugcuccaacggcucccuccagugccgcaucugcaucuga

SEQ ID NO: 103060 - RNA, 1701 nt, Artificial Sequence
  derived and/or modified CDS sequence (opt2) from hemagglutinin__InfluenzaA__AEL89561
augaaggccauccucgucguccuccucuacaccuucgccaccgccaacgccgacacccucugcaucggcuaccacgccaacaacuccaccgacaccgucgacaccguccucgagaagaacgucaccgucacccacuccgucaaccuccucgaggacaagcacaacggcaagcucugcaagcuccgcggcgucgccccccuccaccucggcaagugcaacaucgccggcuggauccucggcaaccccgagugcgagucccucuccaccgccuccuccugguccuacaucgucgagaccuccuccuccggcaacggcaccugcuaccccggcgacuucaucgacuacgaggagcuccgcgagcagcucuccuccgucuccuccuucgagcgcuucgagaucuuccccaagaccuccuccuggcccgaccacgacuccaacaagggcgucaccgccgccugcccccacgccggcgccaaguccuucuacaagaaccucaucuggcucgucaagaagggcaacuccuaccccaagcucuccaaguccuacaucaacgacaagggcaaggagguccucguccucuggggcauccaccaccccuccaccuccgccgaccagcagucccucuaccagaacgccgacgccuacgucuucgucggcaccucccgcuacuccaagaaguucaagcccgagaucgccauccgccccaagguccgcgaccaggagggccgcaugaacuacuacuggacccucgucgagcccggcgacaagaucaccuucgaggccaccggcaaccucgucgucccccgcuacgccuucgccauggagcgcaacgccggcuccggcaucaucaucuccgacacccccguccacgacugcaacaccaccugccagacccccaagggcgccaucaacaccucccuccccuuccagaacauccaccccaucaccaucggcaagugccccaaguacgucaaguccaccaagcuccgccucgccaccggccuccgcaacguccccuccauccagucccgcggccucuucggcgccaucgccggcuucaucgagggcggcuggaccggcauggucgacggcugguacggcuaccaccaccagaacgagcagggcuccggcuacgccgccgaccucaaguccacccagaacgccaucgacaagaucaccaacaaggucaacuccgucaucgagaagaugaacacccaguucaccgccgucggcaaggaguucaaccaccucgagaagcgcaucgagaaccucaacaagaaggucgacgacggcuuccucgacaucuggaccuacaacgccgagcuccucguccuccucgagaacgagcgcacccucgacuaccacgacuccaacgucaagaaccucuacgagaagguccgcucccagcucaagaacaacgccaaggagaucggcaacggcugcuucgaguucuaccacaagugcgacaacaccugcauggaguccgucaagaacggcaccuacgacuaccccaaguacuccgaggaggccaagcucaaccgcgaggagaucgacggcgucaagcucgaguccaccgagaucuaccagauccucgccaucuacuccaccgucgccuccucccucguccucgucgucucccucggcgccaucuccuucuggaugugcuccaacggcucccuccagugccgcaucugcaucuga

SEQ ID NO: 103061 - RNA, 1701 nt, Artificial Sequence; identical to SEQ ID NO: 101620
  derived and/or modified CDS sequence (opt2) from hemagglutinin__InfluenzaA__AEL89571

SEQ ID NO: 103062 - RNA, 1701 nt, Artificial Sequence
  derived and/or modified CDS sequence (opt2) from hemagglutinin__InfluenzaA__AEL89581
augaaggccauccucgucguccuccucuacaccuucgccaccgccaacgccgacacccucugcaucggcuaccacgccaacaacuccaccgacaccgucgacaccguccucgagaagaacgucaccgucacccacuccgucaaccuccucgaggacaagcacaacggcaagcucugcaagcuccgcggcgucgccccccuccaccucggcaagugcaacaucgccggcuggauccucggcaaccccgagugcgagucccucuccaccgccuccuccugguccuacaucgucgagaccuccuccuccgacaacggcaccugcuaccccggcgacuucaucgacuacgaggagcuccgcgagcagcucuccuccgucuccuccuucgagcgcuucgagauguuccccaagaccuccuccuggcccgaccacgacuccaacaagggcgucaccgccgccugcccccacgccggcgccaaguccuucuacaagaaccucaucuggcucgucaagaagggcaacuccuaccccaagcucuccaaguccuacaucaacgacaagggcaaggagguccucguccucuggggcauccaccaccccuccaccuccgccgaccagcagucccucuaccagaacgccgacgccuacgucuucgucggcaccucccgcuacuccaagaaguucaagcccgagaucgccauccgccccaagguccgcgaccaggagggccgcaugaacuacuacuggacccucgucgagcccggcgacaagaucaccuucgaggccaccggcaaccucgucgucccccgcuacgccuucgccauggagcgcaacgccggcuccggcaucaucaucuccgacacccccguccacgacugcaacaccaccugccagacccccaagggcgccaucaacaccucccuccccuuccagaacauccaccccaucaccaucggcaagugccccaaguacgucaaguccaccaagcuccgccucgccaccggccuccgcaacguccccuccauccagucccgcggccucuucggcgccaucgccggcuucaucgagggcggcuggaccggcauggucgacggcugguacggcuaccaccaccagaacgagcagggcuccggcuacgccgccgaccucaaguccacccagaacgccaucgacaagaucaccaacaaggucaacuccgucaucgagaagaugaacacccaguucaccgccgucggcaaggaguucaaccaccucgagaagcgcaucgagaaccucaacaagaaggucgacgacggcuuccucgacaucuggaccuacaacgccgagcuccucguccuccucgagaacgagcgcacccucgacuaccacgacuccaacgucaagaaccucuacgagaagguccgcucccagcucaagaacaacgccaaggagaucggcaacggcugcuucgaguucuaccacaagugcgacaacaccugcauggaguccgucaagaacggcaccuacgacuaccccaaguacuccgaggaggccaagcucaaccgcgaggagaucgacggcgucaagcucgaguccacccgcaucuaccagauccucgccaucuacuccaccgucgccuccucccucguccucgucgucucccucggcgccaucuccuucuggaugugcuccaacggcucccuccagugccgcaucugcaucuga

SEQ ID NO: 103063 - RNA, 1701 nt, Artificial Sequence; identical to SEQ ID NO: 102490
  derived and/or modified CDS sequence (opt2) from hemagglutinin__InfluenzaA__AEL89591

SEQ ID NO: 103064 - RNA, 1701 nt, Artificial Sequence
  derived and/or modified CDS sequence (opt2) from hemagglutinin__InfluenzaA__AEL89601
augaaggccauccucgucguccuccucuacaccuucgccaccgccaacgccgacacccucugcaucggcuaccacgccaacaacuccaccgacaccgucgacaccguccucgagaagaacgucaccgucacccacuccgucaaccuccucgaggacaagcacaacggcaagcucugcaagcuccgcggcgucgccccccuccaccucggcaagugcaacaucgccggcuggauccucggcaaccccgagugcgagucccucuccaccgccuccuccugguccuacaucgucgagaccuccuccuccgacaacggcaccugcuaccccggcgacuucaucgacuacgaggagcuccgcgagcagcucuccuccgucuccuccuucgagcgcuucgagaucuuccccaagaccuccuccuggcccaaccacgacuccaacaagggcgucaccaccgccugcccccacgccggcgccaaguccuucuacaagaaccucaucuggcucgucaagaagggcaacuccuaccccaagcucuccaaguccuacaucaacgacaagggcaaggagguccucguccucuggggcauccaccacccccccaccuccgccgaccagcagucccucuaccagaacgccgacgccuacgucuucgucggcaccucccgcuacuccaagaaguucaagcccgagaucgccauccgccccaagguccgcgaccaggagggccgcaugaacuacuacuggacccucgucgagcccggcgacaagaucaccuucgaggccaccggcaaccucgucgucccccgcuacgccuucgccauggagcgcaacgccggcuccggcaucaucaucuccgacacccccguccacgacugcaacaccaccugccagacccccaagggcgccaucaacaccucccuccccuuccagaacauccaccccaucaccaucggcaagugccccaaguacgucaaguccaccaagcuccgccucgccaccggccuccgcaacguccccuccauccagucccgcggccucuucggcgccaucgccggcuucaucgagggcggcuggaccggcauggucgacggcugguacggcuaccaccaccagaacgagcagggcuccggcuacgccgccgaccucaaguccacccagaacgccaucgacgagaucaccaacaaggucaacuccgucaucgagaagaugaacacccaguucaccgccgucggcaaggaguucaaccaccucgagaagcgcaucgagaaccucaacaagaaggucgacgacggcuuccucgacaucuggaccuacaacgccgagcuccucguccuccucgagaacgagcgcacccucgacuaccacgacuccaaggucaagaaccucuacgagaagguccgcucccagcucaagaacaacgccaaggagaucggcaacggcugcuucgaguucuaccacaagugcgacaacaccugcauggaguccgucaagaacggcaccuacgacuaccccaaguacuccgaggaggccaagcucaaccgcgaggagaucgacggcgucaagcucgaguccacccgcaucuaccagauccucgccaucuacuccaccgucgccuccucccucguccucgucgucucccucggcgccaucuccuucuggaugugcuccaacggcucccuccagugccgcaucugcaucuga

SEQ ID NO: 103065 - RNA, 1701 nt, Artificial Sequence; identical to SEQ ID NO: 102490
  derived and/or modified CDS sequence (opt2) from hemagglutinin__InfluenzaA__AEL89611

SEQ ID NO: 103066 - RNA, 1701 nt, Artificial Sequence; identical to SEQ ID NO: 102932
  derived and/or modified CDS sequence (opt2) from hemagglutinin__InfluenzaA__AEL89621

SEQ ID NO: 103067 - RNA, 1701 nt, Artificial Sequence; identical to SEQ ID NO: 101620
  derived and/or modified CDS sequence (opt2) from hemagglutinin__InfluenzaA__AEL89631

SEQ ID NO: 103068 - RNA, 1701 nt, Artificial Sequence; identical to SEQ ID NO: 102956
  derived and/or modified CDS sequence (opt2) from hemagglutinin__InfluenzaA__AEL89641

SEQ ID NO: 103069 - RNA, 1701 nt, Artificial Sequence
  derived and/or modified CDS sequence (opt2) from hemagglutinin__InfluenzaA__AEL89651
augaaggccauccucgucguccuccucuacaccuucgccaccgccaacgccgacacccucugcaucggcuaccacgccaacaacuccaccgacaccgucgacaccguccucgagaagaacgucaccgucacccacuccgucaaccuccucgaggacaagcacaacggcaagcucugcaagcuccgcggcgucgccccccuccaccucggcaagugcaacaucgccggcuggauccucggcaaccccgagugcgagucccucuccaccgccuccuccugguccuacaucgucgagaccuccuccuccgacaacggcaccugcuaccccggcgucuucaucgacuacgaggagcuccgcgagcagcucuccuccgucuccuccuucgagcgcuucgagaucuuccccaagaccuccuccuggcccaaccacgacuccaacaagggcgucaccgccgccugcccccacgccggcgccaaguccuucuacaagaaccucaucuggcucgucaagaagggcaacuccuaccccaagcucuccaaguccuacaucaacgacaagggcaaggagguccucguccucuggggcauccaccaccccuccaccaccgccgaccagcagucccucuaccagaacgccgacgccuacgucuucgucggcaccucccgcuacuccaagaaguucaagcccgagaucgccauccgccccaagguccgcgaccaggagggccgcaugaacuacuacuggacccucgucgagcccggcgacaagaucaccuucgaggccaccggcaaccucgucgucccccgcuacgccuucgccauggagcgcaacgccggcuccggcaucaucaucuccgacacccccguccacgacugcaacaccaccugccagacccccaagggcgccaucaacaccucccuccccuuccagaacauccaccccaucaccaucggcaagugccccaaguucgucaaguccaccaagcuccgccucgccaccggccuccgcaacguccccuccauccagucccgcggccucuucggcgccaucgccggcuucaucgagggcggcuggaccggcauggucgacggcugguacggcuaccaccaccagaacgagcagggcuccggcuacgccgccgaccucaaguccacccagaacgccaucgacaagaucaccaacaaggucaacuccgucaucgagaagaugaacacccaguucaccgccgucggcaaggaguucaaccaccucgagaagcgcaucgagaaccucaacaagaaggucgacgacggcuuccucgacaucuggaccuacaacgccgagcuccucguccuccucgagaacgagcgcacccucgacuaccacgacuccaacgucaagaaccucuacgagaagguccgcaaccagcucaagaacaacgccaaggagaucggcaacggcugcuucgaguucuaccacaagugcgacaacaccugcauggaguccgucaagaacggcaccuacgacuaccccaaguacuccgaggaggccaagcucaaccgcgaggagaucgacggcgucaagcucgaguccacccgcaucuaccagauccucgccaucuacuccaccgucgccuccucccucguccucgucgucucccucggcgccaucuccuucuggaugugcuccaacggcucccuccagugccgcaucugcaucuga

SEQ ID NO: 103070 - RNA, 1701 nt, Artificial Sequence; identical to SEQ ID NO: 102471
  derived and/or modified CDS sequence (opt2) from hemagglutinin__InfluenzaA__AEL89661

SEQ ID NO: 103071 - RNA, 1701 nt, Artificial Sequence
  derived and/or modified CDS sequence (opt2) from hemagglutinin__InfluenzaA__AEL89671
augaaggccauccucgucguccuccucuacaccuucgccaccgccaacgccgacacccucugcaucggcuaccacgccaacaacuccaccgacaccgucgacaccguccucgagaagaacgucaccgucacccacuccgucaaccuccucgaggacaagcacaacggcaagcucugcaagcuccgcggcgucgccccccuccaccucggcaagugcaacaucgccggcuggauccucggcaaccccgagugcgagucccucuccaccgccuccuccugguccuacaucgucgagaccuccuccuccgacaacggcaccugcuaccccggcgacuucaucgacuacgaggagcuccgcgagcagcucuccuccgucuccuccuucgagcgcuucgagaucuuccccaagaccuccuccuggcccaaccacgacuccaacaagggcgucaccgccgccugcccccacgccggcgccaaguccuucuacaagaaccucaucuggcucgucaagaagggcaacuccuaccccaagcucuccaaguccuacaucaacgacaagggcaaggagguccucguccucuggggcauccaccaccccuccaccaccgccgaccagcagucccucuaccaguccgccgacaccuacgucuucgucggcaccucccgcuacuccaagaaguucaagcccgagaucgccauccgccccaagguccgcgaccaggagggccgcaugaacuacuacuggacccucgucgagcccggcgacaagaucaccuucgaggccaccggcaaccucgucgucccccgcuacgccuucgccauggagcgcaacgccggcuccggcaucaucaucuccgacacccccguccacgacugcaacaccaccugccagacccccaagggcgccaucaacaccucccuccccuuccagaacauccaccccaucaccaucggcaagugccccaaguacgucaaguccaccaagcuccgccucgccaccggccuccgcaacguccccuccauccagucccgcggccucuucggcgccaucgccggcuucaucgagggcggcuggaccggcauggucgacggcugguacggcuaccaccaccagaacgagcagggcuccggcuacgccgccgaccucaaguccacccagaacgccaucgacaagaucaccaacaaggucaacuccgucaucgagaagaugaacacccaguucaccgccgucggcaaggaguucaaccaccucgagaagcgcaucgagaaccucaacaagaaggucgacgacggcuuccucgacaucuggaccuacaacgccgagcuccucguccuccucgagaacgagcgcacccucgacuaccacgacuccaacgucaagaaccucuacgagaagguccgcaaccagcucaagaacaacgccaaggagaucggcaacggcugcuucgaguucuaccacaagugcgacaacaccugcauggaguccgucaagaacggcaccuacgacuaccccaaguacuccgaggaggccaagcucaaccgcgaggagaucgacggcgucaagcucgaguccacccgcaucuaccagauccucgccaucuacuccaccgucgccuccucccucguccucgucgucucccucggcgccaucuccuucuggaugugcuccaacggcucccuccagugccgcaucugcaucuga

SEQ ID NO: 103072 - RNA, 1701 nt, Artificial Sequence; identical to SEQ ID NO: 102471
  derived and/or modified CDS sequence (opt2) from hemagglutinin__InfluenzaA__AEL89691

SEQ ID NO: 103073 - RNA, 1701 nt, Artificial Sequence
  derived and/or modified CDS sequence (opt2) from hemagglutinin__InfluenzaA__AEL89701
augaaggccauccucgucguccuccucuacaccuucgccaccgccaacgccgacacccucugcaucggcuaccacgccaacaacuccaccgacaccgucgacaccguccucgagaagaacgucaccgucacccacuccgucaaccuccucgaggacaagcacaacggcaagcucugcaagcuccgcggcgucgccccccuccaccucggcaagugcaacaucgccggcuggauccucggcaaccccgagugcgagucccucuccaccgccuccuccugguccuacaucgucgagaccuccuccuccgacaacggcaccugcuaccccggcgacuucaucgacuacgaggagcuccgcgagcagcucuccuccgucuccuccuucgagcgcuucgagaucuuccccaagaccuccuccuggcccaaccacgacuccaacaagggcgucaccaccgccugcccccacgccggcgccaaguccuucuacaagaaccucaucuggcucgucaagaagggcaacuccuaccccaagcucuccaaguccuacaucaacgacaagggcaaggagguccucguccucuggggcauccaccacccccccaccuccgccgaccagcagaaccucuaccagaacgccgacgccuacgucuucgucggcaccucccgcuacuccaagaaguucaagcccgagaucgccauccgccccaagguccgcgaccaggagggccgcaugaacuacuacuggacccucgucgagcccggcgacaagaucaccuucgaggccaccggcaaccucgucgucccccgcuacgccuucgccauggagcgcaacgccggcuccggcaucaucaucuccgacacccccguccacgacugcaacaccaccugccagacccccaagggcgccaucaacaccucccuccccuuccagaacauccaccccaucaccaucggcaagugccccaaguacgucaaguccaccaagcuccgccucgccaccggccuccgcaacguccccuccauccagucccgcggccucuucggcgccaucgccggcuucaucgagggcggcuggaccggcauggucgacggcugguacggcuaccaccaccagaacgagcagggcuccggcuacgccgccgaccucaaguccacccagaacgccaucgacggcaucaccaacaaggucaacuccgucaucgagaagaugaacacccaguucaccgccgucggcaaggaguucaaccaccucgagaagcgcaucgagaaccucaacaagaaggucgacgacggcuuccucgacaucuggaccuacaacgccgagcuccucguccuccucgagaacgagcgcacccucgacuaccacgacuccaacgucaagaaccucuacgagaagguccgcucccagcucaagaacaacgccaaggagaucggcaacggcugcuucgaguucuaccacaagugcgacaacaccugcauggaguccgucaagaacggcaccuacgacuaccccaaguacuccgaggaggccaagcucaaccgcgaggagaucgacggcgucaagcucgaguccaccaugaucuaccagauccucgccaucuacuccaccgucgccuccucccucguccucgucgucucccucggcgccaucuccuucuggaugugcuccaacggcucccuccagugccgcaucugcaucuga

SEQ ID NO: 103074 - RNA, 1701 nt, Artificial Sequence; identical to SEQ ID NO: 103073
  derived and/or modified CDS sequence (opt2) from hemagglutinin__InfluenzaA__AEL89711

SEQ ID NO: 103075 - RNA, 1701 nt, Artificial Sequence; identical to SEQ ID NO: 102471
  derived and/or modified CDS sequence (opt2) from hemagglutinin__InfluenzaA__AEL89721

SEQ ID NO: 103076 - RNA, 1701 nt, Artificial Sequence
  derived and/or modified CDS sequence (opt2) from hemagglutinin__InfluenzaA__AEL89741
augaaggccauccucgucguccuccucuacaccuucgccaccaccaacgccgacacccucugcaucggcuaccacgccaacaacuccaccgacaccgucgacaccguccucgagaagaacgucaccgucacccacuccgucaaccuccucgaggacaagcacaacggcaagcucugcaagcuccgcggcgucgccccccuccaccucggcaagugcaacaucgccggcuggauccucggcaaccccgagugcgagucccucuccaccgccuccuccugguccuacaucgucgagaccuccuccuccgacaacggcaccugcuaccccggcgacuucaucgacuacgaggagcuccgcgagcagcucuccuccgucuccuccuucgagcgcuucgagaucuuccccaagaccuccuccuggcccaaccacgacuccaacaagggcgucaccgccgccugcccccacgccggcgccaaguccuucuacaagaaccucaucuggcucgucaagaagggcaacuccuaccccaagcucuccaaguccuacaucaacgacaagggcaaggagguccucguccucuggggcauccaccaccccuccaccaccgccgaccagcagucccucuaccagaacgccgacaccuacgucuucgucggcaccucccgcuacuccaagaaguucaagcccgagaucgccauccgccccaagguccgcgaccaggagggccgcaugaacuacuacuggacccucgucgagcccggcgacaagaucaccuucgaggccaccggcaaccucgucgucccccgcuacgccuucgccauggagcgcaacgccggcuccggcaucaucaucuccgacacccccguccacgacugcaacaccaccugccagacccccaagggcgccaucaacaccucccuccccuuccagaacauccaccccaucaccaucggcaagugccccaaguacgucaaguccaccaagcuccgccucgccaccggccuccgcaacguccccuccauccagucccgcggccucuucggcgccaucgccggcuucaucgagggcggcuggaccggcauggucgacggcugguacggcuaccaccaccagaacgagcagggcuccggcuacgccgccgaccucaaguccacccagaacgccaucgacaagaucaccaacaaggucaacuccgucaucgagaagaugaacacccaguucaccgccgucggcaaggaguucaaccaccucgagaagcgcaucgagaaccucaacaagaaggucgacgacggcuuccucgacaucuggaccuacaacgccgagcuccucguccuccucgagaacgagcgcacccucgacuaccacgacuccaacgucaagaaccucuacgagaagguccgcaaccagcucaagaacaacgccaaggagaucggcaacggcugcuucgaguucuaccacaagugcgacaacaccugcauggaguccgucaagaacggcaccuacgacuaccccaaguacuccgaggaggccaagcucaaccgcgaggagaucgacggcgucaagcucgaguccacccgcaucuaccagauccucgccaucuacuccaccgucgccuccucccucguccucgucgucucccucggcgccaucuccuucuggaugugcuccaacggcucccuccagugccgcaucugcaucuga

SEQ ID NO: 103077 - RNA, 1701 nt, Artificial Sequence; identical to SEQ ID NO: 101620
  derived and/or modified CDS sequence (opt2) from hemagglutinin__InfluenzaA__AEL89751

SEQ ID NO: 103078 - RNA, 1701 nt, Artificial Sequence
  derived and/or modified CDS sequence (opt2) from hemagglutinin__InfluenzaA__AEL89761
augaaggccauccucgucguccuccucuacaccuucgccaccgccaacgccgacacccucugcaucggcuaccacgccaacaacuccaccgacaccgucgacaccguccucgagaagaacgucaccgucacccacuccgucaaccuccucgaggacaagcacaacggcaagcucugcaagcuccgcggcgucgccccccuccaccucggcaagugcaacaucgccggcuggauccucggcaaccccgagugcgagucccucuccaccgccuccuccugguccuacaucgucgagaccuccuccuccgacaacggcaccugcuaccccggcgacuucaucgacuacgaggagcuccgcgagcagcucuccuccgucuccuccuucgagcgcuucgagaucuuccccaagaccuccuccuggcccaaccacgacuccaacaagggcgucaccaccgccugcccccacgccggcgccaaguccuucuacaagaaccucaucuggcucgucaagaagggcaacuccuaccccaagcucuccaaguccuacaucaacgacaagggcaaggagguccucguccucuggggcauccaccacccccccaccuccgccgaccagcagucccucuaccagaacgccgacgccuacgucuucgucggcaccucccgcuacuccaagaaguucaagcccgagaucgccauccgccccaagguccgcgaccaggagggccgcaugaacuacuacuggacccucgucgagcccggcgacaagaucaccuucgaggccaccggcaaccucgucgucccccgcuacgccuucgccauggagcgcaacgccggcuccggcaucaucaucuccgacacccccguccacgacugcaacaccaccugccagacccccaagggcgccaucaacaccucccuccccuuccagaacauccaccccaucaccaucggcaagugccccaaguacgucaaguccaccaagcuccgccucgccaccggccuccgcaacguccccuccauccagucccgcggccucuucggcgccaucgccggcuucaucgagggcggcuggaccggcauggucgacggcugguacggcuaccaccaccagaacgagcagggcuccggcuacgccgccgaccucaaguccacccagaacgccaucgacggcaucaccaacaaggucaacuccgucaucgagaagaugaacacccaguucaccgccgucggcaaggaguucaaccaccucgagaagcgcaucgagaaccucaacaagaaggucgacgacggcuuccucgacaucuggaccuacaacgccgagcuccucguccuccucgagaacgagcgcacccucgacuaccacgacuccaacgucaagaaccucuacgagaagguccgcucccagcucaagaacaacgccaaggagaucggcaacggcugcuucgaguucuaccacaagugcgacaacaccugcauggaguccgucaagaacggcaccuacgacuaccccaaguacuccgaggaggccaagcucaaccgcgaggagaucgacggcgucaagcucgaguccaccaugaucuaccagauccucgccaucuacuccaccgucgccuccucccucguccucgucgucucccucggcgccaucuccuucuggaugugcuccaacggcucccuccagugccgcaucugcaucuga

SEQ ID NO: 103079 - RNA, 1701 nt, Artificial Sequence; identical to SEQ ID NO: 102956
  derived and/or modified CDS sequence (opt2) from hemagglutinin__InfluenzaA__AEL89771

SEQ ID NO: 103080 - RNA, 1701 nt, Artificial Sequence; identical to SEQ ID NO: 103078
  derived and/or modified CDS sequence (opt2) from hemagglutinin__InfluenzaA__AEL89781

SEQ ID NO: 103081 - RNA, 1701 nt, Artificial Sequence; identical to SEQ ID NO: 102471
  derived and/or modified CDS sequence (opt2) from hemagglutinin__InfluenzaA__AEL89791

SEQ ID NO: 103082 - RNA, 1701 nt, Artificial Sequence
  derived and/or modified CDS sequence (opt2) from hemagglutinin__InfluenzaA__AEL89801
augaaggccauccucgucguccuccucuacaccuucgccaccgccaacgccgacacccucugcaucggcuaccacgccaacaacuccaccgacaccgucgacaccguccucgagaagaacgucaccgucacccacuccgucaaccuccucgaggacaagcacaacggcaagcucugcaagcuccgcggcgucgccccccuccaccucggcaagugcaacaucgccggcuggauccucggcaaccccgagugcgagucccucuccaccgccuccuccugguccuacaucgucgagaccuccuccuccgacaacggcaccugcuaccccggcgucuucaucgacuacgaggagcuccgcgagcagcucuccuccgucuccuccuucgagcgcuucgagaucuuccccaagaccuccuccuggcccaaccacgacuccaacaagggcgucaccgccgccugcccccacgccggcgccaaguccuucuacaagaaccucaucuggcucgucaagaagggcaacuccuaccccaagcucuccaaguccuacaucaacgacaagggcaaggagguccucguccucuggggcauccaccaccccuccaccaccgccgaccagcagucccucuaccagaacgccgacgccuacgucuucgucggcaccucccgcuacuccaagaaguucaagcccgagaucgccguccgccccaagguccgcgaccaggagggccgcaugaacuacuacuggacccucgucgagcccggcgacaagaucaccuucgaggccaccggcaaccucgucgucccccgcuacgccuucgccauggagcgcaacgccggcuccggcaucaucaucuccgacacccccguccacgacugcaacaccaccugccagacccccaagggcgccaucaacaccucccuccccuuccagaacauccaccccaucaccaucggcaagugccccaaguacgucaaguccaccaagcuccgccucgccaccggccuccgcaacguccccuccauccagucccgcggccucuucggcgccaucgccggcuucaucgagggcggcuggaccggcauggucgacggcugguacggcuaccaccaccagaacgagcagggcuccggcuacgccgccgaccucaaguccacccagaacgccaucgacaagaucaccaacaaggucaacuccgucaucgagaagaugaacacccaguucaccgccgucggcaaggaguucaaccaccucgagaagcgcaucgagaaccucaacaagaaggucgacgacggcuuccucgacaucuggaccuacaacgccgagcuccucguccuccucgagaacgagcgcacccucgacuaccacgacuccaacgucaagaaccucuacgagaagguccgcaaccagcucaagaacaacgccaaggagaucggcaacggcugcuucgaguucuaccacaagugcgacaacaccugcauggaguccgucaagaacggcaccuacgacuaccccaaguacuccgaggaggccaagcucaaccgcgaggagaucgacggcgucaagcucgaguccacccgcaucuaccagauccucgccaucuacuccaccgucgccuccucccucauccucgucgucucccucggcgccaucuccuucuggaugugcuccaacggcucccuccagugccgcaucugcaucuga

SEQ ID NO: 103083 - RNA, 1701 nt, Artificial Sequence
  derived and/or modified CDS sequence (opt2) from hemagglutinin__InfluenzaA__AEL89812
augaaggccauccucgucguccuccucuacaccuucgccaccgccaacgccgacacccucugcaucggcuaccacgccaacaacuccaccgacaccgucgacaccguccucgagaagaacgucaccgucacccacuccgucaaccuccucgaggacaagcacaacggcaagcucugcaagcuccgcggcgucgccccccuccaccucggcaagugcaacaucgccggcuggauccucggcaaccccgagugcgagucccucuccaccgccuccuccugguccuacaucgucgagaccuccuccuccgacaacggcaccugcuaccccggcgacuucaucgacuacgaggagcuccgcgagcagcucuccuccgucuccuccuucgagcgcuucgagaucuuccccaagaccuccuccuggcccaaccacgacuccaacaagggcgucaccaccgccugcccccacgccggcgccaaguccuucuacaagaaccucaucuggcucgucaagaagggcaacuccuaccccaagcucuccaaguccuacaucaacgacaagggcaaggagguccucguccucuggggcauccaccacccccccaccuccgccgaccagcagucccucuaccagaacgccgacgccuacgucuucgucggcaccucccgcuacuccaagaaguucaagcccgagaucgccauccgccccaagguccgcgaccaggagggccgcaugaacuacuacuggacccucgucgagcccggcgacaagaucaccuucgaggccaccggcaaccucgucgucccccgcuacgccuucgccauggagcgcaacgccggcuccggcaucaucaucuccgacacccccguccacgacugcaacgccaccugccagacccccaagggcgucaucaacaccucccuccccuuccagaacauccaccccaucaccaucggcaagugccccaaguacgucaaguccaccaagcuccgccucgccaccggccuccgcaacguccccuccauccagucccgcggccucuucggcgccaucgccggcuucaucgagggcggcuggaccggcauggucgacggcugguacggcuaccaccaccagaacgagcagggcuccggcuacgccgccgaccucaaguccacccagaacgccaucgacggcaucaccaacaaggucaacuccgucaucgagaagaugaacacccaguucaccgccgucggcaaggaguucaaccaccucgagaagcgcaucgagaaccucaacaagaaggucgacgacggcuuccucgacaucuggaccuacaacgccgagcuccucguccuccucgagaacgagcgcacccucgacuaccacgacuccaacgucaagaaccucuacgagaagguccgcucccagcucaagaacaacgccaaggagaucggcaacggcugcuucgaguucuaccacaagugcgacaacaccugcauggaguccgucaagaacggcaccuacgacuaccccaaguacuccgaggaggccaagcucaaccgcgaggagaucgacggcgucaagcucgaguccaccaugaucuaccagauccucgccaucuacuccaccgucgccuccucccucguccucgucgucucccucggcgccaucuccuucuggaugugcuccaacggcucccuccagugccgcaucugcaucuga

SEQ ID NO: 103084 - RNA, 1701 nt, Artificial Sequence; identical to SEQ ID NO: 102471
  derived and/or modified CDS sequence (opt2) from hemagglutinin__InfluenzaA__AEL89832

SEQ ID NO: 103085 - RNA, 1701 nt, Artificial Sequence
  derived and/or modified CDS sequence (opt2) from hemagglutinin__InfluenzaA__AEL89842
augaaggccauccucgucguccuccucuacacccucgccaccgccaacgccgacacccucugcaucggcuaccacgccaacaacuccaccgacaccgucgacaccguccucgagaagaacgucaccgucacccacuccgucaaccuccucgaggacaagcacgacggcaagcucugcaagcuccgcggcgucgccccccuccaccucggcaagugcaacaucgccggcuggauccucggcaaccccgagugcgagucccucuccaccgccuccuccugguccuacaucgucgagaccuccuccuccgacaacggcaccugcuaccccggcgacuucaucgacuacgaggagcuccgcgagcagcucuccuccgucuccuccuucgagcgcuucgagaucuuccccaagaccuccuccuggcccaaccacgacuccaacaagggcgucaccgccgccugcccccacgccggcgccaaguccuucuacaagaaccucaucuggcucgucaagaagggcaacuccuaccccaagcucuccaaguccuacaucaacgacaagggcaaggagguccucguccucuggggcauccaccaccccuccaccuccgccgaccagcagucccucuaccagaacgccgacgccuacgucuucgucggcaccucccgcuacuccaagaaguucaagcccgagaucgccauccgccccaagguccgcgaccaggagggccgcaugaacuacuacuggacccucgucgagcccggcgacaagaucaccuucgaggccaccggcaaccucgucgucccccgcuacgccuucgccauggagcgcaacgccggcuccggcaucaucaucuccgacacccccguccacgacugcaacgccaccugccagacccccaagggcgccaucaacaccucccuccccuuccagaacguccaccccaucaccaucggcaagugccccaaguacgucaaguccaccaagcuccgccucgccaccggccuccgcaacguccccuccauccagucccgcggccucuucggcgccaucgccggcuucaucgagggcggcuggaccggcauggucgacggcugguacggcuaccaccaccagaacgagcagggcuccggcuacgccgccgaccucaaguccacccagaacgccaucgacaagaucaccaacaaggucaacuccgucaucgagaagaugaacacccaguucaccgccgucggcaaggaguucaaccaccucgagaagcgcaucgagaaccucaacaagaaggucgacgacggcuuccucgacaucuggaccuacaacgccgagcuccucguccuccucgagaacgagcgcacccucgacuaccacgacuccaacgucaagaaccucuacgagaagguccgcucccagcucaagaacaacgccaaggagaucggcaacggcugcuucgaguucuaccacaagugcgacaacaccugcauggaguccgucaagaacggcaccuacgacuaccccaaguacuccgaggaggccaagcucaaccgcgaggagaucgacggcgucaagcucgaguccacccgcaucuaccagauccucgccaucuacuccaccgucgccuccucccucguccucgucgucucccucggcgccaucuccuucuggaugugcuccaacggcucccuccagugccgcaucugcaucuga

SEQ ID NO: 103086 - RNA, 1701 nt, Artificial Sequence
  derived and/or modified CDS sequence (opt2) from hemagglutinin__InfluenzaA__AEL89852
augaaggccauccucgucguccuccucuacaccuucgccaccgccaacgccgacacccucugcaucggcuaccacgccaacaacuccaccgacaccgucgacaccguccucgagaagaacgucaccgucacccacuccgucaaccuccucgaggacaagcacaacggcaagcucugcaagcuccgcggcgucgccccccuccaccucggcaagugcaacaucgccggcuggauccucggcaaccccgagugcgagucccucuccaccgccuccuccugguccuacaucgucgagaccuccuccuccgacaacggcaccugcuaccccggcgacuucaucaacuacgaggagcuccgcgagcagcucuccuccgucuccuccuucgagcgcuucgagaucuuccccaagaccuccuccuggcccaaccacgacuccaacaagggcgucaccgccgccugcccccacgccggcgccaaguccuucuacaagaaccucaucuggcucgucaagaagggcaacuccuaccccaagcucuccaaguccuacaucaacgacaagggcaaggagguccucguccucuggggcauccaccaccccuccaccuccgccgaccagcagucccucuaccagaacgccgacgccuacgucuucgucggcaccuccaaguacuccaagaaguucaagcccgagaucgccguccgccccaagguccgcgaccaggagggccgcaugaacuacuacuggacccucgucgagcccggcgacaagaucaccuucgaggccaccggcaaccuccucgucccccgcuacgccuucgccauggagcgcaacgccggcuccggcaucaucaucuccgacacccccguccacgacugcaacaccaccugccagacccccaagggcgccaucaacaccucccuccccuuccagaacauccaccccaucaccaucggcaagugccccaaguacgucaaguccaccaagcuccgccucgccaccggccuccgcaacguccccuccauccagucccgcggccucuucggcgccaucgccggcuucaucgagggcggcuggaccggcauggucgacggcugguacggcuaccaccaccagaacgagcagggcuccggcuacgccgccgaccucaaguccacccagaacgccaucgacaagaucaccaacaaggucaacuccgucaucgagaagaugaacacccaguucaccgccgucggcaaggaguucaaccaccucgagaagcgcaucgagaaccucaacaagaaggucgacgacggcuuccucgacaucuggaccuacaacgccgagcuccucguccuccucgagaacgagcgcacccucgacuaccacgacuccaacgucaagaaccucuacgagaagguccgcucccagcucaagaacaacgccaaggagaucggcaacggcugcuucgaguucuaccacaagugcgacaacaccugcauggaguccgucaagaacggcaccuacgacuaccccaaguacuccgaggaggccaagcucaaccgcgaggagaucgacggcgucaagcucgaguccacccgcaucuaccagauccucgccaucuacuccaccgucgccuccucccucguccucgucgucucccucggcgccaucuccuucuggaugugcuccaacggcucccuccagugccgcaucugcaucuga

SEQ ID NO: 103087 - RNA, 1701 nt, Artificial Sequence; identical to SEQ ID NO: 102490
  derived and/or modified CDS sequence (opt2) from hemagglutinin__InfluenzaA__AEL93568

SEQ ID NO: 103088 - RNA, 1701 nt, Artificial Sequence; identical to SEQ ID NO: 102471
  derived and/or modified CDS sequence (opt2) from hemagglutinin__InfluenzaA__AEL93578

SEQ ID NO: 103089 - RNA, 1701 nt, Artificial Sequence
  derived and/or modified CDS sequence (opt2) from hemagglutinin__InfluenzaA__AEL93598
augaaggccauccucgucguccuccucuacaccuucgccaccgccaacgccgacacccucugcaucggcuaccacgccaacaacuccaccgacaccgucgacaccguccucgagaagaacgucaccgucacccacuccgucaaccuccucgaggacaagcacaacggcaagcucugcaagcuccgcggcgucgccccccuccaccucggcaagugcaacaucgccggcuggauccucggcaaccccgagugcgagucccucuccaccgccuccuccugguccuacaucgucgagaccuccuccuccgacaacggcaccugcuaccccggcgucuucaucgacuacgaggagcuccgcgagcagcucuccuccgucuccuccuucgagcgcuucgagaucuuccccaagaccuccuccuggcccaaccacgacuccaacaagggcgucaccgccgccugcccccacgccggcgccaaguccuucuacaagaaccucaucuggcucgucaagaagggcaacuccuaccccaagcucuccaaguccuacaucaacgacaagggcaaggagguccucguccucuggggcauccaccaccccuccaccaccgccgaccagcagucccucuaccagaacgccgacgccuacgucuucgucggcaccucccgcuacuccaagaaguucaagcccgagaucgccauccgccccaagguccgcgaccaggagggccgcaugaacuacuacuggacccucgucgagcccggcgacaagaucaccuucgaggccaccggcaaccucgucgucccccgcuacgccuucgccauggagcgcaacgccggcuccggcaucaucaucuccgacacccccguccacgacugcaacaccaccugccagacccccaagggcgccaucaacaccucccuccccuuccagaacauccaccccaucaccaucggcaagugccccaaguacgucaaguccaccaagcuccgccucgccaccggccuccgcaacguccccuccauccagucccgcggccucuucggcgccaucgccggcuucaucgagggcggcuggaccggcauggucgacggcugguacggcuaccaccaccagaacgagcagggcuccggcuacgccgccgaccucaaguccacccagaacgccaucgacaagaucaccaacaaggucaacuccgucaucgagaagaugaacacccaguucaccgccgucggcaaggaguucaaccaccucgagaagcgcaucgagaaccucaacaagaaggucgacgacggcuuccucgacaucuggaccuacaacgccgagcuccucguccuccucgagaacgagcgcacccucgacuaccacgacuccaacgucaagaaccucuacgagaagguccgcaaccagcucaagaacaacgccaaggagaucggcaacggcugcuucgaguucuaccacaagugcgacaacaccugcauggaguccgucaagaacggcaccuacgacuaccccaaguacuccgaggaggccaagcucaaccgcgaggagaucgacggcgucaagcucgaguccacccgcaucuaccagauccucgccaucuacuccaccgucgccuccucccucguccucgucgucucccucggcgccaucuccuucuggaugugcuccaacggcucccuccagugccgcaucugcaucuga

SEQ ID NO: 103090 - RNA, 1701 nt, Artificial Sequence
  derived and/or modified CDS sequence (opt2) from hemagglutinin__InfluenzaA__AEL93618
augaaggccauccucgucgucaugcucuacaccuucgccaccgccaacgccgacacccucugcaucggcuaccacgccaacaacuccaccgacaccgucgacaccguccucgagaagaacgucaccgucacccacuccgucaaccuccucgaggacaagcacaacggcaagcucugcaagcuccgcggcgucgccccccuccaccucggcaagugcaacaucgccggcuggauccucggcaaccccgagugcgagucccucuccaccgccuccuccugguccuacaucgucgagaccuccuccuccgacaacggcaccugcuaccccggcgacuucaucgacuacgaggagcuccgcgagcagcucuccuccgucuccuccuucgagcgcuucgagaucuuccccaagaccuccuccuggcccaaccacgacuccaacaagggcgucaccgccgccugcccccacgccggcgccaaguccuucuacaagaaccucaucuggcucgucaagaagggcaacuccuaccccaagcucuccaaguccuacaucaacgacaagggcaaggagguccucguccucuggggcauccaccaccccuccaccaccgccgaccagcagucccucuaccagaacgccgacaccuacgucuucgucggcaccucccgcuacuccaagaaguucaagcccgagaucgccauccgccccaagguccgcgaccaggagggccgcaugaacuacuacuggacccucgucgagcccggcgacaagaucaccuucgaggccaccggcaaccucgucgucccccgcuacgccuucgccauggagcgcaacgccggcuccggcaucaucaucuccgacacccccguccacgacugcaacaccaccugccagacccccaagggcgccaucaacaccucccuccccuuccagaacauccaccccaucaccaucggcaagugccccaaguacgucaaguccaccaagcuccgccucgccaccggccuccgcaacguccccuccauccagucccgcggccucuucggcgccaucgccggcuucaucgagggcggcuggaccggcauggucgacggcugguacggcuaccaccaccagaacgagcagggcuccggcuacgccgccgaccucaaguccacccagaacgccaucgacaagaucaccaacaaggucaacuccgucaucgagaagaugaacacccaguucaccgccgucggcaaggaguucaaccaccucgagaagcgcaucgagaaccucaacaagaaggucgacgacggcuuccucgacaucuggaccuacaacgccgagcuccucguccuccucgagaacgagcgcacccucgacuaccacgacuccaacgucaagaaccucuacgagaagguccgcaaccagcucaagaacaacgccaaggagaucggcaacggcugcuucgaguucuaccacaagugcgacaacaccugcauggaguccgucaagaacggcaccuacgacuaccccaaguacuccgaggaggccaagcucaaccgcgaggagaucgacggcgucaagcucgaguccacccgcaucuaccagauccucgccaucuacuccaccgucgccuccucccucguccucgucgucucccucggcgccaucuccuucuggaugugcuccaacggcucccuccagugccgcaucugcaucuga

SEQ ID NO: 103091 - RNA, 1701 nt, Artificial Sequence; identical to SEQ ID NO: 102471
  derived and/or modified CDS sequence (opt2) from hemagglutinin__InfluenzaA__AEL93628

SEQ ID NO: 103092 - RNA, 1701 nt, Artificial Sequence; identical to SEQ ID NO: 102906
  derived and/or modified CDS sequence (opt2) from hemagglutinin__InfluenzaA__AEL93638

SEQ ID NO: 103093 - RNA, 1701 nt, Artificial Sequence
  derived and/or modified CDS sequence (opt2) from hemagglutinin__InfluenzaA__AEL94870
augaaggccauccucgucguccuccucuacaccuucgccaccgccaacgccgacacccucugcaucggcuaccacgccaacaacuccaccgacaccgucgacaccguccucgagaagaacgucaccgucacccacuccgucaaccuccucgaggacaagcacaacggcaagcucugcaagcuccgcggcgucgccccccuccaccucggcaagugcaacaucgccggcuggauccucggcaaccccgagugcgagucccucuccaccgccuccuccugguccuacaucgucgagaccuccuccuccgacaacggcaccugcuaccccggcgacuucaucgacuacgaggagcuccgcgagcagcucuccuccgucuccuccuucgagcgcuucgagaucuuccccaagaccuccuccuggcccgaccacgacuccaacaagggcgucaccgccgccugcccccacgccggcgccaaguccuucuacaagaaccucaucuggcucgucaagaagggcaacuccuaccccaagcucuccaaguccuacaucaacgacaagggcaaggagguccucguccucuggggcauccaccaccccuccaccuccgccgaccagcagucccucuaccagaacgccgacgccuacgucuucgucggcaccucccgcuacuccaagaaguucaagcccgagaucgccauccgccccaagguccgcgaccaggagggccgcaugaacuacuacuggacccucgucgagcccggcgacaagaucaccuucgaggccaccggcaaccucgucgucccccgcuacgccuucgccauggagcgcaacgccggcuccggcaucaucaucuccgacacccccgcccacgacugcaacaccaccugccagacccccaagggcgccaucaacaccucccuccccuuccagaacauccaccccaucaccaucggcaagugccccaaguacgucaaguccaccaagcuccgccucgccaccggccuccgcaacguccccuccauccagucccgcggccucuucggcgccaucgccggcuucaucgagggcggcuggaccggcauggucgacggcugguacggcuaccaccaccagaacgagcagggcuccggcuacgccgccgaccucaaguccacccagaacgccaucgacaagaucaccaacaaggucaacuccgucaucaagaagaugaacacccaguucaccgccgucggcaaggaguucaaccaccucgagaagcgcaucgagaaccucaacaagaaggucgacgacggcuuccucgacaucuggaccuacaacgccgagcuccucguccuccucgagaacgagcgcacccucgacuaccacgacuccaacgucaagaaccucuacgagaagguccgcucccagcucaagaacaacgccaaggagaucggcaacggcugcuucgaguucuaccacaagugcgacaacaccugcauggaguccgucaagaacggcaccuacgacuaccccaaguacuccgaggaggccaagcucaaccgcgaggagaucgacggcgucaagcucgaguccacccgcaucuaccagauccucgccaucuacuccaccgucgccuccucccucguccucgucgucucccucggcgccaucuccuucuggaugugcuccaacggcucccuccagugccgcaucugcaucuga

SEQ ID NO: 103094 - RNA, 1701 nt, Artificial Sequence
  derived and/or modified CDS sequence (opt2) from hemagglutinin__InfluenzaA__AEL95426
augaaggccauccucgucguccuccucuacaccuucgccaccgccaacgccgacacccucugcaucggcuaccacgccaacaacuccaccgacaccgucgacaccguccucgagaagaacgucaccgucacccacuccgucaaccuccucgaggacaagcacaacggcaagcucugcaagcuccgcggcgucgccccccuccaccucggcaagugcaacaucgccggcuggauccucggcaaccccgagugcgagucccucuccaccgccuccuccugguccuacaucgucgagaccuccuccuccgacaacggcaccugcuaccccggcgacuucaucgacuacgaggagcuccgcgagcagcucuccuccgucuccuccuucgagcgcuucgagaucuuccccaagaccuccuccuggcccaaccacgacuccaacaagggcgucaccgccgccugcccccacgccggcgccaaguccuucuacaagaaccucaucuggcucgucaagaagggcaacuccuaccccaagcucuccaaguccuacaucaacgacaagggcaaggagguccucguccucuggggcauccaccaccccuccaccaccgccgaccagcagucccucuaccagaacgccgacaccuacgucuucgucggcaccucccgcuacuccaagaaguucaagcccgagaucgccacccgccccaagguccgcgaccaggagggccgcaugaacuacuacuggacccucgucgagcccggcgacaagaucaccuucgaggccaccggcaaccucgucgucccccgcuacgccuucgccauggagcgcaacgccggcuccggcaucaucaucuccgacacccccguccacgacugcaacaccaccugccagacccccaagggcgccaucaacaccucccuccccuuccagaacauccaccccaucaccaucggcaagugccccaaguacgucaaguccaccaagcuccgccucgccaccggccuccgcaacguccccuccauccagucccgcggccucuucggcgccaucgccggcuucaucgagggcggcuggaccggcauggucgacggcugguacggcuaccaccaccagaacgagcagggcuccggcuacgccgccgaccucaaguccacccagaacgccaucgacaagaucaccaacaaggucaacuccgucaucgagaagaugaacacccaguucaccgccgucggcaaggaguucaaccaccucgagaagcgcaucgagaaccucaacaagaaggucgacgacggcuuccucgacaucuggaccuacaacgccgagcuccucguccuccucgagaacgagcgcacccucgacuaccacgacuccaacgucaagaaccucuacgagaagguccgcaaccagcucaagaacaacgccaaggagaucggcaacggcugcuucgaguucuaccacaagugcgacaacaccugcauggaguccgucaagaacggcaccuacgacuaccccaaguacuccgaggaggccaagcucaaccgcgaggagaucgacggcgucaagcucgaguccacccgcaucuaccagauccucgccaucuacuccaccgucgccuccucccucguccucgucgucucccucggcgccaucuccuucuggaugugcuccaacggcucccuccagugccgcaucugcaucuga

SEQ ID NO: 103095 - RNA, 1701 nt, Artificial Sequence
  derived and/or modified CDS sequence (opt2) from hemagglutinin__InfluenzaA__AEL97631
augaaggccauccucgucguccuccucuacaccuucgccaccgccaacgccgacacccucugcaucggcuaccacgccaacaacuccaccgacaccgucgacaccguccucgagaagaacgucaccgucacccacuccgucaacauccucgaggacaagcacaacggcaagcucugcaagcuccgcggcgucgccccccuccaccucggcaagugcaacaucgccggcuggauccucggcaaccccgagugcgagucccucuccaccgccuccuccugguccuacaucgucgagaccuccuccuccgacaacggcaccugcuaccccggcgacuucaucgacuacgaggagcuccgcgagcagcucuccuccgucuccuccuucaagcgcuucgagaucuuccccaagaccuccuccuggcccaaccacgacuccaacaagggcgucaccgccgccugcccccacgccggcgccaaguccuucuacaagaaccucaucuggcucgucaagaagggcaacuccuaccccaagcucuccaaguccuacaucaacgacaagggcaaggagguccucguccucuggggcauccaccaccccuccaccuccgccgaccagcagucccucuaccagaacgccgacgccuacgucuucgucggcaccucccgcuacuccaagaaguucaagcccgagaucgccauccgccccaagguccgcgaccaggagggccgcaugaacuacuacuggacccucgucgagcccggcgacaagaucaccuucgaggccaccggcaaccucgucgucccccgcuacgccuucgccauggagcgcaacgccggcuccggcaucaucaucuccgacacccccguccacgacugcaacaccaccugccagacccccaagggcgccaucaacaccucccuccccuuccagaacauccaccccaccaccaucggcaagugccccaaguacgucaaguccaccaagcuccgccucgccaccggccuccgcaacguccccuccauccagucccgcggccucuucggcgccaucgccggcuucaucgagggcggcuggaccggcauggucgacggcugguacggcuaccaccaccagaacgagcagggcuccggcuacgccgccgaccucaaguccacccagaacgccaucgacgagaucaccaacaaggucaacuccgucaucgagaagaugaacacccaguucaccgccgucggcaaggaguucaaccaccucgagaagcgcaucgagaaccucaacaagaaggucgacgacggcuuccucgacaucuggaccuacaacgccgagcuccucguccuccucgagaacgagcgcacccucgacuaccacgacuccaacgucaagaaccucuacgagaagguccgcucccagcucaagaacaacgccaaggagaucggcaacggcugcuucgaguucuaccacaagugcgacaacaccugcauggaguccgucaagaacggcaccuacgacuaccccaaguacuccgaggaggccaagcucaaccgcgaggagaucgacggcgucaagcucgaguccacccgcaucuaccagauccucgccaucuacuccaccgucgccuccucccucguccucgucgucucccucggcgccaucuccuucuggaugugcuccaacggcucccuccagugccgcaucugcaucuga

SEQ ID NO: 103096 - RNA, 1701 nt, Artificial Sequence
  derived and/or modified CDS sequence (opt2) from hemagglutinin__InfluenzaA__AEL99664
augaaggccauccucgucguccuccucuacaccuucgccaccgccaacgccgacacccucugcaucggcuaccacgccaacaacuccaccgacaccgucgacaccauccucgagaagaacgucaccgucacccacuccgucaaccuccucgaggacaagcacaacggcaagcucugcaagcuccgcggcgucgccccccuccaccucggcaagugcaacaucgccggcuggauccucggcaaccccgagugcgagucccucuccaccgccuccuccugguccuacaucgucgagaccuccuccuccgacaacggcaccugcuaccccggcgacuucaucgacuacgaggagcuccgcgagcagcucuccuccgucuccuccuucaagcgcuucgagaucuuccccaagaccuccuccuggcccaaccacgacuccaacaagggcgucaccgccgccugcccccacgccggcgccaaguccuucuacaagaaccucaucuggcucgucaagaagggcaacuccuaccccaagcucuccaaguccuacaucaacgacaagggcaaggagguccucguccucuggggcauccaccaccccuccaccuccgccgaccagcagucccucuaccagaacgccgacgccuacgucuucgucggcaccucccgcuacuccaagaaguucaagcccgagaucgccauccgccccaagguccgcgaccaggagggccgcaugaacuacuacuggacccucgucgagcccggcgacaagaucaccuucgaggccaccggcaaccucgucgucccccgcuacgccuucgccauggagcgcaacgccggcuccggcaucaucaucuccgacaccuccguccacgacugcaacaccaccugccagacccccaagggcgccaucaacaccucccuccccuuccagaacauccaccccaucaccaucggcaagugccccaaguacgucaaguccaccaagcuccgccucgccaccggccuccgcaacguccccuccauccagucccgcggccucuucggcgccaucgccggcuucaucgagggcggcuggaccggcauggucgacggcugguacggcuaccaccaccagaacgagcagggcuccggcuacgccgccgaccucaaguccacccagaacgccaucgacgagaucaccaacaaggucaacuccgucaucgagaagaugaacacccaguucaccgccgucggcaaggaguucaaccaccucgagaagcgcaucgagaaccucaacaagaaggucgacgacggcuuccucgacaucuggaccuacaacgccgagcuccucguccuccucgagaacgagcgcacccucgacuaccacgacuccaacgucaagaaccucuacgagaagguccgcucccagcucaagaacaacgccaaggagaucggcaacggcugcuucgaguucuaccacaagugcgacaacaccugcauggaguccgucaagaacggcaccuacgacuaccccaaguacuccgaggaggccaagcucaaccgcgaggagaucgacggcgucaagcucgaguccacccgcaucuaccagauccucgccaucuacuccaccgucgccuccucccucguccucgucgucucccucggcgccaucuccuucuggaugugcuccaacggcucccuccagugccgcaucugcaucuga

SEQ ID NO: 103097 - RNA, 1701 nt, Artificial Sequence
  derived and/or modified CDS sequence (opt2) from hemagglutinin__InfluenzaA__AEL99674
augaaggccauccucgucguccuccucuacaccuucgccaccgccaacgccgacacccucugcaucggcuaccacgccaacaacuccaccgacaccgucgacaccguccucgagaagaacgucaccgucacccacuccgucaaccuccucgaggacaagcacaacggcaagcucugcaagcuccgcggcgucgccccccuccaccucggcaagugcaacaucgccggcuggauccucggcaaccccgagugcgagucccucuccaccgccuccuccugguccuacaucgucgagaccuccuccuccgacaacggcaccugcuaccccggcgacuucaucgacuacgaggagcuccgcgagcagcucuccuccgucuccuccuucgagcgcuucgagaucuuccccaagaccuccuccuggcccaaccacgacuccaacaagggcgucaccgccgccugcccccacgccggcgccaaguccuucuacaagaaccucaucuggcucgucaagaagggcaacuccuaccccaagcucuccaaguccuacaucaacgacaagggcaaggagguccucguccucuggggcauccaccaccccuccaccuccgccgaccagcagucccucuaccagaacgccgacgccuacgucuucgucggcaccucccgcuacuccaagaaguucaagcccgagaucgccauccgccccaagguccgcgaccaggagggccgcaugaacuacuacuggacccucgucgagcccggcgacaagaucaucuucgaggccaccggcaaccucgucgucccccgcuacgccuucgccauggagcgcaacgccggcuccggcaucaucaucuccgacacccccguccacgacugcaacaccaccugccagacccccaagggcgccaucaacaccucccuccccuuccagaacauccaccccaucaccaucggcaagugccccaaguacgucaaguccaccaagcuccgccucgccaccggccuccgcaacguccccuccauccagucccgcggccucuucggcgccaucgccggcuucaucgagggcggcuggaccggcauggucgacggcugguacggcuaccaccaccagaacgagcagggcuccggcuacgccgccgaccucaaguccacccagaacgccaucgacgagaucaccaacaaggucaacuccgucaucgagaagaugaacacccaguucaccgccgucggcaaggaguucaaccaccucgagaagcgcaucgagaaccucaacaagaaggucgacgacggcuuccucgacaucuggaccuacaacgccgagcuccucguccuccucgagaacgagcgcacccucgacuaccacgacuccaacgucaagaaccucuacgagaagguccgcucccagcucaagaacaacgccaaggagaucggcaacggcugcuucgaguucuaccacaagugcgacaacaccugcauggaguccgucaagaacggcaccuacgacuaccccaaguacuccgaggaggccaagcucaaccgcgaggagaucgacggcgucaagcucgaguccacccgcaucuaccagauccucgccaucuacuccaccgucgccuccucccucguccucgucgucucccucggcgccaucuccuucuggaugugcuccaacggcucccuccagugccgcaucugcaucuga

SEQ ID NO: 103098 - RNA, 1689 nt, Artificial Sequence; identical to SEQ ID NO: 102307
  derived and/or modified CDS sequence (opt2) from hemagglutinin__InfluenzaA__AEM53455

SEQ ID NO: 103099 - RNA, 1689 nt, Artificial Sequence; identical to SEQ ID NO: 97656
  derived and/or modified CDS sequence (opt2) from hemagglutinin__InfluenzaA__AEM53468

SEQ ID NO: 103100 - RNA, 1698 nt, Artificial Sequence; identical to SEQ ID NO: 98151
  derived and/or modified CDS sequence (opt2) from hemagglutinin__InfluenzaA__AEM60037

SEQ ID NO: 103101 - RNA, 1698 nt, Artificial Sequence
  derived and/or modified CDS sequence (opt2) from hemagglutinin__InfluenzaA__AEM60058
augaaggucaagcuccucguccuccucugcaccuucaccgccaccuacgccgacaccaucugcaucggcuaccacgccaacaacuccaccgacaccgucgacaccguccucgagaagaacgucaccgucacccacuccgucaaccuccucgaggagucccacaacggcaagcucugccuccucaagggcaucgccccccuccagcucggcaacugcuccgucgccggcuggauccucggcaaccccgagugcgagcuccucaucuccaaggaguccugguccuacaucgucgagacccccaaccccgagaacggcaccugcuaccccggcuacuucgccgacuacgaggagcuccgcgagcagcucuccuccgucuccuccuucgagcgcuucgagaucuuccccaaggaguccuccuggcccaaccacaccgucaccggcgucuccgccuccugcucccacaacggcgaguccuccuucuaccgcaaccuccucuggcucaccggcaagaacggccucuaccccaaccucuccaaguccuacgccaacaacaaggagaaggacguccucguccucuggggcguccaccacccccccaacaucggcgaccagcgcgcccucuaccacaccgagaacgccuacgucuccgucgucuccucccacuacucccgccgcuucacccccgagaucgccaagcgccccaagguccgcgaccaggagggccgcaucaacuacuacuggacccuccucgagcccggcgacaccaucaucuucgaggccaacggcaaccucaucgccccccgcuucgccuucgcccucggccgcggcuucggcuccggcaucaucaccuccaacgcccccauggacaagugcgacgccaagugccagaccccccagggcgccaucaacuccucccuccccuuccagaacguccaccccgucaccaucggcgagugccccaaguacguccgcuccaccaagcuccgcauggucaccggccuccgcaacauccccuccauccagucccgcggccucuucggcgccaucgccggcuucaucgagggcggcuggaccggcauggucgacggcugguacggcuaccaccaccagaacgagcagggcuccggcuacgccgccgaccagaaguccacccagaacgccaucaacggcaucaccaacaaggucaacuccgucaucgagaagaugaacacccaguucaccgccgucggcaaggaguucaacaagcucgagcgccgcauggagaaccucaacaagaaggucgacgacggcuuccucgacaucuggaccuacaacgccgagcuccucguccuccucgagaacgagcgcacccucgacuuccacgacuccaacgucaagaaccucuacgagaaggucaagucccagcucaagaacaacgccaaggagaucggcaacggcugcuucgaguucuaccacaagugcaacgacgagugcauggaguccgucaagaacggcaccuacgacuaccccaaguacuccgaggaguccaagcucaaccgcgagaagaucgacggcgucaagcucgaguccaugggcgucuaccagauccucgccaucuacuccaccgucgccuccucccucguccuccucgucucccucggcgccaucuccuucuggaugugcuccaacggcucccuccagugccgcaucugcaucuga

SEQ ID NO: 103102 - RNA, 1701 nt, Artificial Sequence
  derived and/or modified CDS sequence (opt2) from hemagglutinin__InfluenzaA__AEM60069
augaagaccaucaucgcccucuccuacaucuucugccucgucuucgcccagaagcuccccggcaacgacaacuccaccgccacccucugccucggccaccacgccguccccaacggcacccucgucaagaccaucaccaacgaccagaucgaggucaccaacgccaccgagcucguccaguccuccuccaccggccgcaucugcgacuccccccaccgcauccucgacggcaagaacugcacccucaucgacgcccuccucggcgacccccacugcgacggcuuccagaacgagaagugggaccucuucgucgagcgcuccaaggccuacuccaacugcuaccccuacgacguccccgacuacgccucccuccgcucccucgucgccuccuccggcacccucgaguucaucaacgaggacuucaacuggaccggcgucacccaguccggcggcuccuacgccugcaagcgcggcuccgucaaguccuucuucucccgccucaacuggcuccacgaguccgaguacaaguaccccgcccucaacgucaccaugcccaacaacggcaaguucgacaagcucuacaucuggggcguccaccaccccuccaccgaccgcgagcagaccaaccucuacguccgcgccuccggccgcgucaccgucuccaccaagcgcucccagcagaccgucauccccaacaucggcucccgccccuggguccgcggccucuccucccgcaucuccaucuacuggaccaucgucaagcccggcgacauccuccucaucaacuccaccggcaaccucaucgccccccgcggcuacuucaagauccgcaccggcaaguccuccaucaugcgcuccgacgcccccaucggcaccugcuccuccgagugcaucacccccaacggcuccauccccaacgacaagcccuuccagaacgucaacaagaucaccuacggcgccugcccccgcuacgucaagcagaacacccucaagcucgccaccggcaugcgcaacguccccgagaagcagacccgcggcaucuucggcgccaucgccggcuucaucgagaacggcugggagggcauggucgacggcugguacggcuuccgccaccagaacuccgagggcaccggccaggccgccgaccucaaguccacccaggccgccaucgaccagaucaacggcaagcucaaccgccucaucgagaagaccaacgagaaguuccaccagaucgagaaggaguucuccgaggucgagggccgcauccaggaccucgagaaguacgucgaggacaccaagaucgaccucugguccuacaacgccgagcuccucgucgcccucgagaaccagcacaccaucgaccucaccgacuccgagaugaacaagcucuucgagaagacccgcaagcagcuccgcgagaacgccgaggacaugggcaacggcugcuucaagaucuaccacaagugcgacaacgccugcaucggcuccauccgcaacggcaccuacgaccacgacgucuaccgcgacgaggcccucaacaaccgcuuccagaucaagggcgucgagcucaaguccggcuacaaggacuggauccucuggaucuccuucgccaucuccugcuuccuccucugcgucguccuccucggcuucaucaugugggccugccagaagggcaacauccgcugcaacaucugcaucuga

SEQ ID NO: 103103 - RNA, 1701 nt, Artificial Sequence
  derived and/or modified CDS sequence (opt2) from hemagglutinin__InfluenzaA__AEM92308
augaaggccauccucgucguccuccucuacaccuucgccaccgccaacgccgacacccucugcaucggcuaccacgccaacaacuccaccgacaccgucgacaccguccucgagaagaacgucaccgucacccacuccgucaaccuccucgaggacaagcacaacggcaagcucugcaagcuccgcggcgucgccccccuccaccucggcaagugcaacaucgccggcuggauccucggcaaccccgagugcgagucccucuccaccgccuccuccugguccuacaucgucgagaccuccuccuccgacaacggcaccugcuaccccggcgacuucaucgacuacgaggagcuccgcgagcagcucuccuccgucuccuccuucgagcgcuucgagaucuuccccaagaccuccuccuggcccaaccacgacuccaacaagggcgucaccgccgccugcccccacgccggcgccaaguccuucuacaagaaccucaucuggcucgucaagaagcgcaacuccuaccccaagcucuccaaguccuacaucaacgacaagggcaaggagguccucguccucuggggcauccaccaccccuccaccuccgccgaccagcagucccucuaccagaacgccgacgccuacgucuucgucggcuccucccgcuacuccaagaaguucaagcccgagaucgccauccgccccaagguccgcgaccaggagggccgcaugaacuacuacuggacccucgucgagcccggcgacaagaucaccuucgaggccaccgagaaccucgucgucccccgcuacgccuucgccauggagcgcaacgccggcuccggcaucaucaucuccgacacccccguccacgacugcaacaccaccugccagacccccaagggcgccaucaacaccucccuccccuuccagaacauccaccccaucaccaucggcaagugccccaaguacgucaaguccaccaagcuccgccucgccaccggccuccgcaacguccccuccauccagucccgcggccucuucggcgccaucgccggcuucaucgagggcggcuggaccggcauggucgacggcugguacggcuaccaccaccagaacgagcagggcuccggcuacgccgccgaccucaaguccacccagaacgccaucgacgagaucaccaacaaggucaacuccgucaucgagaagaugaacacccaguucaccgccgucggcaaggaguucaaccaccucgagaagcgcaucgagaaccucaacaagaaggucgacgacggcuuccucgacaucuggaccuacaacgccgagcuccucguccuccucgagaacgagcgcacccucgacuaccacgacuccaacgucaagaaccucuacgagaagguccgcucccagcucaagaacaacgccaaggaggucggcaacggcugcuucgaguucuaccacaagugcgacaacaccugcauggaguccgucaagaacggcaccuacgacuaccccaaguacuccgaggaggccaagcucaaccgcgaggagaucgacggcgucaagcucgaguccacccgcaucuaccagauccucgccaucuacuccaccgccgccuccucccucguccucgucgucucccucggcgccaucuccuucuggaugugcuccaacggcucccuccagugccgcaucugcaucuga

SEQ ID NO: 103104 - RNA, 1701 nt, Artificial Sequence
  derived and/or modified CDS sequence (opt2) from hemagglutinin__InfluenzaA__AEM92318
augaaggccauccucgucguccuccucuacaccuucgccaccgccaacgccgacacccucugcaucggcuaccacgccaacaacuccaccgacaccgucgacaccguccucgagaagaacgucaccgucacccacuccgucgaccuccucgaggacaagcacaacggcaagcucugcaagcuccgcggcgucgccccccuccaccucggcaagugcaacaucgccggcuggauccucggcaaccccgagugcgagucccucuccaccgccuccuccugguccuacaucgucgagaccuccuccuccgacaacggcaccugcuaccccggcgacuucaucgacuacgaggagcuccgcgagcagcucuccuccgucuccuccuucgagcgcuucgagaucuuccccaagaccuccuccuggcccaaccacgacuccaacaagggcgucaccgccgccugcccccacgccggcgagaaguccuucuacaagaaccucaucuggcucgucaagaagggcaacuccuaccccaagcucaacaaguccuacaucaacgacaagggcaaggagguccucguccucuggggcauccaccaccccuccaccuccgccgaccagcagucccucuaccagaacgccgacgccuacgucuucgucggcaccucccgcuacuccaagaaguucaagcccgagaucgccauccgccccaagguccgcgaccaggagggccgcaugaacuacuacuggacccucgucgagcccggcgacaagaucaccuucgaggccaccggcaaccucgucgucccccgcuacgccuucgccauggagcgcaacgccggcuccggcaucaucaucuccgacacccccauccacgacugcaacaccaccugccagacccccaagggcgccaucaacaccucccuccccuuccagaacauccaccccaucaccaucggcaagugccccaaguacgucaaguccaccaagcuccgccucgccaccggccuccgcaacguccccuccauccagucccgcggccucuucggcgccaucgccggcuucaucgagggcggcuggaccggcauggucgacggcugguacggcuaccaccaccagaacgagcagggcuccggcuacgccgccgaccucaaguccacccagaacgccaucgacgagaucaccaacaaggucaacuccgucaucgagaagaugaacacccaguucaccgccgucggcaaggaguucaaccaccucgagaagcgcaucgagaaccucaacaagaaggucgacgacggcuuccucgacaucuggaccuacaacgccgagcuccucguccuccucgagaacgagcgcacccucgacuaccacgacuccaacgucaagaaccucuacgagaagguccgcaaccagcucaagaacaacgccaaggagaucggcaacggcugcuucgaguucuaccacaagugcgacaacaccugcauggaguccgucaagaacggcaccuacgacuaccccaaguacuccgaggaggccaagcucaaccgcgaggagaucgacggcgucaagcucgaguccacccgcaucuaccagauccucgccaucuacuccaccgucgccuccucccucguccucgucgucucccucggcgccaucuccuucuggaugugcuccaacggcucccuccagugccgcaucugcaucuga

SEQ ID NO: 103105 - RNA, 1701 nt, Artificial Sequence
  derived and/or modified CDS sequence (opt2) from hemagglutinin__InfluenzaA__AEM92328
augaaggccauccucgucguccuccucuacaccuucgccaccgccaacgccgacacccucugcaucggcuaccacgccaacaacuccaccgacaccgucgacaccguccucgagaagaacgucaccgucacccacuccgucaaccuccucgaggacaagcacaacggcaagcucugcaagcuccgcggcgucgccccccuccaccucggcaagugcaacaucgccggcuggauccucggcaaccccgagugcgagucccucuccaccgccuccuccugguccuacaucgucgagaccuccuccuccgacaacggcaccugcuaccccggcgacuucaucgacuacgaggagcuccgcgagcagcucuccuccgucuccuccuucgagcgcuucgagaucuuccccaagaccuccuccuggcccaaccacgacuccaacaagggcgucaccgccgccugcccccacgccggcgccaaguccuucuacaagaaccucaucuggcucgucaagaagggcaacuccuaccccaagcucaacaucuccuacaucaacgacaagggcaaggagguccucguccucuggggcauccaccaccccuccaccaccgccgaccagcagucccucuaccagaacgccgacgccuacgucuucgucggcaccucccgcuacuccaagaaguucaagcccgagaucgccauccgccccaagguccgcgaccaggagggccgcaugaacuacuacuggacccucgucgagcccggcgacaagaucaccuucgaggccaccggcaaccucgucgucccccgcuacgccuucgccauggagcgcaacgccggcuccggcaucaucaucuccgacacccccguccacgacugcaacaccaccugccagacccccaagggcgccaucaacaccucccuccccuuccagaacauccaccccaucaccaucggcaagugccccaaguacgucaaguccaccaagcuccgccucgccaccggccuccgcaacguccccuccauccagucccgcggccucuucggcgccaucgccggcuucaucgagggcggcuggaccggcauggucgacggcugguacggcuaccaccaccagaacgagcagggcuccggcuacgccgccgaccucaaguccacccagaacgccaucgacaagaucaccaacaaggucaacuccgucaucgagaagaugaacacccaguucaccgccgucggcaaggaguucaaccaccucgagaagcgcaucgagaaccucaacaagaaggucgacgacggcuuccucgacaucuggaccuacaacgccgagcuccucguccuccucgagaacgagcgcacccucgacuaccacgacuccaacgucaagaaccucuacgagaagguccgcaaccagcucaagaacaacgccaaggagaucggcaacggcugcuucgaguucuaccacaagugcgacaacaccugcauggaguccgucaagaacggcaccuacgacuaccccaaguacuccgaggaggccaagcucaaccgcgaggagaucgacggcgucaagcucgaguccacccgcaucuaccagauccucgccaucuacuccaccgucgccuccucccucguccucgucgucucccucggcgccaucuccuucuggaugugcuccaacggcucccuccagugccgcaucugcaucuga

SEQ ID NO: 103106 - RNA, 1701 nt, Artificial Sequence
  derived and/or modified CDS sequence (opt2) from hemagglutinin__InfluenzaA__AEM92348
augaaggccauccucgucguccuccucuacaccuucgccaccgccaacgccgacacccucugcaucggcuaccacgccaacaacuccaccgacaccgucgacaccguccucgagaagaacgucaccgucacccacuccgucgaccuccucgaggacaagcacaacggcaagcucugcaagcuccgcggcgucgccccccuccaccucggcaagugcaacaucgccggcuggauccucggcaaccccgagugcgagucccucuccaccgccuccuccugguccuacaucgucgagaccuccuccuccgacaacggcaccugcuaccccggcgacuucaucgacuacgaggagcuccgcgagcagcucuccuccgucuccuccuucgagcgcuucgagaucuuccccaagaccuccuccuggcccaaccacgacuccaacaagggcgucaccgccgccugcccccacgccggcgagaaguccuucuacaagaaccucaucuggcucgucaagaagggcaacuccuaccccaagcucaacaaguccuacaucaacgacaagggcaaggagguccucguccucuggggcauccaccaccccuccaccuccgccgaccagcagucccucuaccagaacgccgacgccuacgucuucgucggcaccucccgcuacuccaagaaguucaagcccgagaucgccauccgccccaagguccgcgaccaggagggccgcaugaacuacuacuggacccucgucgagcccggcgacaagaucaccuucgaggccaccggcaaccucgucgucccccgcuacgccuucgccauggagcgcaacgccggcuccggcaucaucaucuccgacacccccauccacgacugcaacaccaccugccagacccccaagggcgccaucaacaccucccuccccuuccagaacauccaccccaucaccaucggcaagugccccaaguacgucaaguccaccaagcuccgccucgccaccggccuccgcaacguccccuccauccagucccgcggccucuucggcgccaucgccggcuucaucgagggcggcuggaccggcauggucgacggcugguacggcuaccaccaccagaacgagcagggcuccggcuacgccgccgaccucaaguccacccagaacgccaucgacgagaucaccaacaaggucaacuccgucaucgagaagaugaacacccaguucaccgccgucggcaaggaguucaaccaccucgagaagcgcaucgagaaccucaacaagaaggucgacgacggcuuccucgacaucuggaccuacaacgccgagcuccucguccuccucgagaacgagcgcacccucgacuaccacgacuccaacgucaagaaccucuacgagaaggucaagucccagcucaagaacaacgccaaggagaucggcaacggcugcuucgaguucuaccacaagugcgacaacaccugcauggaguccgucaagaacggcaccuacgacuaccccaaguacuccgaggaggccaagcucaaccgcgagaagaucgacggcgucaagcucgaguccacccgcaucuaccagauccucgccaucuacuccaccgucgccuccucccucguccucgucgucucccucggcgccaucuccuucuggaugugcuccaacggcucccuccagugccgcaucugcaucuga

SEQ ID NO: 103107 - RNA, 1701 nt, Artificial Sequence
  derived and/or modified CDS sequence (opt2) from hemagglutinin__InfluenzaA__AEM92358
augaaggccauccucgucguccuccucuacaccuucgccaccgccaacgccgacacccucugcaucggcuaccacgccaacaacuccaccgacaccgucgacaccguccucgagaagaacgucaccgucacccacuccgucaaccuccucgaggacaagcacaacggcaagcucugcaagcuccgcggcgucgccccccuccaccucggcaagugcaacaucgccggcuggauccucggcaaccccgagugcgagucccucuccaccgccuccuccugguccuacaucgucgagaccuccuccuccgacaacggcaccugcuaccccggcgacuucaucaacuacgaggagcuccgcgagcagcucuccuccgucuccuccuucgagcgcuucgagaucuuccccaagaccuccuccuggcccaaccacgacuccaacaagggcgucaccgccgccugcccccacgccggcgccaaguccuucuacaagaaccucaucuggcucgucaaggagggcaacuccuaccccaagcucuccaaguccuacaucaacgacaagggcaaggagguccucguccucuggggcauccaccaccccuccaccaccaccgaccagcagucccucuaccagaacgccgacgccuacgucuucgucggcaccucccgcuacuccaagaaguucaagcccgagaucgccauccgccccaagaugcgcgaccaggagggccgcaugaacuacuacuggacccucgucgagcccggcgacaagaucaccuucgaggccaccggcaaccucgucgucccccgcuacgccuucgccauggagcgcaacgccggcuccggcaucaucaucuccgacacccccguccacgacugcaacaccaccugccagacccccaagggcgccaucaacaccucccuccccuuccagaacauccaccccaucaccaucggcaagugccccaaguacgucaaguccaccaagcuccgccucgccaccggccuccgcaacguccccuccauccagucccgcggccucuucggcgccaucgccggcuucaucgagggcggcuggaccggcauggucgacggcugguacggcuaccaccaccagaacgagcagggcuccggcuacgccgccgaccucaaguccacccagaacgccaucgacaagaucaccaacaaggucaacuccgucaucgagaagaugaacacccaguucaccgccgucggcaaggaguucaaccaccucgagaagcgcaucgagaaccucaacaagaaggucgacgacggcuuccucgacaucuggaccuacaacgccgagcuccucguccuccucgagaacgagcgcacccucgacuaccacgacuccaacgucaagaaccucuacgagaagguccgcaaccagcucaagaacaacgccaaggagaucggcaacggcugcuucgaguucuaccacaagugcgacaacaccugcauggaguccgucaagaacggcaccuacgacuaccccaaguacuccgaggaggccaagcucaaccgcgaggagaucgacggcgucaagcucgaguccacccgcaucuaccagauccucgccaucuacuccaccgucgccuccucccucguccucgucgucucccucggcgccaucuccuucuggaugugcuccaacggcucccuccagugccgcaucugcaucuga

SEQ ID NO: 103108 - RNA, 1701 nt, Artificial Sequence
  derived and/or modified CDS sequence (opt2) from hemagglutinin__InfluenzaA__AEM92368
augaaggccauccucgucguccuccucuacaccuucgccaccgccaacgccgacacccucugcaucggcuaccacgccaacaacuccaccgacaccgucgacaccguccucgagaagaacgucaccgucacccacuccgucaaccuccucgaggacaagcacaacggcaagcucugcaagcuccgcggcgucgccccccuccaccucggcaagugcaacaucgccggcuggauccucggcaaccccgagugcgagucccucuccaccgccuccuccugguccuacaucgucgagaccuccuccuccgacaacggcaccugcuaccccggcgacuucaucgacuacgaggagcuccgcgagcagcucuccuccgucuccuccuucgagcgcuucgagaucuuccccaagaccuccuccuggcccaaccacgacuccaacaagggcgucaccgccgccugcccccacgccggcgccaaguccuucuacaagaaccucaucuggcucgucaagaagggcaacuccuaccccaagcucaacaaguccuacaucaacgacaagggcaaggagguccucguccucuggggcauccaccaccccuccaccaccgccgaccagcagucccucuaccagaacgccgacgccuacgucuucgucggcaccucccgcuacuccaagaaguucaagcccgagaucgccauccgccccaagguccgcgaccaggagggccgcaugaacuacuacuggacccucgucgagcccggcgacaagaucaccuucgaggccaccggcaaccucgucgucccccgcuacgccuucgccauggagcgcaacgccggcuccggcaucaucaucuccgacacccccguccacgacugcaacaccaccugccagacccccaagggcgccaucaacaccucccuccccuuccagaacauccaccccaucaccaucggcaagugccccaaguacgucaaguccaccaagcuccgccucgccaccggccuccgcaacguccccuccauccagucccgcggccucuucggcgccaucgccggcuucaucgagggcggcuggaccggcauggucgacggcugguacggcuaccaccaccagaacgagcagggcuccggcuacgccgccgaccucaaguccacccagaacgccaucgacaagaucaccaacaaggucaacuccgucaucgagaagaugaacacccaguucaccgccgucggcaaggaguucaaccaccucgagaagcgcaucgagaaccucaacaagaaggucgacgacggcuuccucgacaucuggaccuacaacgccgagcuccucguccuccucgagaacgagcgcacccucgacuaccacgacuccaacgucaagaaccucuacgagaagguccgcaaccagcucaagaacaacgccaaggagaucggcaacggcugcuucgaguucuaccacaagugcgacaacaccugcauggaguccgucaagaacggcaccuacgacuaccccaaguacuccgaggaggccaagcucaaccgcgaggagaucgacggcgucaagcucgaguccacccgcaucuaccagauccucgccaucuacuccaccgucgccuccucccucguccucgucgucucccucggcgccaucuccuucuggaugugcuccaacggcucccuccagugccgcaucugcaucuga

SEQ ID NO: 103109 - RNA, 1701 nt, Artificial Sequence
  derived and/or modified CDS sequence (opt2) from hemagglutinin__InfluenzaA__AEM92378
augaaggccauccucgucguccuccucuacaccuucgccaccgccaacgccgacacccucugcaucggcuaccacgccaacaacuccaccgacaccgucgacaccguccucgagaagaacgucaccgucacccacuccgucaaccuccucgaggacaagcacaacggcaagcucugcaagcuccgcggcgucgccccccuccaccucggcaagugcaacaucgccggcuggauccucggcaaccccgagugcgagucccucuccaccgccuccuccugguccuacaucgucgagaccuccuccuccgacaacggcaccugcuaccccggcgacuucaucgacuacgaggagcuccgcgagcagcucaacuccgucuccuccuucgagcgcuucgagaucuuccccaagaccuccuccuggcccaaccacgacuccaacaagggcgucaccgccgccugcccccacgccggcgccaaguccuucuacaagaaccucaucuggcucgucaagaagggcaacuccuaccccaagcucaacaaguccuacaucaacgacaagggcaaggagguccucguccucuggggcauccaccaccccuccaccaccgccgaccagcagucccucuaccagaacgccgacgccuacgucuucgucggcaccucccgcuacuccaagaaguucaagcccgagaucgccauccgccccaagguccgcgaccaggagggccgcaugaacuacuacuggacccucgucgagcccggcgacaagaucaccuucgaggccaccggcaaccucgucgucccccgcuacgccuucgccauggagcgcaacgccggcuccggcaucaucaucuccgacacccccguccacgacugcaacaccaccugccagacccccaagggcgccaucaacaccucccuccccuuccagaacauccaccccaucaccaucggcaagugccccaaguacgucaaguccaccaagcuccgccucgccaccggccuccgcaacguccccuccauccagucccgcggccucuucggcgccaucgccggcuucaucgagggcggcuggaccggcauggucgacggcugguacggcuaccaccaccagaacgagcagggcuccggcuacgccgccgaccucaaguccacccagaacgccaucgacaagaucaccaacaaggucaacuccgucaucgagaagaugaacacccaguucaccgccgucggcaaggaguucaaccaccucgagaagcgcaucgagaaccucaacaagaaggucgacgacggcuuccucgacaucuggaccuacaacgccgagcuccucguccuccucgagaacgagcgcacccucgacuaccacgacuccaacgucaagaaccucuacgagaagguccgcaaccagcucaagaacaacgccaaggagaucggcaacggcugcuucgaguucuaccacaagugcgacaacaccugcauggaguccgucaagaacggcaccuacgacuaccccaaguacuccgaggaggccaagcucaaccgcgaggagaucgacggcgucaagcucgaguccacccgcaucuaccagauccucgccaucuacuccaccgucgccuccucccucguccucgucgucucccucggcgccaucuccuucuggaugugcuccaacggcucccuccagugccgcaucugcaucuga

SEQ ID NO: 103110 - RNA, 1701 nt, Artificial Sequence
  derived and/or modified CDS sequence (opt2) from hemagglutinin__InfluenzaA__AEM92407
augaaggccauccucgucguccuccucuacaccuucgccaccgccaacgccgacacccucugcaucggcuaccacgccaacaacuccaccgacaccgucgacaccguccucgagaagaacgucaccgucacccacuccgucaaccuccucgaggacaagcacaacggcaagcucugcaagcuccgcggcgucgccccccuccaccucggcaagugcaacaucgccggcuggauccucggcaaccccgagugcgagucccucuccaccgccaacuccugguccuacaucgucgagaccuccuccuccgacaacggcaccugcuaccccggcgacuucaucgacuacgaggagcuccgcgagcagcucuccuccgucuccuccuucgagcgcuucgagaucuuccccaagaccaacuccuggcccaaccacgacuccaacaagggcgucaccgccgccugcccccacgccggcgccaaguccuucuacaagaaccucaucuggcucgucaagaagggcaacuccuaccccaagcucuccaaguccuacaucaacgacaagggcaaggagguccucguccucuggggcauccaccaccccuccaccuccaccgaccagcagucccucuaccagaacgccgacgccuacgucuucgucggcaccucccgcuacuccaagaaguucaagcccgagaucgccauccgccccaagguccgcaaccaggagggccgcaugaacuacuacuggacccucgucgagcccggcgacaagaucaccuucgaggccaccggcaaccucgucgucccccgcuacgccuucaccaucgagcgcaacgccggcuccggcaucaucaucuccgacacccccauccacgacugcaacaccaccugccagacccccaagggcgccaucaacaccucccuccccuuccagaacauccaccccaucaccaucggcaagugccccaaguacgucaaguccaccaagcuccgccucgccaccggccuccgcaacguccccuccauccagucccgcggccucuucggcgccaucgccggcuucaucgagggcggcuggaccggcauggucgacggcugguacggcuaccaccaccagaacgagcagggcuccggcuacgccgccgaccucaaguccacccagaacgccaucgacgagaucaccaacaaggucaacuccgucaucgagaagaugaacacccaguucaccgccgucggcaaggaguucaaccaccucgagaagcgcaucgagaaccucaacaagaaggucgacgacggcuuccucgacaucuggacccacaacgccgagcuccucguccuccucgagaacgagcgcacccucgacuaccacgacuccaacgucaagaaccucuacgagaagguccgcucccagcucaagaacaacgccaaggagaucggcaacggcugcuucgaguucuaccacaagugcgacaacaccugcauggaguccgucaagaacggcaccuacgacuaccccaaguacuccgaggaggccaagcucaaccgcgaggagaucgacggcgucaagcucgaguccacccgcaucuaccagauccucgccaucuacuccaccgucgccuccucccucguccucgucgucucccucggcgccaucuccuucuggaugugcuccaugggcucccuccagugccgcaucugcaucuga

SEQ ID NO: 103111 - RNA, 1701 nt, Artificial Sequence
  derived and/or modified CDS sequence (opt2) from hemagglutinin__InfluenzaA__AEM92417
augaaggccauccucgucguccuccucuacaccuucgccaccgccaacgccgacacccucugcaucggcuaccacgccaacaacuccaccgacaccgucgacaccguccucgagaagaacgucaccgucacccacuccgucaacauccucgaggacaagcacaacggcaagcucugcaagcuccgcggcgucgccccccuccaccucggcaagugcaacaucgccggcuggauccucggcaaccccgagugcgagucccucuccaccgccuccuccugguccuacaucgucgagaccuccuccuccgacaacggcaccugcuaccccggcgacuucaucgacuacgaggagcuccgcgagcagcucuccuccgucuccuccuucgagcgcuucgagaucuuccccaaggccuccuccuggcccaaccacgacuccaacaagggcgucaccgccgccugcccccacgccggcgccaaguccuucuacaagaaccucaucuggcucgucaagaaggagaacuccuaccccaagcucuccaaguccuacaucaacgacaagggcaaggagguccucguccucuggggcauccaccaccccuccaccuccgccgaccagcagucccucuaccagaacgccgacgccuacgucuucgucggcuccucccgcuacuccaagaaguucaagcccgagaucgccauccgccccaagguccgcgaccaggagggccgcaugaacuacuacuggacccucgucgagcccggcgacaagaucaccuucgaggccaccggcaaccucgucgucccccgcuacgccuucgccauggagcgcaacgccggcuccggcaucaucaucuccgacacccccguccacgacugcaacaccaccugccagacccccaagggcgccaucaacaccucccuccccuuccagaacauccaccccaucaccaucggcaagugccccaaguacgucaaguccaccaagcuccgccucgccaccggccuccgcaacguccccuccauccagucccgcggccucuucggcgccaucgccggcuucaucgagggcggcuggaccggcauggucgacggcugguacggcuaccaccaccagaacgagcagggcuccggcuacgccgccgaccucaaguccacccagaacgccaucgacgagaucaccaacaaggucaacuccgucaucgagaagaugaacacccaguucaccgccgucggcaaggaguucaaccaccucgagaagcgcaucgagaaccucaacaagaaggucgacgacggcuuccucgacaucuggaccuacaacgccgagcuccucguccuccucgagaacgagcgcacccucgacuaccacgacuccaacgucaagaaccucuacgagaagguccgcucccagcucaagaacaacgccaaggagaucggcaacggcugcuucgaguucuaccacaagugcgacaacaccugcauggaguccgucaagaacggcaccuacgacuaccccaaguacuccgaggaggccaagcucaaccgcgaggagaucgacggcgucaagcucgaguccacccgcaucuaccagauccucgccaucuacuccaccgucgccuccucccucguccucgucgucucccucggcgccaucuccuucuggaugugcuccaacggcucccuccagugccgcaucugcaucuga

SEQ ID NO: 103112 - RNA, 1701 nt, Artificial Sequence
  derived and/or modified CDS sequence (opt2) from hemagglutinin__InfluenzaA__AEM92428
augaaggccauccucgucguccuccucuacaccuucgccaccgccaacgccgacacccucugcaucggcuaccacgccaacaacuccaccgacaccgucgacaccguccucgagaagaacgucaccgucacccacuccgucaaccuccucgaggacaagcacaacggcaagcucugcaagcuccgcggcgucgccccccuccaccucggcaagugcaacaucgccggcuggauccucggcaaccccgagugcgagucccucuccaccgccuccuccugguccuacaucgucgagaccuccuccuccgacaacggcaccugcuaccccggcgacuucaucgacuacgaggagcuccgcgagcagcucuccuccgucuccuccuucgagcgcuucgagaucuuccccaagaccuccuccuggcccaaccacgacuccaacaagggcgucaccgccgccugcccccacgccggcgccaaguccuucuacaagaaccucaucuggcucgucaagaagggcaacuccuaccccaagcucuccaaguccuacaucaacgacaagggcaaggagguccucguccucuggggcauccaccaccccuccaccuccgccgaccagcagucccucuaccagaacgccgacgccuacgucuucgucggcaccucccgcuacuccaagaaguucaagcccgagaucgccauccgccccaagguccgcgaccaggagggccgcaugaacuacuacuggacccucgucgagcccggcgacaagaucaccuucgaggccaccggcaaccucgucgucccccgcuacgccuucgccauggagcgcaacgccggcuccggcaucaucaucuccgacacccccguccacgacugcaacaccaccugccagacccccaagggcgccaucaacaccucccuccccuuccagaacauccaccccaucaccaucggcaagugccccaaguacgucaaguccaccaagcuccgccucgccaccggccuccgcaacguccccuccauccagucccgcggccucuucggcgccaucgccggcuucaucgagggcggcuggaccggcauggucgacggcugguacggcuaccaccaccagaacgagcagggcuccggcuacgccgccgaccucaaguccacccagaacgccaucgacgagaucaccaacaaggucaacuccgucaucgagaagaugaacacccaguucaccgccgucggcaaggaguucaaccaccucgagaagcgcaucgagaaccucaacaagaaggucgacgacggcuuccucgacaucuggaccuacaacgccgagcuccucguccuccucgagaacgagcgcacccucgacuaccacgacuccaacgucaagaaccucuacgagaagguccgcucccagcucaagaacaacgccaaggagaucggcaacggcugcuucgaguucuaccacaagugcgacaacaugugcauggaguccgucaagaacggcaccuacgacuaccccaaguacuccgaggaggccaagcucaaccgcgaggagaucgacggcgucaagcucgaguccacccgcaucuaccagauccucgccaucuacuccaccgucgccuccucccucguccucgucgucucccucggcgccaucuccuucuggaugugcuccaacggcucccuccagugccgcaucugcaucuga

SEQ ID NO: 103113 - RNA, 1701 nt, Artificial Sequence
  derived and/or modified CDS sequence (opt2) from hemagglutinin__InfluenzaA__AEM92438
augaaggccauccucgucguccuccucuacaccuucgccaccgccaacgccgacacccucugcaucggcuaccacgccaacaacuccaccgacaccgucgacaccguccucgagaagaacgucaccgucacccacuccgucaaccuccucgaggacaagcacaacggcaagcucugcaagcuccgcggcgucgccccccuccaccucggcaagugcaacaucgccggcuggauccucggcaaccccgagugcgagucccucuccaccgccuccuccugguccuacaucgucgagaccuccuccuccgacaacggcaccugcuaccccggcgacuucaucgacuacgaggagcuccgcgagcagcucuccuccgucuccuccuucgagcgcuucgagaucuuccccaagaccuccuccuggcccaaccacgacuccaacaagggcgucaccgccgccugcccccacgccggcgccaagggcuucuacaagaaccucaucuggcucgucaagaagggcaacuccuaccccaagcucuccaaguccuacaucaacgacaagggcaaggagguccucguccucuggggcauccaccaccccuccaccaccgccgaccagcagucccucuaccagaacgccgacaccuacgucuucgucggcaccucccgcuacuccaagaaguucaagcccgagaucgccauccgccccaagguccgcgaccaggagggccgcaugaacuacuacuggacccucgucgagcccggcgacaagaucaccuucgaggccaccggcaaccucgucgucccccgcuacgccuucgccauggagcgcaacgccggcuccggcaucaucaucuccgacacccccguccacgacugcaacaccaccugccagacccccaagggcgccaucaacaccucccuccccuuccagaacauccaccccaucaccaucggcaagugccccaaguacgucaaguccaccaagcuccgccucgccaccggccuccgcaacguccccuccauccagucccgcggccucuucggcgccaucgccggcuucaucgagggcggcuggaccggcauggucgacggcugguacggcuaccaccaccagaacgagcagggcuccggcuacgccgccgaccucaaguccacccagaacgccaucgacaagaucaccaacaaggucaacuccgucaucgagaagaugaacacccaguucaccgccgucggcaaggaguucaaccaccucgagaagcgcaucgagaaccucaacaagaaggucgacgacggcuuccucgacaucuggaccuacaacgccgagcuccucguccuccucgagaacgagcgcacccucgacuaccacgacuccaacgucaagaaccucuacgagaagauccgcaaccagcucaagaacaacgccaaggagaucggcaacggcugcuucgaguucuaccacaagugcgacaacaccugcauggaguccgucaagaacggcaccuacgacuaccccaaguacuccgaggaggccaagcucaaccgcgaggagaucgacggcgucaagcucgaguccacccgcaucuaccagauccucgccaucuacuccaccgucgccuccucccucguccucgucgucucccucggcgccaucuccuucuggaugugcuccaacggcucccuccagugccgcaucugcaucuga

SEQ ID NO: 103114 - RNA, 1701 nt, Artificial Sequence; identical to SEQ ID NO: 102845
  derived and/or modified CDS sequence (opt2) from hemagglutinin__InfluenzaA__AEM92448

SEQ ID NO: 103115 - RNA, 1701 nt, Artificial Sequence; identical to SEQ ID NO: 102845
  derived and/or modified CDS sequence (opt2) from hemagglutinin__InfluenzaA__AEM92458

SEQ ID NO: 103116 - RNA, 1701 nt, Artificial Sequence
  derived and/or modified CDS sequence (opt2) from hemagglutinin__InfluenzaA__AEM92468
augaaggccauccucgucguccuccucuacaccuucgccaccgccaacgccgacacccucugcaucggcuaccacgccaacaacuccaccgacaccgucgacaccguccucgagaagaacgucaccgucacccacuccgucaaccuccucgaggacaagcacaacggcaagcucugcaagcuccgcggcgucgccccccuccaccucggcaagugcaacaucgccggcuggauccucggcaaccccgagugcgagucccucuccaccgccuccuccugguccuacaucgucgagaccuccuccuccgacaacggcaccugcuaccccggcgacuucaucaacuacgaggagcuccgcgagcagcucuccuccgucuccuccuucgagcgcuucgagaucuuccccaagaccuccuccuggcccaaccacgacuccaacaagggcgucaccgccgccugcccccacgccggcgccaaguccuucuacaagaaccucaucuggcucgucaagaagggcaacuccuaccccaagcucuccaaguccuacaucaacgacaagggcaaggagguccucguccucuggggcauccaccaccccuccaccuccgccgaccagcagucccucuaccagaacgccgacgccuacgucuucgucggcaccuccaaguacuccaaggaguucaagcccgagaucgccguccgccccaagguccgcgaccaggagggccgcaugaacuacuacuggacccucgucgagcccggcgacaagaucaccuucgaggccaccggcaaccuccucgucccccgcuacgccuucgccauggagcgcaacgccggcuccggcaucaucaucuccgacacccccguccacgacugcaacaccaucugccagacccccaagggcgccaucaacaccucccuccccuuccagaacauccaccccaucaccaucggcaagugccccaaguacgucaaguccaccaagcuccgccucgccaccggccuccgcaacguccccuccauccagucccgcggccucuucggcgccaucgccggcuucaucgagggcggcuggaccggcauggucgacggcugguacggcuaccaccaccagaacgagcagggcuccggcuacgccgccgaccucaaguccacccagaacgccaucgacaagaucaccaacaaggucaacuccgucaucgagaagaugaacacccaguucaccgccgucggcaaggaguucaaccaccucgagaagcgcaucgagaaccucaacaagaaggucgacgacggcuuccucgacaucuggaccuacaacgccgagcuccucguccuccucgagaacgagcgcacccucgacuaccacgacuccaacgucaagaaccucuacgagaagguccgcucccagcucaagaacaacgccaaggagaucggcaacggcugcuucgaguucuaccacaagugcgacaacaccugcauggaguccgucaagaacggcaccuacgacuaccccaaguacuccgaggaggccaagcucaaccgcgaggagaucgacggcgucaagcucgaguccacccgcaucuaccagauccucgccaucuacuccaccgucgccuccucccucguccucgucgucucccucggcgccaucuccuucuggaugugcuccaacggcucccuccagugccgcaucugcaucuga

SEQ ID NO: 103117 - RNA, 1701 nt, Artificial Sequence
  derived and/or modified CDS sequence (opt2) from hemagglutinin__InfluenzaA__AEM92478
augaaggccauccucgucguccuccucuacaccuucgccaccgccaacgccgacacccucugcaucggcuaccacgccaacaacuccaccgacaccgucgacaccguccucgagaagaacgucaccgucacccacuccgucaaccuccucgaggacaagcacaacggcaagcucugcaagcuccgcggcgucgccccccuccaccucggcaagugcaacaucgccggcuggauccucggcaaccccgagugcgagucccucuccaccgccuccuccugguccuacaucgucgagaccuccuccuccgacaacggcaccugcuaccccggcgacuucaucaacuacgaggagcuccgcgagcagcucuccuccgucuccuccuucgagcgcuucgagaucuuccccaagaccuccuccuggcccaaccacgacuccaacaagggcgucaccgccgccugcccccacgccggcgccaaguccuucuacaagaaccucaucuggcucgucaagaagggcaacuccuaccccaagcucuccaaguccuacaucaacgacaagggcaaggagguccucguccucuggggcauccaccaccccuccaccuccgccgaccagcagucccucuaccagaacgccgacgccuacgucuucgucggcaccuccaaguacuccaagaaguucaagcccgagaucgccguccgccccaagguccgcgaccaggagggccgcaugaacuacuacuggacccucgucgagcccggcgacaagaucaccuucgaggccaccggcaaccuccucgucccccgcuacgccuucgccauggagcgcaacgccggcuccggcaucaucaucuccgacacccccguccacgacugcaacaccaucugccagacccccaagggcgccaucaacaccucccuccccuuccagaacauccaccccaucaccaucggcaagugccccaaguacgucaaguccaccaagcuccgccucgccaccggccuccgcaacguccccuccauccagucccgcggccucuucggcgccaucgccggcuucaucgagggcggcuggaccggcauggucgacggcugguacggcuaccaccaccagaacgagcagggcuccggcuacgccgccgaccucaaguccacccagaacgccaucgacaagaucaccaacaaggucaacuccgucaucgagaagaugaacacccaguucaccgccgucggcaaggaguucaaccaccucgagaagcgcaucgagaaccucaacaagaaggucgacgacggcuuccucgacaucuggaccuacaacgccgagcuccucguccuccucgagaacgagcgcacccucgacuaccacgacuccaacgucaagaaccucuacgagaagguccgcucccagcucaagaacaacgccaaggagaucggcaacggcugcuucgaguucuaccacaagugcgacaacaccugcauggaguccgucaagaacggcaccuacgacuaccccaaguacuccgaggaggccaagcucaaccgcgaggagaucgacggcgucaagcucgaguccacccgcaucuaccagauccucgccaucuacuccaccgucgccuccucccucguccucgucgucucccucggcgccaucuccuucuggaugugcuccaacggcucccuccagugccgcaucugcaucuga

SEQ ID NO: 103118 - RNA, 1701 nt, Artificial Sequence
  derived and/or modified CDS sequence (opt2) from hemagglutinin__InfluenzaA__AEM92498
augaaggccauccucgucguccuccucuacaccuucgccaccgccaacgccgacacccucugcaucggcuaccacgccaacaacuccaccgacaccgucgacaccguccucgagaagaacgucaccgucacccacuccgucaaccuccucgaggacaagcacaacggcaagcucugcaagcuccgcggcgucgccccccuccaccucggcaagugcaacaucgccggcuggauccucggcaaccccgagugcgagucccucuccaccgccaacuccugguccuacaucgucgagaccuccuccuccgacaacggcaccugcuaccccggcgacuucaucgacuacgaggagcuccgcgagcagcucuccuccgucuccuccuucgagcgcuucgagaucuuccccaagaccaacuccuggcccaaccacgacuccaacaagggcgucaccgccgccugcccccacgccggcgccaaguccuucuacaagaaccucaucuggcucgucaagaagggcaacuccuaccccaagcucuccaaguccuacaucaacgacaagggcaaggagguccucguccucuggggcauccaccaccccuccaccuccgccgaccagcagucccucuaccagaacgccgacgccuacgucuucgucggcaccucccgcuacuccaagaaguucaagcccgagaucgccauccgccccaagguccgcgaccaggagggccgcaugaacuacuacuggacccucgucgagcccggcgacaagaucaccuucgaggccaccggcaaccucgucgucccccgcuacgccuucgccauggagcgcaacgccggcuccggcaucaucaucuccgacacccccgcccacgacugcaacaccaccugccagacccccaagggcgccaucaacaccucccuccccuuccagaacauccaccccaucaccaucggcaagugccccaaguacgucaaguccaccaagcuccgccucgccaccggccuccgcaacguccccuccauccagucccgcggccucuucggcgccaucgccggcuucaucgagggcggcuggaccggcauggucgacggcugguacggcuaccaccaccagaacgagcagggcuccggcuacgccgccgaccucaaguccacccagaacgccaucgacaagaucaccaacaaggucaacuccgucaucgagaagaugaacacccaguucaccgccgucggcaaggaguucaaccaccucgagaagcgcaucgagaaccucaacaagaaggucgacgacggcuuccucgacaucuggaccuacaacgccgagcuccucguccuccucgagaacgagcgcacccucgacuaccacgacuccaacgucaagaaccucuacgagaagguccgcucccagcucaagaacaacgccaaggagaucggcaacggcugcuucgaguucuaccacaagugcgacaacaccugcauggaguccgucaagaacggcaccuacgacuaccccaaguacuccgaggaggccaagcucaaccgcgaggagaucgacggcgucaagcucgaguccacccgcaucuaccagauccucgccaucuacuccaccgucgccuccucccucguccucgucgucucccucggcgccaucuccuucuggaugugcuccaacggcucccuccagugccgcaucugcaucuga

SEQ ID NO: 103119 - RNA, 1701 nt, Artificial Sequence
  derived and/or modified CDS sequence (opt2) from hemagglutinin__InfluenzaA__AEM92518
augaaggccauccucgucguccuccucuacaccuucgccaccgccaacgccgacacccucugcaucggcuaccacgccaacaacuccaccgacaccgucgacaccguccucgagaagaacgucaccgucacccacuccgucaaccuccucgaggacaagcacaacggcaagcucugcaagcuccgcggcgucgccccccuccaccucggcaagugcaacaucgccggcuggauccucggcaaccccgagugcgagucccucuccaccgccuccuccugguccuacaucgucgagaccuccuccuccgacaacggcaccugcuaccccggcgacuucaucgacuacgaggagcuccgcgagcagcucuccuccgucuccuccuucgagcgcuucgagaucuuccccaagaccuccuccuggcccaaccacgacuccaacaagggcgucaccaccgccugcccccacgccggcgccaaguccuucuacaagaaccucaucuggcucgucaagaagggcaacuccuaccccaagcucuccaaguccuacaucaacgacaagcgcaaggagguccucguccucuggggcauccaccacccccccaccuccgccgaccagcagucccucuaccagaacgccgacgccuacgucuucgucggcaccucccgcuacuccaagaaguucaagcccgagaucgccauccgccccaagguccgcgaccaggagggccgcaugaacuacuacuggacccucgucgagcccggcgacaagaucaccuucgaggccaccggcaaccucgucgucccccgcuacgccuucgccauggagcgcaacgccggcuccggcaucaucaucuccgacacccccguccacgacugcaacgccaccugccagacccccaagggcgccaucaacaccucccuccccuuccagaacauccaccccaucaccaucggcaagugccccaaguacgucaaguccaccaagcuccgccucgccaccggccuccgcaacguccccuccauccagucccgcggccucuucggcgccaucgccggcuucaucgagggcggcuggaccggcauggucgacggcugguacggcuaccaccaccagaacgagcagggcuccggcuacgccgccgaccucaaguccacccagaacgccaucgacgagaucaccaacaaggucaacuccgucaucgagaagaugaacacccaguucaccgccgucggcaaggaguucaaccaccucgagaagcgcaucgagaaccucaacaagaaggucgacgacggcuuccucgacaucuggaccuacaacgccgagcuccucguccuccucgagaacgagcgcacccucgacuaccacgacuccaaggucaagaaccucuacgagaagguccgcucccagcucaagaacaacgccaaggagaucggcaacggcugcuucgaguucuaccacaagugcgacaacaccugcauggaguccgucaagaacggcaccuacgacuaccccaaguacuccgaggaggccaagcucaaccgcgaggagaucgacggcgucaagcucgaguccacccgcaucuaccagauccucgccaucuacuccaccgucgccuccucccucguccucgucgucucccucggcgccaucuccuucuggaugugcuccaacggcucccuccagugccgcaucugcaucuga

SEQ ID NO: 103120 - RNA, 1701 nt, Artificial Sequence
  derived and/or modified CDS sequence (opt2) from hemagglutinin__InfluenzaA__AEM92528
augaaggccauccucgucguccuccucuacaccuucgccaccgccaacgccgacacccucugcaucggcuaccacgccaacaacuccaccgacaccgucgacaccguccucgagaagaacgucaccgucacccacuccgucaaccuccucgaggacaagcacaacggcaagcucugcaagcuccgcggcgucgccccccuccaccucggcaagugcaacaucgccggcuggauccucggcaaccccgagugcgagucccucuccaccgccuccuccugguccuacaucgucgagaccuccuccuccgacaacggcaccugcuaccccggcgacuucaucgacuacgaggagcuccgcgagcagcucuccuccgucuccuccuucgagcgcuucgagaucuuccccaagaccuccuccuggcccaaccacgacuccaacaagggcgucaccgccgccugcccccacgccggcgccaaguccuucuacaagaaccucaucuggcucgucaagaagggcaacuccuaccccaagcucaacaaguccuacaucaacgacaagggcaaggagguccucguccucuggggcauccaccaccccuccaccuccgccgaccagcagucccucuaccagaacgccgacgccuacgucuucgucggcaccucccgcuacuccaagaaguucaagcccgagaucgccauccgccccaagguccgcgaccaggagggccgcaugaacuacuacuggacccucgucgagcccggcgacaagaucaccuucgaggccaccggcaaccucgucgucccccgcuacgccuucgccauggagcgcaacgccggcuccggcaucaucaucuccgacacccccguccacgacugcaacaccaccugccagacccccaagggcgccaucaacaccucccuccccuuccagaacauccaccccaucaccaucggcaagugccccaaguacgucaaguccaccaagcuccgccucgccaccggccuccgcaacguccccuccauccagucccgcggccucuucggcgccaucgccggcuucaucgagggcggcuggaccggcauggucgacggcugguacggcuaccaccaccagaacgagcagggcuccggcuacgccgccgaccucaaguccacccagaacgccaucgacaagaucaccaacaaggucaacuccgucaucgagaagaugaacacccaguucaccgccgucggcaaggccuucaaccaccucgagaagcgcaucgagaaccucaacaagaaggucgacgacggcuuccucgacaucuggaccuacaacgccgagcuccucguccuccucgagaacgagcgcacccucgacuaccacgacuccaacgucaagaaccucuacgagaagguccgcaaccagcucaagaacaacgccaaggagaucggcaacggcugcuucgaguucuaccacaagugcgacaacaccugcauggaguccgucaagaacggcaccuacgacuaccccaaguacuccgaggaggccaagcucaaccgcgaggagaucgacggcgucaagcucgaguccacccgcaucuaccagauccucgccaucuacuccaccgucgccuccucccucguccucgucgucucccucggcgccaucuccuucuggaugugcuccaacggcucccuccagugccgcaucugcaucuga

SEQ ID NO: 103121 - RNA, 1701 nt, Artificial Sequence
  derived and/or modified CDS sequence (opt2) from hemagglutinin__InfluenzaA__AEM92548
augaaggccauccucgucguccuccucuacaccuucgccaccgccaccgccgacacccucugcaucggcuaccacgccaacaacuccaccgacaccgucgacaccguccucgagaagaacgucaccgucacccacuccgucaaccuccucgaggacaagcacaacggcaagcucugcaagcuccgcggcgucgccccccuccaccucggcaagugcaacaucgccggcuggauccucggcaaccccgagugcgagucccucuccaccgccuccuccugguccuacaucgucgagaccuccuccuccgacaacggcaccugcuaccccggcgacuucaucaacuacgaggagcuccgcgagcagcucuccuccgucuccuccuucgagcgcuucgagaucuuccccaagaccuccuccuggcccaaccacgacuccaacaagggcgucaccgccgccugcccccacgccggcgccaaguccuucuacaagaaccucaucuggcucgucaagaagggcaacuccuaccccaagcucuccaaguccuacaucaacgacaagggcaaggagguccucguccucuggggcauccaccaccccuccaccuccgccgaccagcagucccucuaccagaacgccgacgccuacgucuucgucggcaccucccgcuacuccaagaaguucaagcccgagaucgccauccgccccaagguccgcgaccaggagggccgcaugaacuacuacuggacccucgucgagcccggcgacaagaucaccuucgaggccaccggcaaccucgucgucccccgcuacgccuucgccauggagcgcaacgccggcuccggcaucaucaucuccgacacccccguccacgacugcaacaccaccugccagacccccaagggcgccaucaacaccucccuccccuuccagaacauccaccccaucaccaucggcaagugccccaaguacgucaaguccaccaagcuccgccucgccaccggccuccgcaacguccccuccauccagucccgcggccucuucggcgccaucgccggcuucaucgagggcggcuggaccggcauggucgacggcugguacggcuaccaccaccagaacgagcagggcuccggcuacgccgccgaccucaaguccacccagaacgccaucgacaagaucaccaacaaggucaacuccgucaucgagaagaugaacacccaguucaccgccgucggcaaggaguucaaccaccucgagaagcgcaucgagaaccucaacaagaaggucgacgacggcuuccucgacaucuggaccuacaacgccgagcuccucguccuccucgagaacgagcgcacccucgacuaccacgacuccaacgucaagaaccucuacgagaagguccgcaaccagcucaagaacaacgccaaggagaucggcaacggcugcuucgaguucuaccacaagugcgacaacaccugcauggaguccgucaagaacggcaccuacgacuaccccaaguacuccgaggaggccaagcucaaccgcgaggagaucgacggcgucaagcucgaguccacccgcaucuaccagauccucgccaucuacuccaccgucgccuccucccucguccucgucgucucccucggcgccaucuccuucuggaugugcuccaacggcucccuccagugccgcaucugcaucuga

SEQ ID NO: 103122 - RNA, 1701 nt, Artificial Sequence
  derived and/or modified CDS sequence (opt2) from hemagglutinin__InfluenzaA__AEM92558
augaaggccauccucgucguccuccucuacaccuucgccaccgccaacgccgacacccucugcaucggcuaccacgccaacaacuccaccgacaccgucgacaccguccucgagaagaacgucaccgucacccacuccgucaaccuccucgaggacaagcacaacggcaagcucugcaagcuccgcggcgucgccccccuccaccucggcaagugcuccaucgccggcuggauccucggcaaccccgagugcgagucccucuccaccgccuccuccugguccuacaucgucgagaccuccuccuccgacaacggcaccugcuaccccggcgacuucaucaacuacgaggagcuccgcgagcagcucuccuccgucuccuccuucgagcgcuucgagaucuuccccaagaccuccuccuggcccaaccacgacuccaacaagggcgucaccgccgccugcccccacgccggcgccaaguccuucuacaagaaccucaucuggcucgucaagaagggcaacuccuaccccaagcucuccaaguccuacaucaacgacaagggcaaggagguccucguccucuggggcauccaccaccccuccaccaccgccgaccagcagucccucuaccagaacgccgacgccuacgucuucgucggcaccucccgcuacuccaagaaguucaagcccgagaucgccauccgccccaagguccgcgaccaggagggccgcaugaacuacuacuggacccucgucgagcccggcgacaagaucaccuucgaggccaccggcaaccucgucgucccccgcuacgccuucgccauggagcgcaacgccggcuccggcaucaucaucuccgacacccccguccacgacugcaacaccaccugccagacccccaagggcgccaucaacaccucccuccccuuccagaacauccaccccaucaccaucggcaagugccccaaguacgucaaguccaccaagcuccgccucgccaccggccuccgcaacguccccuccauccagucccgcggccucuucggcgccaucgccggcuucaucgagggcggcuggaccggcauggucgacggcugguacggcuaccaccaccagaacgagcagggcuccggcuacgccgccgaccucaaguccacccagaacgccaucgacaagaucaccaacaaggucaacuccgucaucgagaagaugaacacccaguucaccgccgucggcaaggaguucaaccaccucgagaagcgcaucgagaaccucaacaagaaggucgacgacggcuuccucgacaucuggaccuacaacgccgagcuccucguccuccucgagaacgagcgcacccucgacuaccacgacuccaacgucaagaaccucuacgagaagguccgcaaccagcucaagaacaacgccaaggagaucggcaacggcugcuucgaguucuaccacaagugcgacaacaccugcauggaguccgucaagaacggcaccuacgacuaccccaaguacuccgaggaggccaagcucaaccgcgaggagaucgacggcgucaagcucgaguccacccgcaucuaccagauccucgccaucuacuccaccgucgccuccucccucguccucgucgucucccucggcgccaucuccuucuggaugugcuccaacggcucccuccagugccgcaucugcaucuga

SEQ ID NO: 103123 - RNA, 1701 nt, Artificial Sequence; identical to SEQ ID NO: 103122
  derived and/or modified CDS sequence (opt2) from hemagglutinin__InfluenzaA__AEM92568

SEQ ID NO: 103124 - RNA, 1701 nt, Artificial Sequence
  derived and/or modified CDS sequence (opt2) from hemagglutinin__InfluenzaA__AEM92578
augaaggccauccucgucguccuccucuacaccuucgccaccgccaacgccgacacccucugcaucggcuaccacgccaacaacuccaccgacaccgucgacaccguccucgagaagaacgucaccgucacccacuccgucaaccuccucgaggacaagcacaacggcaagcucugcaagcuccgcggcgucgccccccuccaccucggcaagugcaacaucgccggcuggauccucggcaaccccgagugcgagucccucuccaccgccuccuccugguccuacaucgucgagaccuccaucuccgacaacggcaccugcuaccccggcgacuucaucaacuacgaggagcuccgcgagcagcucuccuccgucuccuccuucgagcgcuucgagaucuuccccaagaccuccuccuggcccaaccacgacuccaacaagggcgucaccgccgccugcccccacgccggcgccaaguccuucuacaagaaccucaucuggcucgucaagaagggcaacuccuaccccaagcucuccaaguccuacaucaacgacaagggcaaggagguccucguccucuggggcauccaccaccccuccaccuccgccgaccagcagucccucuaccagaacgccgacgccuacgucuucgucggcaccucccgcuacuccaagaaguucaagcccgagaucgccauccgccccaagguccgcgaccaggagggccgcaugaacuacuacuggacccucgucgagcccggcgacaagaucaccuucgaggccaccggcaaccucgucgucccccgcuacgccuucgccauggagcgcaacgccggcuccggcaucaucaucuccgacacccccguccacgacugcaacaccaccugccagacccccaagggcgccaucaacaccucccuccccuuccagaacauccaccccaucaccaucggcaagugccccaaguacgucaaguccaccaagcuccgccucgccaccggccuccgcaacguccccuccauccagucccgcggccucuucggcgccaucgccggcuucaucgagggcggcuggaccggcauggucgacggcugguacggcuaccaccaccagaacgagcagggcuccggcuacgccgccgaccucaaguccacccagaacgccaucgacaagaucaccaacaaggucaacuccgucaucgagaagaugaacacccaguucaccgccgucggcaaggaguucaaccaccucgagaagcgcaucgagaaccucaacaagaaggucgacgacggcuuccucgacaucuggaccuacaacgccgagcuccucguccuccucgagaacgagcgcacccucgacuaccacgacuccaacgucaagaaccucuacgagaagguccgcaaccagcucaagaacaacgccaaggagaucggcaacggcugcuucgaguucuaccacaagugcgacaacaccugcauggaguccgucaagaacggcaccuacgacuaccccaaguacuccgaggaggccaagcucaaccgcgaggagaucgacggcgucaagcucgaguccacccgcaucuaccagauccucgccaucuacuccaccgucgccuccucccucguccucgucgucucccucggcgccaucuccuucuggaugugcuccaacggcucccuccagugccgcaucugcaucuga

SEQ ID NO: 103125 - RNA, 1701 nt, Artificial Sequence
  derived and/or modified CDS sequence (opt2) from hemagglutinin__InfluenzaA__AEM92608
augaaggccauccucgucguccuccucuacaccuucgccaccgccaacgccgacacccucugcaucggcuaccacgccaacaacuccaccgacaccgucgacaccguccucgagaagaacgucaccgucacccacuccgucaaccuccucgaggacaagcacaacggcaagcucugcaagcuccgcggcgucgccccccuccaccucggcaagugcaacaucgccggcuggauccucggcaaccccgagugcgagucccucuccaccgccuccuccugguccuacaucgucgagaccuccuccuccgacaacggcaccugcuaccccggcgacuucaucgacuacgaggagcuccgcgagcagcucuccuccgucuccuccuucgagcgcuucgagaucuuccccaagaccuccuccuggcccaaccacgacuccaacaagggcgucaccgccgccugcccccacgccggcgccaaguccuucuacaagaaccucaucuggcucgucaagaagggcaacuccuaccccaagcucuccaaguccuacaucaacgacaagggcaaggagguccucguccucuggggcauccaccaccccuccaccaccgccgaccagcagucccucuaccagaacgccgacgccuacgucuucgucggcaccucccgcuacuccaagaaguucaagcccgagaucgccauccgccccaagguccgcgaccaggagggccgcaugaacuacuacuggacccucgucgagcccggcgacaagaucaccuucgaggccaccggcaaccucgucgucccccgcuacgccuucgccauggagcgcaacgccggcuccggcaucaucaucuccgacacccccguccacgacugcaacaccaccugccagacccccaagggcgccaucaacaccucccuccccuuccagaacauccaccccaucaccaucggcaagugccccaaguacgucaaguccaccaagcuccgccucgccaccggccuccgcaacguccccuccauccagucccgcggccucuucggcgccaucgccggcuucaucgagggcggcuggaccggcauggucgacggcugguacggcuaccaccaccagaacgagcagggcuccggcuacgccgccgaccucaaguccacccagaacgccaucgacaagaucaccaacaaggucaacuccgucaucgagaagaugaacacccaguucaccgccgucggcaaggaguucaaccaccucgagaagcgcaucgagaaccucaacaagaaggucgacgacggcuuccucgacaucuggaccuacaacgccgagcuccucguccuccucgagaacgagcgcacccucgacuaccacgacuccaacgucaagaaccucuacgagaagguccgcaaccagcucaagaacaacgccaaggagaucggcaacggcugcuucgaguucuaccacaagugcgacaacaccugcauggaguccgucaagaacggcaccuacgacuaccccaaguacuccgaggaggccaagcucaaccgcgaggagaucgacggcgucaagcucgaguccacccgcaucuaccagauccucgccaucuacuccaccgucgccuccucccucguccucgucgucucccucggcgccaucuccuucuggaugugcuccaacggcucccuccagugccgcaucugcaucuga

SEQ ID NO: 103126 - RNA, 1701 nt, Artificial Sequence
  derived and/or modified CDS sequence (opt2) from hemagglutinin__InfluenzaA__AEM92618
augaaggccauccucgucguccuccucuacaccuucgccaccgccaacgccgacacccucugcaucggcuaccacgccaacaacuccaccgacaccgucgacaccguccucgagaagaacgucaccgucacccacuccgucaaccuccucgaggacaagcacaacggcaagcucugcaagcuccgcggcgucgccccccuccaccucggcaagugcaacaucgccggcuggauccucggcaaccccgagugcgagucccucuccaccgccaacuccugguccuacaucgucgagaccuccuccuccgacaacggcaccugcuaccccggcgacuucaucgacuacgaggagcuccgcgagcagcucuccuccgucuccuccuucgagcgcuucgagaucuuccccaagaccaacuccuggcccaaccacgacuccaacaagggcgucaccgccgccugcccccacgccggcgccaaguccuucuacaagaaccucaucuggcucgucaagaccggcaacuccuaccccaagcucuccaaguccuacaucaacgacaagggcaaggagguccucguccucuggggcauccaccaccccuccaccuccgccgaccagcagucccucuaccagaacgccgacgccuacgucuucgucggcaccucccgcuacucccgcaaguucaagcccgagaucgccauccgccccaagguccgcgaccaggagggccgcaugaacuacuacuggacccucgucgagcccggcgacaagaucaccuucgaggccaccggcaaccucgucgucccccgcuacgccuucgccauggagcgcaacgccggcuccggcaucaucaucuccgacacccccgcccacgacugcaacaccaccugccagacccccaagggcgccaucaacaccucccuccccuuccagaacauccaccccaucaccaucggcaagugccccaaguacgucaaguccaccaagcuccgccucgccaccggccuccgcaacguccccuccauccagucccgcggccucuucggcgccaucgccggcuucaucgagggcggcuggaccggcauggucgacggcugguacggcuaccaccaccagaacgagcagggcuccggcuacgccgccgaccucaaguccacccagaacgccaucgacaagaucaccaacaaggucaacuccgucaucgagaagaugaacacccaguucaccgccgucggcaaggaguucaaccaccucgagaagcgcaucgagaaccucaacaagaaggucgacgacggcuuccucgacaucuggaccuacaacgccgagcuccucguccuccucgagaacgagcgcacccucgacuaccacgacuccaacgucaagaaccucuacgagaagguccgcucccagcucaagaacaacgccaaggagaucggcaacggcugcuucgaguucuaccacaagugcgacaacaccugcauggaguccgucaagaacggcaccuacgacuaccccaaguacuccgaggaggccaagcucaaccgcgaggagaucgacggcgucaagcucgaguccacccgcaucuaccagauccucgccaucuacuccaccgucgccuccucccucguccucgucgucucccucggcgccaucuccuucuggaugugcuccaacggcucccuccagugccgcaucugcaucuga

SEQ ID NO: 103127 - RNA, 1701 nt, Artificial Sequence
  derived and/or modified CDS sequence (opt2) from hemagglutinin__InfluenzaA__AEM92638
augaaggccauccucgucguccuccucuacaccuucgccaccgccaacgccgacacccucugcaucggcuaccacgccaacaacuccaccgacaccgucgacaccguccucgagaagaacgucaccgucacccacuccgucaacauccucgaggacaagcacaacggcaagcucugcaagcuccgcggcgucgccccccuccaccucggcaagugcaacaucgccggcuggauccucggcaaccccgagugcgagucccucuccaccgccuccuccugguccuacaucgucgagaccuccuccuccgacaacggcaccugcuaccccggcgacuucaucgacuacgaggagcuccgcgagcagcucuccuccgucuccuccuucgagcgcuucgagaucuuccccaagaccuccuccuggcccaaccacgacaccaacaagggcgucaccgccgccugcccccacgccggcgccaaguccuucuacaagaaccucaucuggcucgucaagaagggcaacuccuaccccaagcucuccaaguccuacaucaacgacaagggcaaggagguccucguccucuggggcauccaccaccccuccaccuccgccgaccagcagucccucuaccagaacgccgacgccuacgucuucgucggcuccucccgcuacuccaagaaguucaagcccgagaucgccauccgccccaagguccgcgaccaggagggccgcaugaacuacuacuggacccucgucgagcccggcgacaagaucaccuucgaggccaccggcaaccucgucgucccccgcuacgccuucgccauggagaagaacgccggcuccggcaucaucaucuccgacacccccguccacgacugcaacaccaccugccagacccccaagggcgccaucaacaccucccuccccuuccagaacauccaccccaucaccaucggcaagugccccaaguacgucaaguccaccaagcuccgccucgccaccggccuccgcaacguccccuccauccagucccgcggccucuucggcgccaucgccggcuucaucgagggcggcuggaccggcauggucgacggcugguacggcuaccaccaccagaacgagcagggcuccggcuacgccgccgaccucaaguccacccagaacgccaucgacgagaucaccaacaaggucaacuccgucaucgagaagaugaacacccaguucaccgccgucggcaaggaguucaaccaccucgagaagcgcaucgagaaccucaacaagaaggucgacgacggcuuccucgacaucuggaccuacaacgccgagcuccucguccuccucgagaacgagcgcacccucgacuaccacgacuccaacgucaagaaccucuacgagaagguccgcucccagcucaagaacaacgccaaggaggucggcaacggcugcuucgaguucuaccacaagugcgacaacaccugcauggaguccgucaagaacggcaccuacgacuaccccaaguacuccgaggaggccaagcucaaccgcgaggagaucgacggcgucaagcucgaguccacccgcaucuaccagauccucgccaucuacuccaccgccgccuccucccucguccucgucgucucccucggcgccaucuccuucuggaugugcuccaacggcucccuccagugccgcaucugcaucuga

SEQ ID NO: 103128 - RNA, 1701 nt, Artificial Sequence
  derived and/or modified CDS sequence (opt2) from hemagglutinin__InfluenzaA__AEM92648
augaaggccauccucgucguccuccucuacaccuucgccaccgccaacgccgacacccucugcaucggcuaccacgccaacaacuccaccgacaccgucgacaccguccucgagaagaacgucaccgucacccacuccgucaacauccucgaggacaagcacaacggcaagcucugcaagcuccgcggcgucgccccccuccaccucggcaagugcaacaucgccggcuggauccucggcaaccccgagugcgagucccucuccaccgccuccuccugguccuacaucgucgagaccuccuccuccgacaacggcaccugcuaccccggcgacuucaucgacuacgaggagcuccgcgagcagcucuccuccgucuccuccuucgagcgcuucgagaucuuccccaagaccuccuccuggcccaaccacgacaccaacaagggcgucaccgccgccugcccccacgccggcgccaaguccuucuacaagaaccucaucuggcucgucaaggagggcaacuccuaccccaagcucuccaaguccuacaucaacgacaagggcaaggagguccucguccucuggggcauccaccaccccuccaccuccgccgaccagcagucccucuaccagaacgccgacgccuacgucuucgucggcuccucccgcuacuccaagaaguucaagcccgagaucgccauccgccccaagguccgcgaccaggagggccgcaugaacuacuacuggacccucgucgagcccggcgacaagaucaccuucgaggccaccggcaaccucgucgucccccgcuacgccuucgccauggagaagaacgccggcuccggcaucaucaucuccgacacccccguccacgacugcaacaccaccugccagacccccaagggcgccaucaacaccucccuccccuuccagaacauccaccccaucaccaucggcaagugccccaaguacgucaaguccaccaagcuccgccucgccaccggccuccgcaacguccccuccauccagucccgcggccucuucggcgccaucgccggcuucaucgagggcggcuggaccggcauggucgacggcugguacggcuaccaccaccagaacgagcagggcuccggcuacgccgccgaccucaaguccacccagaacgccaucgacgagaucaccaacaaggucaacuccgucaucgagaagaugaacacccaguucaccgccgucggcaaggaguucaaccaccucgagaagcgcaucgagaaccucaacaagaaggucgacgacggcuuccucgacaucuggaccuacaacgccgagcuccucguccuccucgagaacgagcgcacccucgacuaccacgacuccaacgucaagaaccucuacgagaagguccgcucccagcucaagaacaacgccaaggaggucggcaacggcugcuucgaguucuaccacaagugcgacaacaccugcauggaguccgucaagaacggcaccuacgacuaccccaaguacuccgaggaggccaagcucaaccgcgaggagaucgacggcgucaagcucgaguccacccgcaucuaccagauccucgccaucuacuccaccgccgccuccucccucguccucgucgucucccucggcgccaucuccuucuggaugugcuccaacggcucccuccagugccgcaucugcaucuga

SEQ ID NO: 103129 - RNA, 1701 nt, Artificial Sequence; identical to SEQ ID NO: 101569
  derived and/or modified CDS sequence (opt2) from hemagglutinin__InfluenzaA__AEM98407

SEQ ID NO: 103130 - RNA, 1701 nt, Artificial Sequence; identical to SEQ ID NO: 101569
  derived and/or modified CDS sequence (opt2) from hemagglutinin__InfluenzaA__AEM98418

SEQ ID NO: 103131 - RNA, 1701 nt, Artificial Sequence; identical to SEQ ID NO: 101569
  derived and/or modified CDS sequence (opt2) from hemagglutinin__InfluenzaA__AEM98429

SEQ ID NO: 103132 - RNA, 1701 nt, Artificial Sequence
  derived and/or modified CDS sequence (opt2) from hemagglutinin__InfluenzaA__AEN55398
augaaggccauccucgucguccuccucuacaccuucgccaccgccaacgccgacacccucugcaucggcuaccacgccaacaacuccaccgacaccgucgacaccguccucgagaagaacgucaccgucacccacuccgucaaccuccucgaggacaagcacaacggcaagcucugcaagcuccgcggcgucgccccccuccaccucggcaagugcaacaucgccggcuggauccucggcaaccccgagugcgagucccucuccaccgccuccuccugguccuacaucgucgagaccuccuccuccgacaacggcaccugcuaccccggcaacuucaucgacuacgaggagcuccgcgagcagcucuccuccgucuccuccuucgagcgcuucgagaucuuccccaagaccuccuccuggcccgaccacgacuccaacaagggcgucaccgccgccugcccccacgccggcgccaaguccuucuacaagaaccucaucuggcucgucaagaagggcaacuccuaccccaagcucuccaaguccuacaucaacgacaagggcaaggagguccucguccucuggggcauccaccaccccuccaccuccgccgaccagcagucccucuaccagaacgccgacgccuacgucuucgucggcaccucccgcuacuccaagaaguucaagcccgagaucgccauccgccccaagguccgcgaccaggagggccgcaugaacuacuacuggacccucgucgagcccggcgacaagaucaccuucgaggccaccggcaaccucgucgccccccgcuacgccuucgccauggagcgcaacgccggcuccggcaucaucaucuccgacacccccguccacgacugcaacaccaccugccagacccccaagggcgccaucaacaccucccuccccuuccagaacauccaccccaucaccaucggcaagugccccaaguacgucaaguccaccaagcuccgccucgucaccggccuccgcaacguccccuccauccagucccgcggccucuucggcgccaucgccggcuucaucgagggcggcuggaccggcauggucgacggcugguacggcuaccaccaccagaacgagcagggcuccggcuacgccgccgaccucaaguccacccagaacgccaucgacaagaucaccaacaaggucaacuccgucaucgagaagaugaacacccaguucaccgccgucggcaaggaguucaaccaccucgagaagcgcaucgagaaccucaacaagaaggucgacgacggcuuccucgacaucuggaccuacaacgccgagcuccucguccuccucgagaacgagcgcacccucgacuaccacgacuccaacgucaagaaccucuacgagaagguccgcucccagcucaagaacaacgccaaggagaucggcaacggcugcuucgaguucuaccacaagugcgacaacaccugcauggaguccgucaagaacggcaccuacgacuaccccaaguacuccgaggaggccaagcucaaccgcgaggagaucgacggcgucaagcucgaguccacccgcaucuaccagauccucgccaucuacuccaccgucgccuccucccucguccucgucgucucccucggcgccaucuccuucuggaugugcuccaacggcucccuccagugccgcaucugcaucuga

SEQ ID NO: 103133 - RNA, 1701 nt, Artificial Sequence; identical to SEQ ID NO: 102956
  derived and/or modified CDS sequence (opt2) from hemagglutinin__InfluenzaA__AEN55408

SEQ ID NO: 103134 - RNA, 1701 nt, Artificial Sequence; identical to SEQ ID NO: 102471
  derived and/or modified CDS sequence (opt2) from hemagglutinin__InfluenzaA__AEN55418

SEQ ID NO: 103135 - RNA, 1701 nt, Artificial Sequence; identical to SEQ ID NO: 101620
  derived and/or modified CDS sequence (opt2) from hemagglutinin__InfluenzaA__AEN55463

SEQ ID NO: 103136 - RNA, 1701 nt, Artificial Sequence
  derived and/or modified CDS sequence (opt2) from hemagglutinin__InfluenzaA__AEN55473
augaaggccauccucgucguccuccucuacaccuucgccaccgccaacgccgacacccucugcaucggcuaccacgccaacaacuccaccgacaccgucgacaccguccucgagaagaacgucaccgucacccacuccgucaaccuccucgaggacaagcacaacggcaagcucugcaagcuccgcggcgucgccccccuccaccucggcaagugcaacaucgccggcuggauccucggcaaccccgagugcgagucccucuccaccgccuccuccugguccuacaucgucgagaccuccuccuccgacaacggcaccugcuaccccggcgacuucaucgacuacgaggagcuccgcgagcagcucuccuccgucuccuccuucgagcgcuucgagaucuuccccaagaccuccuccuggcccaaccacgacuccaacaagggcgucaccgccgccugcccccacgccggcgccaaguccuucuacaagaaccucaucuggcucgucaagaagggcaacuccuaccccaagcucuccaaguccuacaucaacgacaagggcaaggagguccucguccucuggggcauccaccaccccuccaccaccaccgaccagcagucccucuaccagaccgccgacaccuacgucuucgucggcaccucccgcuacuccaagaaguucaagcccgagaucgccauccgccccaagguccgcgaccaggagggccgcaugaacuacuacuggacccucgucgagcccggcgacaagaucaccuucgaggccaccggcaaccucgucgucccccgcuacgccuucgccauggagcgcaacgccggcuccggcaucaucaucuccgacacccccguccacgacugcaacaccaccugccagacccccaagggcgccaucaacaccucccuccccuuccagaacauccaccccaucaccaucggcaagugccccaaguacgucaaguccaccaagcuccgccucgccaccggccuccgcaacguccccuccauccagucccgcggccucuucggcgccaucgccggcuucaucgagggcggcuggaccggcauggucgacggcugguacggcuaccaccaccagaacgagcagggcuccggcuacgccgccgaccucaaguccacccagaacgccaucgacaagaucaccaacaaggucaacuccgucaucgagaagaugaacacccaguucaccgccgucggcaaggaguucaaccaccucgagaagcgcaucgagaaccucaacaagaaggucgacgacggcuuccucgacaucuggaccuacaacgccgagcuccucguccuccucgagaacgagcgcacccucgacuaccacgacuccaacgucaagaaccucuacgagaagguccgcaaccagcucaagaccaacgccaaggagaucggcaacggcugcuucgaguucuaccacaagugcgacaacaccugcauggaguccgucaagaacggcaccuacgacuaccccaaguacuccgaggaggccaagcucaaccgcgaggagaucgacggcgucaagcucgaguccacccgcaucuaccagauccucgccaucuacuccaccgucgccuccucccucguccucgucgucucccucggcgccaucuccuucuggaugugcuccaacggcucccuccagugccgcaucugcaucuga

SEQ ID NO: 103137 - RNA, 1701 nt, Artificial Sequence; identical to SEQ ID NO: 102471
  derived and/or modified CDS sequence (opt2) from hemagglutinin__InfluenzaA__AEN55483

SEQ ID NO: 103138 - RNA, 1701 nt, Artificial Sequence; identical to SEQ ID NO: 103078
  derived and/or modified CDS sequence (opt2) from hemagglutinin__InfluenzaA__AEN55493

SEQ ID NO: 103139 - RNA, 1701 nt, Artificial Sequence; identical to SEQ ID NO: 102471
  derived and/or modified CDS sequence (opt2) from hemagglutinin__InfluenzaA__AEN55503

SEQ ID NO: 103140 - RNA, 1701 nt, Artificial Sequence
  derived and/or modified CDS sequence (opt2) from hemagglutinin__InfluenzaA__AEN55513
augaaggccauccucgucguccuccucuacaccuucgccaccgccaacgccgacacccucugcaucggcuaccacgccaacaacuccaccgacaccgucgacaccguccucgagaagaacgucaccgucacccacuccgucaaccuccucgaggacaagcacaacggcaagcucugcaagcuccgcggcgucgccccccuccaccucggcaagugcaacaucgccggcuggauccucggcaaccccgagugcgagucccucuccaccgccuccuccugguccuacaucgucgagaccuccuccuccgacaacggcaccugcuaccccggcgacuucaucgacuacgaggagcuccgcgagcagcucuccuccgucuccuccuucgagcgcuucgagaucuuccccaagaccuccuccuggcccaaccacgacuccaacaagggcgucaccgccgccugcccccacgccggcgccaaguccuucuacaagaaccucaucuggcucgucaagaagggcaacuccuaccccaagcucuccaaguccuacaucaacgacaagggcaaggagguccucguccucuggggcauccaccaccccuccaccaccgccgaccagcagaaccucuaccagaacgccgacaccuacgucuucgucggcaccucccgcuacuccaagaaguucaagcccgagaucgccauccgccccaagguccgcgaccaggagggccgcaugaacuacuacuggacccucgucgagcccggcgacaagaucaccuucgaggccaccggcaaccucgucgucccccgcuacgccuucgccauggagcgcaacgccggcuccggcaucaucaucuccgacacccccguccacgacugcaacaccaccugccagacccccaagggcgccaucaacaccucccuccccuuccagaacauccaccccaucaccaucggcaagugccccaaguacgucaaguccaccaagcuccgccucgccaccggccuccgcaacguccccuccauccagucccgcggccucuucggcgccaucgccggcuucaucgagggcggcuggaccggcauggucgacggcugguacggcuaccaccaccagaacgagcagggcuccggcuacgccgccgaccucaaguccacccagaacgccaucgacaagaucaccaacaaggucaacuccgucaucgagaagaugaacacccaguucaccgccgucggcaaggaguucaaccaccucgagaagcgcaucgagaaccucaacaagaaggucgacgacggcuuccucgacaucuggaccuacaacgccgagcuccucguccuccucgagaacgagcgcacccucgacuaccacgacuccaacgucaagaaccucuacgagaagguccgcaaccagcucaagaacaacgccaaggagaucggcaacggcugcuucgaguucuaccacaagugcgacaacaccugcauggaguccgucaagaacggcaccuacgacuaccccaaguacuccgaggaggccaagcucaaccgcgaggagaucgacggcgucaagcucgaguccacccgcaucuaccagauccucgccaucuacuccaccgucgccuccucccucguccucgucgucucccucggcgccaucuccuucuggaugugcuccaacggcucccuccagugccgcaucugcaucuga

SEQ ID NO: 103141 - RNA, 1701 nt, Artificial Sequence; identical to SEQ ID NO: 102471
  derived and/or modified CDS sequence (opt2) from hemagglutinin__InfluenzaA__AEN55523

SEQ ID NO: 103142 - RNA, 1701 nt, Artificial Sequence; identical to SEQ ID NO: 101260
  derived and/or modified CDS sequence (opt2) from hemagglutinin__InfluenzaA__AEN68904

SEQ ID NO: 103143 - RNA, 1701 nt, Artificial Sequence; identical to SEQ ID NO: 98705
  derived and/or modified CDS sequence (opt2) from hemagglutinin__InfluenzaA__AEN68905

SEQ ID NO: 103144 - RNA, 1701 nt, Artificial Sequence; identical to SEQ ID NO: 98705
  derived and/or modified CDS sequence (opt2) from hemagglutinin__InfluenzaA__AEN68906

SEQ ID NO: 103145 - RNA, 1701 nt, Artificial Sequence; identical to SEQ ID NO: 99807
  derived and/or modified CDS sequence (opt2) from hemagglutinin__InfluenzaA__AEN68907

SEQ ID NO: 103146 - RNA, 1701 nt, Artificial Sequence; identical to SEQ ID NO: 98705
  derived and/or modified CDS sequence (opt2) from hemagglutinin__InfluenzaA__AEN68908

SEQ ID NO: 103147 - RNA, 1701 nt, Artificial Sequence
  derived and/or modified CDS sequence (opt2) from hemagglutinin__InfluenzaA__AEN68909
augaaggccauccucgucguccuccucuacaccuucgccaccgccaacgccgacacccucugcgucggcuaccacgccaacaacuccaccgacaccgucgacaccguccucgagaagaacgucaccgucacccacuccgucaaccuccucgaggacaagcacaacggcaagcucugcaagcuccgcggcgucgccccccuccaccucggcaagugcaacaucgccggcuggauccucggcaaccccgagugcgagucccucuccaccgccuccuccugguccuacaucgucgagaccuccuccuccgacaacggcaccugcuaccccggcgacuucaucgacuacgaggagcuccgcgagcagcucuccuccgucuccuccuucgagcgcuucgagaucuuccccaagaccuccuccuggcccaaccacgacuccaacaagggcgucaccgccgccugcccccacgccggcgccaaguccuucuacaagaaccucaucuggcucgucaagaagggcaacuccuaccccaagcucuccaaguccuacaucaacgacaagggcaaggagguccucguccucuggggcauccaccaccccuccaccuccgccgaccagcagucccucuaccagaacgccgacgccuacgucuucgucggcaccucccgcuacuccaagaaguucaagcccgagaucgccauccgccccaagguccgcgaccaggagggccgcaugaacuacuacuggacccucgucgagcccggcgacaagaucaccuucgaggccaccggcaaccucgucgucccccgcuacgccuucgccauggagcgcaacgccggcuccggcaucaucaucuccgacacccccguccacgacugcaacaccaccugccagacccccaagggcgccaucaacaccucccuccccuuccagaacauccaccccaucaccaucggcaagugccccaaguacgucaaguccaccaagcuccgccucgccaccggccuccgcaacguccccuccauccagucccgcggccucuucggcgccaucgccggcuucaucgagggcggcuggaccggcauggucgacggcugguacggcuaccaccaccagaacgagcagggcuccggcuacgccgccgaccucaaguccacccagaacgccaucgacgagaucaccaacaaggucaacuccgucaucgagaagaugaacacccaguucaccgccgucggcaaggaguucaaccaccucgagaagcgcaucgagaaccucaacaagaaggucgacgacggcuuccucgacaucuggaccuacaacgccgagcuccucguccuccucgagaacgagcgcacccucgacuaccacgacuccaacgucaagaaccucuacgagaagguccgcucccagcucaagaacaacgccaaggagaucggcaacggcugcuucgaguucuaccacaagugcgacaacaccugcauggaguccgucaagaacggcaccuacgacuaccccaaguacuccgaggaggccaagcucaaccgcgaggagaucgacggcgucaagcucgaguccacccgcaucuaccagauccucgccaucuacuccaccgucgccuccucccucguccucgucgucucccucggcgccaucuccuucuggaugugcuccaacggcucccuccagugccgcaucugcaucuga

SEQ ID NO: 103148 - RNA, 1701 nt, Artificial Sequence
  derived and/or modified CDS sequence (opt2) from hemagglutinin__InfluenzaA__AEN68910
augaaggccauccucgucguccuccucuacaccuucgccaccgccaacgccgacacccucugcgucggcuaccacgccaacaacuccaccgacaccgucgacaccguccucgagaagaacgucaccgucacccacuccgucaaccuccucgaggacaagcacaacggcaagcucugcaagcuccgcggcgucgccccccuccaccucggcaagugcaacaucgccggcuggauccucggcaaccccgagugcgagucccucuccaccgccuccuccugguccuacaucgucgagaccuccuccuccgacaacggcaccugcuaccccggcgacuucaucgacuacgaggagcuccgcgagcagcucuccuccgucuccuccuucgagcgcuucgagaucuuccccaagaccuccuccuggcccaaccacgacuccaacaagggcgucaccgccgccugcccccacgccggcgccaaguccuucuacaagaaccucaucuggcucgucaagaagggcaacuccuaccccaagcucuccaaguccuacaucaacgacaagggcaaggagguccucguccucuggggcauccaccaccccuccaccuccgccgaccagcagucccucuaccagaacgccgacgccuacgucuucgucggcaccucccgcuacuccaagaaguucaagcccgagaucgccauccgccccaagguccgcgaccaggagggccgcaugaacuacuacuggacccucgucgagcccggcgacaagaucaccuucgaggccaccggcaaccucgucgucccccgcuacgccuucgccauggagcgcaacgccggcuccggcaucaucaucuccgacacccccguccacgacugcaacaccaccugccagacccccaagggcgccaucaacaccucccuccccuuccagaacauccaccccaucaccaucggcaagugccccaaguacgucaagggcaccaagcuccgccucgccaccggccuccgcaacguccccuccauccagucccgcggccucuucggcgccaucgccggcuucaucgagggcggcuggaccggcauggucgacggcugguacggcuaccaccaccagaacgagcagggcuccggcuacgccgccgaccucaaguccacccagaacgccaucgacgagaucaccaacaaggucaacuccgucaucgagaagaugaacacccaguucaccgccgucggcaaggaguucaaccaccucgagaagcgcaucgagaaccucaacaagaaggucgacgacggcuuccucgacaucuggaccuacaacgccgagcuccucguccuccucgagaacgagcgcacccucgacuaccacgacuccaacgucaagaaccucuacgagaagguccgcucccagcucaagaacaacgccaaggagaucggcaacggcugcuucgaguucuaccacaagugcgacaacaccugcauggaguccgucaagaacggcaccuacgacuaccccaaguacuccgaggaggccaagcucaaccgcgaggagaucgacggcgucaagcucgaguccacccgcaucuaccagauccucgccaucuacuccaccgucgccuccucccucguccucgucgucucccucggcgccaucuccuucuggaugugcuccaacggcucccuccagugccgcaucugcaucuga

SEQ ID NO: 103149 - RNA, 1701 nt, Artificial Sequence; identical to SEQ ID NO: 100821
  derived and/or modified CDS sequence (opt2) from hemagglutinin__InfluenzaA__AEN68911

SEQ ID NO: 103150 - RNA, 1701 nt, Artificial Sequence; identical to SEQ ID NO: 98705
  derived and/or modified CDS sequence (opt2) from hemagglutinin__InfluenzaA__AEN68912

SEQ ID NO: 103151 - RNA, 1701 nt, Artificial Sequence; identical to SEQ ID NO: 98796
  derived and/or modified CDS sequence (opt2) from hemagglutinin__InfluenzaA__AEN68913

SEQ ID NO: 103152 - RNA, 1701 nt, Artificial Sequence; identical to SEQ ID NO: 101371
  derived and/or modified CDS sequence (opt2) from hemagglutinin__InfluenzaA__AEN68914

SEQ ID NO: 103153 - RNA, 1701 nt, Artificial Sequence; identical to SEQ ID NO: 98705
  derived and/or modified CDS sequence (opt2) from hemagglutinin__InfluenzaA__AEN68915

SEQ ID NO: 103154 - RNA, 1701 nt, Artificial Sequence; identical to SEQ ID NO: 98705
  derived and/or modified CDS sequence (opt2) from hemagglutinin__InfluenzaA__AEN68916

SEQ ID NO: 103155 - RNA, 1701 nt, Artificial Sequence
  derived and/or modified CDS sequence (opt2) from hemagglutinin__InfluenzaA__AEN68917
augaaggccauccucggcguccuccucuacaccuucgccaccgccaacgccgacacccucugcaucggcuaccacgccaacaacuccaccgacaccgucgacaccguccucgagaagaacgucaccgucacccacuccgucaaccuccucgaggacaagcacaacggcaagcucugcaagcuccgcggcgucgccccccuccaccucggcaagugcaacaucgccggcuggauccucggcaaccccgagugcgagucccucuccaccgccuccuccugguccuacaucgucgagaccuccuccuccgacaacggcaccugcuaccccggcgacuucaucgacuacgaggagcuccgcgagcagcucuccuccgucuccuccuucgagcgcuucgagaucuuccccaagaccuccuccuggcccaaccacgacuccaacaagggcgucaccgccgccugcccccacgccggcgccaaguccuucuacaagaaccucaucuggcucgucaagaagggcaacuccuaccccaagcucuccaaguccuacaucaacgacaagggcaaggagguccucguccucuggggcauccaccaccccuccaccuccgccgaccagcagucccucuaccagaacgccgacgccuacgucuucgucggcaccucccgcuacuccaagaaguucaagcccgagaucgccauccgccccaagguccgcgaccaggagggccgcaugaacuacuacuggacccucgucgagcccggcgacaagaucaccuucgaggccaccggcaaccucgucgucccccgcuacgccuucgccauggagcgcaacgccggcuccggcaucaucaucuccgacacccccguccacgacugcaacaccaccugccagacccccaagggcgccaucaacaccucccuccccuuccagaacauccaccccgucaccaucggcaagugccccaaguacgucaaguccaccaagcuccgccucgccaccggccuccgcaacguccccuccauccagucccgcggccucuucggcgccaucgccggcuucaucgagggcggcuggaccggcauggucgacggcugguacggcuaccaccaccagaacgagcagggcuccggcuacgccgccgaccucaaguccacccagaacgccaucgacaagaucaccaacaaggucaacuccgucaucgagaagaugaacacccaguucaccgccgucggcaaggaguucaaccaccucgagaagcgcaucgagaaccucaacaagaaggucgacgacggcuuccucgacaucuggaccuacaacgccgagcuccucguccuccucgagaacgagcgcacccucgacuaccacgacuccaacgucaagaaccucuacgagaagguccgcucccagcucaagaacaacgccaaggagaucggcaacggcugcuucgaguucuaccacaagugcgacaacaccugcauggaguccgucaagaacggcaccuacgacuaccccaaguacuccgaggaggccaagcucaaccgcgaggagaucgacggcgucaagcucgaguccacccgcaucuaccagauccucgccaucuacuccaccgucgccuccucccucguccucgucgucucccucggcgccaucuccuucuggaugugcuccaacggcucccuccagugccgcaucugcaucuga

SEQ ID NO: 103156 - RNA, 1701 nt, Artificial Sequence
  derived and/or modified CDS sequence (opt2) from hemagglutinin__InfluenzaA__AEN68918
augaaggccauccucgucguccuccucuacaccuucgccaccgccaacgccgacacccucugcaucggcuaccacgccaacaacuccaccgacaccgucgacaccguccucgagaagaacgucaccgucacccacuccgucaaccuccucgaggacaagaacaacggcaagcucugcaagcuccgcggcgucgccccccuccaccucggcaagugcaacaucgccggcuggauccucggcaaccccgagugcgagucccucuccaccgccuccuccugguccuacaucgucgagaccuccuccuccgacaacggcaccugcuaccccggcgacuucaucgacuacgaggagcuccgcgagcagcucuccuccgucuccuccuucgagcgcuucgagauguuccccaagaccuccuccuggcccaaccacgacuccaacaagggcgucaccgccgccugcccccacgccggcgccaaguccuucuacaagaaccucaucuggcucgucaagaagggcaacuccuaccccaagcucuccaaguccuacaucaacgacaagggcaaggagguccucguccucuggggcauccaccaccccuccaccuccgccgaccagcagucccucuaccagaacgccgacgccuacgucuucgucggcaccucccgcuacuccaagaaguucaagcccgagaucgccauccgccccaagguccgcgaccaggagggccgcaugaacuacuacuggacccucgucgagcccggcgacaagaucaccuucgaggccaccggcaaccucgucgucccccgcuacgccuucgccauggagcgcaacgccggcuccggcaucaucaucuccgacacccccguccacgacugcaacaccaccugccagacccccaagggcgccaucaacaccucccuccccuuccagaacauccaccccaucaccaucggcaagugccccaaguacgucaaguccaccaagcuccgccucgccaccggccuccgcaacguccccuccauccagucccgcggccucuucggcgccaucgccggcuucaucgagggcggcuggaccggcauggucgacggcugguacggcuaccaccaccagaacgagcagggcuccggcuacgccgccgaccucaaguccacccagaacgccaucgacgagaucaccaacaaggucaacuccgucaucgagaagaugaacacccaguucaccgccgucggcaaggaguucaaccaccucgagaagcgcaucgagaaccucaacaagaaggucgacgacggcuuccucgacaucuggaccuacaacgccgagcuccucguccuccucgagaacgagcgcacccucgacuaccacgacuccaacgucaagaaccucuacgagaagguccgcucccagcucaagaacaacgccaaggaggucggcaacggcugcuucgaguucuaccacaagugcgacaacaccugcauggaguccgucaagaacggcaccuacgacuaccccaaguacuccgaggaggccaagcucaaccgcgaggagaucgacggcgucaagcucgaguccacccgcaucuaccagauccucgccaucuacuccaccgucgccuccucccucguccucgucgucucccucggcgccaucuccuucuggaugugcuccaacggcucccuccagugccgcaucugcaucuga

SEQ ID NO: 103157 - RNA, 1701 nt, Artificial Sequence; identical to SEQ ID NO: 101620
  derived and/or modified CDS sequence (opt2) from hemagglutinin__InfluenzaA__AEN68919

SEQ ID NO: 103158 - RNA, 1701 nt, Artificial Sequence; identical to SEQ ID NO: 100869
  derived and/or modified CDS sequence (opt2) from hemagglutinin__InfluenzaA__AEN68920

SEQ ID NO: 103159 - RNA, 1701 nt, Artificial Sequence; identical to SEQ ID NO: 99869
  derived and/or modified CDS sequence (opt2) from hemagglutinin__InfluenzaA__AEN68921

SEQ ID NO: 103160 - RNA, 1701 nt, Artificial Sequence; identical to SEQ ID NO: 99865
  derived and/or modified CDS sequence (opt2) from hemagglutinin__InfluenzaA__AEN68922

SEQ ID NO: 103161 - RNA, 1701 nt, Artificial Sequence; identical to SEQ ID NO: 99869
  derived and/or modified CDS sequence (opt2) from hemagglutinin__InfluenzaA__AEN68923

SEQ ID NO: 103162 - RNA, 1701 nt, Artificial Sequence; identical to SEQ ID NO: 99869
  derived and/or modified CDS sequence (opt2) from hemagglutinin__InfluenzaA__AEN68924

SEQ ID NO: 103163 - RNA, 1701 nt, Artificial Sequence
  derived and/or modified CDS sequence (opt2) from hemagglutinin__InfluenzaA__AEN68925
augaaggccauccucgucguccuccucuacaccuucgccaccgccaacgccgacacccucugcaucggcuaccacgccaacaacuccaccgacaccgucgacaccguccucgagaagaacgucaccgucacccacuccgucaaccuccucgaggacaagcacaacggcaagcucugcaagcuccgcggcgucgccccccuccaccucggcaagugcaacaucgccggcuggauccucggcaaccccgagugcgagucccucuccaccgccuccuccugguccuacaucgucgagaccuccuccuccgacaacggcaccugcuaccccggcgacuucaucgacuacgaggagcuccgcgagcagcucuccuccgucuccuccuucgagcgcuucgagaucuuccccaagaccuccuccuggcccaaccacgacuccaacaagggcgucaccgccgccugcccccacgccggcgccaaguccuucuacaagaaccucaucuggcucgucaagaagggcaacuccuaccccaagcucuccaaguccuacaucaacgacaagggcaaggagguccucguccucuggggcauccaccaccccuccaccuccgccgaccagcagucccucuaccagaacgccgacgccuacgucuucgucgagaccucccgcuacuccaagaaguucaagcccgagaucgccauccgccccaagguccgcgaccaggagggccgcaugaacuacuacuggacccucgucgagcccggcgacaagaucaccuucgaggccaccggcaaccucgucgucccccgcuacgccuucgccauggagcgcaacgccggcuccggcaucaucaucuccgacacccccguccacgacugcaacaccaccugccagacccccaagggcgccaucaacaccucccuccccuuccagaacauccaccccaucaccaucggcaagugccccaaguacgucaaguccaccaagcuccgccucgccaccggccuccgcaacguccccuccauccagucccgcggccucuucggcgccaucgccggcuucaucgagggcggcuggaccggcauggucgacggcugguacggcuaccaccaccagaacgagcagggcuccggcuacgccgccgaccucaaguccacccagaacgccaucgacaagaucaccaacaaggucaacuccgucaucgagaagaugaacacccaguucaccgccgucggcaaggaguucaaccaccucgagaagcgcaucgagaaccucaacaagaaggucgacgacggcuuccucgacaucuggaccuacaacgccgagcuccucguccuccucgagaacgagcgcacccucgacuaccacgacuccaacgucaagaaccucuacgagaagguccgcucccagcucaagaacaacgccaaggagaucggcaacggcugcuucgaguucuaccacaagugcgacaacaccugcauggaguccgucaagaacggcaccuacgacuaccccaaguacuccgaggaggccaagcucaaccgcgaggagaucgacggcgucaagcucgaguccacccgcaucuaccagauccucgccaucuacuccaccgucgccuccucccucguccucgucgucucccucggcgccaucuccuucuggaugugcuccaacggcucccuccagugccgcaucugcaucuga

SEQ ID NO: 103164 - RNA, 1701 nt, Artificial Sequence
  derived and/or modified CDS sequence (opt2) from hemagglutinin__InfluenzaA__AEN68926
augaaggccauccucgucguccuccucuacaccuucgccaccgccaacgccgacacccucugcaucggcuaccacgccaacaacuccaccgacaccgucgacaccguccucgagaagaacgucaccgucacccacuccgucaaccuccucgaggacaagcacaacggcaagcucugcaagcuccgcggcgucgccccccuccaccucggcaagugcaacaucgccggcuggauccucggcaaccccgagugcgagucccucgccaccgccuccuccugguccuacaucgucgagaccuccaacuccgacaacggcaccugcuaccccggcgacuucaucgacuacgaggagcuccgcgagcagcucuccuccgucuccuccuucgagcgcuucgagaucuuccccaagaccuccuccuggcccaaccacgacuccaacaagggcgucaccgccgccugcccccacgccggcgccaaguccuucuacaagaaccucaucuggcucgucaagaagggcaacuccuaccccaagcucuccaaguccuacaucaacgacaagggccgcgagguccucguccucuggggcauccaccaccccuccaccuccgccgaccagcagucccucuaccagaacgccgacaccuacgucuucgucggcaccucccgcuacuccaagaaguucaagcccgagaucgccauccgccccaagguccgcgaccaggagggccgcaugaacuacuacuggacccucgucgagcccggcgacaagaucaccuucgaggccaccggcaaccucgucgucccccgcuacgccuucgccauggagcgcaacgccggcuccggcaucaucaucuccgacacccccguccacgacugcaacaccaccugccagacccccaagggcgccaucaacaccucccuccccuuccagaacauccaccccaucaccaucggcaagugccccaaguacgucaaguccaccaagcuccgccucgccaccggccuccgcaacguccccuccauccagucccgcggccucuucggcgccaucgccggcuucaucgagggcggcuggaccggcauggucgacggcugguacggcuaccaccaccagaacgagcagggcuccggcuacgccgccgaccucaaguccacccagaacgccaucgacgagaucaccaacaaggucaacuccgucaucgagaagaugaacacccaguucaccgccgucggcaaggaguucaaccaccucgagaagcgcaucgagaaccucaacaagaaggucgacgacggcuuccucgacaucuggaccuacaacgccgagcuccucguccuccucgagaacgagcgcacccucgacuaccacgacuccaacgucaagaaccucuacgagaagguccgcucccagcucaagaacaacgccaaggagaucggcaacggcugcuucgaguucuaccacaagugcgacaacaccugcauggaguccgucaagaacggcaccuacgacuaccccaaguacuccgaggaggccaagcucaaccgcgaggagaucgacggcgucaagcucgaguccacccgcaucuaccagauccucgccaucuacuccaccgucgccuccucccucguccucgucgucucccucggcgccaucuccuucuggaugugcuccaacggcucccuccagugccgcaucugcaucuga

SEQ ID NO: 103165 - RNA, 1701 nt, Artificial Sequence
  derived and/or modified CDS sequence (opt2) from hemagglutinin__InfluenzaA__AEN68927
augaaggccauccucgucguccuccucuacaccuucgccaccgccaacgccgacacccucugcaucggcuaccacgccaacaacuccaccgacaccgucgacaccguccucgagaagaacgucaccgucacccacuccgucaaccuccucgaggacaagcacaacggcaagcucugcaagcuccgcggcgucgccccccuccaccucggcaagugcaacaucgccggcuggauccucggcaaccccgagugcgagucccucuccaccgccuccuccugguccuacaucgucgagaccuccuccuccgacaacggcaccugcuaccccggcgacuucaucgacuacgaggagcuccgcgagcagcucuccuccgucuccuccuucgagcgcuucgagaucuuccccaagaccuccuccuggcccgaccacgacuccaacaagggcgucaccgccgccugcccccacgccggcgccaaguccuucuacaagaaccucaucuggcucgucaagaagggcaacuccuaccccaagcucuccaaguccuacaucaacgacaagggcaaggagguccucguccucuggggcauccaccaccccuccaccuccgccgaccagcagucccucuaccagaacgccgacgccuacgucuucgucggcaccucccgcuacuccaagaaguucaagcccgagaucgccauccgccccaagguccgcgaccaggagggccgcaugaacuacuacuggacccucgucgagcccggcgacaagaucaccuucgaggccaccggcaaccucgucgucccccgcuacgccuucgccauggagcgcaacgccggcuccggcaucaucaucuccgacacccccguccacgacugcaacaccaccugccagacccccaagggcgccaucaacaccucccuccccuuccagaacauccaccccaucaccaucggcaagugccccaaguacgucaaguccaccaagcuccgccucgccaccggccuccgcaacguccccuccauccagucccgcggccucuucggcgccaucgccggcuucaucgagggcggcuggaccggcauggucgacggcugguacggcuaccaccaccagaacgagcagggcuccggcuacgccgccgaccucaaguccacccagaacgccaucgacaagaucaccaacaaggucaacuccgucaucgagaagaugaacacccaguucaccgccgucggcaaggaguucaaccaccucgagaagcgcaucgagaaccucaacaagaaggucgacgacggcuuccucgacaucuggaccuacaacgccgagcuccucguccuccucgagaacgagcgcacccucgacuaccacgacuccaacgucaagaaccucuacgagaagguccgcaaccagcucaagaacaacgccaaggagaucggcaacggcugcuucgaguucuaccacaagugcgacaacaccugcauggaguccgucaagaacggcaccuacgacuaccccaaguacuccgaggaggccaagcucaaccgcgaggagaucgacggcgucaagcucgaguccacccgcaucuaccagauccucgccaucuacuccaccgucgccuccucccucguccucgucgucucccucggcgccaucuccuucuggaugugcuccaacggcucccuccagugccgcaucugcaucuga

SEQ ID NO: 103166 - RNA, 1701 nt, Artificial Sequence; identical to SEQ ID NO: 102291
  derived and/or modified CDS sequence (opt2) from hemagglutinin__InfluenzaA__AEN68928

SEQ ID NO: 103167 - RNA, 1701 nt, Artificial Sequence
  derived and/or modified CDS sequence (opt2) from hemagglutinin__InfluenzaA__AEN68929
augaaggccauccucgucguccuccucuacaccuucgccaccgccaacgccgacacccucugcaucggcuaccacgccaacaacuccaccgacaccgucgacaccguccucgagaagaacgucaccgucacccacuccgucaaccuccucgaggacaagcacaacggcaagcucugcaagcuccgcggcaucgccccccuccaccucggcaagugcaacaucgccggcuggauccucggcaaccccgagugcgagucccucuccaccgccuccuccugguccuacaucgucgagaccuccuccuccgacaacggcaccugcuaccccggcgacuucaucgacuacgaggagcuccgcgagcagcucuccuccgucuccuccuucgagcgcuucgagaucuuccccaagaccuccuccuggcccaaccacgacuccaacaagggcgucaccgccgccugcccccacgccggcgccaaguccuucuacaagaaccucaucuggcucgucaagaagggcaacuccuaccccaagcucuccaaguccuacaucaacgacaagggcaaggagguccucguccucuggggcauccaccaccccuccaccuccgccgaccagcagucccucuaccagaacgccgacgccuacgucuucgucggcaccucccgcuacuccaagaaguucaagcccgagaucgccauccgccccaagguccgcgaccaggagggccgcaugaacuacuacuggacccucgucgagcccggcgacaagaucaccuucgaggccaccggcaaccucgucgucccccgcuacgccuucgccauggagcgcaacgccggcuccggcaucaucaucuccgacacccccguccacgacugcaacaccaccugccagacccccaagggcgccaucaacaccucccuccccuuccagaacauccaccccaucaccaucggcaagugccccaaguacgucaaguccaccaagcuccgccucgccaccggccuccgcaacguccccuccauccagucccgcggccucuucggcgccaucgccggcuucaucgagggcggcuggaccggcauggucgacggcugguacggcuaccaccaccagaacgagcagggcuccggcuacgccgccgaccucaaguccacccagaacgccaucgacaagaucaccaacaaggucaacuccgucaucgagaagaugaacacccaguucaccgccgucggcaaggaguucaaccaccucgagaagcgcaucgagaaccucaacaagaaggucgacgacggcuuccucgacaucuggaccuacaacgccgagcuccucguccuccucgagaacgagcgcacccucgacuaccacgacuccaacgucaagaaccucuacgagaagguccgcucccagcucaagaacaacgccaaggagaucggcaacggcugcuucgaguucuaccacaagugcgacaacaccugcauggaguccgucaagaacggcaccuacgacuaccccaaguacuccgaggaggccaagcucaaccgcgaggagaucgacggcgucaagcucgaguccacccgcaucuaccagauccucgccaucuacuccaccgucgccuccucccucguccucgucgucucccucggcgccaucuccuucuggaugugcuccaacggcucccuccagugccgcaucugcaucuga

SEQ ID NO: 103168 - RNA, 1701 nt, Artificial Sequence; identical to SEQ ID NO: 101620
  derived and/or modified CDS sequence (opt2) from hemagglutinin__InfluenzaA__AEN68930

SEQ ID NO: 103169 - RNA, 1701 nt, Artificial Sequence; identical to SEQ ID NO: 101620
  derived and/or modified CDS sequence (opt2) from hemagglutinin__InfluenzaA__AEN68931

SEQ ID NO: 103170 - RNA, 1701 nt, Artificial Sequence; identical to SEQ ID NO: 101620
  derived and/or modified CDS sequence (opt2) from hemagglutinin__InfluenzaA__AEN68932

SEQ ID NO: 103171 - RNA, 1701 nt, Artificial Sequence
  derived and/or modified CDS sequence (opt2) from hemagglutinin__InfluenzaA__AEN69426
augaaggccauccucgucguccuccucuacaccuucgccaccuccaacgccgacacccucugcaucggcuaccacgccaacaacuccaccgacaccgucgacaccguccucgagaagaacgucaccgucacccacuccgucaaccuccucgaggacaagcacaacggcaagcucugcaagcuccgcggcgucgccccccuccaccucggcaagugcaacaucgccggcuggauccucggcaaccccgagugcgagucccucuccaccgccuccuccugguccuacaucgucgagaccuccuccuccgacaacggcaccugcuaccccggcaacuucaucgacuacgaggagcuccgcgagcagcucuccuccgucuccuccuucgagcgcuucgagaucuuccccaagaccuccuccuggcccgaccacgacuccaacaagggcgucaccgccgccugcccccacgccggcgccaaguccuucuacaagaaccucaucuggcucgucaagaagggcaacuccuaccccaagcucuccaaguccuacaucaacgacaagggcaaggagguccucguccucuggggcauccaccaccccuccaccuccgccgaccagcagucccucuaccagaacgccgacgccuacgucuucgucggcaccucccgcuacuccaagaaguucaagcccgagaucgccauccgccccaagguccgcgaccaggagggccgcaugaacuacuacuggacccucgucgagcccggcgacaagaucaccuucgaggccaccggcaaccucgucgccccccgcuacgccuucgccauggagcgcaacgccggcuccggcaucaucaucuccgacacccccguccacgacugcaacaccaccugccagacccccaagggcgccaucaacaccucccuccccuuccagaacauccaccccaucaccaucggcaagugccccaaguacgucaaguccaccaagcuccgccucgccaccggccuccgcaacguccccuccauccagucccgcggccucuucggcgccaucgccggcuucaucgagggcggcuggaccggcauggucgacggcugguacggcuaccaccaccagaacgagcagggcuccggcuacgccgccgaccucaaguccacccagaacgccaucgacaagaucaccaacaaggucaacuccgucaucgagaagaugaacacccaguucaccgccgucggcaaggaguucaaccaccucgagaagcgcaucgagaaccucaacaagaaggucgacgacggcuuccucgacaucuggaccuacaacgccgagcuccucguccuccucgagaacgagcgcacccucgacuaccacgacuccaacgucaagaaccucuacgagaagguccgcucccagcucaagaacaacgccaaggagaucggcaacggcugcuucgaguucuaccacaagugcgacaacaccugcauggaguccgucaagaacggcaccuacgacuaccccaaguacuccgaggaggccaagcucaaccgcgaggagaucgacggcgucaagcucgaguccacccgcaucuaccagauccucgccaucuacuccaccgucgccuccucccucguccucgucgucucccucggcgccaucuccuucuggaugugcuccaacggcucccuccagugccgcaucugcaucuga

SEQ ID NO: 103172 - RNA, 1701 nt, Artificial Sequence; identical to SEQ ID NO: 102956
  derived and/or modified CDS sequence (opt2) from hemagglutinin__InfluenzaA__AEN69475

SEQ ID NO: 103173 - RNA, 1701 nt, Artificial Sequence; identical to SEQ ID NO: 102956
  derived and/or modified CDS sequence (opt2) from hemagglutinin__InfluenzaA__AEN69481

SEQ ID NO: 103174 - RNA, 1701 nt, Artificial Sequence; identical to SEQ ID NO: 98958
  derived and/or modified CDS sequence (opt2) from hemagglutinin__InfluenzaA__AEO01032

SEQ ID NO: 103175 - RNA, 1701 nt, Artificial Sequence; identical to SEQ ID NO: 99058
  derived and/or modified CDS sequence (opt2) from hemagglutinin__InfluenzaA__AEO01033

SEQ ID NO: 103176 - RNA, 1701 nt, Artificial Sequence; identical to SEQ ID NO: 99058
  derived and/or modified CDS sequence (opt2) from hemagglutinin__InfluenzaA__AEO01034

SEQ ID NO: 103177 - RNA, 1701 nt, Artificial Sequence; identical to SEQ ID NO: 98692
  derived and/or modified CDS sequence (opt2) from hemagglutinin__InfluenzaA__AEO01035

SEQ ID NO: 103178 - RNA, 1701 nt, Artificial Sequence; identical to SEQ ID NO: 99058
  derived and/or modified CDS sequence (opt2) from hemagglutinin__InfluenzaA__AEO01036

SEQ ID NO: 103179 - RNA, 1701 nt, Artificial Sequence; identical to SEQ ID NO: 98947
  derived and/or modified CDS sequence (opt2) from hemagglutinin__InfluenzaA__AEO01037

SEQ ID NO: 103180 - RNA, 1701 nt, Artificial Sequence; identical to SEQ ID NO: 99058
  derived and/or modified CDS sequence (opt2) from hemagglutinin__InfluenzaA__AEO01038

SEQ ID NO: 103181 - RNA, 1701 nt, Artificial Sequence; identical to SEQ ID NO: 98885
  derived and/or modified CDS sequence (opt2) from hemagglutinin__InfluenzaA__AEO01039

SEQ ID NO: 103182 - RNA, 1701 nt, Artificial Sequence
  derived and/or modified CDS sequence (opt2) from hemagglutinin__InfluenzaA__AEO01040
augaaggccauccucgucguccuccucuacaccuucgccaccgccaacgccgacacccucugcaucggcuaccacgccaacaacuccaccgacaccgucgacaccguccucgagaagaacgucaccgucacccacuccgucaaccuccucgaggacaagcacaacggcaagcucugcaagcuccgcggcgucgccccccuccaccucggcaagugcaacaucgccggcuggauccucggcaaccccgagugcgagucccucuccaccgccuccuccugguccuacaucgucgagaccuccuccuccgacaacggcaccugcuaccccggcgacuucaucgacuacgaggagcuccgcgagcagcucuccuccgucuccuccuucgagcgcuucgagaucuuccccaagaccuccuccuggcccaaccacgacuccaacaagggcgucaccgccgccugcccccacgccggcgccaaguccuucuacaagaaccucaucuggcucgucaagaagggcaacuccuaccccaagcucuccaaguccuacaucaacgacaagggcaagaagguccucguccucuggggcauccaccaccccuccaccuccgccgaccagcagucccucuaccagaacgccgacgccuacgucuucgucggcaccucccgcuacuccaagaaguucaagcccgagaucgccauccgccccaagguccgcgaccaggagggccgcaugaacuacuacuggacccucaucgagcccggcgacaagaucaccuucgaggccaccggcaaccucgucgucccccgcuacgccuucaccauggagcgcaacgccggcuccggcaucaucaucuccgacacccccguccacgacugcaacaccaccugccagacccccaagggcgccaucaacaccucccuccccuuccagaacauccaccccaucaccaucggcaagugccccaaguacgucaaguccaccaagcuccgccucgccaccggccuccgcaacguccccuccauccagucccgcggccucuucggcgccaucgccggcuucaucgagggcggcuggaccggcauggucgacggcugguacggcuaccaccaccagaacgagcagggcuccggcuacgccgccgaccucaaguccacccagaacgccaucgacgagaucaccaacaaggucaacuccgucaucgagaagaugaacacccaguucaccgccgucggcaaggaguucaaccaccucgagaagcgcaucgagaaccucaacaagaaggucgacgacggcuuccucgacaucuggaccuacaacgccgagcuccucguccuccucgagaacgagcgcacccucgacuaccacgacuccaacgucaagaaccucuacgagaagguccgcucccagcucaagaacaacgccaaggagaucggcaacggcugcuucgaguucuaccacaagugcgacaacaccugcauggaguccgucaagaacggcaccuacgacuaccccaaguacuccgaggaggccaagcucaaccgcgaggagaucgacggcgucaagcucgaguccacccgcaucuaccagauccucgccaucuacuccaccgucgccuccucccucguccucgucgucucccucggcgccaucuccuucuggaugugcuccaacggcucccuccagugccgcaucugcaucuga

SEQ ID NO: 103183 - RNA, 1701 nt, Artificial Sequence; identical to SEQ ID NO: 98705
  derived and/or modified CDS sequence (opt2) from hemagglutinin__InfluenzaA__AEO01041

SEQ ID NO: 103184 - RNA, 1701 nt, Artificial Sequence; identical to SEQ ID NO: 99058
  derived and/or modified CDS sequence (opt2) from hemagglutinin__InfluenzaA__AEO01042

SEQ ID NO: 103185 - RNA, 1701 nt, Artificial Sequence
  derived and/or modified CDS sequence (opt2) from hemagglutinin__InfluenzaA__AEO01043
augaaggccauccucgucguccuccucuacaccuucgccaccgccaacgccgacacccucugcaucggcuaccacgccaacaacuccaccgacaccgucgacaccguccucgagaagaacgucaccgucacccacuccgucaaccuccucgaggacaagcacaacggcaagcucugcaagcuccgcggcgucgccccccuccaccucggcaagugcaacaucgccggcuggauccucggcaaccccgagugcgagucccucuccaccgccuccuccugguccuacaucgucgagaccuccuccuccaacaacggcaccugcuaccccggcgacuucaucgacuacgaggagcuccgcgagcagcucuccuccgucuccuccuucgagcgcuucgagaucuuccccaagaccuccuccuggcccaaccacgacuccaacaagggcgucaccgccgccugcccccacgccggcgccaaguccuucuacaagaaccucaucuggcucgucaagaagggcaacuccuaccccaagcucuccaaguccuacaucaacgacaagggcaaggagguccucguccucuggggcauccaccaccccuccaccuccgccgaccagcagucccucuaccagaacgccgacgccuacgucuucgucggcaccucccgcuacuccaagaaguucaagcccgagaucgccauccgccccaagguccgcgagcaggagggccgcaugaacuacuacuggacccucgucgagcccggcgacaagaucaccuucgaggccaccggcaaccucgucgucccccgcuacgccuucgccauggagcgcaacgccggcuccggcaucaucaucuccgacacccccguccacgacugcaacaccaccugccagacccccaagggcgccaucaacaccucccuccccuuccagaacauccaccccaucaccaucggcaagugccccaaguacgucaaguccaccaagcuccgccucgccaccggccuccgcaacguccccuccauccagucccgcggccucuucggcgccaucgccggcuucaucgagggcggcuggaccggcauggucgacggcugguacggcuaccaccaccagaacgagcagggcuccggcuacgccgccgaccucaaguccacccagaacgccaucgacgagaucaccaacaaggucaacuccgucaucgagaagaugaacacccaguucaccgccgucggcaaggaguucaaccaccucgagaagcgcaucgagaaccucaacaagaaggucgacgacggcuuccucgacaucuggaccuacaacgccgagcuccucguccuccucgagaacgagcgcacccucgacuaccacgacuccaacgucaagaaccucuacgagaagguccgcucccagcucaagaacaacgccaaggagaucggcaacggcugcuucgaguucuaccacaagugcgacaacaccugcauggaguccgucaagaacggcaccuacgacuaccccaaguacuccgaggaggccaagcucaaccgcgaggagaucgacggcgucaagcucgaguccacccgcaucuaccagauccucgccaucuacuccaccgucgccuccucccucguccucgucgucucccucggcgccaucuccuucuggaugugcuccaacggcucccuccagugccgcaucugcaucuga

SEQ ID NO: 103186 - RNA, 1701 nt, Artificial Sequence; identical to SEQ ID NO: 98705
  derived and/or modified CDS sequence (opt2) from hemagglutinin__InfluenzaA__AEO01044

SEQ ID NO: 103187 - RNA, 1701 nt, Artificial Sequence
  derived and/or modified CDS sequence (opt2) from hemagglutinin__InfluenzaA__AEO01045
augaaggccauccucgucguccuccucuacaccuucgccaccgccaacgccgacacccucugcaucggcuaccacgccaacaacuccaccgacaccgucgacaccguccucgagaagaacgucaccgucacccacuccgucaaccuccucgaggacaagcacaacggcaagcucugcaagcuccgcggcgucgccccccuccaccucggcaagugcaacaucgccggcuggauccucggcaaccucgagugcgagucccucuccaccgccuccuccugguccuacaucgucgagaccuccuccuccgacaacggcaccugcuaccccggcgacuucaucgacuacgaggagcuccgcgagcagcucuccuccgucuccuccuucgagcgcuucgagaucuuccccaagaccuccuccuggcccaaccacgacuccaacaagggcgucaccgccgccugcccccacgccggcgccaaguccuucuacaagaaccucaucuggcucgucaagaagggcaacuccuaccccaagcucuccaaguccuacaucaacgacaagggcaaggagguccucguccucuggggcauccaccaccccuccaccuccgccgaccagcagucccucuaccagaacgccgacgccuacgucuucgucggcaccucccgcuacuccaagaaguucaagcccgagaucgccauccgccccaagguccgcgaccaggagggccgcaugaacuacuacuggacccucgucgagcccggcgacaagaucaccuucgaggccaccggcaaccucgucgucccccgcuacgccuucgccauggagcgcaacgccggcuccggcaucaucaucuccgacacccccguccacgacugcaacaccaccugccagacccccaagggcgccaucaacaccucccuccccuuccagaacauccaccccaucaccaucggcaagugccccaaguacgucaaguccaccaagcuccgccucgccaccggccuccgcaacguccccuccauccagucccgcggccucuucggcgccaucgccggcuucaucgagggcggcuggaccggcauggucgacggcugguacggcuaccaccaccagaacgagcagggcuccggcuacgccgccgaccucaaguccacccagaacgccaucgacgagaucaccaacaaggucaacuccgucaucgagaagaugaacacccaguucaccgccgucggcaaggaguucaaccaccucgagaagcgcaucgagaaccucaacaagaaggucgacgacggcuuccucgacaucuggaccuacaacgccgagcuccucguccuccucgagaacgagcgcacccucgacuaccacgacuccaacgucaagaaccucuacgagaagguccgcucccagcucaagaacaacgccaaggagaucggcaacggcugcuucgaguucuaccacaagugcgacaacaccugcauggaguccgucaagaacggcaccuacgacuaccccaaguacuccgaggaggccaagcucaaccgcgaggagaucgacggcgucaagcucgaguccacccgcaucuaccagauccucgccaucuacuccaccgucgccuccucccucguccucgucgucucccucggcgccaucuccuucuggaugugcuccaacggcucccuccagugccgcaucugcaucuga

SEQ ID NO: 103188 - RNA, 1701 nt, Artificial Sequence; identical to SEQ ID NO: 98705
  derived and/or modified CDS sequence (opt2) from hemagglutinin__InfluenzaA__AEO01046

SEQ ID NO: 103189 - RNA, 1701 nt, Artificial Sequence; identical to SEQ ID NO: 98705
  derived and/or modified CDS sequence (opt2) from hemagglutinin__InfluenzaA__AEO01047

SEQ ID NO: 103190 - RNA, 1701 nt, Artificial Sequence
  derived and/or modified CDS sequence (opt2) from hemagglutinin__InfluenzaA__AEO01048
augaaggccauccucgucguccuccucuacaccuucgccaccgccaacgccgacacccucugcaucggcuaccacgccaacaacuccaccgacaccgucgacaccguccucgagaagaacgucaccgucacccacuccgucaaccuccucgaggacaagcacaacggcaagcucugcaagcuccgcggcgucgccccccuccaccucggcaagugcaacaucgccggcuggauccucggcaaccccgagugcgagucccucuccaccgccuccuccugguccuacaucgucgagaccuccuccuccgacaacggcaccugcuaccccggcgacuucaucgacuacgaggagcuccgcgagcagcucuccuccgucuccuccuucgagcgcuucgagaucuuccccaagaccuccuccuggcccaaccacgacuccaacaagggcgucaccgccgccugcccccacgccggcgccaaguccuucuacaagaaccucaucuggcucgucaagaagggcaacuccuaccccaagcucuccaaguccuacaucaacgacaagggcaaggagguccucguccucuggggcauccaccaccccuccaccuccgccgaccagcagucccucuaccagaacgccgacgccuacgucuucgucggcaccucccgcuacuccaagaaguucaagcccgagaucgccauccgccccaagguccgcgaccaggagggccgcaugaacuacuacuggacccucgucgagcccggcgacaagaucaccuucgaggccaccggcaaccucgucgucccccgcuacgccuucgccauggagcgcaacgccggcuccggcaucaucaucuccgacacccccguccacgacugcaacaccaccugccagacccccaagggcgccaucaacaccucccuccccuuccagaacauccaccccaucaccaucggcaagugccccaaguacgucaaguccaccaagcuccgccucgccaccggccuccgcaacguccccuccauccagucccgcggccucuucggcgccaucgccggcuucaucgagggcggcuggaccggcauggucgacggcugguacggcuaccaccaccagaacgagcagggcuccggcuacgccgccgaccucaaguccacccagaacgccaucgacgagaucaccaacaaggucaacuccgucaucgagaagaugaacacccaguucaccgccgucggcaaggaguucaaccaccucgagaagcgcaucgagaaccucaacaagaaggucgacgacggcuuccucgacaucuggaccuacaacgccgagcuccucguccuccucgagaacgagcgcacccucgacuaccacgacuccaacgucaagaaccucuacgagaagguccgcucccagcucaagaacaacgccaaggagaucggcaacggcugcuucgaguucuaccacaagugcgacaacaccugcauggaguccgucaagaacggcaccuacgacuaccccaaguacuccgaggaggccaagcucaaccgcgaggagaucgacggcgucaagcucgaguccacccgcaucuaccagauccucgccaucuacuccaccgucgccuccucccucguccucgucgucucccucggcgccaucuccuucuggaugugcuccaacggcucccuccagugcaagaucugcaucuga

SEQ ID NO: 103191 - RNA, 1701 nt, Artificial Sequence; identical to SEQ ID NO: 99603
  derived and/or modified CDS sequence (opt2) from hemagglutinin__InfluenzaA__AEO01049

SEQ ID NO: 103192 - RNA, 1701 nt, Artificial Sequence; identical to SEQ ID NO: 98705
  derived and/or modified CDS sequence (opt2) from hemagglutinin__InfluenzaA__AEO01050

SEQ ID NO: 103193 - RNA, 1701 nt, Artificial Sequence; identical to SEQ ID NO: 99058
  derived and/or modified CDS sequence (opt2) from hemagglutinin__InfluenzaA__AEO01051

SEQ ID NO: 103194 - RNA, 1701 nt, Artificial Sequence
  derived and/or modified CDS sequence (opt2) from hemagglutinin__InfluenzaA__AEO01052
augaaggccaucaucgucguccuccucuacaccuucgccaccgccaacgccgacacccucugcaucggcuaccacgccaacaacuccaccgacaccgucgacaccguccucgagaagaacgucaccgucacccacuccgucaaccuccucgaggacaagcacaacggcaagcucugcaagcuccgcggcgucgccccccuccaccucggcaagugcaacaucgccggcuggauccucggcaaccccgagugcgagucccucuccaccgccuccuccugguccuacaucgucgagaccuccuccuccgacaacggcaccugcuaccccggcgacuucaucgacuacgaggagcuccgcgagcagcucuccuccgucuccuccuucgagcgcuucgagaucuuccccaagaccuccuccuggcccaaccacgacuccaacaagggcgucaccgccgccugcccccacgccggcgccaaguccuucuacaagaaccucaucuggcucgucaagaagggcaacuccuaccccaagcucuccaaguccuacaucaacgacaagggcaaggagguccucguccucuggggcauccaccaccccuccaccuccgccgaccagcagucccucuaccagaacgccgacgccuacgucuucgucggcaccucccgcuacuccaagaaguucaagcccgagaucgccauccgccccaagguccgcgaccaggagggccgcaugaacuacuacuggacccucgucgagcccggcgacaagaucaccuucgaggccaccggcaaccucgucgucccccgcuacgccuucgccauggagcgcaacgccggcuccggcaucaucaucuccgacacccccguccacgacugcaacaccaccugccagacccccaagggcgccaucaacaccucccuccccuuccagaacauccaccccaucaccaucggcaagugccccaaguacgucaaguccaccaagcuccgccucgccaccggccuccgcaacguccccuccauccagucccgcggccucuucggcgccaucgccggcuucaucgagggcggcuggaccggcauggucgacggcugguacggcuaccaccaccagaacgagcagggcuccggcuacgccgccgaccucaaguccacccagaacgccaucgacaagaucaccaacaaggucaacuccgucaucgagaagaugaacacccaguucaccgccgucggcaaggaguucaaccaccucgagaagcgcaucgagaaccucaacaagaaggucgacgacggcuuccucgacaucuggaccuacaacgccgagcuccucguccuccucgagaacgagcgcacccucgacuaccacgacuccaacgucaagaaccucuacgagaagguccgcucccagcucaagaacaacgccaaggagaucggcaacggcugcuucgaguucuaccacaagugcgacaacaccugcauggaguccgucaagaacggcaccuacgacuaccccaaguacuccgaggaggccaagcucaaccgcgaggagaucgacggcgucaagcucgaguccacccgcaucuaccagauccucgccaucuacuccaccgucgccuccucccucguccucgucgucucccucggcgccaucuccuucuggaugugcuccaacggcucccuccagugccgcaucugcaucuga

SEQ ID NO: 103195 - RNA, 1701 nt, Artificial Sequence; identical to SEQ ID NO: 99058
  derived and/or modified CDS sequence (opt2) from hemagglutinin__InfluenzaA__AEO01053

SEQ ID NO: 103196 - RNA, 1701 nt, Artificial Sequence; identical to SEQ ID NO: 98705
  derived and/or modified CDS sequence (opt2) from hemagglutinin__InfluenzaA__AEO01054

SEQ ID NO: 103197 - RNA, 1701 nt, Artificial Sequence; identical to SEQ ID NO: 99517
  derived and/or modified CDS sequence (opt2) from hemagglutinin__InfluenzaA__AEO01055

SEQ ID NO: 103198 - RNA, 1701 nt, Artificial Sequence; identical to SEQ ID NO: 99058
  derived and/or modified CDS sequence (opt2) from hemagglutinin__InfluenzaA__AEO01056

SEQ ID NO: 103199 - RNA, 1701 nt, Artificial Sequence; identical to SEQ ID NO: 98705
  derived and/or modified CDS sequence (opt2) from hemagglutinin__InfluenzaA__AEO01057

SEQ ID NO: 103200 - RNA, 1701 nt, Artificial Sequence; identical to SEQ ID NO: 98705
  derived and/or modified CDS sequence (opt2) from hemagglutinin__InfluenzaA__AEO01058

SEQ ID NO: 103201 - RNA, 1701 nt, Artificial Sequence; identical to SEQ ID NO: 98705
  derived and/or modified CDS sequence (opt2) from hemagglutinin__InfluenzaA__AEO01059

SEQ ID NO: 103202 - RNA, 1701 nt, Artificial Sequence; identical to SEQ ID NO: 98705
  derived and/or modified CDS sequence (opt2) from hemagglutinin__InfluenzaA__AEO01060

SEQ ID NO: 103203 - RNA, 1701 nt, Artificial Sequence; identical to SEQ ID NO: 98705
  derived and/or modified CDS sequence (opt2) from hemagglutinin__InfluenzaA__AEO01061

SEQ ID NO: 103204 - RNA, 1701 nt, Artificial Sequence; identical to SEQ ID NO: 98705
  derived and/or modified CDS sequence (opt2) from hemagglutinin__InfluenzaA__AEO01062

SEQ ID NO: 103205 - RNA, 1701 nt, Artificial Sequence; identical to SEQ ID NO: 98705
  derived and/or modified CDS sequence (opt2) from hemagglutinin__InfluenzaA__AEO01063

SEQ ID NO: 103206 - RNA, 1701 nt, Artificial Sequence; identical to SEQ ID NO: 98705
  derived and/or modified CDS sequence (opt2) from hemagglutinin__InfluenzaA__AEO01064

SEQ ID NO: 103207 - RNA, 1701 nt, Artificial Sequence; identical to SEQ ID NO: 98947
  derived and/or modified CDS sequence (opt2) from hemagglutinin__InfluenzaA__AEO01065

SEQ ID NO: 103208 - RNA, 1701 nt, Artificial Sequence; identical to SEQ ID NO: 99058
  derived and/or modified CDS sequence (opt2) from hemagglutinin__InfluenzaA__AEO01066

SEQ ID NO: 103209 - RNA, 1701 nt, Artificial Sequence
  derived and/or modified CDS sequence (opt2) from hemagglutinin__InfluenzaA__AEO01067
augaaggccauccucgucguccuccucuacaccuucgccaccgccaacgccgacacccucugcaucggcuaccacgccaacaacuccaccgacaccgucgacaccguccucgagaagaacgucaccgucacccacuccgucaaccuccucgaggacaagcacaacggcaagcucugcaagcuccgcggcgucgccccccuccaccucggcaagugcaacaucgccggcuggauccucggcaaccccgagugcgagucccucuccaccgccuccuccugguccuacaucgucgagaccuccuccuccgacaacggcaccugcuaccccggcgacuucaucgacuacgaggagcuccgcgagcagcucuccuccgucuccuccuucgagcgcuucgagaucuuccccaagaccuccuccuggcccaaccacgacuccaacaagggcgucaccgccgccugcccccacgccggcgccaaguccuucuacaagaaccucaucuggcucgucaagaagggcaacuccuaccccaagcucuccaaguccuacaucaacgacaagggcaaggagguccucguccucuggggcauccaccaccccuccaccuccgccgaccagcagucccucuaccagaacgccgacgccuacgucuucgucggcaccucccgcuacuccaagaaguucaagcccgagauggccauccgccccaagguccgcgaccaggagggccgcaugaacuacuacuggacccucgucgagcccggcgacaagaucaccuucgaggccaccggcaaccucgucgucccccgcuacgccuucgccauggagcgcaacgccggcuccggcaucaucaucuccgacacccccguccacgacugcaacaccaccugccagacccccaagggcgccaucaacaccucccuccccuuccagaacauccaccccaucaccaucggcaagugccccaaguacgucaaguccaccaagcuccgccucgccaccggccuccgcaacguccccuccauccagucccgcggccucuucggcgccaucgccggcuucaucgagggcggcuggaccggcauggucgacggcugguacggcuaccaccaccagaacgagcagggcuccggcuacgccgccgaccucaaguccacccagaacgccaucgacgagaucaccaacaaggucaacuccgucaucgagaagaugaacacccaguucaccgccgucggcaaggaguucaaccaccucgagaagcgcaucgagaaccucaacaagaaggucgacgacggcuuccucgacaucuggaccuacaacgccgagcuccucguccuccucgagaacgagcgcacccucgacuaccacgacuccaacgucaagaaccucuacgagaagguccgcucccagcucaagaacaacgccaaggagaucggcaacggcugcuucgaguucuaccacaagugcgacaacaccugcauggaguccgucaagaacggcaccuacgacuaccccaaguacuccgaggaggccaagcucaaccgcgaggagaucgacggcgucaagcucgaguccacccgcaucuaccagauccucgccaucuacuccaccgucgccuccucccucguccucgucgucucccucggcgccaucuccuucuggaugugcuccaacggcucccuccagugccgcaucugcaucuga

SEQ ID NO: 103210 - RNA, 1701 nt, Artificial Sequence; identical to SEQ ID NO: 99058
  derived and/or modified CDS sequence (opt2) from hemagglutinin__InfluenzaA__AEO01068

SEQ ID NO: 103211 - RNA, 1701 nt, Artificial Sequence; identical to SEQ ID NO: 98705
  derived and/or modified CDS sequence (opt2) from hemagglutinin__InfluenzaA__AEO01069

SEQ ID NO: 103212 - RNA, 1701 nt, Artificial Sequence; identical to SEQ ID NO: 99058
  derived and/or modified CDS sequence (opt2) from hemagglutinin__InfluenzaA__AEO01070

SEQ ID NO: 103213 - RNA, 1701 nt, Artificial Sequence; identical to SEQ ID NO: 98705
  derived and/or modified CDS sequence (opt2) from hemagglutinin__InfluenzaA__AEO01071

SEQ ID NO: 103214 - RNA, 1701 nt, Artificial Sequence
  derived and/or modified CDS sequence (opt2) from hemagglutinin__InfluenzaA__AEO01073
augaaggccauccucgucguccuccucuacaccuucgccaccgccaacgccgacacccucugcaucggcuaccacgccaacaacuccaccgacaccgucgacaccguccucgagaagaacgucaccgucacccacuccgucaaccuccucgaggacaagcacaacggcaagcucugcaagcuccgcggcgucgccccccuccaccucggcaagugcaacaucgccggcuggauccucggcaaccccgagugcgagucccucuccaccgccuccuccugguccuacaucgucgagaccuccuccuccgacaacggcaccugcuaccccggcgacuucaucgacuacgaggagcuccgcgagcagcucuccuccgucuccuccuucgagcgcuucgagaucuuccccaagaccuccuccuggcccaaccacgacuccaacaagggcgucaccgccgccugcccccacgccggcgccaaguccuucuacaagaaccucaucuggcucgucaagaagggcaacuccuaccccaagcucuccaaguccuacaucaacgacaagggcaaggagguccucguccucuggggcauccaccaccccuccaccuccgccgaccagcagucccucuaccagaacgccgacgccuacgucuucgucggcaccucccgcuacuccaagaaguucaagcccgagaucgccauccgccccaagguccgcgaccaggagggccgcaugaacuacuacuggacccucgucgagcccggcgacaagaucaccuucgaggccaccggcaaccucgucgucccccgcuacgccuucgccauggagcgcaacgccggcuccggcaucaucaucuccgacacccccguccacgacugcaacaccaccugccagacccccaagggcgccgucaacaccucccuccccuuccagaacauccaccccaucaccaucggcaagugccccaaguacgucaaguccaccaagcuccgccucgccaccggccuccgcaacguccccuccauccagucccgcggccucuucggcgccaucgccggcuucaucgagggcggcuggaccggcauggucgacggcugguacggcuaccaccaccagaacgagcagggcuccggcuacgccgccgaccucaaguccacccagaacgccaucgacgagaucaccaacaaggucaacuccgucaucgagaagaugaacacccaguucaccgccgucggcaaggaguucaaccaccucgagaagcgcaucgagaaccucaacaagaaggucgacgacggcuuccucgacaucuggaccuacaacgccgagcuccucguccuccucgagaacgagcgcacccucgacuaccacgacuccaacgucaagaaccucuacgagaagguccgcucccagcucaagaacaacgccaaggagaucggcaacggcugcuucgaguucuaccacaagugcgacaacaccugcauggaguccgucaagaacggcaccuacgacuaccccaaguacuccgaggaggccaagcucaaccgcgaggagaucgacggcgucaagcucgaguccacccgcaucuaccagauccucgccaucuacuccaccgucgccuccucccucguccucgucgucucccucggcgccaucuccuucuggaugugcuccaacggcucccuccagugccgcaucugcaucuga

SEQ ID NO: 103215 - RNA, 1701 nt, Artificial Sequence; identical to SEQ ID NO: 98947
  derived and/or modified CDS sequence (opt2) from hemagglutinin__InfluenzaA__AEO01074

SEQ ID NO: 103216 - RNA, 1701 nt, Artificial Sequence; identical to SEQ ID NO: 99058
  derived and/or modified CDS sequence (opt2) from hemagglutinin__InfluenzaA__AEO01075

SEQ ID NO: 103217 - RNA, 1701 nt, Artificial Sequence; identical to SEQ ID NO: 99058
  derived and/or modified CDS sequence (opt2) from hemagglutinin__InfluenzaA__AEO01076

SEQ ID NO: 103218 - RNA, 1701 nt, Artificial Sequence
  derived and/or modified CDS sequence (opt2) from hemagglutinin__InfluenzaA__AEO01077
augaaggccauccucgucguccuccucuacaccuucgccaccgccaacgccgacacccucugcaucggcuaccacgccaacaacuccaccgacaccgucgacaccguccucgagaagaacgucaccgucacccacuccgucaaccuccucgaggacaagcacaacggcaagcucugcaagcuccgcggcgucgccccccuccaccucggcaagugcaacaucgccggcuggauccucggcaaccccgagugcgagucccucuccaccgccuccuccugguccuacaucgucgagaccuccuccuccgacaacggcaccugcuaccccggcgacuucaucgacuacgaggagcuccgcgagcagcucuccuccgucuccuccuucgagcgcuucgagaucuuccccaagaccuccuccuggcccaaccacgacuccaacaagggcgucaccgccgccugcccccacgccggcgccaaguccuucuacaagaaccucaucuggcucgucaagaagggcaacuccuaccccaagcucuccaaguccuacaucaacgacaagggcaaggagguccucguccucuggggcauccaccaccccuccaccuccgccgaccagcagucccucuaccagaacgccgacgccuacgucuucgucggcaccucccgcuacuccaagaaguucaagcccgagaucgccauccgccccaagguccgcgagcaggagggccgcaugaacuacuacuggacccucgucgagcccggcgacaagaucaccuucgaggccaccggcaaccucgucgucccccgcuacgccuucgccauggagcgcaacgccggcuccggcaucaucaucuccgacacccccguccacgacugcaacaccaccugccagacccccaagggcgccaucaacaccucccuccccuuccagaacauccaccccaucaccaucggcaagugccccaaguacgucaaguccaccaagcuccgccucgccaccggccuccgcaacguccccuccauccagucccgcggccucuucggcgccaucgccggcuucaucgagggcggcuggaccggcauggucgacggcugguacggcuaccaccaccagaacgagcagggcuccggcuacgccgccgaccucaaguccacccagaacgccaucgacgagaucaccaacaaggucaacuccgucaucgagaagaugaacacccaguucaccgccgucggcaaggaguucaaccaccucgagaagcgcaucgagaaccucaacaagaaggucgacgacggcuuccucgacaucuggaccuacaacgccgagcuccucguccuccucgagaacgagcgcacccucgacuaccacgacuccaacgucaagaaccucuacgagaagguccgcucccagcucaagaacaacgccaaggagaucggcaacggcugcuucgaguucuaccacaagugcgacaacaccugcauggagaacgucaagaacggcaccuacgacuaccccaaguacuccgaggaggccaagcucaaccgcgaggagaucgacggcgucaagcucgaguccacccgcaucuaccagauccucgccaucuacuccaccgucgccuccucccucguccucgucgucucccucggcgccaucuccuucuggaugugcuccaacggcucccuccagugccgcaucugcaucuga

SEQ ID NO: 103219 - RNA, 1701 nt, Artificial Sequence; identical to SEQ ID NO: 98705
  derived and/or modified CDS sequence (opt2) from hemagglutinin__InfluenzaA__AEO01078

SEQ ID NO: 103220 - RNA, 1701 nt, Artificial Sequence; identical to SEQ ID NO: 98705
  derived and/or modified CDS sequence (opt2) from hemagglutinin__InfluenzaA__AEO01079

SEQ ID NO: 103221 - RNA, 1701 nt, Artificial Sequence; identical to SEQ ID NO: 98705
  derived and/or modified CDS sequence (opt2) from hemagglutinin__InfluenzaA__AEO01080

SEQ ID NO: 103222 - RNA, 1701 nt, Artificial Sequence; identical to SEQ ID NO: 99058
  derived and/or modified CDS sequence (opt2) from hemagglutinin__InfluenzaA__AEO01081

SEQ ID NO: 103223 - RNA, 1701 nt, Artificial Sequence; identical to SEQ ID NO: 98705
  derived and/or modified CDS sequence (opt2) from hemagglutinin__InfluenzaA__AEO01082

SEQ ID NO: 103224 - RNA, 1701 nt, Artificial Sequence; identical to SEQ ID NO: 98705
  derived and/or modified CDS sequence (opt2) from hemagglutinin__InfluenzaA__AEO01083

SEQ ID NO: 103225 - RNA, 1701 nt, Artificial Sequence; identical to SEQ ID NO: 98705
  derived and/or modified CDS sequence (opt2) from hemagglutinin__InfluenzaA__AEO01084

SEQ ID NO: 103226 - RNA, 1701 nt, Artificial Sequence; identical to SEQ ID NO: 99058
  derived and/or modified CDS sequence (opt2) from hemagglutinin__InfluenzaA__AEO01085

SEQ ID NO: 103227 - RNA, 1701 nt, Artificial Sequence; identical to SEQ ID NO: 98705
  derived and/or modified CDS sequence (opt2) from hemagglutinin__InfluenzaA__AEO01086

SEQ ID NO: 103228 - RNA, 1701 nt, Artificial Sequence; identical to SEQ ID NO: 99058
  derived and/or modified CDS sequence (opt2) from hemagglutinin__InfluenzaA__AEO01087

SEQ ID NO: 103229 - RNA, 1701 nt, Artificial Sequence; identical to SEQ ID NO: 98885
  derived and/or modified CDS sequence (opt2) from hemagglutinin__InfluenzaA__AEO01088

SEQ ID NO: 103230 - RNA, 1701 nt, Artificial Sequence; identical to SEQ ID NO: 99058
  derived and/or modified CDS sequence (opt2) from hemagglutinin__InfluenzaA__AEO01089

SEQ ID NO: 103231 - RNA, 1701 nt, Artificial Sequence; identical to SEQ ID NO: 99058
  derived and/or modified CDS sequence (opt2) from hemagglutinin__InfluenzaA__AEO01090

SEQ ID NO: 103232 - RNA, 1701 nt, Artificial Sequence; identical to SEQ ID NO: 99058
  derived and/or modified CDS sequence (opt2) from hemagglutinin__InfluenzaA__AEO01091

SEQ ID NO: 103233 - RNA, 1701 nt, Artificial Sequence
  derived and/or modified CDS sequence (opt2) from hemagglutinin__InfluenzaA__AEO01092
augaaggccauccucgucguccuccucuacaccuucgccaccgccaacgccgacacccucugcaucggcuaccacgccaacaacuccaccgacaccgucgacaccguccucgagaagaacgucaccgucacccacuccgucaaccuccucgaggacaagcacaacggcaagcucugcaagcuccgcggcgucgccccccuccaccucggcaagugcaacaucgccggcuggauccucggcaaccccgagugcgagucccucuccaccgccuccuccugguccuacaucgucgagaccuccuccuccgacaacggcaccugcuaccccggcgacuucaucgacuacgaggagcuccgcgagcagcucuccuccgucuccuccuucgagcgcuucgagaucuuccccaagaccuccuccuggcccaaccacgacuccaacaagggcgucaccgccgccugcccccacgccggcgccaaguccuucuacaagaaccucaucuggcucgucaagaagggcaacuccuaccccaagcucuccaaguccuacaucaacgacaagggcaaggagguccucguccucuggggcauccaccaccccuccaccuccgccgaccagcagucccucuaccagaacgccgacgccuacgucuucgucggcaccucccgcuacuccaagaaguucaagcccgagaucgccauccgccccaagguccgcgaccaggagggccgcaugaacuacuacuggacccucgucgagcccggcgacaagaucaccuucgaggccaccggcaaccucgucgucccccgcuacgccuucgccauggagcgcaacgccggcuccggcaucaucaucuccgacacccccguccacgacugcaacaccaccugccagacccccaagggcgccaucaacaccucccuccccuuccagaacauccaccccaucaccaucggcaagugccccaaguacgucaaguccaccaagcuccgccucgccaccggccuccgcaacguccccuccauccagucccgcggccucuucggcgccaucgccggcuucaucgagggcggcuggaccggcauggucgacggcugguacggcuaccaccaccagaacgagcagggcuccggcuacgccgccgaccucaaguccacccagaacgccaucgacgagaucaccaacaaggucaacuccgucaucgagaagaugaacacccaguucaccgccgucggcaaggaguucaaccaccucgagaagcgcaucgagaaccucaacaagaaggucgacgacggcuuccucgacaucuggaccuacaacgccgagcuccucguccuccucgagaacgagcgcacccucgacuaccacgacuccaacgucaagaaccucuacgagcgcguccgcucccagcucaagaacaacgccaaggagaucggcaacggcugcuucgaguucuaccacaagugcgacaacaccugcauggaguccgucaagaacggcaccuacgacuaccccaaguacuccgaggaggccaagcucaaccgcgaggagaucgacggcgucaagcucgaguccacccgcaucuaccagauccucgccaucuacuccaccgucgccuccucccucguccucgucgucucccucggcgccaucuccuucuggaugugcuccaacggcucccuccagugccgcaucugcaucuga

SEQ ID NO: 103234 - RNA, 1701 nt, Artificial Sequence; identical to SEQ ID NO: 98705
  derived and/or modified CDS sequence (opt2) from hemagglutinin__InfluenzaA__AEO01093

SEQ ID NO: 103235 - RNA, 1701 nt, Artificial Sequence; identical to SEQ ID NO: 98705
  derived and/or modified CDS sequence (opt2) from hemagglutinin__InfluenzaA__AEO01094

SEQ ID NO: 103236 - RNA, 1701 nt, Artificial Sequence; identical to SEQ ID NO: 101912
  derived and/or modified CDS sequence (opt2) from hemagglutinin__InfluenzaA__AEO01095

SEQ ID NO: 103237 - RNA, 1701 nt, Artificial Sequence; identical to SEQ ID NO: 99058
  derived and/or modified CDS sequence (opt2) from hemagglutinin__InfluenzaA__AEO01096

SEQ ID NO: 103238 - RNA, 1701 nt, Artificial Sequence; identical to SEQ ID NO: 99058
  derived and/or modified CDS sequence (opt2) from hemagglutinin__InfluenzaA__AEO01097

SEQ ID NO: 103239 - RNA, 1701 nt, Artificial Sequence; identical to SEQ ID NO: 99058
  derived and/or modified CDS sequence (opt2) from hemagglutinin__InfluenzaA__AEO01098

SEQ ID NO: 103240 - RNA, 1701 nt, Artificial Sequence; identical to SEQ ID NO: 98705
  derived and/or modified CDS sequence (opt2) from hemagglutinin__InfluenzaA__AEO01099

SEQ ID NO: 103241 - RNA, 1701 nt, Artificial Sequence; identical to SEQ ID NO: 98947
  derived and/or modified CDS sequence (opt2) from hemagglutinin__InfluenzaA__AEO01100

SEQ ID NO: 103242 - RNA, 1701 nt, Artificial Sequence; identical to SEQ ID NO: 98705
  derived and/or modified CDS sequence (opt2) from hemagglutinin__InfluenzaA__AEO01101

SEQ ID NO: 103243 - RNA, 1701 nt, Artificial Sequence; identical to SEQ ID NO: 98705
  derived and/or modified CDS sequence (opt2) from hemagglutinin__InfluenzaA__AEO01102

SEQ ID NO: 103244 - RNA, 1701 nt, Artificial Sequence; identical to SEQ ID NO: 99058
  derived and/or modified CDS sequence (opt2) from hemagglutinin__InfluenzaA__AEO01103

SEQ ID NO: 103245 - RNA, 1701 nt, Artificial Sequence; identical to SEQ ID NO: 99058
  derived and/or modified CDS sequence (opt2) from hemagglutinin__InfluenzaA__AEO01104

SEQ ID NO: 103246 - RNA, 1701 nt, Artificial Sequence
  derived and/or modified CDS sequence (opt2) from hemagglutinin__InfluenzaA__AEO01105
augaaggccauccucgucguccuccucuacaccuucgccaccgccaacgccgacacccucugcaucggcuaccacgccaacaacuccaccgacaccgucgacaccguccucgagaagaacgucaccgucacccacuccgucaaccuccucgaggacaagcacaacggcaagcucugcaagcuccgcggcgucgccccccuccaccucggcaagugcaacaucgccggcuggauccucggcaaccccgagugcgagucccucuccaccgccuccuccugguccuacaucgucgagaccuccuccuccgacaacggcaccugcuaccccggcgacuucaucgacuacgaggagcuccgcgagcagcucuccuccgucuccuccuucgagcgcuucgagaucuuccccaagaccuccuccuggcccaaccacgacuccuccaagggcgucaccgccgccugcccccacgccggcgccaaguccuucuacaagaaccucaucuggcucgucaagaagggcaacuccuaccccaagcucuccaaguccuacaucaacgacaagggcaaggagguccucguccucuggggcauccaccaccccuccaccuccgccgaccagcagucccucuaccagaacgccgacgccuacgucuucgucggcaccucccgcuacuccaagaaguucaagcccgagaucgccauccgccccaagguccgcgaccaggagggccgcaugaacuacuacuggacccucgucgagcccggcgacaagaucaccuucgaggccaccggcaaccucgucgucccccgcuacgccuucgccauggagcgcaacgccggcuccggcaucaucaucuccgacacccccguccacgacugcaacaccaccugccagacccccaagggcgccaucaacaccucccuccccuuccagaacauccaccccaucaccaucggcaagugccccaaguacgucaaguccaccaagcuccgccucgccaccggccuccgcaacguccccuccauccagucccgcggccucuucggcgccaucgccggcuucaucgagggcggcuggaccggcauggucgacggcugguacggcuaccaccaccagaacgagcagggcuccggcuacgccgccgaccucaaguccacccagaacgccaucgacgagaucaccaacaaggucaacuccgucaucgagaagaugaacacccaguucaccgccgucggcaaggaguucaaccaccucgagaagcgcaucgagaaccucaacaagaaggucgacgacggcuuccucgacaucuggaccuacaacgccgagcuccucguccuccucgagaacgagcgcacccucgacuaccacgacuccaacgucaagaaccucuacgagaagguccgcucccagcucaagaacaacgccaaggagaucggcaacggcugcuucgaguucuaccacaagugcgacaacaccugcauggaguccgucaagaacggcaccuacgacuaccccaaguacuccgaggaggccaagcucaaccgcgaggagaucgacggcgucaagcucgaguccacccgcaucuaccagauccucgccaucuacuccaccgucgccuccucccucguccucgucgucucccucggcgccaucuccuucuggaugugcuccaacggcucccuccagugccgcaucugcaucuga

SEQ ID NO: 103247 - RNA, 1701 nt, Artificial Sequence; identical to SEQ ID NO: 99058
  derived and/or modified CDS sequence (opt2) from hemagglutinin__InfluenzaA__AEO01106

SEQ ID NO: 103248 - RNA, 1701 nt, Artificial Sequence; identical to SEQ ID NO: 98705
  derived and/or modified CDS sequence (opt2) from hemagglutinin__InfluenzaA__AEO01107

SEQ ID NO: 103249 - RNA, 1701 nt, Artificial Sequence; identical to SEQ ID NO: 98705
  derived and/or modified CDS sequence (opt2) from hemagglutinin__InfluenzaA__AEO01108

SEQ ID NO: 103250 - RNA, 1701 nt, Artificial Sequence; identical to SEQ ID NO: 98705
  derived and/or modified CDS sequence (opt2) from hemagglutinin__InfluenzaA__AEO01109

SEQ ID NO: 103251 - RNA, 1701 nt, Artificial Sequence; identical to SEQ ID NO: 98705
  derived and/or modified CDS sequence (opt2) from hemagglutinin__InfluenzaA__AEO01110

SEQ ID NO: 103252 - RNA, 1701 nt, Artificial Sequence; identical to SEQ ID NO: 98705
  derived and/or modified CDS sequence (opt2) from hemagglutinin__InfluenzaA__AEO01111

SEQ ID NO: 103253 - RNA, 1701 nt, Artificial Sequence; identical to SEQ ID NO: 98705
  derived and/or modified CDS sequence (opt2) from hemagglutinin__InfluenzaA__AEO01112

SEQ ID NO: 103254 - RNA, 1701 nt, Artificial Sequence
  derived and/or modified CDS sequence (opt2) from hemagglutinin__InfluenzaA__AEO01113
augaaggccauccucgucguccuccucuacaccuucgccaccgccaacgccgacacccucugcaucggcuaccacgccaacaacuccaccgacaccgucgacaccguccucgagaagaacgucaccgucacccacuccgucaaccuccucgaggacaagcacaacggcaagcucugcaagcuccgcggcgucgccccccuccaccucggcaagugcaacaucgccggcuggauccucggcaaccccgagugcgagucccucuccaccgccuccuccugguccuacaucgucgagaccuccuccuccgacaacggcaccugcuaccccggcgacuucaucgacuacgaggagcuccgcgagcagcucuccuccgucuccuccuucgagcgcuucgagaucuuccccaagaccuccuccuggcccaaccacgacuccaacaagggcgucaccgccgccugccuccacgccggcgccaaguccuucuacaagaaccucaucuggcucgucaagaagggcaacuccuaccccaagcucuccaaguccuacaucaacgacaagggcaaggagguccucguccucuggggcauccaccaccccuccaccuccgccgaccagcagucccucuaccagaacgccgacgccuacgucuucgucggcaccucccgcuacuccaagaaguucaagcccgagaucgccauccgccccaagguccgcgaccaggagggccgcaugaacuacuacuggacccucgucgagcccggcgacaagaucaccuucgaggccaccggcaaccucgucgucccccgcuacgccuucgccauggagcgcaacgccggcuccggcaucaucaucuccgacacccccguccacgacugcaacaccaccugccagacccccaagggcgccaucaacaccucccuccccuuccagaacauccaccccaucaccaucggcaagugccccaaguacgucaaguccaccaagcuccgccucgccaccggccuccgcaacguccccuccauccagucccgcggccucuucggcgccaucgccggcuucaucgagggcggcuggaccggcauggucgacggcugguacggcuaccaccaccagaacgagcagggcuccggcuacgccgccgaccucaaguccacccagaacgccaucgacgagaucaccaacaaggucaacuccgucaucgagaagaugaacacccaguucaccgccgucggcaaggaguucaaccaccucgagaagcgcaucgagaaccucaacaagaaggucgacgacggcuuccucgacaucuggaccuacaacgccgagcuccucguccuccucgagaacgagcgcacccucgacuaccacgacuccaacgucaagaaccucuacgagaagguccgcucccagcucaagaacaacgccaaggagaucggcaacggcugcuucgaguucuaccacaagugcgacaacaccugcauggaguccgucaagaacggcaccuacgacuaccccaaguacuccgaggaggccaagcucaaccgcgaggagaucgacggcgucaagcucgaguccacccgcaucuaccagauccucgccaucuacuccaccgucgccuccucccucguccucgucgucucccucggcgccaucuccuucuggaugugcuccaacggcucccuccagugccgcaucugcaucuga

SEQ ID NO: 103255 - RNA, 1701 nt, Artificial Sequence; identical to SEQ ID NO: 98947
  derived and/or modified CDS sequence (opt2) from hemagglutinin__InfluenzaA__AEO01114

SEQ ID NO: 103256 - RNA, 1701 nt, Artificial Sequence
  derived and/or modified CDS sequence (opt2) from hemagglutinin__InfluenzaA__AEO01115
auggaggccauccucgucguccuccucuacaccuucgccaccgccaacgccgacacccucugcaucggcuaccacgccaacaacuccaccgacaccgucgacaccguccucgagaagaacgucaccgucacccacuccgucaaccuccucgaggacaagcacaacggcaagcucugcaagcuccgcggcgucgccccccuccaccucggcaagugcaacaucgccggcuggauccucggcaaccccgagugcgagucccucuccaccgccuccuccugguccuacaucgucgagaccuccuccuccgacaacggcaccugcuaccccggcgacuucaucgacuacgaggagcuccgcgagcagcucuccuccgucuccuccuucgagcgcuucgagaucuuccccaagaccuccuccuggcccaaccacgacuccaacaagggcgucaccgccgccugccuccacgccggcgccaaguccuucuacaagaaccucaucuggcucgucaagaagggcaacuccuaccccaagcucuccaaguccuacaucaacgacaagggcaaggagguccucguccucuggggcauccaccaccccuccaccuccgccgaccagcagucccucuaccagaacgccgacgccuacgucuucgucggcaccucccgcuacuccaagaaguucaagcccgagaucgccauccgccccaagguccgcgaccaggagggccgcaugaacuacuacuggacccucgucgagcccggcgacaagaucaccuucgaggccaccggcaaccucgucgucccccgcuacgccuucgccauggagcgcaacgccggcuccggcaucaucaucuccgacacccccguccacgacugcaacaccaccugccagacccccaagggcgccaucaacaccucccuccccuuccacaacauccaccccaucaccaucggcaagugccccaaguacgucaaguccaccaagcuccgccucgccaccggccuccgcaacguccccuccauccagucccgcggccucuucggcgccaucgccggcuucaucgagggcggcuggaccggcauggucgacggcugguacggcuaccaccaccagaacgagcagggcuccggcuacgccgccgaccucaaguccacccagaacgccaucgacgagaucaccaacaaggucaacuccgucaucgagaagaugaacacccaguucaccgccgucggcaaggaguucaaccaccucgagaagcgcaucgagaaccucaacaagaaggucgacgacggcuuccucgacaucuggaccuacaacgccgagcuccucguccuccucgagaacgagcgcacccucgacuaccacgacuccaacgucaagaaccucuacgagaagguccgcucccagcucaagaacaacgccaaggagaucggcaacggcugcuucgaguucuaccacaagugcgacaacaccugcauggaguccgucaagaacggcaccuacgacuaccccaaguacuccgaggaggccaagcucaaccgcgaggagaucgacggcgucaagcucgaguccacccgcaucuaccagauccucgccaucuacuccaccgucgccuccucccucguccucgucgucucccucggcgccaucuccuucuggaugugcuccaacggcucccuccagugccgcaucugcaucuga

SEQ ID NO: 103257 - RNA, 1701 nt, Artificial Sequence; identical to SEQ ID NO: 98705
  derived and/or modified CDS sequence (opt2) from hemagglutinin__InfluenzaA__AEO01116

SEQ ID NO: 103258 - RNA, 1701 nt, Artificial Sequence; identical to SEQ ID NO: 98705
  derived and/or modified CDS sequence (opt2) from hemagglutinin__InfluenzaA__AEO01117

SEQ ID NO: 103259 - RNA, 1701 nt, Artificial Sequence; identical to SEQ ID NO: 99571
  derived and/or modified CDS sequence (opt2) from hemagglutinin__InfluenzaA__AEO01118

SEQ ID NO: 103260 - RNA, 1701 nt, Artificial Sequence; identical to SEQ ID NO: 98705
  derived and/or modified CDS sequence (opt2) from hemagglutinin__InfluenzaA__AEO01119

SEQ ID NO: 103261 - RNA, 1701 nt, Artificial Sequence
  derived and/or modified CDS sequence (opt2) from hemagglutinin__InfluenzaA__AEO01120
augaaggccauccucgucguccuccucuacaccuucgccaccgccaacgccgacacccucugcaucggcuaccacgccaacaacuccaccgacaccgucgacaccguccucgagaagaacgucaccgucacccacuccgucaaccuccucgaggacaagcacaacggcaagcucugcaagcuccgcggcgucgccccccuccaccucggcaagugcaacaucgccggcuggauccucggcaaccccgagugcgagucccucuccaccgccuccuccugguccuacaucgucgagaccuccuccuccgacaacggcaccugcuaccccggcgacuucaucgacuacgaggagcuccgcgagcagcucuccuccgucuccuccuucgagcgcuucgagaucuuccccaagaccuccuccuggcccaaccacgacuccaacaagggcgucaccgccgccugcccccacgccggcgccaaguccuucuacaagaaccucaucuggcucgucaagaagggcaacuccuaccccaagcucuccaaguccuacaucaacgacaagggcaaggagguccucguccucuggggcauccaccaccccuccaccuccgccgaccagcagucccucuaccagaacgccgacgccuacgucuucgucggcaccucccgcuacuccaagaaguucaagcccgagaucgccauccgccccaagguccgcgagcaggagggccgcaugaacuacuacuggacccucgucgagcccggcgacaagaucaccuucgaggccaccggcaaccucgucgucccccgcuacgccuucgccauggagcgcaacgccggcuccggcaucaucaucuccgacacccccguccacgacugcaacaccaccugccagacccccaagggcgccaucaacaccucccuccccuuccagaacauccaccccaucaccaucggcaagugccccaaguacgucaaguccaccaagcuccgccucgccaccggccuccgcaacauccccuccauccagucccgcggccucuucggcgccaucgccggcuucaucgagggcggcuggaccggcauggucgacggcugguacggcuaccaccaccagaacgagcagggcuccggcuacgccgccgaccucaaguccacccagaacgccaucgacgagaucaccaacaaggucaacuccgucaucgagaagaugaacacccaguucaccgccgucggcaaggaguucaaccaccucgagaagcgcaucgagaaccucaacaagaaggucgacgacggcuuccucgacgucuggaccuacaacgccgagcuccucguccuccucgagaacgagcgcacccucgacuaccacgacuccaacgucaagaaccucuacgagaagguccgcucccagcucaagaacaacgccaaggagaucggcaacggcugcuucgaguucuaccacaagugcgacaacaccugcauggaguccgucaagaacggcaccuacgacuaccccaaguacuccgaggaggccaagcucaaccgcgaggagaucgacggcgucaagcucgaguccacccgcaucuaccagauccucgccaucuacuccaccgucgccuccucccucguccucgucgucucccucggcgccaucuccuucuggaugugcuccaacggcucccuccagugccgcaucugcaucuga

SEQ ID NO: 103262 - RNA, 1701 nt, Artificial Sequence; identical to SEQ ID NO: 98705
  derived and/or modified CDS sequence (opt2) from hemagglutinin__InfluenzaA__AEO01121

SEQ ID NO: 103263 - RNA, 1701 nt, Artificial Sequence; identical to SEQ ID NO: 99058
  derived and/or modified CDS sequence (opt2) from hemagglutinin__InfluenzaA__AEO01122

SEQ ID NO: 103264 - RNA, 1701 nt, Artificial Sequence; identical to SEQ ID NO: 98705
  derived and/or modified CDS sequence (opt2) from hemagglutinin__InfluenzaA__AEO01123

SEQ ID NO: 103265 - RNA, 1701 nt, Artificial Sequence; identical to SEQ ID NO: 98705
  derived and/or modified CDS sequence (opt2) from hemagglutinin__InfluenzaA__AEO01124

SEQ ID NO: 103266 - RNA, 1701 nt, Artificial Sequence; identical to SEQ ID NO: 99058
  derived and/or modified CDS sequence (opt2) from hemagglutinin__InfluenzaA__AEO01125

SEQ ID NO: 103267 - RNA, 1701 nt, Artificial Sequence
  derived and/or modified CDS sequence (opt2) from hemagglutinin__InfluenzaA__AEO01126
augaaggccacccucgucguccuccucuacaccuucgccaccgccaacgccgacacccucugcaucggcuaccacgccaacaacuccaccgacaccgucgacaccguccucgagaagaacgucaccgucacccacuccgucaaccuccucgaggacaagcacaacggcaagcucugcaagcuccgcggcgucgccccccuccaccucggcaagugcaacaucgccggcuggauccucggcaaccccgagugcgagucccucuccaccgccuccuccugguccuacaucgucgagaccuccuccuccgacaacggcaccugcuaccccggcgacuucaucgacuacgaggagcuccgcgagcagcucuccuccgucuccuccuucgagcgcuucgagaucuuccccaagaccuccuccuggcccaaccacgacuccaacaagggcgucaccgccgccugcccccacgccggcgccaaguccuucuacaagaaccucaucuggcucgucaagaagggcaacuccuaccccaagcucuccaaguccuacaucaacgacaagggcaaggagguccucguccucuggggcauccaccaccccuccaccuccgccgaccagcagucccucuaccagaacgccgacgccuacgucuucgucggcaccucccgcuacuccaagaaguucaagcccgagaucgccauccgccccaagguccgcgagcaggagggccgcaugaacuacuacuggacccucgucgagcccggcgacaagaucaccuucgaggccaccggcaaccucgucgucccccgcuacgccuucgccauggagcgcaacgccggcuccggcaucaucaucuccgacacccccguccacgacugcaacaccaccugccagacccccaagggcgccaucaacaccucccuccccuuccagaacauccaccccaucaccaucggcaagugccccaaguacgucaaguccaccaagcuccgccucgccaccggccuccgcaacguccccuccauccagucccgcggccucuucggcgccaucgccggcuucaucgagggcggcuggaccggcauggucgacggcugguacggcuaccaccaccagaacgagcagggcuccggcuacgccgccgaccucaaguccacccagaacgccaucgacgagaucaccaacaaggucaacuccgucaucgagaagaugaacacccaguucaccgccgucggcaaggaguucaaccaccucgagaagcgcaucgagaaccucaacaagaaggucgacgacggcuuccucgacaucuggaccuacaacgccgagcuccucguccuccucgagaacgagcgcacccucgacuaccacgacuccaacgucaagaaccucuacgagaagguccgcucccagcucaagaacaacgccaaggagaucggcaacggcugcuucgaguucuaccacaagugcgacaacaccugcauggaguccgucaagaacggcaccuacgacuaccccaaguacuccgaggaggccaagcucaaccgcgaggagaucgacggcgucaagcucgaguccacccgcaucuaccagauccucgccaucuacuccaccgucgccuccucccucguccucgucgucucccucggcgccaucuccuucuggaugugcuccaacggcucccuccagugccgcaucugcaucuga

SEQ ID NO: 103268 - RNA, 1701 nt, Artificial Sequence; identical to SEQ ID NO: 98705
  derived and/or modified CDS sequence (opt2) from hemagglutinin__InfluenzaA__AEO01127

SEQ ID NO: 103269 - RNA, 1701 nt, Artificial Sequence; identical to SEQ ID NO: 98705
  derived and/or modified CDS sequence (opt2) from hemagglutinin__InfluenzaA__AEO01128

SEQ ID NO: 103270 - RNA, 1701 nt, Artificial Sequence; identical to SEQ ID NO: 99058
  derived and/or modified CDS sequence (opt2) from hemagglutinin__InfluenzaA__AEO01129

SEQ ID NO: 103271 - RNA, 1701 nt, Artificial Sequence; identical to SEQ ID NO: 98705
  derived and/or modified CDS sequence (opt2) from hemagglutinin__InfluenzaA__AEO01130

SEQ ID NO: 103272 - RNA, 1701 nt, Artificial Sequence; identical to SEQ ID NO: 99058
  derived and/or modified CDS sequence (opt2) from hemagglutinin__InfluenzaA__AEO01131

SEQ ID NO: 103273 - RNA, 1701 nt, Artificial Sequence; identical to SEQ ID NO: 98705
  derived and/or modified CDS sequence (opt2) from hemagglutinin__InfluenzaA__AEO01132

SEQ ID NO: 103274 - RNA, 1701 nt, Artificial Sequence
  derived and/or modified CDS sequence (opt2) from hemagglutinin__InfluenzaA__AEO01133
augaaggccauccucgucguccuccucuacaccuucgccaccgccaacgccgacacccucugcaucggcuaccacgccaacaacuccaccgacaccgucgacaccguccucgagaagaacgucaccgucacccacuccgucaacauccucgaggacaagcacaacggcaagcucugcaagcuccgcggcgucgccccccuccaccucggcaagugcaacaucgccggcuggauccucggcaaccccgagugcgagucccucuccaccgccuccuccugguccuacaucgucgagaccuccuccuccgacaacggcaccugcuaccccggcgacuucaucgacuacgaggagcuccgcgagcagcucuccuccgucuccuccuucgagcgcuucgagaucuuccccaagaccuccuccuggcccaaccacgacuccaacaagggcgucaccgccgccugcccccacgccggcgccaaguccuucuacaagaaccucaucuggcucgucaagaagggcaacuccuaccccaagcucuccaaguccuacaucaacgacaagggcaaggagguccucguccucuggggcauccaccaccccuccaccuccgccgaccagcagucccucuaccagaacgccgacgccuacgucuucgucggcuccucccgcuacuccaagaaguucaagcccgagaucgccauccgccccaagguccgcgaccaggagggccgcaugaacuacuacuggacccucgucgagcccggcgacaagaucaccuucgaggccaccggcaaccucgucgucccccgcuacgccuucgccauggagcgcaacgccggcuccggcaucaucaucuccgacacccccguccacgacugcaacaccaccugccagacccccaagggcgccaucaacaccucccuccccuuccagaacauccaccccaucaccaucggcaagugccccaaguacgucaaguccaccaagcuccgccucgccaccggccuccgcaacguccccuccauccagucccgcggccucuucggcgccaucgccggcuucaucgagggcggcuggaccggcauggucgacggcugguacggcuaccaccaccagaacgagcagggcuccggcuacgccgccgaccucaaguccacccagaacgccaucgacgagaucaccaacaaggucaacuccgucaucgagaagaugaacacccaguucaccgccgucggcaaggaguucaaccaccucgagaagcgcaucgagaaccucaacaagaaggucgacgacggcuuccucgacaucuggaccuacaacgccgagcuccucguccuccucgagaacgagcgcacccucgacuaccacgacuccaacgucaagaaccucuacgagaagguccgcucccagcucaagaacaacgccaaggagaucggcaacggcugcuucgaguucuaccacaagugcgacaacaccugcauggaguccgucaagaacggcaccuacgacuaccccaaguacuccgaggaggccaagcucaaccgcgaggagaucgacggcgucaagcucgaguccaccaugaucuaccagauccucgccaucuacuccaccgucgccuccucccucguccucgucgucucccucggcgccaucuccuucuggaugugcuccaacggcucccuccagugccgcaucugcaucuga

SEQ ID NO: 103275 - RNA, 1701 nt, Artificial Sequence; identical to SEQ ID NO: 99058
  derived and/or modified CDS sequence (opt2) from hemagglutinin__InfluenzaA__AEO01134

SEQ ID NO: 103276 - RNA, 1701 nt, Artificial Sequence; identical to SEQ ID NO: 99058
  derived and/or modified CDS sequence (opt2) from hemagglutinin__InfluenzaA__AEO01135

SEQ ID NO: 103277 - RNA, 1701 nt, Artificial Sequence; identical to SEQ ID NO: 98705
  derived and/or modified CDS sequence (opt2) from hemagglutinin__InfluenzaA__AEO01136

SEQ ID NO: 103278 - RNA, 1701 nt, Artificial Sequence; identical to SEQ ID NO: 99152
  derived and/or modified CDS sequence (opt2) from hemagglutinin__InfluenzaA__AEO01137

SEQ ID NO: 103279 - RNA, 1701 nt, Artificial Sequence; identical to SEQ ID NO: 99152
  derived and/or modified CDS sequence (opt2) from hemagglutinin__InfluenzaA__AEO01138

SEQ ID NO: 103280 - RNA, 1701 nt, Artificial Sequence; identical to SEQ ID NO: 98705
  derived and/or modified CDS sequence (opt2) from hemagglutinin__InfluenzaA__AEO01139

SEQ ID NO: 103281 - RNA, 1701 nt, Artificial Sequence; identical to SEQ ID NO: 98705
  derived and/or modified CDS sequence (opt2) from hemagglutinin__InfluenzaA__AEO01140

SEQ ID NO: 103282 - RNA, 1701 nt, Artificial Sequence; identical to SEQ ID NO: 98705
  derived and/or modified CDS sequence (opt2) from hemagglutinin__InfluenzaA__AEO01141

SEQ ID NO: 103283 - RNA, 1701 nt, Artificial Sequence; identical to SEQ ID NO: 98705
  derived and/or modified CDS sequence (opt2) from hemagglutinin__InfluenzaA__AEO01142

SEQ ID NO: 103284 - RNA, 1701 nt, Artificial Sequence
  derived and/or modified CDS sequence (opt2) from hemagglutinin__InfluenzaA__AEO01144
augaaggccauccucgucguccuccucuacaccuucgccaccgccaacgccgacacccucugcaucggcuaccacgccaacaacuccaccgacaccgucgacaccguccucgagaagaacgucaccgucacccacuccgucaaccuccucgaggacaagcacaacggcaagcucugcaagcuccgcggcgucgccccccuccaccucggcaagugcaacaucgccggcuggauccucggcaaccccgagugcgagucccucuccaccgccuccuccugguccuacaucgucgagaccuccaucuccgacaacggcaccugcuaccccggcgacuucaucgacuacgaggagcuccgcgagcagcucuccuccgucuccuccuucgagcgcuucgagaucuuccccaagaccuccuccuggcccaaccacgacuccaacaagggcgucaccgccgccugcccccacgccggcgccaagggcuucuacaagaaccucaucuggcucgucaagaagggcaacuccuaccccaagcucuccaaguccuacaucaacgacaagggcaaggagguccucguccucuggggcauccaccaccccuccaccuccgccgaccagcagucccucuaccagaacgccgacgccuacgucuucgucggcaccucccgcuacuccaagaaguucaagcccgagaucgccauccgccccaagguccgcgaccaggagggccgcaugaacuacuacuggacccucgucgagcccggcgacaagaucaccuucgaggccaccggcaaccucgucgucccccgcuacgccuucgccauggagcgcaacgccggcuccggcaucaucaucuccgacacccccguccacgacugcaacaccaccugccagacccccaagggcgccaucaacaccucccuccccuuccagaacauccaccccaucaccaucggcaagugccccaaguacgucaaguccaccaagcuccgccucgccaccggccuccgcaacguccccuccauccagucccgcggccucuucggcgccaucgccggcuucaucgagggcggcuggaccggcauggucgacggcugguacggcuaccaccaccagaacgagcagggcuccggcuacgccgccgaccucaaguccacccagaacgccaucgacgagaucaccaacaaggucaacuccgucaucgagaagaugaacacccaguucaccgccgucggcaaggaguucaaccaccucgagaagcgcaucgagaaccucaacaagaaggucgacgacggcuuccucgacaucuggaccuacaacgccgagcuccucguccuccucgagaacgagcgcacccucgacuaccacgacuccaacgucaagaaccucuacgagaagguccgcucccagcucaagaacaacgccaaggagaucggcaacggcugcuucgaguucuaccacaagugcgacaacaccugcauggaguccgucaagaacggcaccuacgacuaccccaaguacuccgaggaggccaagcucaaccgcgaggagaucgacggcgucaagcucgaguccacccgcaucuaccagauccucgccaucuacuccaccgucgccuccucccucguccucgucgucucccucggcgccaucuccuucuggaugugcuccaacggcucccuccagugccgcaucugcaucuga

SEQ ID NO: 103285 - RNA, 1701 nt, Artificial Sequence; identical to SEQ ID NO: 98885
  derived and/or modified CDS sequence (opt2) from hemagglutinin__InfluenzaA__AEO01145

SEQ ID NO: 103286 - RNA, 1701 nt, Artificial Sequence
  derived and/or modified CDS sequence (opt2) from hemagglutinin__InfluenzaA__AEO01146
augaaggccauccucgucguccuccucuacaccuucgccaccgccaacgccgacacccucugcaucggcuaccacgccaacaacuccaccgacaccgucgacaccguccucgagaagaacgucaccgucacccacuccgucaaccuccucgaggacaagcacaacggcaagcucugcaagcuccgcggcgucgccccccuccaccucggcaagugcaacaucgccggcuggauccucggcaaccccgagugcgagucccucuccaccgccuccuccugguccuacaucgucgagaccuccuccuccgacaacggcaccugcuaccccggcgacuucaucgacuacgaggagcuccgcgagcagcucuccuccgucuccuccuucgagcgcuucgagaucuuccccaagaccuccuccuggcccaaccacgacuccaacaagggcgucaccgccgccugcccccacgccggcgccaaguccuucuacaagaaccucaucuggcucgucaagaagggcaacuccuaccccaagcucuccaaguccuacaucaacgacaagggcaaggagguccucguccucuggggcauccaccaccccuccaccuccgccgaccagcagucccucuaccagaacgccgacgccuacgucuucgucggcaccucccgcuacuccaagaaguucaaccccgagaucgccauccgccccaagguccgcgaccaggagggccgcaugaacuacuacuggacccucgucgagcccggcgacaagaucaccuucgaggccaccggcaaccucgucgucccccgcuacgccuucgccauggagcgcaacgccggcuccggcaucaucaucuccgacacccccguccacgacugcaacaccaccugccagacccccaagggcgccaucaacaccucccuccccuuccagaacauccaccccaucaccaucggcaagugccccaaguacgucaaguccaccaagcuccgccucgccaccggccuccgcaacguccccuccauccagucccgcggccucuucggcgccaucgccggcuucaucgagggcggcuggaccggcauggucgacggcugguacggcuaccaccaccagaacgagcagggcuccggcuacgccgccgaccucaaguccacccagaacgccaucgacgagaucaccaacaaggucaacuccgucaucgagaagaugaacacccaguucaccgccgucggcaaggaguucaaccaccucgagaagcgcaucgagaaccucaacaagaaggucgacgacggcuuccucgacaucuggaccuacaacgccgagcuccucguccuccucgagaacgagcgcacccucgacuaccacgacuccaacgucaagaaccucuacgagaagguccgcucccagcucaagaacaacgccaaggagaucggcaacggcugcuucgaguucuaccacaagugcgacaacaccugcauggaguccgucaagaacggcaccuacgacuaccccaaguacuccgaggaggccaagcucaaccgcgaggagaucgacggcgucaagcucgaguccacccgcaucuaccagauccucgccaucuacuccaccgucgccuccucccucguccucgucgucucccucggcgccaucuccuucuggaugugcuccaacggcucccuccagugccgcaucugcaucuga

SEQ ID NO: 103287 - RNA, 1701 nt, Artificial Sequence; identical to SEQ ID NO: 98705
  derived and/or modified CDS sequence (opt2) from hemagglutinin__InfluenzaA__AEO01147

SEQ ID NO: 103288 - RNA, 1701 nt, Artificial Sequence; identical to SEQ ID NO: 99058
  derived and/or modified CDS sequence (opt2) from hemagglutinin__InfluenzaA__AEO01148

SEQ ID NO: 103289 - RNA, 1701 nt, Artificial Sequence; identical to SEQ ID NO: 99058
  derived and/or modified CDS sequence (opt2) from hemagglutinin__InfluenzaA__AEO01149

SEQ ID NO: 103290 - RNA, 1701 nt, Artificial Sequence; identical to SEQ ID NO: 101912
  derived and/or modified CDS sequence (opt2) from hemagglutinin__InfluenzaA__AEO01150

SEQ ID NO: 103291 - RNA, 1701 nt, Artificial Sequence; identical to SEQ ID NO: 98705
  derived and/or modified CDS sequence (opt2) from hemagglutinin__InfluenzaA__AEO01151

SEQ ID NO: 103292 - RNA, 1701 nt, Artificial Sequence
  derived and/or modified CDS sequence (opt2) from hemagglutinin__InfluenzaA__AEO01152
augaaggccauccucaucguccuccucuacaccuucgccaccgccaacgccgacacccucugcaucggcuaccacgccaacaacuccaccgacaccgucgacaccguccucgagaagaacgucaccgucacccacuccgucaaccuccucgaggacaagcacaacggcaagcucugcaagcuccgcggcgucgccccccuccaccucggcaagugcaacaucgccggcuggauccucggcaaccccgagugcgagucccucuccaccgccuccuccugguccuacaucgucgagaccuccuccuccgacaacggcaccugcuaccccggcgacuucaucgacuacgaggagcuccgcgagcagcucuccuccgucuccuccuucgagcgcuucgagaucuuccccaagaccuccuccuggcccaaccacgacuccaacaagggcgucaccgccgccugcccccacgccggcgccaaguccuucuacaagaaccucaucuggcucgucaagaagggcaacuccuaccccaagcucuccaaguccuacaucaacgacaagggcaaggagguccucguccucuggggcauccaccaccccuccaccuccgccgaccagcagucccucuaccagaacgccgacgccuacgucuucgucggcaccucccgcuacuccaagaaguucaagcccgagaucgccauccgccccaagguccgcggccaggagggccgcaugaacuacuacuggacccucgucgagcccggcgacaagaucaccuucgaggccaccggcaaccucgucgucccccgcuacgccuucgccauggagcgcaacgccggcuccggcaucaucaucuccgacacccccguccacgacugcaacaccaccugccagacccccaagggcgccaucaacaccucccuccccuuccagaacauccaccccaucaccaucggcaagugccccaaguacgucaaguccaccaagcuccgccucgccaccggccuccgcaacguccccuccauccagucccgcggccucuucggcgccaucgccggcuucaucgagggcggcuggaccggcauggucgacggcugguacggcuaccaccaccagaacgagcagggcuccggcuacgccgccgaccucaaguccacccagaacgccaucgacgagaucaccaacaaggucaacuccgucaucgagaagaugaacacccaguucaccgccgucggcaaggaguucaaccaccucgagaagcgcaucgagaaccucaacaagaaggucgacgacggcuuccucgacaucuggaccuacaacgccgagcuccucguccuccucgagaacgagcgcacccucgacuaccacgacuccaacgucaagaaccucuacgagaagguccgcucccagcucaagaacaacgccaaggagaucggcaacggcugcuucgaguucuaccacaagugcgacaacaccugcauggaguccgucaagaacggcaccuacgacuaccccaaguacuccgaggaggccaagcucaaccgcgaggagaucgacggcgucaagcucgaguccacccgcaucuaccagauccucgccaucuacuccaccgucgccuccucccucguccucgucgucucccucggcgccaucuccuucuggaugugcuccaacggcucccuccagugccgcaucugcaucuga

SEQ ID NO: 103293 - RNA, 1701 nt, Artificial Sequence
  derived and/or modified CDS sequence (opt2) from hemagglutinin__InfluenzaA__AEO01153
augaaggccauccucgucguccuccucuacaccuucgccaccgccaacgccgacacccucugcaucggcuaccacgccaacaacuccaccgacaccgucgacaccguccucgagaagaacgucaccgucacccacuccgucaaccuccucgaggacaagcacaacggcaagcucugcaagcuccgcggcgucgccccccuccaccucggcaagugcaacaucgccggcuggauccucggcaaccccgagugcgagucccucuccaccgccuccuccugguccuacaucgucgagaccuccuccuccgacaacggcaccugcuaccccggcgacuucaucgacuacgaggagcuccgcgagcagcucuccuccgucuccuccuucgagcgcuucgagaucuuccccaagaccuccuccuggcccaaccacgacuccaacaagggcgucaccgccgccugcccccacgccggcgccaaguccuucuacaagaaccucaucuggcucgucaagaagggcaacuccuaccccaagcucuccaaguccuacaucaacaacaagggcaaggagguccucguccucuggggcauccaccaccccuccaccuccgccgaccagcagucccucuaccagaacgccgacgccuacgucuucgucggcaccucccgcuacuccaagaaguucaagcccgagaucgccauccgccccaagguccgcgaccaggagggccgcaugaacuacuacuggacccucgucgagcccggcgacaagaucaccuucgaggccaccggcaaccucgucgucccccgcuacgccuucgccauggagcgcaacgccggcuccggcaucaucaucuccaacacccccguccacgacugcaacaccaccugccagacccccaagggcgccaucaacaccucccuccccuuccagaacauccaccccaucaccaucggcaagugccccaaguacgucaaguccaccaagcuccgccucgccaccggccuccgcaacguccccuccauccagucccgcggccucuucggcgccaucgccggcuucaucgagggcggcuggaccggcauggucgacggcugguacggcuaccaccaccagaacgagcagggcuccggcuacgccgccgaccucaaguccacccagaacgccaucgacgagaucaccaacaaggucaacuccgucaucgagaagaugaacacccaguucaccgccgucggcaaggaguucaaccaccucgagaagcgcaucgagaaccucaacaagaaggucgacgacggcuuccucgacaucuggaccuacaacgccgagcuccucguccuccucgagaacgagcgcacccucgacuaccacgacuccaacgucaagaaccucuacgagaagguccgcucccagcucaagaacaacgccaaggagaucggcaacggcugcuucgaguucuaccacaagugcgacaacaccugcauggaguccgucaagaacggcaccuacgacuaccccaaguacuccgaggaggccaagcucaaccgcgaggagaucgacggcgucaagcucgaguccacccgcaucuaccagauccucgccaucuacuccaccgucgccuccucccucguccucgucgucucccucggcgccaucuccuucuggaugugcuccaacggcucccuccagugccgcaucugcaucuga

SEQ ID NO: 103294 - RNA, 1701 nt, Artificial Sequence; identical to SEQ ID NO: 98705
  derived and/or modified CDS sequence (opt2) from hemagglutinin__InfluenzaA__AEO01154

SEQ ID NO: 103295 - RNA, 1701 nt, Artificial Sequence; identical to SEQ ID NO: 99058
  derived and/or modified CDS sequence (opt2) from hemagglutinin__InfluenzaA__AEO01155

SEQ ID NO: 103296 - RNA, 1701 nt, Artificial Sequence; identical to SEQ ID NO: 99058
  derived and/or modified CDS sequence (opt2) from hemagglutinin__InfluenzaA__AEO01156

SEQ ID NO: 103297 - RNA, 1701 nt, Artificial Sequence; identical to SEQ ID NO: 98705
  derived and/or modified CDS sequence (opt2) from hemagglutinin__InfluenzaA__AEO01157

SEQ ID NO: 103298 - RNA, 1701 nt, Artificial Sequence; identical to SEQ ID NO: 98705
  derived and/or modified CDS sequence (opt2) from hemagglutinin__InfluenzaA__AEO01158

SEQ ID NO: 103299 - RNA, 1701 nt, Artificial Sequence; identical to SEQ ID NO: 98705
  derived and/or modified CDS sequence (opt2) from hemagglutinin__InfluenzaA__AEO01159

SEQ ID NO: 103300 - RNA, 1701 nt, Artificial Sequence
  derived and/or modified CDS sequence (opt2) from hemagglutinin__InfluenzaA__AEO01160
augaaggccauccucgucgcccuccucuacaccuucgccaccgccaacgccgacacccucugcaucggcuaccacgccaacaacuccaccgacaccgucgacaccguccucgagaagaacgucaccgucacccacuccgucaaccuccucgaggacaagcacaacggcaagcucugcaagcuccgcggcgucgccccccuccaccucggcaagugcaacaucgccggcuggauccucggcaaccccgagugcgagucccucuccaccgccuccuccugguccuacaucgucgagaccuccuccuccgacaacggcaccugcuaccccggcgacuucaucgacuacgaggagcuccgcgagcagcucuccuccgucuccuccuucgagcgcuucgagaucuuccccaagaccuccuccuggcccaaccacgacuccaacaagggcgucaccgccgccugcccccacgccggcgccaaguccuucuacaagaaccucaucuggcucgucaagaagggcaacuccuaccccaagcucuccaaguccuacaucaacgacaagggcaaggagguccucguccucuggggcauccaccaccccuccaccuccgccgaccagcagucccucuaccagaacgccgacgccuacgucuucgucggcaccucccgcuacuccaagaaguucaagcccgagaucgccauccgccccaagguccgcgagcaggagggccgcaugaacuacuacuggacccucgucgagcccggcgacaagaucaccuucgaggccaccggcaaccucgucgucccccgcuacgccuucgccauggagcgcaacgccggcuccggcaucaucaucuccgacacccccguccacgacugcaacaccaccugccagacccccaagggcgccaucaacaccucccuccccuuccagaacauccaccccaucaccaucggcaagugccccaaguacgucaaguccaccaagcuccgccucgccaccggccuccgcaacguccccuccauccagucccgcggccucuucggcgccaucgccggcuucaucgagggcggcuggaccggcauggucgacggcugguacggcuaccaccaccagaacgagcagggcuccggcuacgccgccgaccucaaguccacccagaacgccaucgacgagaucaccaacaaggucaacuccgucaucgagaagaugaacacccaguucaccgccgucggcaaggaguucaaccaccucgagaagcgcaucgagaaccucaacaagaaggucgacgacggcuuccucgacaucuggaccuacaacgccgagcuccucguccuccucgagaacgagcgcacccucgacuaccacgacuccaacgucaagaaccucuacgagaagguccgcucccagcucaagaacaacgccaaggagaucggcaacggcugcuucgaguucuaccacaagugcgacaacaccugcauggaguccgucaagaacggcaccuacgacuaccccaaguacuccgaggaggccaagcucaaccgcgaggagaucgacggcgucaagcucgaguccacccgcaucuaccagauccucgccaucuacuccaccgucgccuccucccucguccucgucgucucccucggcgccaucuccuucuggaugugcuccaacggcucccuccagugccgcaucugcaucuga

SEQ ID NO: 103301 - RNA, 1701 nt, Artificial Sequence; identical to SEQ ID NO: 98705
  derived and/or modified CDS sequence (opt2) from hemagglutinin__InfluenzaA__AEO01161

SEQ ID NO: 103302 - RNA, 1701 nt, Artificial Sequence; identical to SEQ ID NO: 99058
  derived and/or modified CDS sequence (opt2) from hemagglutinin__InfluenzaA__AEO01162

SEQ ID NO: 103303 - RNA, 1701 nt, Artificial Sequence; identical to SEQ ID NO: 99058
  derived and/or modified CDS sequence (opt2) from hemagglutinin__InfluenzaA__AEO01163

SEQ ID NO: 103304 - RNA, 1701 nt, Artificial Sequence; identical to SEQ ID NO: 99058
  derived and/or modified CDS sequence (opt2) from hemagglutinin__InfluenzaA__AEO01164

SEQ ID NO: 103305 - RNA, 1701 nt, Artificial Sequence
  derived and/or modified CDS sequence (opt2) from hemagglutinin__InfluenzaA__AEO01165
augaaggccauccucgucguccuccucuacaccuucgccaccgccaacgccgacacccucugcaucggcuaccacgccaacaacuccaccgacaccgucgacaccguccucgagaagaacgucaccgucacccacuccgucaaccuccucgaggacaagcacaacggcaagcucugcaagcuccgcggcgucgccccccuccaccucggcaagugcaacaucgccggcuggauccucggcaaccccgagugcgagucccucuccaccgccuccuccugguccuacaucgucgagaccuccuccuccgacaacggcaccugcuaccccggcgacuucaucgacuacgaggagcuccgcgagcagcucuccuccgucuccuccuucgagcgcuucgagaucuuccccaagaccuccuccuggcccaaccacgacuccaacaagggcgucaccgccgccugcccccacgccggcgccaaguccuucuacaagaaccucaucuggcucgucaagaagggcaacuccuaccccaaguucuccaaguccuacaucaacgacaagggcaaggagguccucguccucuggggcauccaccaccccuccaccuccgccgaccagcagucccucuaccagaacgccgacgccuacgucuucgucggcaccucccgcuacuccaagaaguucaagcccgagaucgccauccgccccaagguccgcgaccaggagggccgcaugaacuacuacuggacccucgucgagcccggcgacaagaucaccuucgaggccaccggcaaccucgucgucccccgcuacgccuucgccauggagcgcaacgccggcuccggcaucaucaucuccgacacccccguccacgacugcaacaccaccugccagacccccaagggcgccaucaacaccucccuccccuuccagaacauccaccccaucaccaucggcaagugccccaaguacgucaaguccaccaagcuccgccucgccaccggccuccgcaacguccccuccauccagucccgcggccucuucggcgccaucgccggcuucaucgagggcggcuggaccggcauggucgacggcugguacggcuaccaccaccagaacgagcagggcuccggcuacgccgccgaccucaaguccacccagaacgccaucgacgagaucaccaacaaggucaacuccgucaucgagaagaugaacacccaguucaccgccgucggcaaggaguucaaccaccucgagaagcgcaucgagaaccucaacaagaaggucgacgacggcuuccucgacaucuggaccuacaacgccgagcuccucguccuccucgagaacgagcgcacccucgacuaccacgacuccaacgucaagaaccucuacgagaagguccgcucccagcucaagaacaacgccaaggagaucggcaacggcugcuucgaguucuaccacaagugcgacaacaccugcauggaguccgucaagaacggcaccuacgacuaccccaaguacuccgaggaggccaagcucaaccgcgaggagaucgacggcgucaagcucgaguccacccgcaucuaccagauccucgccaucuacuccaccgucgccuccucccucguccucgucgucucccucggcgccaucuccuucuggaugugcuccaacggcucccuccagugccgcaucugcaucuga

SEQ ID NO: 103306 - RNA, 1701 nt, Artificial Sequence; identical to SEQ ID NO: 99058
  derived and/or modified CDS sequence (opt2) from hemagglutinin__InfluenzaA__AEO01166

SEQ ID NO: 103307 - RNA, 1701 nt, Artificial Sequence
  derived and/or modified CDS sequence (opt2) from hemagglutinin__InfluenzaA__AEO01167
augaaggccauccucgucguccuccucuacaccuucgccaccgccaacgccgacacccucugcaucggcuaccacgccaacaacuccaccgacaccgucgacaccguccucgagaagaacgucaccgucacccacuccgucaaccuccucgaggacaagcacaacggcaagcucugcaagcuccgcggcgucgccccccuccaccucggcaagugcaacaucgccggcuggauccucggcaaccccgagugcgagucccucuccaccgccuccuccugguccuacaucgucgagaccuccuccuccgacaacggcaccugcuaccccggcgacuucaucgacuacgaggagcuccgcgagcagcucuccuccgucuccuccuucgagcgcuucgagaucuuccccaagaccuccuccuggcccaaccacgacuccaacaagggcgucaccgccgccugcccccacgccggcgccaaguccuucuacaagaaccucaucuggcucgucaagaagggcaacuccuaccccaagcucuccaaguccuacaucaacgacaagggcaaggagguccucguccucuggggcauccaccaccccuccaccuccgccgaccagcagucccucuaccagaacgccgacgccuacgucuucgucggcaccucccgcuacuccaagaaguucaagcccgagaucgccauccgccccaagguccgcgagcaggagggccgcaugaacuacuacuggacccucgucgagcccggcgacaagaucaccuucgaggccaccggcaaccucgucgucccccgcuacgccuucgccauggagcgcaacgccggcuccggcaucaucaucuccgacaccuccguccacgacugcaacaccaccugccagacccccaagggcgccaucaacaccucccuccccuuccagaacauccaccccaucaccaucggcaagugccccaaguacgucaaguccaccaagcuccgccucgccaccggccuccgcaacguccccuccauccagucccgcggccucuucggcgccaucgccggcuucaucgagggcggcuggaccggcauggucgacggcugguacggcuaccaccaccagaacgagcagggcuccggcuacgccgccgaccucaaguccacccagaacgccaucgacgagaucaccaacaaggucaacuccgucaucgagaagaugaacacccaguucaccgccgucggcaaggaguucaaccaccucgagaagcgcaucgagaaccucaacaagaaggucgacgacggcuuccucgacaucuggaccuacaacgccgagcuccucguccuccucgagaacgagcgcacccucgacuaccacgacuccaacgucaagaaccucuacgagaagguccgcucccagcucaagaacaacgccaaggagaucggcaacggcugcuucgaguucuaccacaagugcgacaacaccugcauggaguccgucaagaacggcaccuacgacuaccccaaguacuccgaggaggccaagcucaaccgcgaggagaucgacggcgucaagcucgaguccacccgcaucuaccagauccucgccaucuacuccaccgucgccuccucccucguccucgucgucucccucggcgccaucuccuucuggaugugcuccaacggcucccuccagugccgcaucugcaucuga

SEQ ID NO: 103308 - RNA, 1701 nt, Artificial Sequence; identical to SEQ ID NO: 98705
  derived and/or modified CDS sequence (opt2) from hemagglutinin__InfluenzaA__AEO01168

SEQ ID NO: 103309 - RNA, 1701 nt, Artificial Sequence; identical to SEQ ID NO: 99058
  derived and/or modified CDS sequence (opt2) from hemagglutinin__InfluenzaA__AEO01169

SEQ ID NO: 103310 - RNA, 1701 nt, Artificial Sequence; identical to SEQ ID NO: 99058
  derived and/or modified CDS sequence (opt2) from hemagglutinin__InfluenzaA__AEO01170

SEQ ID NO: 103311 - RNA, 1701 nt, Artificial Sequence; identical to SEQ ID NO: 99058
  derived and/or modified CDS sequence (opt2) from hemagglutinin__InfluenzaA__AEO01171

SEQ ID NO: 103312 - RNA, 1701 nt, Artificial Sequence; identical to SEQ ID NO: 98705
  derived and/or modified CDS sequence (opt2) from hemagglutinin__InfluenzaA__AEO01172

SEQ ID NO: 103313 - RNA, 1701 nt, Artificial Sequence
  derived and/or modified CDS sequence (opt2) from hemagglutinin__InfluenzaA__AEO01173
augaaggccauccucgucguccuccucuacaccuucgccaccgccaacgccgacacccucugcaucggcuaccacgccaacaacuccaccgacaccgucgacaccguccucgagaagaacgucaccgucacccacuccgucaaccuccucgaggacaagcacaacggcaagcucugcaagcuccgcggcgucgccccccuccaccucggcaagugcaacaucgccggcuggauccucggcaaccccgagugcgagucccucuccaccgccuccuccugguccuacaucgucgagaccuccuccuccgacaacggcaccugcuaccccggcgacuucaucgacuacgaggagcuccgcgagcagcucuccuccgucuccuccuucgagcgcuucgagaucuuccccaagaccuccuccuggcccaaccacgacuccaacaagggcgucaccgccgccugcccccacgccggcgccaaguccuucuacaagaaccucaucuggcucgucaagaagggcaacuccuaccccaagcucuccaaguccuacaucaacgacaagggcaaggagguccucguccucuggggcauccaccaccccuccaccuccgccgaccagcagucccucuaccagaacgccgacgccuacgucuucgucggcaccucccgcuacuccaagaaguucaagcccgagaucgccauccgccccaagguccgcgaccaggagggccgcaugaacuacuacuggacccucgucgagcccggcggcaagaucaccuucgaggccaccggcaaccucgucgucccccgcuacgccuucgccauggagcgcaacgccggcuccggcaucaucaucuccgacacccccguccacgacugcaacaccaccugccagacccccaagggcgccaucaacaccucccuccccuuccagaacauccaccccaucaccaucggcaagugccccaaguacgucaaguccaccaagcuccgccucgccaccggccuccgcaacguccccuccauccagucccgcggccucuucggcgccaucgccggcuucaucgagggcggcuggaccggcauggucgacggcugguacggcuaccaccaccagaacgagcagggcuccggcuacgccgccgaccucaaguccacccagaacgccaucgacgagaucaccaacaaggucaacuccgucaucgagaagaugaacacccaguucaccgccgucggcaaggaguucaaccaccucgagaagcgcaucgagaaccucaacaagaaggucgacgacggcuuccucgacaucuggaccuacaacgccgagcuccucguccuccucgagaacgagcgcacccucgacuaccacgacuccaacgucaagaaccucuacgagaagguccgcucccagcucaagaacaacgccaaggagaucggcaacggcugcuucgaguucuaccacaagugcgacaacaccugcauggaguccgucaagaacggcaccuacgacuaccccaaguacuccgaggaggccaagcucaaccgcgaggagaucgacggcgucaagcucgaguccacccgcaucuaccagauccucgccaucuacuccaccgucgccuccucccucguccucgucgucucccucggcgccaucuccuucuggaugugcuccaacggcucccuccagugccgcaucugcaucuga

SEQ ID NO: 103314 - RNA, 1701 nt, Artificial Sequence
  derived and/or modified CDS sequence (opt2) from hemagglutinin__InfluenzaA__AEO01174
augaaggccauccucgucguccuccucuacaccuucgccaccgccaacgccgacacccucugcaucggcuaccacgccaacaacuccaccgacaccgucgacaccguccucgagaagaacgucaccgucacccacuccgucaaccuccucgaggacaagcacaacggcaagcucugcaagcuccgcggcgucgccccccuccaccucggcaagugcaacaucgccggcuggauccucggcaaccccgagugcgagucccucuccaccgccuccuccugguccuacaucgucgagaccuccuccuccggcaacggcaccugcuaccccggcgacuucaucgacuacgaggagcuccgcgagcagcucuccuccgucuccuccuucgagcgcuucgagaucuuccccaagaccuccuccuggcccaaccacgacuccaacaagggcgucaccgccgccugcccccacgccggcgccaaguccuucuacaagaaccucaucuggcucgucaagaagggcaacuccuaccccaagcucuccaaguccuacaucaacgacaagggcaaggagguccucguccucuggggcauccaccaccccuccaccuccgccgaccagcagucccucuaccagaacgccgacgccuacgucuucgucggcaccucccgcuacuccaagaaguucaagcccgagaucgccauccgccccaagguccgcgagcaggagggccgcaugaacuacuacuggacccucgucgagcccggcgacaagaucaccuucgaggccaccggcaaccucgucgucccccgcuacgccuucgccauggagcgcaacgccggcuccggcaucaucaucuccgacacccccguccacgacugcaacaccaccugccagacccccaagggcgccaucaacaccucccuccccuuccagaacauccaccccaucaccaucggcaagugccccaaguacgucaaguccaccaagcuccgccucgccaccggccuccgcaacguccccuccauccagucccgcggccucuucggcgccaucgccggcuucaucgagggcggcuggaccggcauggucgacggcugguacggcuaccaccaccagaacgagcagggcuccggcuacgccgccgaccucaaguccacccagaacgccaucgacgagaucaccaacaaggucaacuccgucaucgagaagaugaacacccaguucaccgccgucggcaaggaguucaaccaccucgagaagcgcaucgagaaccucaacaagaaggucgacgacggcuuccucgacaucuggaccuacaacgccgagcuccucguccuccucgagaacgagcgcacccucgacuaccacgacuccaacgucaagaaccucuacgagaagguccgcucccagcucaagaacaacgccaaggagaucggcaacggcugcuucgaguucuaccacaagugcgacaacaccugcauggaguccgucaagaacggcaccuacgacuaccccaaguacuccgaggaggccaagcucaaccgcgaggagaucgacggcgucaagcucgaguccacccgcaucuaccagauccucgccaucuacuccaccgucgccuccucccucguccucgucgucucccucggcgccaucuccuucuggaugugcuccaacggcucccuccagugccgcaucugcaucuga

SEQ ID NO: 103315 - RNA, 1701 nt, Artificial Sequence; identical to SEQ ID NO: 98705
  derived and/or modified CDS sequence (opt2) from hemagglutinin__InfluenzaA__AEO01176

SEQ ID NO: 103316 - RNA, 1701 nt, Artificial Sequence; identical to SEQ ID NO: 98705
  derived and/or modified CDS sequence (opt2) from hemagglutinin__InfluenzaA__AEO01177

SEQ ID NO: 103317 - RNA, 1701 nt, Artificial Sequence; identical to SEQ ID NO: 99058
  derived and/or modified CDS sequence (opt2) from hemagglutinin__InfluenzaA__AEO01179

SEQ ID NO: 103318 - RNA, 1701 nt, Artificial Sequence; identical to SEQ ID NO: 99058
  derived and/or modified CDS sequence (opt2) from hemagglutinin__InfluenzaA__AEO01180

SEQ ID NO: 103319 - RNA, 1701 nt, Artificial Sequence; identical to SEQ ID NO: 99058
  derived and/or modified CDS sequence (opt2) from hemagglutinin__InfluenzaA__AEO01181

SEQ ID NO: 103320 - RNA, 1701 nt, Artificial Sequence; identical to SEQ ID NO: 99058
  derived and/or modified CDS sequence (opt2) from hemagglutinin__InfluenzaA__AEO01182

SEQ ID NO: 103321 - RNA, 1701 nt, Artificial Sequence; identical to SEQ ID NO: 98705
  derived and/or modified CDS sequence (opt2) from hemagglutinin__InfluenzaA__AEO01183

SEQ ID NO: 103322 - RNA, 1701 nt, Artificial Sequence; identical to SEQ ID NO: 99058
  derived and/or modified CDS sequence (opt2) from hemagglutinin__InfluenzaA__AEO01184

SEQ ID NO: 103323 - RNA, 1701 nt, Artificial Sequence; identical to SEQ ID NO: 98705
  derived and/or modified CDS sequence (opt2) from hemagglutinin__InfluenzaA__AEO01185

SEQ ID NO: 103324 - RNA, 1701 nt, Artificial Sequence; identical to SEQ ID NO: 98705
  derived and/or modified CDS sequence (opt2) from hemagglutinin__InfluenzaA__AEO01186

SEQ ID NO: 103325 - RNA, 1701 nt, Artificial Sequence; identical to SEQ ID NO: 98705
  derived and/or modified CDS sequence (opt2) from hemagglutinin__InfluenzaA__AEO01187

SEQ ID NO: 103326 - RNA, 1701 nt, Artificial Sequence; identical to SEQ ID NO: 98705
  derived and/or modified CDS sequence (opt2) from hemagglutinin__InfluenzaA__AEO01188

SEQ ID NO: 103327 - RNA, 1701 nt, Artificial Sequence; identical to SEQ ID NO: 98705
  derived and/or modified CDS sequence (opt2) from hemagglutinin__InfluenzaA__AEO01189

SEQ ID NO: 103328 - RNA, 1701 nt, Artificial Sequence; identical to SEQ ID NO: 98705
  derived and/or modified CDS sequence (opt2) from hemagglutinin__InfluenzaA__AEO01191

SEQ ID NO: 103329 - RNA, 1701 nt, Artificial Sequence; identical to SEQ ID NO: 98705
  derived and/or modified CDS sequence (opt2) from hemagglutinin__InfluenzaA__AEO01192

SEQ ID NO: 103330 - RNA, 1701 nt, Artificial Sequence; identical to SEQ ID NO: 100019
  derived and/or modified CDS sequence (opt2) from hemagglutinin__InfluenzaA__AEO01193

SEQ ID NO: 103331 - RNA, 1701 nt, Artificial Sequence; identical to SEQ ID NO: 99058
  derived and/or modified CDS sequence (opt2) from hemagglutinin__InfluenzaA__AEO01194

SEQ ID NO: 103332 - RNA, 1701 nt, Artificial Sequence; identical to SEQ ID NO: 99058
  derived and/or modified CDS sequence (opt2) from hemagglutinin__InfluenzaA__AEO01195

SEQ ID NO: 103333 - RNA, 1701 nt, Artificial Sequence; identical to SEQ ID NO: 98705
  derived and/or modified CDS sequence (opt2) from hemagglutinin__InfluenzaA__AEO01196

SEQ ID NO: 103334 - RNA, 1701 nt, Artificial Sequence; identical to SEQ ID NO: 98705
  derived and/or modified CDS sequence (opt2) from hemagglutinin__InfluenzaA__AEO01197

SEQ ID NO: 103335 - RNA, 1701 nt, Artificial Sequence; identical to SEQ ID NO: 99058
  derived and/or modified CDS sequence (opt2) from hemagglutinin__InfluenzaA__AEO01198

SEQ ID NO: 103336 - RNA, 1701 nt, Artificial Sequence; identical to SEQ ID NO: 99571
  derived and/or modified CDS sequence (opt2) from hemagglutinin__InfluenzaA__AEO01200

SEQ ID NO: 103337 - RNA, 1701 nt, Artificial Sequence
  derived and/or modified CDS sequence (opt2) from hemagglutinin__InfluenzaA__AEO01201
augaaggccauccucgucguccuccucuacaccuucgccaccgccaacgccgacacccucugcaucggcuaccacgccaacaacuccaccgacaccgucgacaccguccucgagaagaacgucaccgucacccacuccgucaaccuccucgaggagaagcacaacggcaagcucugcaagcuccgcggcgucgccccccuccaccucggcaagugcaacaucgccggcuggauccucggcaaccccgagugcgagucccucuccaccgccuccuccugguccuacaucgucgagaccuccuccuccgacaacggcaccugcuaccccggcgacuucaucgacuacgaggagcuccgcgagcagcucuccuccgucuccuccuucgagcgcuucgagaucuuccccaagaccuccuccuggcccaaccacgacuccaacaagggcgucaccgccgccugcccccacgccggcgccaaguccuucuacaagaaccucaucuggcucgucaagaagggcaacuccuaccccaagcucuccaaguccuacaucaacgacaagggcaaggagguccucguccucuggggcauccaccaccccuccaccuccgccgaccagcagucccucuaccagaacgccgacgccuacgucuucgucggcaccucccgcuacuccaagaaguucaagcccgagaucgccauccgccccaagguccgcgagcaggagggccgcaugaacuacuacuggacccucgucgagcccggcgacaagaucaccuucgaggccaccggcaaccucgucgucccccgcuacgccuucgccauggagcgcaacgccggcuccggcaucaucaucuccgacacccccguccacgacugcaacaccaccugccagacccccaagggcgccaucaacaccucccuccccuuccagaacauccaccccaucaccaucggcaagugccccaaguacgucaaguccaccaagcuccgccucgccaccggccuccgcaacguccccuccauccagucccgcggccucuucggcgccaucgccggcuucaucgagggcggcuggaccggcauggucgacggcugguacggcuaccaccaccagaacgagcagggcuccggcuacgccgccgaccucaaguccacccagaacgccaucgacgagaucaccaacaaggucaacuccgucaucgagaagaugaacacccaguucaccgccgucggcaaggaguucaaccaccucgagaagcgcaucgagaaccucaacaagaaggucgacgacggcuuccucgacaucuggaccuacaacgccgagcuccucguccuccucgagaacgagcgcacccucgacuaccacgacuccaacgucaagaaccucuacgagaagguccgcucccagcucaagaacaacgccaaggagaucggcaacggcugcuucgaguucuaccacaagugcgacaacaccugcauggaguccgucaagaacggcaccuacgacuaccccaaguacuccgaggaggccaagcucaaccgcgaggagaucgacggcgucaagcucgaguccacccgcaucuaccagauccucgccaucuacuccaccgucgccuccucccucguccucgucgucucccucggcgccaucuccuucuggaugugcuccaacggcucccuccagugccgcaucugcaucuga

SEQ ID NO: 103338 - RNA, 1701 nt, Artificial Sequence; identical to SEQ ID NO: 98705
  derived and/or modified CDS sequence (opt2) from hemagglutinin__InfluenzaA__AEO01202

SEQ ID NO: 103339 - RNA, 1701 nt, Artificial Sequence; identical to SEQ ID NO: 100341
  derived and/or modified CDS sequence (opt2) from hemagglutinin__InfluenzaA__AEO01203

SEQ ID NO: 103340 - RNA, 1701 nt, Artificial Sequence; identical to SEQ ID NO: 98705
  derived and/or modified CDS sequence (opt2) from hemagglutinin__InfluenzaA__AEO01204

SEQ ID NO: 103341 - RNA, 1701 nt, Artificial Sequence; identical to SEQ ID NO: 98705
  derived and/or modified CDS sequence (opt2) from hemagglutinin__InfluenzaA__AEO01205

SEQ ID NO: 103342 - RNA, 1701 nt, Artificial Sequence; identical to SEQ ID NO: 98705
  derived and/or modified CDS sequence (opt2) from hemagglutinin__InfluenzaA__AEO01206

SEQ ID NO: 103343 - RNA, 1701 nt, Artificial Sequence; identical to SEQ ID NO: 98705
  derived and/or modified CDS sequence (opt2) from hemagglutinin__InfluenzaA__AEO01207

SEQ ID NO: 103344 - RNA, 1701 nt, Artificial Sequence; identical to SEQ ID NO: 98705
  derived and/or modified CDS sequence (opt2) from hemagglutinin__InfluenzaA__AEO01208

SEQ ID NO: 103345 - RNA, 1701 nt, Artificial Sequence; identical to SEQ ID NO: 99058
  derived and/or modified CDS sequence (opt2) from hemagglutinin__InfluenzaA__AEO01209

SEQ ID NO: 103346 - RNA, 1701 nt, Artificial Sequence; identical to SEQ ID NO: 98705
  derived and/or modified CDS sequence (opt2) from hemagglutinin__InfluenzaA__AEO01210

SEQ ID NO: 103347 - RNA, 1701 nt, Artificial Sequence; identical to SEQ ID NO: 99058
  derived and/or modified CDS sequence (opt2) from hemagglutinin__InfluenzaA__AEO01211

SEQ ID NO: 103348 - RNA, 1701 nt, Artificial Sequence; identical to SEQ ID NO: 98705
  derived and/or modified CDS sequence (opt2) from hemagglutinin__InfluenzaA__AEO01212

SEQ ID NO: 103349 - RNA, 1701 nt, Artificial Sequence; identical to SEQ ID NO: 98705
  derived and/or modified CDS sequence (opt2) from hemagglutinin__InfluenzaA__AEO01213

SEQ ID NO: 103350 - RNA, 1701 nt, Artificial Sequence
  derived and/or modified CDS sequence (opt2) from hemagglutinin__InfluenzaA__AEO01214
augaaggccauccucgucguccuccucuacaccuucgccaccgccaacgccgacacccucugcaucggcuaccacgccaacaacuccaccgacaccgucgacaccguccucgagaagaacgucaccgucacccacuccgucaaccuccucgaggacaagcacaacggcaagcucugcaagcuccgcggcgucgccccccuccaccucggcaagugcaacaucgccggcuggauccucggcaaccccgagugcgagucccucuccaccgccuccuccugguccuacaucgucgagaccuccuccuccgacaacggcaccugcuaccccggcgacuucaucgacuacgaggagcuccgcgagcagcucuccuccgucuccuccuucgagcgcuucgagaucuuccccaagaccuccuccuggcccaaccacgacuccaacaagggcgucaccgccgccugcccccacgccggcgccaaguccuucuacaagaaccucaucuggcucgucaagaagggcaacuccuaccccaagcucuccaaguccuacaucaacgacaagggcaaggagguccucguccucuggggcauccaccaccccuccaccuccgccgaccagcagucccucuaccagaacgccgacgccuacgucuucgucggcaccucccgcuacuccaagaaguucaagcccgagaucgccauccgccccaagguccgcgaccaggagggccgcaugaacuacuacuggacccucgucgagcccggcgacaagaucaccuucgaggccaccggcaaccucgucgccccccgcuacgccuucgccauggagcgcaacgccggcuccggcaucaucaucuccgacacccccguccacgacugcaacaccaccugccagacccccaagggcgccaucaacaccucccuccccuuccagaacauccaccccaucaccaucggcaagugccccaaguacgucaaguccaccaagcuccgccucgccaccggccuccgcaacguccccuccauccagucccgcggccucuucggcgccaucgccggcuucaucgagggcggcuggaccggcauggucgacggcugguacggcuaccaccaccagaacgagcagggcuccggcuacgccgccgaccucaaguccacccagaacgccaucgacgagaucaccaacaaggucaacuccgucaucgagaagaugaacacccaguucaccgccgucggcaaggaguucaaccaccucgagaagcgcaucgagaaccucaacaagaaggucgacgacggcuuccucgacaucuggaccuacaacgccgagcuccucguccuccucgagaacgagcgcacccucgacuaccacgacuccaacgucaagaaccucuacgagaagguccgcucccagcucaagaacaacgccaaggagaucggcaacggcugcuucgaguucuaccacaagugcgacaacaccugcauggaguccgucaagaacggcaccuacgacuaccccaaguacuccgaggaggccaagcucaaccgcgaggagaucgacggcgucaagcucgaguccacccgcaucuaccagauccucgccaucuacuccaccgucgccuccucccucguccucgucgucucccucggcgccaucuccuucuggaugugcuccaacggcucccuccagugccgcaucugcaucuga

SEQ ID NO: 103351 - RNA, 1701 nt, Artificial Sequence; identical to SEQ ID NO: 99058
  derived and/or modified CDS sequence (opt2) from hemagglutinin__InfluenzaA__AEO01215

SEQ ID NO: 103352 - RNA, 1701 nt, Artificial Sequence
  derived and/or modified CDS sequence (opt2) from hemagglutinin__InfluenzaA__AEO01216
augaaggccauccucgucguccuccucuacaccuucgccaccgccaacgccgacacccucugcaucggcuaccacgccaacaacuccaccgacaccgucgacaccguccucgagaagaacgucaccgucacccacuccgucaaccuccucgaggacaagcacaacggcaagcucugcaagcuccgcggcgucgccccccuccaccucggcaagugcaacaucgccggcuggauccucggcaaccccgagugcgagucccucuccaccgccuccuccugguccuacaucgucgagaccuccuccuccgacaacggcaccugcuaccccggcgacuucaucgacuacgaggagcuccgcgagcagcucuccuccgucuccuccuucgagcgcuucgagaucuuccccaagaccuccuccuggcccaaccacgacuccaacaagggcgucaccgccgccugcccccacgccggcgccaaguccuucuacaagaaccucaucuggcucgucaagaagggcaacuccuaccccaagcucuccaaguccuacaucaacgacaagggcaaggagguccucguccucuggggcauccaccaccccuccaccuccgccgaccagcagucccucuaccagaacgccgacgccuacgucuucgucggcaccucccgcuacuccaagaaguucaagcccgagaucgccauccgccccaagguccgcgagcaggagggccgcaugaacuacuacuggacccucgucgagcccggcgacaagaucaccuucgaggccaccggcaaccucgucgucccccgcuacgccuucgccauggagcgcaacgccggcuccggcaucaucaucuccgacacccccguccacgacugcaacaccaccugccagacccccaagggcgccaucaacaccucccuccccuuccagaacauccaccccaucaccaucggcaagugccccaaguacgucaaguccaccaagcuccgccucgccaccggccuccgcaacguccccuccauccagucccgcggccucuucggcgccaucgccggcuucaucgagggcggcuggaccggcauggucgacggcugguacggcuaccaccaccagaacgagcagggcuccggcuacgccgccgaccucaaguccacccagaacgccaucgacgagaucaccaacaaggucaacuccgucaucgagaagaugaacacccaguucaccgccgucggcaaggaguucaaccaccucgagaagcgcgucgagaaccucaacaagaaggucgacgacggcuuccucgacaucuggaccuacaacgccgagcuccucguccuccucgagaacgagcgcacccucgacuaccacgacuccaacgucaagaaccucuacgagaagguccgcucccagcucaagaacaacgccaaggagaucggcaacggcugcuucgaguucuaccacaagugcgacaacaccugcauggaguccgucaagaacggcaccuacgacuaccccaaguacuccgaggaggccaagcucaaccgcgaggagaucgacggcgucaagcucgaguccacccgcaucuaccagauccucgccaucuacuccaccgucgccuccucccucguccucgucgucucccucggcgccaucuccuucuggaugugcuccaacggcucccuccagugccgcaucugcaucuga

SEQ ID NO: 103353 - RNA, 1701 nt, Artificial Sequence; identical to SEQ ID NO: 99058
  derived and/or modified CDS sequence (opt2) from hemagglutinin__InfluenzaA__AEO01217

SEQ ID NO: 103354 - RNA, 1701 nt, Artificial Sequence; identical to SEQ ID NO: 99058
  derived and/or modified CDS sequence (opt2) from hemagglutinin__InfluenzaA__AEO01218

SEQ ID NO: 103355 - RNA, 1701 nt, Artificial Sequence; identical to SEQ ID NO: 99058
  derived and/or modified CDS sequence (opt2) from hemagglutinin__InfluenzaA__AEO01219

SEQ ID NO: 103356 - RNA, 1701 nt, Artificial Sequence; identical to SEQ ID NO: 98796
  derived and/or modified CDS sequence (opt2) from hemagglutinin__InfluenzaA__AEO01220

SEQ ID NO: 103357 - RNA, 1701 nt, Artificial Sequence; identical to SEQ ID NO: 98705
  derived and/or modified CDS sequence (opt2) from hemagglutinin__InfluenzaA__AEO01221

SEQ ID NO: 103358 - RNA, 1701 nt, Artificial Sequence; identical to SEQ ID NO: 98705
  derived and/or modified CDS sequence (opt2) from hemagglutinin__InfluenzaA__AEO01222

SEQ ID NO: 103359 - RNA, 1701 nt, Artificial Sequence; identical to SEQ ID NO: 99058
  derived and/or modified CDS sequence (opt2) from hemagglutinin__InfluenzaA__AEO01223

SEQ ID NO: 103360 - RNA, 1701 nt, Artificial Sequence
  derived and/or modified CDS sequence (opt2) from hemagglutinin__InfluenzaA__AEO01224
augaaggccauccucgucguccuccucuacaccuucgccaccgccaacgccgacacccucugcaucggcuaccacgccaacaacuccaccgacaccgucgacaccguccucgagaagaacgucaccgucacccacuccgucaaccuccucgaggacaagcacaacggcaagcucugcaagcuccgcggcgucgccccccuccaccucggcaagugcaacaucgccggcuggauccucggcaaccccgagugcgagucccucuccaccgccuccuccugguccuacaucgucgagaccuccuccuccgacaacggcaccugcuaccccggcgacuucaucgacuacgaggagcuccgcgagcagcucuccuccgucuccuccuucgagcgcuucgagaucuuccccaagaccuccuccuggcccaaccacgacuccaacaagggcgucaccgccgccugcccccacgccggcgccaaguccuucuacaagaaccucaucuggcucgucaagaagggcaacuccuaccccaagcucuccaaguccuacaucaacgacaagggcaaggagguccucguccucuggggcauccaccaccccuccaccuccgccgaccagcagucccucuaccagaacgccgacgccuacgucuucgucggcaccucccgcuacuccaagaaguucaagcccgagaucgccauccgccccaagguccgcgaccaggagggccgcaugaacuacuacuggacccucgucgagcccggcgacaagaucaccuucgaggccaccggcaaccucgucgucccccgcuacgccuucgccaccgagcgcaacgccggcuccggcaucaucaucuccgacacccccguccacgacugcaacaccaccugccagacccccaagggcgccaucaacaccucccuccccuuccagaacauccaccccaucaccaucggcaagugccccaaguacgucaaguccaccaagcuccgccucgccaccggccuccgcaacguccccuccauccagucccgcggccucuucggcgccaucgccggcuucaucgagggcggcuggaccggcauggucgacggcugguacggcuaccaccaccagaacgagcagggcuccggcuacgccgccgaccucaaguccacccagaacgccaucgacgagaucaccaacaaggucaacuccgucaucgagaagaugaacacccaguucaccgccgucggcaaggaguucaaccaccucgagaagcgcaucgagaaccucaacaagaaggucgacgacggcuuccucgacaucuggaccuacaacgccgagcuccucguccuccucgagaacgagcgcacccucgacuaccacgacuccaacgucaagaaccucuacgagaagguccgcucccagcucaagaacaacgccaaggagaucggcaacggcugcuucgaguucuaccacaagugcgacaacaccugcauggaguccgucaagaacggcaccuacgacuaccccaaguacuccgaggaggccaagcucaaccgcgaggagaucgacggcgucaagcucgaguccacccgcaucuaccagauccucgccaucuacuccaccgucgccuccucccucguccucgucgucucccucggcgccaucuccuucuggaugugcuccaacggcucccuccagugccgcaucugcaucuga

SEQ ID NO: 103361 - RNA, 1701 nt, Artificial Sequence
  derived and/or modified CDS sequence (opt2) from hemagglutinin__InfluenzaA__AEO01225
augaaggccauccucgucguccuccucuacaccuucgccaccgccaacgccgacacccucugcaucggcuaccacgccaacaacuccaccgacaccgucgacaccguccucgagaagaacgucaccgucacccacuccgucaaccuccucgaggacaagcacaacggcaagcucugcaagcuccgcggcgucgccccccuccaccucggcaagugcaacaucgccggcuggauccucggcaaccccgagugcgagucccucuccaccgccuccuccugguccuacaucgucgagaccuccuccuccgacaacggcaccugcuaccccggcgacuucaucgacuacgaggagcuccgcgagcagcucuccuccgucuccuccuucgagcgcuucgagaucuuccccaagaccuccuccuggcccaaccacgacuccaacaagggcgucaccgccgccugcccccacgccggcgccaaguccuucuacaagaaccucaucuggcucgucaagaagggcaacuccuaccccaagcucuccaaguccuacaucaacgacaagggcaaggagguccucguccucuggggcauccaccaccccuccaccuccgccgaccagcagucccucuaccagaacgccgacgccuacgucuucgucggcaccucccgcuacuccaagaaguucaagcccgagaucgccauccgccccaagguccgcgaccaggagggccgcaugaacuacuacuggaccgucgucgagcccggcgacaagaucaccuucgaggccaccggcaaccucgucgucccccgcuacgccuucgccauggagcgcaacgccggcuccggcaucaucaucuccgacacccccguccacgacugcaacaccaccugccagacccccaagggcgccaucaacaccucccuccccuuccagaacauccaccccaucaccaucggcaagugccccaaguacgucaaguccaccaagcuccgccucgccaccggccuccgcaacguccccuccauccagucccgcggccucuucggcgccaucgccggcuucaucgagggcggcuggaccggcauggucgacggcugguacggcuaccaccaccagaacgagcagggcuccggcuacgccgccgaccucaaguccacccagaacgccaucgacgagaucaccaacaaggucaacuccgucaucgagaagaugaacacccaguucaccgccgucggcaaggaguucaaccaccucgagaagcgcaucgagaaccucaacaagaaggucgacgacggcuuccucgacaucuggaccuacaacgccgagcuccucguccuccucgagaacgagcgcacccucgacuaccacgacuccaacgucaagaaccucuacgagaagguccgcucccagcucaagaacaacgccaaggagaucggcaacggcugcuucgaguucuaccacaagugcgacaacaccugcauggaguccgucaagaacggcaccuacgacuaccccaaguacuccgaggaggccaagcucaaccgcgaggagaucgacggcgucaagcucgaguccacccgcaucuaccagauccucgccaucuacuccaccgucgccuccucccucguccucgucgucucccucggcgccaucuccuucuggaugugcuccaacggcucccuccagugccgcaucugcaucuga

SEQ ID NO: 103362 - RNA, 1701 nt, Artificial Sequence
  derived and/or modified CDS sequence (opt2) from hemagglutinin__InfluenzaA__AEO01226
augaaggccauccucgucguccuccucuacaccuucgccaccgccaacgccgacacccucugcaucggcuaccacgccaacaacuccaccgacaccgucgacaccguccucgagaagaacgucaccgucacccacuccgucaaccuccucgaggacaagcacaacggcaagcucugcaagcuccgcggcgucgccccccuccaccucggcaagugcaacaucgccggcuggauccucggcaaccccgagugcgagucccucuccaccgccuccuccugguccuacaucgucgagaccuccuccuccgacaacggcaccugcuaccccggcgacuucaucgacuacgaggagcuccgcgagcagcucuccuccgucuccuccuucgagcgcuucgagaucuuccccaagaccuccuccuggcccaaccacgacuccaacaagggcgucaccgccgccugcccccacgccggcgccaaguccuucuacaagaaccucaucuggcucgucaagaagggcaacuccuaccccaagcucuccaaguccuacaucaacgacaagggcaaggagguccucguccucuggggcauccaccaccccuccaccuccgccgaccagcagucccucuaccagaacgccgacgccuacgucuucgucggcaccucccgcuacuccaagaaguucaagcccgagaucgccauccgccccaagguccgcgaccaggagggccgcaugaacuacuacuggacccucgucgagcccggcgacaagaucaccuucgaggccaccggcaaccucgucgucccccgcuacgccuucgccauggagcgcaacgacggcuccggcaucaucaucuccgacacccccguccacgacugcaacaccaccugccagacccccaagggcgccaucaacaccucccuccccuuccagaacauccaccccaucaccaucggcaagugccccaaguacgucaaguccaccaagcuccgccucgccaccggccuccgcaacguccccuccauccagucccgcggccucuucggcgccaucgccggcuucaucgagggcggcuggaccggcauggucgacggcugguacggcuaccaccaccagaacgagcagggcuccggcuacgccgccgaccucaaguccacccagaacgccaucgacgagaucaccaacaaggucaacuccgucaucgagaagaugaacacccaguucaccgccgucggcaaggaguucaaccaccucgagaagcgcaucgagaaccucaacaagaaggucgacgacggcuuccucgacaucuggaccuacaacgccgagcuccucguccuccucgagaacgagcgcacccucgacuaccacgacuccaacgucaagaaccucuacgagaagguccgcucccagcucaagaacaacgccaaggagaucggcaacggcugcuucgaguucuaccacaagugcgacaacaccugcauggaguccgucaagaacggcaccuacgacuaccccaaguacuccgaggaggccaagcucaaccgcgaggagaucgacggcgucaagcucgaguccacccgcaucuaccagauccucgccaucuacuccaccgucgccuccucccucguccucgucgucucccucggcgccaucuccuucuggaugugcuccaacggcucccuccagugccgcaucugcaucuga

SEQ ID NO: 103363 - RNA, 1701 nt, Artificial Sequence; identical to SEQ ID NO: 100872
  derived and/or modified CDS sequence (opt2) from hemagglutinin__InfluenzaA__AEO01227

SEQ ID NO: 103364 - RNA, 1701 nt, Artificial Sequence; identical to SEQ ID NO: 98705
  derived and/or modified CDS sequence (opt2) from hemagglutinin__InfluenzaA__AEO01228

SEQ ID NO: 103365 - RNA, 1701 nt, Artificial Sequence; identical to SEQ ID NO: 98705
  derived and/or modified CDS sequence (opt2) from hemagglutinin__InfluenzaA__AEO01229

SEQ ID NO: 103366 - RNA, 1701 nt, Artificial Sequence
  derived and/or modified CDS sequence (opt2) from hemagglutinin__InfluenzaA__AEO01230
augaaggccauccucgucguccuccucuacaccuucgccaccgccaacgccgacacccucugcaucggcuaccacgccaacaacuccaccgacaccgucgacaccguccucgagcgcaacgucaccgucacccacuccgucaaccuccucgaggacaagcacaacggcaagcucugcaagcuccgcggcgucgccccccuccaccucggcaagugcaacaucgccggcuggauccucggcaaccccgagugcgagucccucuccaccgccuccuccugguccuacaucgucgagaccuccuccuccgacaacggcaccugcuaccccggcgacuucaucgacuacgaggagcuccgcgagcagcucuccuccgucuccuccuucgagcgcuucgagaucuuccccaagaccuccuccuggcccaaccacgacuccaacaagggcgucaccgccgccugcccccacgccggcgccaaguccuucuacaagaaccucaucuggcucgucaagaagggcaacuccuaccccaagcucuccaaguccuacaucaacgacaagggcaaggagguccucguccucuggggcauccaccaccccuccaccuccgccgaccagcagucccucuaccagaacgccgacgccuacgucuucgucggcaccucccgcuacuccaagaaguucaagcccgagaucgccauccgccccaagguccgcgaccaggagggccgcaugaacuacuacuggacccucgucgagcccggcgacaagaucaccuucgaggccaccggcaaccucgucgucccccgcuacgccuucgccauggagcgcaacgccggcuccggcaucaucaucuccgacacccccguccacgacugcaacaccaccugccagacccccaagggcgccaucaacaccucccuccccuuccagaacauccaccccaucaccaucggcaagugccccaaguacgucaaguccaccaagcuccgccucgccaccggccuccgcaacguccccuccauccagucccgcggccucuucggcgccaucgccggcuucaucgagggcggcuggaccggcauggucgacggcugguacggcuaccaccaccagaacgagcagggcuccggcuacgccgccgaccucaaguccacccagaacgccaucgacgagaucaccaacaaggucaacuccgucaucgagaagaugaacacccaguucaccgccgucggcaaggaguucaaccaccucgagaagcgcaucgagaaccucaacaagaaggucgacgacggcuuccucgacaucuggaccuacaacgccgagcuccucguccuccucgagaacgagcgcacccucgacuaccacgacuccaacgucaagaaccucuacgagaagguccgcucccagcucaagaacaacgccaaggagaucggcaacggcugcuucgaguucuaccacaagugcgacaacaccugcauggaguccgucaagaacggcaccuacgacuaccccaaguacuccaaggaggccaagcucaaccgcgaggagaucgacggcgucaagcucgaguccacccgcaucuaccagauccucgccaucuacuccaccgucgccuccucccucguccucgucgucucccucggcgccaucuccuucuggaugugcuccaacggcucccuccagugccgcaucugcaucuga

SEQ ID NO: 103367 - RNA, 1701 nt, Artificial Sequence; identical to SEQ ID NO: 98705
  derived and/or modified CDS sequence (opt2) from hemagglutinin__InfluenzaA__AEO01231

SEQ ID NO: 103368 - RNA, 1701 nt, Artificial Sequence; identical to SEQ ID NO: 99058
  derived and/or modified CDS sequence (opt2) from hemagglutinin__InfluenzaA__AEO01232

SEQ ID NO: 103369 - RNA, 1701 nt, Artificial Sequence; identical to SEQ ID NO: 98705
  derived and/or modified CDS sequence (opt2) from hemagglutinin__InfluenzaA__AEO01233

SEQ ID NO: 103370 - RNA, 1701 nt, Artificial Sequence; identical to SEQ ID NO: 98705
  derived and/or modified CDS sequence (opt2) from hemagglutinin__InfluenzaA__AEO01234

SEQ ID NO: 103371 - RNA, 1701 nt, Artificial Sequence; identical to SEQ ID NO: 98705
  derived and/or modified CDS sequence (opt2) from hemagglutinin__InfluenzaA__AEO01235

SEQ ID NO: 103372 - RNA, 1701 nt, Artificial Sequence; identical to SEQ ID NO: 102577
  derived and/or modified CDS sequence (opt2) from hemagglutinin__InfluenzaA__AEO01236

SEQ ID NO: 103373 - RNA, 1701 nt, Artificial Sequence; identical to SEQ ID NO: 98705
  derived and/or modified CDS sequence (opt2) from hemagglutinin__InfluenzaA__AEO01237

SEQ ID NO: 103374 - RNA, 1701 nt, Artificial Sequence; identical to SEQ ID NO: 98705
  derived and/or modified CDS sequence (opt2) from hemagglutinin__InfluenzaA__AEO01238

SEQ ID NO: 103375 - RNA, 1701 nt, Artificial Sequence; identical to SEQ ID NO: 98705
  derived and/or modified CDS sequence (opt2) from hemagglutinin__InfluenzaA__AEO01240

SEQ ID NO: 103376 - RNA, 1701 nt, Artificial Sequence; identical to SEQ ID NO: 99058
  derived and/or modified CDS sequence (opt2) from hemagglutinin__InfluenzaA__AEO01241

SEQ ID NO: 103377 - RNA, 1701 nt, Artificial Sequence; identical to SEQ ID NO: 98705
  derived and/or modified CDS sequence (opt2) from hemagglutinin__InfluenzaA__AEO01242

SEQ ID NO: 103378 - RNA, 1701 nt, Artificial Sequence
  derived and/or modified CDS sequence (opt2) from hemagglutinin__InfluenzaA__AEO01244
augaaggccauccucgucguccuccucuacaccuucgccaccgccaacgccgacacccucugcaucggcuaccacgccaacaacuccaccgacaccgucgacaccguccucgagaagaacgucaccgucacccacuccgucaaccuccucgaggacaagcacaacggcaagcucugcaagcuccgcggcgucgccccccuccaccucggcaagugcaacaucgccggcuggauccucggcaaccccgagugcgagucccucuccaccgccuccuccugguccuacaucgucgagaccuccuccuccgacaacggcaccugcuaccccggcgacuucaucgacuacgaggagcuccgcgagcagcucuccuccgucuccuccuucgagcgcuucgagaucuuccccaagaccuccuccuggcccaaccacgacuccaacaagggcgucaccgccgccugcccccacgccggcgccaaguccuucuacaagaaccucaucuggcucgucaagaagggcaacuccuaccccaagcucuccaaguccuacaucaacgacaagggcaaggagguccucguccucuggggcauccaccaccccuccaccuccgccgaccagcagucccucuaccagaacgccgacgccuacgucuucgucggcaccuccaaguacuccaagaaguucaagcccgagaucgccauccgccccaagguccgcggccaggagggccgcaugaacuacuacuggacccucgucgagcccggcgacaagaucaccuucgaggccaccggcaaccucgucgucccccgcuacgccuucgccauggagcgcaacgccggcuccggcaucaucaucuccgacacccccguccacgacugcaacaccaccugccagacccccaagggcgccaucaacaccucccuccccuuccagaacauccaccccaucaccaucggcaagugccccaaguacgucaaguccaccaagcuccgccucgccaccggccuccgcaacguccccuccauccagucccgcggccucuucggcgccaucgccggcuucaucgagggcggcuggaccggcauggucgacggcugguacggcuaccaccaccagaacgagcagggcuccggcuacgccgccgaccucaaguccacccagaacgccaucgacgagaucaccaacaaggucaacuccgucaucgagaagaugaacacccaguucaccgccgucggcaaggaguucaaccaccucgagaagcgcaucgagaaccucaacaagaaggucgacgacggcuuccucgacaucuggaccuacaacgccgagcuccucguccuccucgagaacgagcgcacccucgacuaccacgacuccaacgucaagaaccucuacgagaagguccgcucccagcucaagaacaacgccaaggagaucggcaacggcugcuucgaguucuaccacaagugcgacaacaccugcauggaguccgucaagaacggcaccuacgacuaccccaaguacuccgaggaggccaagcucaaccgcgaggagaucgacggcgucaagcucgaguccacccgcaucuaccagauccucgccaucuacuccaccgucgccuccucccucguccucgucgucucccucggcgccaucuccuucuggaugugcuccaacggcucccuccagugccgcaucugcaucuga

SEQ ID NO: 103379 - RNA, 1701 nt, Artificial Sequence; identical to SEQ ID NO: 98705
  derived and/or modified CDS sequence (opt2) from hemagglutinin__InfluenzaA__AEO01245

SEQ ID NO: 103380 - RNA, 1701 nt, Artificial Sequence
  derived and/or modified CDS sequence (opt2) from hemagglutinin__InfluenzaA__AEO01247
augaaggccauccucgucguccuccucuacaccuucgccaccgccaacgccgacacccucugcaucggcuaccacgccaacaacuccaccgacaccgucgacaccguccucgagaagaacgucaccgucacccacuccgucaaccuccucgaggacaagcacaacggcaagcucugcaagcuccgcggcgucgccccccuccaccucggcaagugcaacaucgccggcuggauccucggcaaccccgagugcgagucccucuccaccgccuccuccugguccuacaucgucgagaccuccuccuccgacaacggcaccugcuaccccggcgacuucaucgacuacgaggagcuccgcgagcagcucuccuccgucuccuccuucgagcgcuucgagaucuuccccaagaccuccuccuggcccaaccacgacuccaacaagggcgucaccgccgccugcccccacgccggcgccaaguccuucuacaagaaccucaucuggcucgucaagaagggcaacuccuaccccaagcucuccaaguccuacaucaacgacaagggcaaggagguccucguccucuggggcauccaccaccccuccaccuccgccgaccagcagucccucuaccagaacgccgacgccuacgucuucgucggcaccucccgcuacuccaagaaguucaagcccgagaucgccauccgccccaagguccgcgaccaggagggccgcaugaacuacuacuggacccucgucgagcccggcgacaagaucaccuucgaggccaccggcaaccucgucgucccccgcuacgccuucgccauggagcgcaacgccggcuccggcauccucaucuccgacacccccguccacgacugcaacaccaccugccagacccccaagggcgccaucaacaccucccuccccuuccagaacauccaccccaucaccaucggcaagugccccaaguacgucaaguccaccaagcuccgccucgccaccggccuccgcaacguccccuccauccagucccgcggccucuucggcgccaucgccggcuucaucgagggcggcuggaccggcauggucgacggcugguacggcuaccaccaccagaacgagcagggcuccggcuacgccgccgaccucaaguccacccagcacgccaucgacgagaucaccaacaaggucaacuccgucaucgagaagaugaacacccaguucaccgccgucggcaaggaguucaaccaccucgagaagcgcaucgagaaccucaacaagaaggucgacgacggcuuccucgacaucuggaccuacaacgccgagcuccucguccuccucgagaacgagcgcacccucgacuaccacgacuccaacgucaagaaccucuacgagaagguccgcucccagcucaagaacaacgccaaggagaucggcaacggcugcuucgaguucuaccacaagugcgacaacaccugcauggaguccgucaagaacggcaccuacgacuaccccaaguacuccgaggaggccaagcucaaccgcgaggagaucgacggcgucaagcucgaguccacccgcaucuaccagauccucgccaucuacuccaccgucgccuccucccucguccucgucgucucccucggcgccaucuccuucuggaugugcuccaacggcucccuccagugccgcaucugcaucuga

SEQ ID NO: 103381 - RNA, 1701 nt, Artificial Sequence; identical to SEQ ID NO: 98705
  derived and/or modified CDS sequence (opt2) from hemagglutinin__InfluenzaA__AEO01248

SEQ ID NO: 103382 - RNA, 1701 nt, Artificial Sequence; identical to SEQ ID NO: 98705
  derived and/or modified CDS sequence (opt2) from hemagglutinin__InfluenzaA__AEO01249

SEQ ID NO: 103383 - RNA, 1701 nt, Artificial Sequence
  derived and/or modified CDS sequence (opt2) from hemagglutinin__InfluenzaA__AEO01250
augaaggccauccucgucguccuccucuacaccuucgccaccgccaacgccgacacccucugcaucggcuaccacgccaacaacuccaccgacaccgucgacaccguccucgagaagaacgucaccgucacccacuccgucaaccuccucgaggacaagcacaacggcaagcucugcaagcuccgcggcgucgccccccuccaccucggcaagugcaacaucgccggcuggauccucggcaaccccgagugcgagucccucuccaccgccuccuccugguccuacaucgucgagaccuccuccuccgacaacggcaccugcuaccccggcgacuucaucgacuacgaggagcuccgcgagcagcucuccuccgucuccuccuucgagcgcuucgagaucuuccccaagaccuccuccuggcccaaccacgacuccaacaagggcgucaccgccgccugcccccacgccggcgccaaguccuucuacaagaaccucaucuggcucgucaagaagggcaacuccuaccccaagcucuccaaguccuacaucaacgacaagggcaaggagguccucguccucuggggcauccaccaccccuccaccuccgccgaccagcagucccucuaccagaacgaggacgccuacgucuucgucggcaccucccgcuacuccaagaaguucaagcccgagaucgccauccgccccaagguccgcgaccaggagggccgcaugaacuacuacuggacccucgucgagcccggcgacaagaucaccuucgaggccaccggcaaccucgucgucccccgcuacgccuucgccauggagcgcaacgccggcuccggcaucaucaucuccgacacccccguccacgacugcaacaccaccugccagacccccaagggcgccaucaacaccucccuccccuuccagaacauccaccccaucaccaucggcaagugccccaaguacgucaaguccaccaagcuccgccucgccaccggccuccgcaacguccccuccauccagucccgcggccucuucggcgccaucgccggcuucaucgagggcggcuggaccggcauggucgacggcugguacggcuaccaccaccagaacgagcagggcuccggcuacgccgccgaccucaaguccacccagaacgccaucgacgagaucaccaacaaggucaacuccgucaucgagaagaugaacacccaguucaccgccgucggcaaggaguucaaccaccucgagaagcgcaucgagaaccucaacaagaaggucgacgacggcuuccucgacaucuggaccuacaacgccgagcuccucguccuccucgagaacgagcgcacccucgacuaccacgacuccaacgucaagaaccucuacgagaagguccgcucccagcucaagaacaacgccaaggagaucggcaacggcugcuucgaguucuaccacaagugcgacaacaccugcauggaguccgucaagaacggcaccuacgacuaccccaaguacuccgaggaggccaagcucaaccgcgaggagaucgacggcgucaagcucgaguccacccgcaucuaccagauccucgccaucuacuccaccgucgccuccucccucguccucgucgucucccucggcgccaucuccuucuggaugugcuccaacggcucccuccagugccgcaucugcaucuga

SEQ ID NO: 103384 - RNA, 1701 nt, Artificial Sequence; identical to SEQ ID NO: 100302
  derived and/or modified CDS sequence (opt2) from hemagglutinin__InfluenzaA__AEO01251

SEQ ID NO: 103385 - RNA, 1701 nt, Artificial Sequence; identical to SEQ ID NO: 98705
  derived and/or modified CDS sequence (opt2) from hemagglutinin__InfluenzaA__AEO01252

SEQ ID NO: 103386 - RNA, 1701 nt, Artificial Sequence; identical to SEQ ID NO: 98705
  derived and/or modified CDS sequence (opt2) from hemagglutinin__InfluenzaA__AEO01253

SEQ ID NO: 103387 - RNA, 1701 nt, Artificial Sequence
  derived and/or modified CDS sequence (opt2) from hemagglutinin__InfluenzaA__AEO01254
augaaggccauccucgucguccuccucuacaccuucgccaccgccaacgccgacacccucugcaucggcuaccacgccaacaacuccaccgacaccgucgacaccguccucgagaagaacgucaccgucacccacuccgucaaccuccucgaggacaagcacaacggcaagcucugcaagcuccgcggcgucgccccccuccaccucggcaagugcaacaucgccggcuggauccucggcaaccccgagugcgagucccucuccaccgccuccuccugguccuacaucgucgagaccuccuccuccgacaacggcaccugcuaccccggcgacuucaucgacuacgaggagcuccgcgagcagcucuccuccgucuccuccuucgagcgcuucgagaucuuccccaagaccuccuccuggcccaaccacgacuccaacaagggcgucaccgccgccugcccccacgccggcgccaaguccuucuacaagaaccucaucuggcucgucaagaagggcaacuccuaccccaagcucuccaaguccuacaucaacaacaagggcaaggagguccucguccucuggggcauccaccaccccuccaccuccgccgaccagcagucccucuaccagaacgccgacgccuacgucuucgucggcaccucccgcuacuccaagaaguucaagcccgagaucgccauccgccccaagguccgcgaccaggagggccgcaugaacuacuacuggacccucgucgagcccggcgacaagaucaccuucgaggccaccggcaaccucgucgucccccgcuacgccuucgccauggagcgcaacgccggcuccggcaucaucaucuccgacacccccguccacgacugcaacaccaccugccagacccccaagggcgccaucaacaccucccuccccuuccagaacauccaccccaucaccaucggcaagugccccaaguacgucaaguccaccaagcuccgccucgccaccggccuccgcaacguccccuccauccagucccgcggccucuucggcgccaucgccggcuucaucgagggcggcuggaccggcauggucgacggcugguacggcuaccaccaccagaacgagcagggcuccggcuacgccgccgaccucaaguccacccagaacgccaucgacaagaucaccaacaaggucaacuccgucaucgagaagaugaacacccaguucaccgccgucggcaaggaguucaaccaccucgagaagcgcaucgagaaccucaacaagaaggucgacgacggcuuccucgacaucuggaccuacaacgccgagcuccucguccuccucgagaacgagcgcacccucgacuaccacgacuccaacgucaagaaccucuacgagaagguccgcucccagcucaagaacaacgccaaggagaucggcaacggcugcuucgaguucuaccacaagugcgacaacaccugcauggaguccgucaagaacggcaccuacgacuaccccaaguacuccgaggaggccaagcucaaccgcgaggagaucgacggcgucaagcucgaguccacccgcaucuaccagauccucgccaucuacuccaccgucgccuccucccucguccucgucgucucccucggcgccaucuccuucuggaugugcuccaacggcucccuccagugccgcaucugcaucuga

SEQ ID NO: 103388 - RNA, 1701 nt, Artificial Sequence; identical to SEQ ID NO: 99152
  derived and/or modified CDS sequence (opt2) from hemagglutinin__InfluenzaA__AEO01256

SEQ ID NO: 103389 - RNA, 1701 nt, Artificial Sequence; identical to SEQ ID NO: 102124
  derived and/or modified CDS sequence (opt2) from hemagglutinin__InfluenzaA__AEO01257

SEQ ID NO: 103390 - RNA, 1701 nt, Artificial Sequence; identical to SEQ ID NO: 98705
  derived and/or modified CDS sequence (opt2) from hemagglutinin__InfluenzaA__AEO01258

SEQ ID NO: 103391 - RNA, 1701 nt, Artificial Sequence; identical to SEQ ID NO: 103387
  derived and/or modified CDS sequence (opt2) from hemagglutinin__InfluenzaA__AEO01259

SEQ ID NO: 103392 - RNA, 1701 nt, Artificial Sequence; identical to SEQ ID NO: 101260
  derived and/or modified CDS sequence (opt2) from hemagglutinin__InfluenzaA__AEO01260

SEQ ID NO: 103393 - RNA, 1701 nt, Artificial Sequence
  derived and/or modified CDS sequence (opt2) from hemagglutinin__InfluenzaA__AEO01261
augaaggccauccucgucguccuccucuacaccuucgccaccgccaacgccgacacccucugcaucggcuaccacgccaacaacuccaccgacaccgucgacaccguccucgagaagaacgucaccgucacccacuccgucaaccuccucgaggacaagcacaacggcaagcucugcaagcuccgcggcgucgccccccuccaccucggcaagugcaacaucgccggcuggauccucggcaaccccgagugcgagucccucuccaccgccuccuccugguccuacaucgucgagaccuccuccuccgacaacggcaccugcuaccccggcgacuucaucgacuacgaggagcuccgcgagcagcucuccuccgucuccuccuucgagcgcuucgagaucuuccccaagaccuccuccuggcccaaccacgacuccaacaagggcgucaccgccgccugcccccacgccggcgccaaguccuucuacaagaaccucaucuggcucgucaagaagggcaacuccuaccccaagcucuccaaguccuacaucaacgacaagggcaaggagguccucguccucuggggcauccaccaccccuccaccuccgccgaccagcagucccucuaccagaacgccgacgccuacgucuucgucggcaccucccgcuacuccaagaaguucaagcccgagaucgccauccgccccaagguccgcgaccaggagggccgcaugaacuacuacuggacccucgucgagcccggcgacaagaucaccuucgaggccaccggcaaccucgucgucccccgcuacgccuucgccauggagcgcaacgccggcuccggcaucaucaucuccgacacccccguccacgacugcaacaccaccugccagacccccaagggcgccaucaacaccucccuccccuuccagaacauccaccccaucaccaucggcaagugccccaaguacgucaaguccaccaagcuccgcauggccaccggccuccgcaacguccccuccauccagucccgcggccucuucggcgccaucgccggcuucaucgagggcggcuggaccggcauggucgacggcugguacggcuaccaccaccagaacgagcagggcuccggcuacgccgccgaccucaaguccacccagaacgccaucgacgagaucaccaacaaggucaacuccgucaucgagaagaugaacacccaguucaccgccgucggcaaggaguucaaccaccucgagaagcgcaucgagaaccucaacaagaaggucgacgacggcuuccucgacaucuggaccuacaacgccgagcuccucguccuccucgagaacgagcgcacccucgacuaccacgacuccaacgucaagaaccucuacgagaagguccgcucccagcucaagaacaacgccaaggagaucggcaacggcugcuucgaguucuaccacaagugcgacaacaccugcauggaguccgucaagaacggcaccuacgacuaccccaaguacuccgaggaggccaagcucaaccgcgaggagaucgacggcgucaagcucgaguccaccggcaucuaccagauccucgccaucuacuccaccgucgccuccucccucguccucgucgucucccucggcgccaucuccuucuggaugugcuccaacggcucccuccagugccgcaucugcaucuga

SEQ ID NO: 103394 - RNA, 1701 nt, Artificial Sequence; identical to SEQ ID NO: 98705
  derived and/or modified CDS sequence (opt2) from hemagglutinin__InfluenzaA__AEO01262

SEQ ID NO: 103395 - RNA, 1701 nt, Artificial Sequence; identical to SEQ ID NO: 100387
  derived and/or modified CDS sequence (opt2) from hemagglutinin__InfluenzaA__AEO01263

SEQ ID NO: 103396 - RNA, 1701 nt, Artificial Sequence; identical to SEQ ID NO: 99058
  derived and/or modified CDS sequence (opt2) from hemagglutinin__InfluenzaA__AEO01264

SEQ ID NO: 103397 - RNA, 1701 nt, Artificial Sequence; identical to SEQ ID NO: 98705
  derived and/or modified CDS sequence (opt2) from hemagglutinin__InfluenzaA__AEO01265

SEQ ID NO: 103398 - RNA, 1701 nt, Artificial Sequence
  derived and/or modified CDS sequence (opt2) from hemagglutinin__InfluenzaA__AEO01266
augaaggccauccucgucguccuccucuacaccuucgccaccgccaacgccgacacccucugcaucggcuaccacgccaacaacuccaccgacaccgucgacaccguccucgagaagaacgucaccgucacccacuccgucaaccuccucgaggacaagcacaacggcaagcucugcaagcuccgcggcgucgccccccuccaccucggcaagugcaacaucgccggcuggauccucggcaaccccgagugcgagucccucuccaccgccuccuccugguccuacaucgucgagaccuccuccuccgacaacggcaccugcuaccccggcgacuucaucgacuacgaggagcuccgcgagcagcucuccuccgucuccuccuucgagcgcuucgagaucuuccccaagaccuccuccuggcccaaccacgacuccaacaagggcgucaccgccgccugcccccacgccggcgccaaguccuucuacaagaaccucaucuggcucgucaagaagggcaacuccuaccccaagcucuccaaguccuacaucaacgacaagggcaaggagguccucguccucuggggcauccaccaccccuccaccuccgccgaccagcagucccucuaccagaacgccgacgccuacgucuucgucggcaccucccgcuacuccaagaaguucaagcccgagaucgccauccgccccaagguccgcggccaggagggccgcaugaacuacuacuggacccucgucgagcccggcgacaagaucaccuucgaggccaccggcaaccucgucgucccccgcuacgccuucgccauggagcgcaacgccggcuccggcaucaucaucuccgacgcccccguccacgacugcaacaccaccugccagacccccaagggcgccaucaacaccucccuccccuuccagaacauccaccccaucaccaucggcaagugccccaaguacgucaaguccaccaagcuccgccucgccaccggccuccgcaacguccccuccauccagucccgcggccucuucggcgccaucgccggcuucaucgagggcggcuggaccggcauggucgacggcugguacggcuaccaccaccagaacgagcagggcuccggcuacgccgccgaccucaaguccacccagaacgccaucgacgagaucaccaacaaggucaacuccgucaucgagaagaugaacacccaguucaccgccgucggcaaggaguucaaccaccucgagaagcgcaucgagaaccucaacaagaaggucgacgacggcuuccucgacaucuggaccuacaacgccgagcuccucguccuccucgagaacgagcgcacccucgacuaccacgacuccaacgucaagaaccucuacgagaagguccgcucccagcucaagaacaacgccaaggagaucggcaacggcugcuucgaguucuaccacaagugcgacaacaccugcauggaguccgucaagaacggcaccuacgacuaccccaaguacuccgaggaggccaagcucaaccgcgaggagaucgacggcgucaagcucgaguccacccgcaucuaccagauccucgccaucuacuccaccgucgccuccucccucguccucgucgucucccucggcgccaucuccuucuggaugugcuccaacggcucccuccagugccgcaucugcaucuga

SEQ ID NO: 103399 - RNA, 1701 nt, Artificial Sequence; identical to SEQ ID NO: 98705
  derived and/or modified CDS sequence (opt2) from hemagglutinin__InfluenzaA__AEO01267

SEQ ID NO: 103400 - RNA, 1701 nt, Artificial Sequence; identical to SEQ ID NO: 98705
  derived and/or modified CDS sequence (opt2) from hemagglutinin__InfluenzaA__AEO01268

SEQ ID NO: 103401 - RNA, 1701 nt, Artificial Sequence
  derived and/or modified CDS sequence (opt2) from hemagglutinin__InfluenzaA__AEO01269
augaaggccauccucgucguccuccucuacaccuucgccaccgccaacgccgacacccucugcaucggcuaccacgccaacaacuccaccgacaccgucgacaccguccucgagaagaacgucaccgucacccacuccgucaaccuccucgaggacaagcacaacggcaagcucugcaagcuccgcggcgucgccccccuccaccucggcaagugcaacaucgccggcuggauccucggcaaccccgagugcgagucccucuccaccgccuccuccugguccuacaucgucgagaccuccuccuccgacaacggcaccugcuaccccggcgacuucaucgacuacgaggagcuccgcgagcagcucuccuccgucuccuccuucgagcgcuucgagaucuuccccaagaccuccuccuggcccaaccacgacuccaacaagggcgucaccgccgccugcccccacgccggcgccaaguccuucuacaagaaccucaucuggcucgucaagaagggcaacuccuaccccaagcucuccaaguccuacaucaacgacaagggcaaggagguccucguccucuggggcauccaccaccccuccaccuccgccgaccagcagucccucuaccagaacgccgacgccuacgucuucgucggcaccucccgcuacuccaagaaguucaagcccgagaucgccauccgccccaagguccgcgagcaggagggccgcaugaacuacuacuggacccucgucgagcccggcgacaagaucaccuucgaggccaccggcaaccucgucgucccccgcuacgccuucgccauggagcgcaacgccggcuccggcaucgucaucuccgacacccccguccacgacugcaacaccaccugccagacccccaagggcgccaucaacaccucccuccccuuccagaacauccaccccaucaccaucggcaagugccccaaguacgucaaguccaccaagcuccgccucgccaccggccuccgcaacguccccuccauccagucccgcggccucuucggcgccaucgccggcuucaucgagggcggcuggaccggcauggucgacggcugguacggcuaccaccaccagaacgagcagggcuccggcuacgccgccgaccucaaguccacccagaacgccaucgacgagaucaccaacaaggucaacuccgucaucgagaagaugaacacccaguucaccgccgucggcaaggaguucaaccaccucgagaagcgcauggagaaccucaacaagaaggucgacgacggcuuccucgacaucuggaccuacaacgccgagcuccucguccuccucgagaacgagcgcacccucgacuaccacgacuccaacgucaagaaccucuacgagaagguccgcucccagcucaagaacaacgccaaggagaucggcaacggcugcuucgaguucuaccacaagugcgacaacaccugcauggaguccgucaagaacggcaccuacgacuaccccaaguacuccgaggaggccaagcucaaccgcgaggagaucgacggcgucaagcucgaguccacccgcaucuaccagauccucgccaucuacuccaccgucgccuccucccucguccucgucgucucccucggcgccaucuccuucuggaugugcuccaacggcucccuccagugccgcaucugcaucuga

SEQ ID NO: 103402 - RNA, 1701 nt, Artificial Sequence; identical to SEQ ID NO: 99869
  derived and/or modified CDS sequence (opt2) from hemagglutinin__InfluenzaA__AEO01270

SEQ ID NO: 103403 - RNA, 1701 nt, Artificial Sequence
  derived and/or modified CDS sequence (opt2) from hemagglutinin__InfluenzaA__AEO01271
augaaggccauccucgucguccuccucuacaccuucgccaccgccaacgccgacacccucugcaucggcuaccacgccaacaacuccaccgacaccgucgacaccguccucgagaagaacgucaccgucacccacuccgucaaccuccucgaggacaagcacaacggcaagcucugcaagcuccgcggcgucgccccccuccaccucggcaagugcgacaucgccggcuggauccucggcaaccccgagugcgagucccucuccaccgccuccuccugguccuacaucgucgagacccccuccuccgacaacggcaccugcuaccccggcgacuucaucgacuacgaggagcuccgcgagcagcucuccuccgucuccuccuucgagcgcuucgagaucuuccccaagaccuccuccuggcccaaccacgacuccaacaagggcgucaccgccgccugcccccacgccggcgccaaguccuucuacaagaaccucaucuggcucgucaagaagggcaacuccuaccccaagcucuccaaguccuacaucaacgacaagggcaaggagguccucguccucuggggcauccaccaccccuccaccuccgccgaccagcagucccucuaccagaacgccgacgccuacgucuucgucggcaccucccgcuacuccaagaaguucaagcccgagaucgccauccgccccaagguccgcgaccaggagggccgcaugaacuacuacuggacccucgucgagcccggcgacaagaucaccuucgaggccaccggcaaccucgucgucccccgcuacgccuucgccauggagcgcaacgccggcuccggcaucaucaucuccgacacccccguccacgacugcaacaccaccugccagacccccaagggcgccaucaacaccucccuccccuuccagaacauccaccccaucaccaucggcaagugccccaaguacgucaaguccaccaagcuccgccucgccaccggccuccgcaacguccccuccauccagucccgcggccucuucggcgccaucgccggcuucaucgagggcggcuggaccggcauggucgacggcugguacggcuaccaccaccagaacgagcagggcuccggcuacgccgccgaccucaaguccacccagcacgccaucgacgagaucaccaacaaggucaacuccgucaucgagaagaugaacacccaguucaccgccgucggcaaggaguucaaccaccucgagaagcgcaucgagaaccucaacaagaaggucgacgacggcuuccucgacaucuggaccuacaacgccgagcuccucguccuccucgagaacgagcgcacccucgacuaccacgacuccaacgucaagaaccucuacgagaagguccgcucccagcucaagaacaacgccaaggagaucggcaacggcugcuucgaguucuaccacaagugcgacaacaccugcauggaguccgucaagaacggcaccuacgacuaccccaaguacuccgaggaggccaagcucaaccgcgaggagaucgacggcgucaagcucgaguccacccgcaucuaccagauccucgccaucuacuccaccgucgccuccucccucguccucgucgucucccucggcgccaucuccuucuggaugugcuccaacggcucccuccagugccgcaucugcaucuga

SEQ ID NO: 103404 - RNA, 1701 nt, Artificial Sequence; identical to SEQ ID NO: 98705
  derived and/or modified CDS sequence (opt2) from hemagglutinin__InfluenzaA__AEO01272

SEQ ID NO: 103405 - RNA, 1701 nt, Artificial Sequence; identical to SEQ ID NO: 98705
  derived and/or modified CDS sequence (opt2) from hemagglutinin__InfluenzaA__AEO01273

SEQ ID NO: 103406 - RNA, 1701 nt, Artificial Sequence; identical to SEQ ID NO: 98705
  derived and/or modified CDS sequence (opt2) from hemagglutinin__InfluenzaA__AEO01274

SEQ ID NO: 103407 - RNA, 1701 nt, Artificial Sequence; identical to SEQ ID NO: 100873
  derived and/or modified CDS sequence (opt2) from hemagglutinin__InfluenzaA__AEO01275

SEQ ID NO: 103408 - RNA, 1701 nt, Artificial Sequence
  derived and/or modified CDS sequence (opt2) from hemagglutinin__InfluenzaA__AEO01276
augaaggccauccucgucguccuccucuacaccuucgccaccgccaacgccgacacccucugcaucggcuaccacgccaacaacuccaccgacaccgucgacaccguccucaagaagaacgucaccgucacccacuccgucaaccuccucgaggacaagcacaacggcaagcucugcaagcuccgcggcgucgccccccuccaccucggcaagugcaacaucgccggcuggauccucggcaaccccgagugcgagucccucuccaccgccuccuccugguccuacaucgucgagaccuccuccuccgacaacggcaccugcuaccccggcgacuucaucgacuacgaggagcuccgcgagcagcucuccuccgucuccuccuucgagcgcuucgagaucuuccccaagaccuccuccuggcccaaccacgacuccaacaagggcgucaccgccgccugcccccacgccggcgccaaguccuucuacaagaaccucaucuggcucgucaagaagggcaacuccuaccccaagcucuccaaguccuacaucaacgacaagggcaaggagguccucguccucuggggcauccaccaccccuccaccuccgccgaccagcagucccucuaccagaacgccgacgccuacgucuucgucggcaccucccgcuacuccaagaaguucaagcccgagaucgccauccgccccaagguccgcgaccaggagggccgcaugaacuacuacuggacccucgucgagcccggcgacaagaucaccuucgaggccaccggcaaccucgucgucccccgcuacgccuucgccauggagcgcaacgccggcuccggcaucaucaucuccgacacccccguccacgacugcaacaccaccugccagacccccaagggcgccaucaacaccucccuccccuuccagaacauccaccccaucaccaucggcaagugccccaaguacgucaaguccaccaagcuccgccucgccaccggccuccgcaacguccccuccauccagucccgcggccucuucggcgccaucgccggcuucaucgagggcggcuggaccggcauggucgacggcugguacggcuaccaccaccagaacgagcagggcuccggcuacgccgccgaccucaaguccacccagaacgccaucgacgagaucaccaacaaggucaacuccgucaucgagaagaugaacacccaguucaccgccgucggcaaggaguucaaccaccucgagaagcgcaucgagaaccucaacaagaaggucgacgacggcuuccucgacaucuggaccuacaacgccgagcuccucguccuccucgagaacgagcgcacccucgacuaccacgacuccaacgucaagaaccucuacgagaagguccgcucccagcucaagaacaacgccgaggagaucggcaacggcugcuucgaguucuaccacaagugcgacaacaccugcauggaguccgucaagaacggcaccuacgacuaccccaaguacuccgaggaggccaagcucaaccgcgaggagaucgacggcgucaagcucgaguccacccgcaucuaccagauccucgccaucuacuccaccgucgccuccucccucguccucgucgucucccucggcgccaucuccuucuggaugugcuccaacggcucccuccagugccgcaucugcaucuga

SEQ ID NO: 103409 - RNA, 1701 nt, Artificial Sequence; identical to SEQ ID NO: 98705
  derived and/or modified CDS sequence (opt2) from hemagglutinin__InfluenzaA__AEO01277

SEQ ID NO: 103410 - RNA, 1701 nt, Artificial Sequence
  derived and/or modified CDS sequence (opt2) from hemagglutinin__InfluenzaA__AEO01278
augaaggccauccucgucguccuccucuacaccuucgccaccgccaacgccgacacccucugcaucggcuaccacgccaacaacuccaccgacaccgucgacaccguccucgagaagaacgucaccgucacccacuccgucaaccuccucgaggacaagcacaacggcaagcucugcaagcuccgcggcgucgccccccuccaccucggcaagugcgacaucgccggcuggauccucggcaaccccgagugcgagucccucuccaccgccuccuccugguccuacaucgucgagaccuccuccuccgacaacggcaccugcuaccccggcgacuucaucgacuacgaggagcuccgcgagcagcucuccuccgucuccuccuucgagcgcuucgagaucuuccccaagaccuccuccuggcccaaccacgacuccaacaagggcgucaccgccgccugcccccacgccggcgccaaguccuucuacaagaaccucaucuggcucgucaagaagggcaacuccuaccccaagcucuccaaguccuacaucaacgacaagggcaaggagguccucguccucuggggcauccaccaccccuccaccuccgccgaccagcagucccucuaccagaacgccgacgccuacgucuucgucggcaccucccgcuacuccaagaaguucaagcccgagaucgccauccgccccaagguccgcgaccaggagggccgcaugaacuacuacuggacccucgucgagcccggcgacaagaucaccuucgaggccaccggcaaccucgucgucccccgcuacgccuucgccauggagcgcaacgccggcuccggcaucaucaucuccgacacccccguccacgacugcaacaccaccugccagacccccaagggcgccaucaacaccucccuccccuuccagaacauccaccccaucaccaucggcaagugccccaaguacgucaaguccaccaagcuccgccucgccaccggccuccgcaacguccccuccauccagucccgcggccucuucggcgccaucgccggcuucaucgagggcggcuggaccggcauggucgacggcugguacggcuaccaccaccagaacgagcagggcuccggcuacgccgccgaccucaaguccacccagcacgccaucgacgagaucaccaacaaggucaacuccgucaucgagaagaugaacacccaguucaccgccgucggcaaggaguucaaccaccucgagaagcgcaucgccaaccucaacaagaaggucgacgacggcuuccucgacaucuggaccuacaacgccgagcuccucguccuccucgagaacgagcgcacccucgacuaccacgacuccaacgucaagaaccucuacgagaagguccgcucccagcucaagaacaacgccaaggagaucggcaacggcugcuucgaguucuaccacaagugcgacaacaccugcauggaguccgucaagaacggcaccuacgacuaccccaaguacuccgaggaggccaagcucaaccgcgaggagaucgacggcgucaagcucgaguccacccgcaucuaccagauccucgccaucuacuccaccgucgccuccucccucguccucgucgucucccucggcgccaucuccuucuggaugugcuccaacggcucccuccagugccgcaucugcaucuga

SEQ ID NO: 103411 - RNA, 1701 nt, Artificial Sequence
  derived and/or modified CDS sequence (opt2) from hemagglutinin__InfluenzaA__AEO01279
augaaggccauccucgucguccuccucuacaccuucgccaccgccaacgccgacacccucugcaucggcuaccacgccaacaacuccaccgacaccgucgacaccguccucgagaagaacgucaccgucacccacuccgucaaccuccucgaggacaagcacaacggcaagcucugcaagcuccgcggcgucgccccccuccaccucggcaagugcaacaucgccggcuggauccucggcaaccccgagugcgagucccucuccaccgccuccuccugguccuacaucgucgagaccuccuccuccgacaacggcaccugcuaccccggcgacuucaucgacuacgaggagcuccgcgagcagcucuccuccgucuccuccuucgagcgcuucgagaucuuccccaagaccuccuccuggcccaaccacgacuccaacaagggcgucaccgccgccugcccccacgccggcgccaaguccuucuacaagaaccucaucuggcucgucaagaagggcaacuccuaccccaagcucuccaaguccuacaucaacgacaagggcaaggagguccucguccucuggggcauccaccaccccuccaccuccgccgaccagcagucccucuaccagaacgccgacgccuacgucuucgucggcaccucccgcuacuccaagaaguucaagcccgagaucgccauccgccccaagguccgcgaccaggagggccgcaugaacuacuacuggacccucgucgagcccggcgacaagaucaccuucgaggccaccggcaaccucgucgucccccgcuacgccuucgccauggagcgcaccgccggcuccggcaucaucaucuccgacacccccguccacgacugcaacaccaccugccagacccccaagggcgccaucaacaccucccuccccuuccagaacauccaccccaucaccaucggcaagugccccaaguacgucaaguccaccaagcuccgccucgccaccggccuccgcaacguccccuccauccagucccgcggccucuucggcgccaucgccggcuucaucgagggcggcuggaccggcauggucgacggcugguacggcuaccaccaccagaacgagcagggcuccggcuacgccgccgaccucaaguccacccagaacgccaucgacaagaucaccaacaaggucaacuccgucaucgagaagaugaacacccaguucaccgccgucggcaaggaguucaaccaccucgagaagcgcaucgagaaccucaacaagaaggucgacgacggcuuccucgacaucuggaccuacaacgccgagcuccucguccuccucgagaacgagcgcacccucgacuaccacgacuccaacgucaagaaccucuacgagaagguccgcucccagcucaagaacaacgccaaggagaucggcaacggcugcuucgaguucuaccacaagugcgacaacaccugcauggaguccgucaagaacggcaccuacgacuaccccaaguacuccgaggaggccaagcucaaccgcgaggagaucgacggcgucaagcucgaguccacccgcaucuaccagauccucgccaucuacuccaccgucgccuccucccucguccucgucgucucccucggcgccaucuccuucuggaugugcuccaacggcucccuccagugccgcaucugcaucuga

SEQ ID NO: 103412 - RNA, 1701 nt, Artificial Sequence
  derived and/or modified CDS sequence (opt2) from hemagglutinin__InfluenzaA__AEO01282
augaaggccauccucgucguccuccucuacaccuucgccaccgccaacgccgacacccucugcaucggcuaccacgccaacaacuccaccgacaccgucgacaccguccucgagaagaacgucaccgucacccacuccgucaaccuccucgaggacaagcacaacggcaagcucugcaagcuccgcggcgucgccccccuccaccucggcaagugcaacaucgccggcuggauccucggcaaccccgagugcgagucccucuccaccgccuccuccugguccuacaucgucgagaccuccuccuccgacaacggcaccugcuaccccggcgacuucaucgacuacgaggagcuccgcgagcagcucuccuccgucuccuccuucgagcgcuucgagaucuuccccaagaccuccuccuggcccaaccacgacuccaacaagggcgucaccgccgccugcccccacgccggcgccaaguccuucuacaagaaccucaucuggcucgucaagaagggcaacuccuaccccaagcucuccaaguccuacaucaacgacaagggcaaggagguccucguccucuggggcauccaccaccccuccaccuccgccgaccagcagucccucuaccagaacgccgacgccuacgucuucgucggcaccucccgcuacuccaagaaguucaagcccgagaucgccauccgccccaagguccgcgaccaggagggccgcaugaacuacuacuggacccucgucgagcccggcgacaagaucaccuucgaggccaccggcaaccucgucgucccccgcuacgccuucgccauggagcgcaacgccggcuccggcaucaucaucuccgacacccccguccacgacugcaacaccaccugccagacccccaagggcgccaucaacaccucccuccccuuccagaacauccaccccaucaccaucggcaagugccccaaguacgucaaguccaccaagcuccgccucgccaccggccuccgcaacguccccuccauccagucccgcggccucuucggcgccaucgccggcuucaucgagggcggcuggaccggcauggucgacggcugguacggcuaccaccaccagaacgagcagggcuccggcuacgccgccgaccucaaguccacccagaacgccaucgacgagaucaccaacaaggucaacuccgucaucgagaagaugaacacccaguucaccgccgucggcaaggaguucaaccaccucgagaagcgcaucgagaaccucaacaagaaggucgacgacggcuuccucgacaucuggaccuacaacgccgagcuccucguccuccucgagaacgagcgcacccucgacuaccacgacuccaacgucaagaagcucuacgagaagguccgcucccagcucaagaacaacgccaaggagaucggcaacggcugcuucgaguucuaccacaagugcaacaacaccugcauggaguccgucaagaacggcaccuacgacuaccccaaguacuccgaggaggccaagcucaaccgcgaggagaucgacggcgucaagcucgaguccacccgcaucuaccagauccucgccaucuacuccaccgucgccuccucccucguccucgucgucucccucggcgccaucuccuucuggaugugcuccaacggcucccuccagugccgcaucugcaucuga

SEQ ID NO: 103413 - RNA, 1701 nt, Artificial Sequence; identical to SEQ ID NO: 99807
  derived and/or modified CDS sequence (opt2) from hemagglutinin__InfluenzaA__AEO01283

SEQ ID NO: 103414 - RNA, 1701 nt, Artificial Sequence
  derived and/or modified CDS sequence (opt2) from hemagglutinin__InfluenzaA__AEO01284
augaaggccauccucgucguccuccucuacaccuucgccaucgccaacgccgacacccucugcaucggcuaccacgccaacaacuccaccgacaccgucgacaccguccucgagaagaacgucaccgucacccacuccgucaaccuccucgaggacaagcacaacggcaagcucugcaagcuccgcggcgucgccccccuccaccucggcaagugcaacaucgccggcuggauccucggcaaccccgagugcgagucccucuccaccgccuccuccugguccuacaucgucgagaccuccuccuccgacaacggcaccugcuaccccggcgacuucaucgacuacgaggagcuccgcgagcagcucuccuccgucuccuccuucgagcgcuucgagaucuuccccaagaccuccuccuggcccaaccacgacuccaacaagggcgucaccgccgccugcccccacgccggcgccaaguccuucuacaagaaccucaucuggcucgucaagaagggcaacuccuaccccaagcucuccaaguccuacaucaacgacaagggcaaggagguccucguccucuggggcauccaccaccccuccaccuccgccgaccagcagucccucuaccagaacgccgacgccuacgucuucgucggcaccucccgcuacuccaagaaguucaagcccgagaucgccauccgccccaagguccgcgaccaggagggccgcaugaacuacuacuggacccucgucgagcccggcgacaagaucaccuucgaggccaccggcaaccucgucgucccccgcuacgccuucgccauggagcgcaacgccggcuccggcaucaucaucuccgacacccccguccacgacugcaacaccaccugccagacccccaagggcgccaucaacaccucccuccccuuccagaacauccaccccaucaccaucggcaagugccccaaguacgucaaguccaccaagcuccgccucgccaccggccuccgcaacguccccuccauccagucccgcggccucuucggcgccaucgccggcuucaucgagggcggcuggaccggcauggucgacggcugguacggcuaccaccaccagaacgagcagggcuccggcuacgccgccgaccucaaguccacccagcacgccaucgacgagaucaccaacaaggucaacuccgucaucgagaagaugaacacccaguucaccgccgucggcaaggaguucaaccaccucgagaagcgcaucgagaaccucaacaagaaggucgacgacggcuuccucgacaucuggaccuacaacgccgagcuccucguccuccucgagaacgagcgcacccucgacuaccacgacuccaacgucaagaaccucuacgagaagguccgcucccagcucaagaacaacgccaaggagaucggcaacggcugcuucgaguucuaccacaagugcgacaacaccugcauggaguccgucaagaacggcaccuacgacuaccccaaguacuccgaggaggccaagcucaaccgcgaggagaucaacggcgucaagcucgaguccacccgcaucuaccagauccucgccaucuacuccaccgucgccuccucccucguccucgucgucucccucggcgccaucuccuucuggaugugcuccaacggcucccuccagugccgcaucugcaucuga

SEQ ID NO: 103415 - RNA, 1701 nt, Artificial Sequence; identical to SEQ ID NO: 99806
  derived and/or modified CDS sequence (opt2) from hemagglutinin__InfluenzaA__AEO01285

SEQ ID NO: 103416 - RNA, 1701 nt, Artificial Sequence; identical to SEQ ID NO: 99899
  derived and/or modified CDS sequence (opt2) from hemagglutinin__InfluenzaA__AEO01286

SEQ ID NO: 103417 - RNA, 1701 nt, Artificial Sequence
  derived and/or modified CDS sequence (opt2) from hemagglutinin__InfluenzaA__AEO01287
augaaggccauccucgucguccuccucuacaccuucgccaccgccaacuccgacacccucugcaucggcuaccacgccaacaacuccaccgacaccgucgacaccguccucgagaagaacgucaccgucacccacuccgucaaccuccucgaggacaagcacaacggcaagcucugcaagcuccgcggcgucgccccccuccaccucggcaagugcaacaucgccggcuggauccucggcaaccccgagugcgagucccucuccaccgccuccuccugguccuacaucgucgagaccuccuccuccgacaacggcaccugcuaccccggcgacuucaucgacuacgaggagcuccgcgagcagcucuccuccgucuccuccuucgagcgcuucgagaucuuccccaagaccuccuccuggcccaaccacgacuccaacaagggcgucaccgccgccugcccccacgccggcgccaaguccuucuacaagaaccucaucuggcucgucaagaagggcaacuccuaccccaagcucuccaaguccuacaucaacgacaagggcaaggagguccucguccucuggggcauccaccaccccuccaccuccgccgaccagcagucccucuaccagaacgccgacgccuacgucuucgucggcaccucccgcuacuccaagaaguucaagcccgagaucgccauccgccccaagguccgcgaccaggagggccgcaugaacuacuacuggacccucgucgagcccggcgacaagaucaccuucgaggccaccggcaaccucgucgucccccgcuacgccuucgccauggagcgcaacgccggcuccggcaucaucaucuccgacacccccguccacgacugcaacaccaccugccagacccccaagggcgccaucaacaccucccuccccuuccagaacauccaccccaucaccaucggcaagugccccaaguacgucaaguccaccaagcuccgccucgccaccggccuccgcaacguccccuccauccagucccgcggccucuucggcgccaucgccggcuucaucgagggcggcuggaccggcauggucgacggcugguacggcuaccaccaccagaacgagcagggcuccggcuacgccgccgaccucaaguccacccagaacgccaucgacgagaucaccaacaaggucaacuccgucaucgagaagaugaacacccaguucaccgccgucggcaaggaguucaaccaccucgagaagcgcaucgagaaccucaacaagaaggucgacgacggcuuccucgacaucuggaccuacaacgccgagcuccucguccuccucgagaacgagcgcacccucgacuaccacgacuccaacgucaagaaccucuacgagaagguccgcucccagcucaagaacaacgccaaggagaucggcaacggcugcuucgaguucuaccacaagugcgacaacaccugcauggaguccgucaagaacggcaccuacgacuaccccaaguacuccgaggaggccaagcucaaccgcgaggagaucgacggcgucaagcucgaguccacccgcaucuaccagauccucgccaucuacuccaccgucgccuccucccucguccucgucgucucccucggcgccaucuccuucuggaugugcuccaacggcucccuccagugccgcaucugcaucuga

SEQ ID NO: 103418 - RNA, 1701 nt, Artificial Sequence; identical to SEQ ID NO: 99058
  derived and/or modified CDS sequence (opt2) from hemagglutinin__InfluenzaA__AEO01288

SEQ ID NO: 103419 - RNA, 1701 nt, Artificial Sequence; identical to SEQ ID NO: 98705
  derived and/or modified CDS sequence (opt2) from hemagglutinin__InfluenzaA__AEO01289

SEQ ID NO: 103420 - RNA, 1701 nt, Artificial Sequence
  derived and/or modified CDS sequence (opt2) from hemagglutinin__InfluenzaA__AEO01290
augaaggccauccucgucguccuccucuacaccuucgccaccgccaacgccgacacccucugcaucggcuaccacgccaacaacuccaccgacaccgucgacaccguccucgagaagaacgucaccgucacccacuccgucaaccuccucgaggacaagcacaacggcaagcucugcaagcuccgcggcgucgccccccuccaccucggcaagugcaacaucgccggcuggauccucggcaaccccgagugcgagucccucuccaccgccuccuccugguccuacaucgucgagaccuccuccuccgacaacggcaccugcuaccccggcgacuucaucgacuacgaggagcuccgcgagcagcucuccuccgucuccuccuucgagcgcuucgagaucuuccccaagaccuccuccuggcccaaccacgacuccaacaagggcgucaccgccgccugcccccacgccggcgccaaguccuucuacaagaaccucaucuggcucgucaagaagggcaacuccuaccccaagcucuccaaguccuacaucaacgacaagggcaaggagguccucguccucuggggcauccaccaccccuccaccuccgccgaccagcagucccucuaccagaacgccgacgccuacgucuucgucggcaccucccgcuacuccaagaaguucaagcccgagaucgccauccgccccaagguccgcgaccaggagggccgcaugaacuacuacuggacccucgucgagcccggcgacaagaucaccuucgaggccaccggcaaccucgucgucccccgcuacgccuucgccauggagcgcaacgccggcuccggcaucaucaucuccgacacccccguccacgacugcaacaccaccugccagacccccaagggcgccaucaacaccucccucuccuuccagaacauccaccccaucaccaucggcaagugccccaaguacgucaaguccaccaagcuccgccucgccaccggccuccgcaacguccccuccauccagucccgcggccucuucggcgccaucgccggcuucaucgagggcggcuggaccggcauggucgacggcugguacggcuaccaccaccagaacgagcagggcuccggcuacgccgccgaccucaaguccacccagaacgccaucgacgagaucaccaacaaggucaacuccgucaucgagaagaugaacacccaguucaccgccgucggcaaggaguucaaccaccucgagaagcgcaucgagaaccucaacaagaaggucgacgacggcuuccucgacaucuggaccuacaacgccgagcuccucguccuccucgagaacgagcgcacccucgacuaccacgacuccaacgucaagaaccucuacgagaagguccgcucccagcucaagaacaacgccaaggagaucggcaacggcugcuucgaguucuaccacaagugcgacaacaccugcauggaguccgucaagaacggcaccuacgacuaccccaaguacuccgaggaggccaagcucaaccgcgaggagaucgacggcgucaagcucgaguccacccgcaucuaccagauccucgccaucuacuccaccgucgccuccucccucguccucgucgucucccucggcgccaucuccuucuggaugugcuccaacggcucccuccagugccgcaucugcaucuga

SEQ ID NO: 103421 - RNA, 1701 nt, Artificial Sequence; identical to SEQ ID NO: 98705
  derived and/or modified CDS sequence (opt2) from hemagglutinin__InfluenzaA__AEO01291

SEQ ID NO: 103422 - RNA, 1701 nt, Artificial Sequence; identical to SEQ ID NO: 98705
  derived and/or modified CDS sequence (opt2) from hemagglutinin__InfluenzaA__AEO01292

SEQ ID NO: 103423 - RNA, 1701 nt, Artificial Sequence
  derived and/or modified CDS sequence (opt2) from hemagglutinin__InfluenzaA__AEO01294
augaaggccauccucgucguccuccucuacaccuucgccaccgccaacgccgacacccucugcaucggcuaccacgccaacaacuccaccgacaccgucgacaccguccucgagaagaacgucaccgucacccacuccgucaaccuccucgaggacaagcacaacggcaagcucugcaagcuccgcggcgucgccccccuccaccucggcaagugcgacaucgccggcuggauccucggcaaccccgagugcgagucccucuccaccgccuccuccugguccuacaucgucgagaccuccuccuccgacaacggcaccugcuaccccggcgacuucaucgacuacgaggagcuccgcgagcagcucuccuccgucuccuccuucgagcgcuucgagaucuuccccaagaccuccuccuggcccaaccacgacuccaacaagggcgucaccgccgccugcccccacgccggcgccaaguccuucuacaagaaccucaucuggcucgucaagaagggcaacuccuaccccaagcucuccaaguccuacaucaacgacaagggcaaggagguccucguccucuggggcauccaccaccccuccaccuccgccgaccagcagucccucuaccagaacgccgacgccuacgucuucgucggcaccucccgcuacuccaagaaguucaagcccgagaucgccauccgccccaagguccgcgaccaggagggccgcaugaacuacuacuggacccucgucgagcccggcgacaagaucaccuucgaggccaccggcaaccucgucgucccccgcuacgccuucgccauggagcgcaacgccggcuccggcaucaucaucuccgacacccccguccacgacugcaacaccaccugccagacccccaagggcgccaucaacaccucccuccccuuccagaacauccaccccaucaccaucggcaagugccccaaguacgucaaguccaccaagcuccgccucgccaccggccuccgcaacguccccuccauccagucccgcggccucuucggcgccaucgccggcuucaucgagggcggcuggaccggcauggucgacggcugguacggcuaccaccaccagaacgagcagggcuccggcuacgccgccgaccucaaguccacccagcacgccaucgacgagaucaccaacaaggucaacuccgucaucgagaagaugaacacccaguucaccgccgucggcaaggaguucaaccaccucgagaagcgcaucgagaaccucaacaagaaggucgacgacggcuuccucgacaucuggaccuacaacgccgagcuccucguccuccucgagaacgagcgcacccucgacuaccacgacuccaacgucaagaaccucuacgagaagguccgcucccagcucaagaacaacgccaaggagaucggcaacggcugcuucgaguucuaccacaagugcgacaacaccugcauggaguccgucaagaacggcaccuacgacuaccccaaguacuccgaggaggccaagcucaaccgcgaggagaucgacggcgucaagcucgaguccacccgcaucuaccagauccucgccaucuacuccaccgucgccuccucccucguccucgucgucucccucggcgccaucuccuucuggaugugcuccaacggcucccuccagugccgcaucugcaucuga

SEQ ID NO: 103424 - RNA, 1701 nt, Artificial Sequence
  derived and/or modified CDS sequence (opt2) from hemagglutinin__InfluenzaA__AEO01295
augaaggccauccucgucguccuccucuacaccuucgccaccgccaacgccgacacccucugcaucggcuaccacgccaacaacuccaccgacaccgucgacaccguccucgagaagaacgucaccgucacccacuccgucaaccuccucgaggacaagcacaacggcaagcucugcaagcuccgcggcgucgccccccuccaccucggcaagugcaacaucgccggcuggauccucggcaaccccgagugcgagucccucuccaccgccuccuccugguccuacaucgucgagaccuccaacuccgacaacggcaccugcuaccccggcgacuucaucgacuacgaggagcuccgcgagcagcucuccuccgucuccuccuucgagcgcuucgagaucuuccccaagaccuccuccuggcccaaccacgacuccaacaagggcgucaccgccgccugcccccacgccggcgccaaguccuucuacaagaaccucaucuggcucgucaagaagggcaacuccuaccccaagcucuccaaguccuacaucaacgacaagggcaaggagguccucguccucuggggcauccaccaccccuccaccuccgccgaccagcagucccucuaccagaacgccgacgccuacgucuucgucggcaccucccgcuacuccaagaaguucaagcccgagaucgccauccgccccaagguccgcgaccaggagggccgcaugaacuacuacuggacccucgucgagcccggcgacaagaucaccuucgaggccaccggcaaccucgucgucccccgcuacgccuucgccauggagcgcaacgccggcuccggcaucaucaucuccgacacccccguccacuacugcaacaccaccugccagacccccaagggcgccaucaacaccucccuccccuuccagaacauccaccccaucaccaucggcaagugccccaaguacgucaaguccaccaagcuccgccucgccaccggccuccgcaacguccccuccauccagucccgcggccucuucggcgccaucgccggcuucaucgagggcggcuggaccggcauggucgacggcugguacggcuaccaccaccagaacgagcagggcuccggcuacgccgccgaccucaaguccacccagaacgccaucgacaagaucaccaacaaggucaacuccgucaucgagaagaugaacacccaguucaccgccgucggcaaggaguucaaccaccucgagaagcgcaucgagaaccucaacaagaaggucgacgacggcuuccucgacaucuggaccuacaacgccgagcuccucguccuccucgagaacgagcgcacccucgacuaccacgacuccaacgucaagaaccucuacgagaagguccgcucccagcucaagaacaacgccaaggagaucggcaacggcugcuucgaguucuaccacaagugcgacaacaccugcauggaguccgucaagaacggcaccuacgacuaccccaaguacuccgaggaggccaagcucaaccgcgaggagaucgacggcgucaagcucgaguccacccgcaucuaccagauccucgccaucuacuccaccgucgccuccucccucguccucgucgucucccucggcgccaucuccuucuggaugugcuccaacggcucccuccagugccgcaucugcaucuga

SEQ ID NO: 103425 - RNA, 1701 nt, Artificial Sequence; identical to SEQ ID NO: 98705
  derived and/or modified CDS sequence (opt2) from hemagglutinin__InfluenzaA__AEO01296

SEQ ID NO: 103426 - RNA, 1701 nt, Artificial Sequence; identical to SEQ ID NO: 100387
  derived and/or modified CDS sequence (opt2) from hemagglutinin__InfluenzaA__AEO01297

SEQ ID NO: 103427 - RNA, 1701 nt, Artificial Sequence; identical to SEQ ID NO: 100392
  derived and/or modified CDS sequence (opt2) from hemagglutinin__InfluenzaA__AEO01298

SEQ ID NO: 103428 - RNA, 1701 nt, Artificial Sequence; identical to SEQ ID NO: 98705
  derived and/or modified CDS sequence (opt2) from hemagglutinin__InfluenzaA__AEO01299

SEQ ID NO: 103429 - RNA, 1701 nt, Artificial Sequence; identical to SEQ ID NO: 98705
  derived and/or modified CDS sequence (opt2) from hemagglutinin__InfluenzaA__AEO01300

SEQ ID NO: 103430 - RNA, 1701 nt, Artificial Sequence; identical to SEQ ID NO: 98705
  derived and/or modified CDS sequence (opt2) from hemagglutinin__InfluenzaA__AEO01301

SEQ ID NO: 103431 - RNA, 1701 nt, Artificial Sequence; identical to SEQ ID NO: 98705
  derived and/or modified CDS sequence (opt2) from hemagglutinin__InfluenzaA__AEO01302

SEQ ID NO: 103432 - RNA, 1701 nt, Artificial Sequence; identical to SEQ ID NO: 100302
  derived and/or modified CDS sequence (opt2) from hemagglutinin__InfluenzaA__AEO01303

SEQ ID NO: 103433 - RNA, 1701 nt, Artificial Sequence
  derived and/or modified CDS sequence (opt2) from hemagglutinin__InfluenzaA__AEO01304
augaaggccauccucgucguccuccucuacaccuucgccaccgccaacgccgacacccucugcaucggcuaccacgccaacaacuccaccgacaccgucgacaccguccucgagaagaacgucaccgucacccacuccgucaaccuccucgaggacaagcacaacggcaagcucugcaagcuccgcggcgucgccccccuccaccucggcaagugcaacaucgccggcuggauccucggcaaccccgagugcgagucccucuccaccgccuccuccugguccuacaucgucgagaccuccuccuccgacaacggcaccugcuaccccggcgacuucaucgacuacgaggagcuccgcgagcagcucuccuccgucuccuccuucgagcgcuucgagaucuuccccaaggccuccuccuggcccaaccacgacuccaacaagggcgucaccgccgccugcccccacgccggcgccaaguccuucuacaagaaccucaucuggcucgucaagaagggcaacuccuaccccaagcucuccaaguccuacaucaacgacaagggcaagggcguccucguccucuggggcauccaccaccccuccaccuccgccgaccagcagucccucuaccagaacgccgacgccuacgucuucgucggcaccucccgcuacuccaagaaguucaagcccgagaucgccauccgccccaagguccgcgaccaggagggccgcaugaacuacuacuggacccucgucgagcccggcgacaagaucaccuucgaggccaccggcaaccucgucgucccccgcuacgccuucgccauggagcgcaacgccggcuccggcaucaucaucuccgacacccccguccacgacugcaacaccaccugccagacccccaagggcgccaucaacaccucccuccccuuccagaacauccaccccaucaccaucggcaagugccccaaguacgucaaguccaccaagcuccgccucgccaccggccuccgcaacguccccuccauccagucccgcggccucuucggcgccaucgccggcuucaucgagggcggcuggaccggcauggucgacggcugguacggcuaccaccaccagaacgagcagggcuccggcuacgccgccgaccucaaguccacccagaacgccaucgacgagaucaccaacaaggucaacuccgucaucgagaagaugaacacccaguucaccgccgucggcaaggaguucaaccaccucgagaagcgcaucgagaaccucaacaagaaggucgacgacggcuuccucgacaucuggaccuacaacgccgagcuccucguccuccucgagaacgagcgcacccucgacuaccacgacuccaacgucaagaaccucuacgagaagguccgcucccagcucaagaacaacgccaaggagaucggcaacggcugcuucgaguucuaccacaagugcgacaacaccugcauggaguccgucaagaacggcaccuacgacuaccccaaguacuccgaggaggccaagcucaaccgcgaggagaucgacggcgucaagcucgaguccacccgcaucuaccagauccucgccaucuacuccaccgucgccuccucccucguccucgucgucucccucggcgccaucuccuucuggaugugcuccaacggcucccuccagugccgcaucugcaucuga

SEQ ID NO: 103434 - RNA, 1701 nt, Artificial Sequence
  derived and/or modified CDS sequence (opt2) from hemagglutinin__InfluenzaA__AEO01305
augaaggccauccucgucguccuccucuacaccuucgccaccgccuccgccgacacccucugcaucggcuaccacgccaacaacuccaccgacaccgucgacaccguccucgagaagaacgucaccgucacccacuccgucaaccuccucgaggacaagcacaacggcaagcucugcaagcuccgcggcgucgccccccuccaccucggcaagugcaacaucgccggcuggauccucggcaaccccgagugcgagucccucuccaccgccuccuccugguccuacaucgucgagaccuccuccuccgacaacggcaccugcuaccccggcgacuucaucgacuacgaggagcuccgcgagcagcucuccuccgucuccuccuucgagcgcuucgagaucuuccccaagaccuccuccuggcccaaccacgacuccaacaagggcgucaccgccgccugcccccacgccggcgccaaguccuucuacaagaaccucaucuggcucgucaagaagggcaacuccuaccccaagcucuccaaguccuacaucaacgacaagggcaaggagguccucguccucuggggcauccaccaccccuccaccuccgccgaccagcagucccucuaccagaacgccgacgccuacgucuucgucggcaccucccgcuacuccaagaaguucaagcccgagaucgccauccgccccaagguccgcgaccaggagggccgcaugaacuacuacuggacccucgucgagcccggcgacaagaucaccuucgaggccaccggcaaccucgucgucccccgcuacgccuucgccauggagcgcaacgccggcuccggcaucaucaucuccgacacccccguccacgacugcaacaccaccugccagacccccaagggcgccaucaacaccucccuccccuuccagaacauccaccccaucaccaucggcaagugccccaaguacgucaaguccaccaagcuccgccucgccaccggccuccgcaacguccccuccauccagucccgcggccucuucggcgccaucgccggcuucaucgagggcggcuggaccggcauggucgacggcugguacggcuaccaccaccagaacgagcagggcuccggcuacgccgccgaccucaaguccacccagaacgccaucgacgagaucaccaacaaggucaacuccgucaucgagaagaugaacacccaguucaccgccgucggcaaggaguucaaccaccucgagaagcgcaucgagaaccucaacaagaaggucgacgacggcuuccucgacaucuggaccuacaacgccgagcuccucguccuccucgagaacgagcgcacccucgacuaccacgacuccaacgucaagaaccucuacgagaagguccgcucccagcucaagaacaacgccaaggagaucggcaacggcugcuucgaguucuaccacaagugcgacaacaccugcauggaguccgucaagaacggcaccuacgacuaccccaaguacuccgaggaggccaagcucaaccgcgaggagaucgacggcgucaagcucgaguccacccgcaucuaccagauccucgccaucuacuccaccgucgccuccucccucguccucgucgucucccucggcgccaucuccuucuggaugugcuccaacggcucccuccagugccgcaucugcaucuga

SEQ ID NO: 103435 - RNA, 1701 nt, Artificial Sequence; identical to SEQ ID NO: 98705
  derived and/or modified CDS sequence (opt2) from hemagglutinin__InfluenzaA__AEO01306

SEQ ID NO: 103436 - RNA, 1701 nt, Artificial Sequence; identical to SEQ ID NO: 98705
  derived and/or modified CDS sequence (opt2) from hemagglutinin__InfluenzaA__AEO01307

SEQ ID NO: 103437 - RNA, 1701 nt, Artificial Sequence; identical to SEQ ID NO: 98705
  derived and/or modified CDS sequence (opt2) from hemagglutinin__InfluenzaA__AEO01308

SEQ ID NO: 103438 - RNA, 1701 nt, Artificial Sequence
  derived and/or modified CDS sequence (opt2) from hemagglutinin__InfluenzaA__AEO01309
augaaggccauccucgucguccuccucuacaccuucgccaucgccaacgccgacacccucugcaucggcuaccacgccaacaacuccaccgacaccgucgacaccguccucgagaagaacgucaccgucacccacuccgucaaccuccucgaggacaagcacaacggcaagcucugcaagcuccgcggcgucgccccccuccaccucggcaagugcaacaucgccggcuggauccucggcaaccccgagugcgagucccucuccaccgccuccuccugguccuacaucgucgagaccuccuccuccgacaacggcaccugcuaccccggcgacuucaucgacuacgaggagcuccgcgagcagcucuccuccgucuccuccuucgagcgcuucgagaucuuccccaagaccuccuccuggcccaaccacgacuccaacaagggcgucaccgccgccugcccccacgccggcgccaaguccuucuacaagaaccucaucuggcucgucaagaagggcaacuccuaccccaagcucuccaaguccuacaucaacgacaagggcaaggagguccucguccucuggggcauccaccaccccuccaccuccgccgaccagcagucccucuaccagaacgccgacgccuacgucuucgucggcaccucccgcuacuccaagaaguucaagcccgagaucgccauccgccccaagguccgcgaccaggagggccgcaugaacuacuacuggacccucgucgagcccggcgacaagaucaccuucgaggccaccggcaaccucgucgucccccgcuacgccuucgccauggagcgcaacgccggcuccggcaucaucaucuccgacacccccguccacgacugcaacaccaccugccagacccccaagggcgccaucaacaccucccuccccuuccagaacauccaccccaucaccaucggcaagugccccaaguacgucaaguccaccaagcuccgccucgccaccggccuccgcaacguccccuccauccagucccgcggccucuucggcgccaucgccggcuucaucgagggcggcuggaccggcauggucgacggcugguacggcuaccaccaccagaacgagcagggcuccggcuacgccgccgaccucaaguccacccagcacgccaucgacgagaucaccaacaaggucaacuccgucaucgagaagaugaacacccaguucaccgccgucggcaaggaguucaaccaccucgagaagcgcaucgagaaccucaacaagaaggucgacgacggcuuccucgacaucuggaccuacaacgccgagcuccucguccuccucgagaacgagcgcacccucgacuaccacgacuccaacgucaagaaccucuacgagaagguccgcucccagcucaagaacaacgccaaggagaucggcaacggcugcuucgaguucuaccacaagugcgacaacaccugcauggaguccgucaagaacggcaccuacgacuaccccaaguacuccaaggaggccaagcucaaccgcgaggagaucaacggcgucaagcucgaguccacccgcaucuaccagauccucgccaucuacuccaccgucgccuccucccucguccucgucgucucccucggcgccaucuccuucuggaugugcuccaacggcucccuccagugccgcaucugcaucuga

SEQ ID NO: 103439 - RNA, 1701 nt, Artificial Sequence
  derived and/or modified CDS sequence (opt2) from hemagglutinin__InfluenzaA__AEO01310
augaaggccauccucgucguccuccucuacaccuucgccaccgccaacgccgacacccucugcaucggcuaccacgccaacaacuccaccgacaccgucgacaccguccucgagaagaacgucaccgucacccacuccgucaaccuccucgaggacaagcacaacggcaagcucugcaagcuccgcggcgucgccccccuccaccucggcaagugcaacaucgccggcuggauccucggcaaccccgagugcgagucccucuccaccgccuccuccugguccuacaucgucgagaccuccuccuccgacaacggcaccugcuaccccggcgacuucaucgacuacgaggagcuccgcgagcagcucuccuccgucuccuccuucgagcgcuucgagaucuuccccaagaccuccuccuggcccaaccacgacuccaacaagggcgucaccgccgccugcccccacgccggcgccaaguccuucuacaagaaccucaucuggcucgucaagaagggcaacuccuaccccaagcucuccaaguccuacaucaacgaccgcggcaaggagguccucguccucuggggcauccaccaccccuccaccuccgccgaccagcagucccucuaccagaacgccgacgccuacgucuucgucggcaccucccgcuacuccaagaaguucaagcccgagaucgccauccgccccaagguccgcgaccaggagggccgcaugaacuacuacuggacccucgucgagcccggcgacaagaucaccuucgaggccaccggcaaccucgucgucccccgcuacgccuucgccauggagcgcaacgccggcuccggcaucaucaucuccgacacccccguccacgacugcaacaccaccugccagacccccaagggcgccaucaacaccucccuccccuuccagaacauccaccccaucaccaucggcaagugccccaaguacgucaaguccaccaagcuccgccucgccaccggccuccgcaacguccccuccauccagucccgcggccucuucggcgccaucgccggcuucaucgagggcggcuggaccggcauggucgacggcugguacggcuaccaccaccagaacgagcagggcuccggcuacgccgccgaccucaaguccacccagaacgccaucgacgagaucaccaacaaggucaacuccgucaucgagaagaugaacacccaguucaccgccgucggcaaggaguucaaccaccucgagaagcgcaucgagaaccucaacaagaaggucgacgacggcuuccucgacaucuggaccuacaacgccgagcuccucguccuccucgagaacgagcgcacccucgacuaccacgacuccaacgucaagaaccucuacgagaagguccgcucccagcucaagaacaacgccaaggagaucggcaacggcugcuucgaguucuaccacaagugcgacaacaccugcauggaguccgucaagaacggcaccuacgacuaccccaaguacuccgaggaggccaagcucaaccgcgaggagaucgacggcgucaagcucgaguccacccgcaucuaccagauccucgccaucuacuccaccgucgccuccucccucguccucgucgucucccucggcgccaucuccuucuggaugugcuccaacggcucccuccagugccgcaucugcaucuga

SEQ ID NO: 103440 - RNA, 1701 nt, Artificial Sequence; identical to SEQ ID NO: 98705
  derived and/or modified CDS sequence (opt2) from hemagglutinin__InfluenzaA__AEO01311

SEQ ID NO: 103441 - RNA, 1701 nt, Artificial Sequence
  derived and/or modified CDS sequence (opt2) from hemagglutinin__InfluenzaA__AEO01312
augaaggccauccucgucguccuccucuacaccuucgccaccgccaacgccgacacccucugcaucggcuaccacgccaacaacuccaccgacaccgucgacaccguccucgagaagaacgucaccgucacccacuccgucaaccuccucgaggacaagcacaacggcaagcucugcaagcuccgcggcgucgccccccuccaccucggcaagugcaacaucgccggcuggauccucggcaaccccgagugcgagucccucuccaccgccuccuccugguccuacaucgucgagaccuccuccuccgacaacggcaccugcuaccccggcgacuucaucgacuacgaggagcuccgcgagcagcucuccuccgucuccuccuucgagcgcuucgagaucuuccccaagaccuccuccuggcccaaccacgacuccaacaagggcgucaccgccgccugcccccacgccggcgccaaguccuucuacaagaaccucaucuggcucgucaagaagggcaacuccuaccccaagcucuccaaguccuacaucaacgacaagggcaaggagguccucguccucuggggcauccaccaccccuccaccuccgccgaccagcagucccucuaccagaacgccgacgccuacgucuucgucggcaccucccgcuacuccaagaaguucaagcccgagaucgccauccgccccaagguccgcgaccaggagggccgcaugaacuacuacuggacccucgucgagcccggcgacaagaucaccuucgaggccaccggcaaccucgucgucccccgcuacgccuucgccauggagcgcaacgccggcuccggcaucaucaucuccgacacccccguccacgacugcaacaccaccugccagacccccaagggcgccaucaacaccucccuccccuuccagaacauccaccccaucaccaucggcaagugccccaaguacgucaaguccaccaagcuccgccucgccaccggccuccgcaacguccccuccauccagucccgcggccucuucggcgccaucgccggcuucaucgagggcggcuggaccggcaucgucgacggcugguacggcuaccaccaccagaacgagcagggcuccggcuacgccgccgaccucaaguccacccagaacgccaucgacgagaucaccaacaaggucaacuccgucaucgagaagaugaacacccaguucaccgccgucggcaaggaguucaaccaccucgagaagcgcaucgagaaccucaacaagaaggucgacgacggcuuccucgacaucuggaccuacaacgccgagcuccucguccuccucgagaacgagcgcacccucgacuaccacgacuccaacgucaagaaccucuacgagaagguccgcucccagcucaagaacaacgccaaggagaucggcaacggcugcuucgaguucuaccacaagugcgacaacaccugcauggaguccgucaagaacggcaccuacgacuaccccaaguacuccgaggaggccaagcucaaccgcgaggagaucgacggcgucaagcucgaguccacccgcaucuaccagauccucgccaucuacuccaccgucgccuccucccucguccucgucgucucccucggcgccaucuccuucuggaugugcuccaacggcucccuccagugccgcaucugcaucuga

SEQ ID NO: 103442 - RNA, 1701 nt, Artificial Sequence; identical to SEQ ID NO: 99058
  derived and/or modified CDS sequence (opt2) from hemagglutinin__InfluenzaA__AEO01313

SEQ ID NO: 103443 - RNA, 1701 nt, Artificial Sequence; identical to SEQ ID NO: 99869
  derived and/or modified CDS sequence (opt2) from hemagglutinin__InfluenzaA__AEO01314

SEQ ID NO: 103444 - RNA, 1701 nt, Artificial Sequence
  derived and/or modified CDS sequence (opt2) from hemagglutinin__InfluenzaA__AEO01315
augaaggccauccucgucguccuccucuacaccuucgccaccgccaacgccgacacccucugcaucggcuaccacgccaacaacuccaccgacaccgucgacaccguccucgagaagaacgucaccgucacccacuccgucaaccuccucgaggacaagcacaaccgcaagcucugcaagcuccgcggcgucgccccccuccaccucggcaagugcaacaucgccggcuggauccucggcaaccccgagugcgagucccucuccaccgccuccuccugguccuacaucgucgagaccuccuccuccgacaacggcaccugcuaccccggcgacuucaucgacuacgaggagcuccgcgagcagcucuccuccgucuccuccuucgagcgcuucgagaucuuccccaagaccuccuccuggcccaaccacgacuccaacaagggcgucaccgccgccugcccccacgccggcgccaaguccuucuacaagaaccucaucuggcucgucaagaagggcaacuccuaccccaagcucuccaaguccuacaucaacgacaagggcaaggagguccucguccucuggggcauccaccaccccuccaccuccgccgaccagcagucccucuaccagaacgccgacgccuacgucuucgucggcaccucccgcuacuccaagaaguucaagcccgagaucgccauccgccccaagguccgcgaccaggagggccgcaugaacuacuacuggacccucgucgagcccggcgacaagaucaccuucgaggccaccggcaaccucgucgucccccgcuacgccuucgccauggagcgcaacgccggcuccggcaucaucaucuccgacacccccguccacgacugcaacaccaccugccagacccccaagggcgccaucaacaccucccuccccuuccagaacauccaccccaucaccaucggcaagugccccaaguacgucaaguccaccaagcuccgccucgccaccggccuccgcaacguccccuccauccagucccgcggccucuucggcgccaucgccggcuucaucgagggcggcuggaccggcauggucgacggcugguacggcuaccaccaccagaacgagcagggcuccggcuacgccgccgaccucaaguccacccagaacgccaucgacgagaucaccaacaaggucaacuccgucaucgagaagaugaacacccaguucaccgccgucggcaaggaguucaaccaccucgagaagcgcaucgagaaccucaacaagaaggucgacgacggcuuccucgacaucuggaccuacaacgccgagcuccucguccuccucgagaacgagcgcacccucgacuaccacgacuccaacgucaagaaccucuacgagaagguccgcucccagcucaagaacaacgccaaggagaucggcaacggcugcuucgaguucuaccacaagugcgacaacaccugcauggaguccgucaagaacggcaccuacgacuaccccaaguacuccgaggaggccaagcucaaccgcgaggagaucgacggcgucaagcucgaguccacccgcaucuaccagauccucgccaucuacuccaccgucgccuccucccucguccucgucgucucccucggcgccaucuccuucuggaugugcuccaacggcucccuccagugccgcaucugcaucuga

SEQ ID NO: 103445 - RNA, 1701 nt, Artificial Sequence; identical to SEQ ID NO: 98705
  derived and/or modified CDS sequence (opt2) from hemagglutinin__InfluenzaA__AEO01316

SEQ ID NO: 103446 - RNA, 1701 nt, Artificial Sequence; identical to SEQ ID NO: 98705
  derived and/or modified CDS sequence (opt2) from hemagglutinin__InfluenzaA__AEO01317

SEQ ID NO: 103447 - RNA, 1701 nt, Artificial Sequence; identical to SEQ ID NO: 98705
  derived and/or modified CDS sequence (opt2) from hemagglutinin__InfluenzaA__AEO01318

SEQ ID NO: 103448 - RNA, 1701 nt, Artificial Sequence; identical to SEQ ID NO: 98705
  derived and/or modified CDS sequence (opt2) from hemagglutinin__InfluenzaA__AEO01319

SEQ ID NO: 103449 - RNA, 1701 nt, Artificial Sequence
  derived and/or modified CDS sequence (opt2) from hemagglutinin__InfluenzaA__AEO01321
augaaggccauccucgucguccuccucuacaccuucgccaccgccaacgccgacacccucugcaucggcuaccacgccaacaacuccaccgacaccgucgacaccguccucgagaagaacgucaccgucacccacuccgucaacauccucgaggacaagcacaacggcaagcucugcaagcuccgcggcgucgccccccuccaccucggcaagugcaacaucgccggcuggauccucggcaaccccgagugcgagucccucuccaccgccuccuccugguccuacaucgucgagaccuccuccuccgacaacggcaccugcuaccccggcgacuucaucgacuacgaggagcuccgcgagcagcucuccuccgucuccuccuucgagcgcuucgagaucuuccccaagaccuccuccuggcccaaccacgacuccaacaagggcgucaccgccgccugcccccacgccggcgccaaguccuucuacaagaaccucaucuggcucgucaagaagggcaacuccuaccccaagcucuccaaguccuacaucaacgacaagggcaaggagguccucguccucuggggcauccaccaccccuccaccuccgccgaccagcagucccucuaccagaacgccgacgccuacgucuucgucggcaccucccgcuacuccaagaaguucaagcccgagaucgccauccgccccaagguccgcgaccaggagggccgcaugaacuacuacuggacccucgucgagcccggcgacaagaucaccuucgaggccaccggcaaccucgucgucccccgcuacgccuucgccauggagcgcaacgccggcuccggcaucaucaucuccgacacccccguccacgacugcaacaccaccugccagacccccaagggcgccaucaacaccucccuccccuuccagaacauccaccccaucaccaucggcaagugccccaaguacgucaaguccaccaagcuccgccucgccaccggccuccgcaacguccccuccauccagucccgcggccucuucggcgccaucgccggcuucaucgagggcggcuggaccggcauggucgacggcugguacggcuaccaccaccagaacgagcagggcuccggcuacgccgccgaccucaaguccacccagaacgccaucgacgagaucaccaacaaggucaacuccgucaucgagaagaugaacacccaguucaccgccgucggcaaggaguucaaccaccucgagaagcgcaucgagaaccucaacaagaaggucgacgacggcuuccucgacaucuggaccuacaacgccgagcuccucgcccuccucgagaacgagcgcacccucgacuaccacgacuccaacgucaagaaccucuacgagaagguccgcucccagcucaagaacaacgccaaggagaucggcaacggcugcuucgaguucuaccacaagugcgacaacaccugcauggaguccgucaagaacggcaccuacgacuaccccaaguacuccgaggaggccaagcucaaccgcgaggagaucgacggcgucaagcucgaguccacccgcaucuaccagauccucgccaucuacuccaccgucgccuccucccucguccucgucgucucccucggcgccaucuccuucuggaugugcuccaacggcucccuccagugccgcaucugcaucuga

SEQ ID NO: 103450 - RNA, 1701 nt, Artificial Sequence; identical to SEQ ID NO: 98705
  derived and/or modified CDS sequence (opt2) from hemagglutinin__InfluenzaA__AEO01322

SEQ ID NO: 103451 - RNA, 1701 nt, Artificial Sequence; identical to SEQ ID NO: 100387
  derived and/or modified CDS sequence (opt2) from hemagglutinin__InfluenzaA__AEO01323

SEQ ID NO: 103452 - RNA, 1701 nt, Artificial Sequence; identical to SEQ ID NO: 100302
  derived and/or modified CDS sequence (opt2) from hemagglutinin__InfluenzaA__AEO01324

SEQ ID NO: 103453 - RNA, 1701 nt, Artificial Sequence; identical to SEQ ID NO: 98705
  derived and/or modified CDS sequence (opt2) from hemagglutinin__InfluenzaA__AEO01325

SEQ ID NO: 103454 - RNA, 1701 nt, Artificial Sequence
  derived and/or modified CDS sequence (opt2) from hemagglutinin__InfluenzaA__AEO01326
augaaggccauccucgucguccuccucuacaccuucgccaccgccaacgccgacacccucugcaucggcuaccacgccaacaacuccaccgacaccgucgacaccguccucgagaagaacgucaccgucacccacuccgucaaccuccucgaggacaagcacaacggcaagcucugcaagcuccgcggcgucgccccccuccaccucggcaagugcaacaucgccggcuggauccucggcaaccccgagugcgagucccucuccaccgccuccuccugguccuacaucgucgagaccuccuccuccgacaacggcaccugcuaccccggcgacuucaucgacuacgaggagcuccgcgagcagcucuccuccgucuccuccuucgagcgcuucgagaucuuccccaagaccuccuccuggcccaaccacgacuccaacaagggcgucaccgccgccugcccccacgccggcgccaaguccuucuacaagaaccucaucuggcucgucaagaagggcaacuccuaccccaagcucuccaaguccuacaucaacgacaagggcaaggagguccucguccucuggggcauccaccaccccuccaccuccgccgaccagcagucccucuaccaggacgccgacgccuacgucuucgucggcaccucccgcuacuccaagaaguucaagcccgagaucgccauccgccccaagguccgcgaccaggagggccgcaugaacuacuacuggacccucgucgagcccggcgacaagaucaccuucgaggccaccggcaaccucgucgucccccgcuacgccuucgccauggagcgcaacgccggcuccggcaucaucaucuccgacacccccguccacgacugcaacaccaccugccagacccccaagggcgccaucaacaccucccuccccuuccagaacauccaccccaucaccaucggcaagugccccaaguacgucaaguccaccaagcuccgccucgccaccggccuccgcaacguccccuccauccagucccgcggccucuucggcgccaucgccggcuucaucgagggcggcuggaccggcauggucgacggcugguacggcuaccaccaccagaacgagcagggcuccggcuacgccgccgaccucaaguccacccagaacgccaucgacgagaucaccaacaaggucaacuccgucaucgagaagaugaacacccaguucaccgccgucggcaaggaguucaaccaccucgagaagcgcaucgagaaccucaacaagaaggucgacgacggcuuccucgacaucuggaccuacaacgccgagcuccucguccuccucgagaacgagcgcacccucgacuaccacgacuccaacgucaagaaccucuacgagaagguccgcucccagcucaagaacaacgccaaggagaucggcaacggcugcuucgaguucuaccacaagugcgacaacaccugcauggaguccgucaagaacggcaccuacgacuaccccaaguacuccgaggaggccaagcucaaccgcgaggagaucgacggcgucaagcucgaguccacccgcaucuaccagauccucgccaucuacuccaccgucgccuccucccucguccucgucgucucccucggcgccaucuccuucuggaugugcuccaacggcucccuccagugccgcaucugcaucuga

SEQ ID NO: 103455 - RNA, 1701 nt, Artificial Sequence; identical to SEQ ID NO: 98705
  derived and/or modified CDS sequence (opt2) from hemagglutinin__InfluenzaA__AEO01327

SEQ ID NO: 103456 - RNA, 1701 nt, Artificial Sequence; identical to SEQ ID NO: 103414
  derived and/or modified CDS sequence (opt2) from hemagglutinin__InfluenzaA__AEO01328

SEQ ID NO: 103457 - RNA, 1701 nt, Artificial Sequence; identical to SEQ ID NO: 98705
  derived and/or modified CDS sequence (opt2) from hemagglutinin__InfluenzaA__AEO01330

SEQ ID NO: 103458 - RNA, 1701 nt, Artificial Sequence
  derived and/or modified CDS sequence (opt2) from hemagglutinin__InfluenzaA__AEO01331
augaaggccauccucgucguccuccucuacaccuucgccaccgccaacgccgacacccucugcaucggcuaccacgccaacaacuccaccgacaccgucgacacccuccucgagaagaacgucaccgucacccacuccgucaaccuccucgaggacaagcacaacggcaagcucugcaagcuccgcggcgucgccccccuccaccucggcaagugcaacaucgccggcuggauccucggcaaccccgagugcgagucccucuccaccgccuccuccugguccuacaucgucgagaccuccuccuccgacaacggcaccugcuaccccggcgacuucaucgacuacgaggagcuccgcgagcagcucuccuccgucuccuccuucgagcgcuucgagaucuuccccaagaccuccuccuggcccaaccacgacuccaacaagggcgucaccgccgccugcccccacgccggcgccaaguccuucuacaagaaccucaucuggcucgucaagaagggcaacuccuaccccaagcucuccaaguccuacaucaacgacaagggcaaggagguccucguccucuggggcauccaccaccccuccaccuccgccgaccagcagucccucuaccagaacgccgacgccuacgucuucgucggcaccucccgcuacuccaagaaguucaagcccgagaucgccauccgccccaagguccgcgaccaggagggccgcaugaacuacuacuggacccucgucgagcccggcgacaagaucaccuucgaggccaccggcaaccucgucgucccccgcuacgccuucgccauggagcgcaacgccggcuccggcaucaucaucuccgacacccccguccacgacugcaacaccaccugccagacccccaagggcgccaucaacaccucccuccccuuccagaacauccaccccaucaccaucggcaagugccccaaguacgucaaguccaccaagcuccgccucgccaccggccuccgcaacguccccuccauccagucccgcggccucuucggcgccaucgccggcuucaucgagggcggcuggaccggcauggucgacggcugguacggcuaccaccaccagaacgagcagggcuccggcuacgccgccgaccucaaguccacccagaacgccaucgacgagaucaccaacaaggucaacuccgucaucgagaagaugaacacccaguucaccgccgucggcaaggaguucaaccaccucgagaagcgcaucgagaaccucaacaagaaggucgacgacggcuuccucgacaucuggaccuacaacgccgagcuccucguccuccucgagaacgagcgcacccucgacuaccacgacuccaacgucaagaaccucuacgagaagguccgcucccagcucaagaacaacgccaaggagaucggcaacggcugcuucgaguucuaccacaagugcgacaacaccugcauggaguccgucaagaacggcaccuacgacuaccccaaguacuccgaggaggccaagcucaaccgcgaggagaucgacggcgucaagcucgaguccacccgcaucuaccagauccucgccaucuacuccaccgucgccuccucccucguccucgucgucucccucggcgccaucuccuucuggaugugcuccaacggcucccuccagugccgcaucugcaucuga

SEQ ID NO: 103459 - RNA, 1701 nt, Artificial Sequence
  derived and/or modified CDS sequence (opt2) from hemagglutinin__InfluenzaA__AEO01332
augaaggccauccucgucguccuccucuacaccuucgccaccgccaacgccgacacccucugcaucggcuaccacgccaacaacuccaccgacaccgucgacaccguccucgagaagaacgucaccgucacccacuccgucaaccuccucgaggacaagcacaacggcaagcucugcaagcuccgcggcgucgccccccuccaccucggcaagugcaacaucgccggcuggauccucggcaaccccgagugcgagucccucuccaccgccuccuccugguccuacaucgucgagaccuccuccuccgacaacggcaccugcuaccccggcgacuucaucgacuacgaggagcuccgcgagcagcucuccuccgucuccuccuucgagcgcuucgagaucuuccccaagaccuccuccuggcccaaccacgacuccaacaagggcgucaccgccgccugcccccacgccggcgccaaguccuucuacaagaaccucaucuggcucgucaagaagggcaacuccuaccccaagcucuccaaguccuacaucaacgacaagggcaaggagguccucguccucuggggcauccaccaccccuccaccuccgccgaccagcagucccucuaccagaacgccgacgccuacgucuucgucggccucucccgcuacuccaagaaguucaagcccgagaucgccauccgccccaagguccgcgagcaggagggccgcaugaacuacuacuggacccucgucgagcccggcgacaagaucaccuucgaggccaccggcaaccucgucgucccccgcuacgccuucgccauggagcgcaacgccggcuccggcaucgucaucuccgacacccccguccacgacugcaacaccaccugccagacccccaagggcgccaucaacaccucccuccccuuccagaacauccaccccaucaccaucggcaagugccccaaguacgucaaguccaccaagcuccgccucgccaccggccuccgcaacguccccuccauccagucccgcggccucuucggcgccaucgccggcuucaucgagggcggcuggaccggcauggucgacggcugguacggcuaccaccaccagaacgagcagggcuccggcuacgccgccgaccucaaguccacccagaacgccaucgacgagaucaccaacaaggucaacuccgucaucgagaagaugaacacccaguucaccgccgucggcaaggaguucaaccaccucgagaagcgcauggagaaccucaacaagaaggucgacgacggcuuccucgacaucuggaccuacaacgccgagcuccucguccuccucgagaacgagcgcacccucgacuaccacgacuccaacgucaagaaccucuacgagaagguccgcucccagcucaagaccaacgccaaggagaucggcaacggcugcuucgaguucuaccacaagugcgacaacaccugcauggaguccgucaagaacggcaccuacgacuaccccaaguacuccgaggaggccaagcucaaccgcgaggagaucgacggcgucaagcucgaguccacccgcaucuaccagauccucgccaucuacuccaccgucgccuccucccucguccucgucgucucccucggcgccaucuccuucuggaugugcuccaacggcucccuccagugccgcaucugcaucuga

SEQ ID NO: 103460 - RNA, 1701 nt, Artificial Sequence; identical to SEQ ID NO: 100873
  derived and/or modified CDS sequence (opt2) from hemagglutinin__InfluenzaA__AEO01333

SEQ ID NO: 103461 - RNA, 1701 nt, Artificial Sequence
  derived and/or modified CDS sequence (opt2) from hemagglutinin__InfluenzaA__AEO01334
augaaggccauccucgucguccuccucuacaccuucgccaccgccaacgccgacacccucugcaucggcuaccacgccaacaacuccaccgacaccgucgacaccauccucgagaagaacgucaccgucacccacuccgucaaccuccucgaggacaagcacaacggcaagcucugcaagcuccgcggcgucgccccccuccaccucggcaagugcaacaucgccggcuggauccucggcaaccccgagugcgagucccucuccaccgccuccuccugguccuacaucgucgagaccuccuccuccgacaacggcaccugcuaccccggcgacuucaucgacuacgaggagcuccgcgagcagcucuccuccgucuccuccuucgagcgcuucgagaucuuccccaagaccuccuccuggcccaaccacgacuccaacaagggcgucaccgccgccugcccccacgccggcgccaaguccuucuacaagaaccucaucuggcucgucaagaagggcaacuccuaccccaagcucuccaaguccuacaucaacgacaagggcaaggagguccucguccucuggggcauccaccaccccuccaccuccgccgaccagcagucccucuaccagaacgccgacgccuacgucuucgucggcaccucccgcuacuccaagaaguucaagcccgagaucgccauccgccccaagguccgcgaccaggagggccgcaugaacuacuacuggacccucgucgagcccggcgacaagaucaccuucgaggccaccggcaaccucgucgucccccgcuacgccuucgccauggagcgcaacgccggcuccggcaucaucaucuccgacacccccguccacgacugcaacaccaccugccagacccccaagggcgccaucaacaccucccuccccuuccagaacauccaccccaucaccaucggcaagugccccaaguacgucaaguccaccaagcuccgccucgccaccggccuccgcaacguccccuccauccagucccgcggccucuucggcgccaucgccggcuucaucgagggcggcuggaccggcauggucgacggcugguacggcuaccaccaccagaacgagcagggcuccggcuacgccgccgaccucaaguccacccagaacgccaucgacgagaucaccaacaaggucaacuccgucaucgagaagaugaacacccaguucaccgccgucggcaaggaguucaaccaccucgagaagcgcaucgagaaccucaacaagaaggucgacgacggcuuccucgacaucuggaccuacaacgccgagcuccucguccuccucgagaacgagcgcacccucgacuaccacgacuccaacgucaagaaccucuacgagaagguccgcucccagcucaagaacaacgccaaggagaucggcaacggcugcuucgaguucuaccacaagugcgacaacaccugcauggaguccgucaagaacggcaccuacgacuaccccaaguacuccgaggaggccaagcucaaccgcgaggagaucgacggcgucaagcucgaguccacccgcaucuaccagauccucgccaucuacuccaccgucgccuccucccucguccucgucgucucccucggcgccaucuccuucuggaugugcuccaacggcucccuccagugccgcaucugcaucuga

SEQ ID NO: 103462 - RNA, 1701 nt, Artificial Sequence; identical to SEQ ID NO: 100302
  derived and/or modified CDS sequence (opt2) from hemagglutinin__InfluenzaA__AEO01335

SEQ ID NO: 103463 - RNA, 1701 nt, Artificial Sequence
  derived and/or modified CDS sequence (opt2) from hemagglutinin__InfluenzaA__AEO01336
augaaggccauccucgucguccuccucuacaccuucgccaccgccaacgccgacacccucugcaucggcuaccacgccaacaacuccaccgacaccgucgacaccguccucgagaagaacgucaccgucacccacuccgucaaccuccucgaggacaagcacaacggcaagcucugcaagcuccgcggcgucgccccccuccaccucggcaagugcaacaucgccggcuggauccucggcaaccccgagugcgagucccucuccaccgccuccuccugguccuacaucgucgagaccuccuccuccgacaacggcaccugcuaccccggcgacuucaucgacuacgaggagcuccgcgagcagcucuccuccgucuccuccuucgagcgcuucgagaucuuccccaagaccuccuccuggcccaaccacgacuccaacaagggcgucaccgccgccugcccccacgccggcgccaaguccuucuacaagaaccucaucuggcucgucaagaagggcaacuccuaccccaagcucaacaaguccuacaucaacgacaagggcaaggagguccucguccucuggggcauccaccaccccuccaccuccgccgaccagcagucccucuaccagaacgccgacgccuacgucuucgucggcaccucccgcuacuccaagaaguucaagcccgagaucgccauccgccccaagguccgcgaccaggagggccgcaugaacuacuacuggacccucgucgagcccggcgacaagaucaccuucgaggccaccggcaaccucgucgucccccgcuacgccuucgccauggagcgcaacgccggcuccggcaucaucaucuccgacacccccguccacgacugcaacaccaccugccagacccccaagggcgccaucaacaccucccuccccuuccagaacauccaccccaucaccaucggcgagugccccaaguacgucaaguccaccaagcuccgccucgccaccggccuccgcaacguccccuccauccagucccgcggccucuucggcgccaucgccggcuucaucgagggcggcuggaccggcauggucgacggcugguacggcuaccaccaccagaacgagcagggcuccggcuacgccgccgaccucaaguccacccagaacgccaucgacaagaucaccaacaaggucaacuccgucaucgagaagaugaacacccaguucaccgccgucggcaaggaguucaaccaccucgagaagcgcaucgagaaccucaacaagaaggucgacgacggcuuccucgacaucuggaccuacaacgccgagcuccucguccuccucgagaacgagcgcacccucgacuaccacgacuccaacgucaagaaccucuacgagaagguccgcucccagcucaagaacaacgccaaggagaucggcaacggcugcuucgaguucuaccacaagugcgacaacaccugcauggaguccgucaagaacggcaccuacgacuaccccaaguacuccgaggaggccaagcucaaccgcgaggagaucgacggcgucaagcucgaguccacccgcaucuaccagauccucgccaucuacuccaccgucgccuccucccucguccucgucgucucccucggcgccaucuccuucuggaugugcuccaacggcucccuccagugccgcaucugcaucuga

SEQ ID NO: 103464 - RNA, 1701 nt, Artificial Sequence
  derived and/or modified CDS sequence (opt2) from hemagglutinin__InfluenzaA__AEO01337
augaaggccauccucgucguccuccucuacaccuucgccaccgccaacgccgacacccucugcaucggcuaccacgccaacaacuccaccgacaccgucgacaccguccucgagaagaacgucaccgucacccacuccgucaaccuccucgaggacaagcacaacggcaagcucugcaagcuccgcggcgucgccccccuccaccucggcaagugcaacaucgccggcuggauccucggcaaccccgagugcgagucccucuccaccgccuccuccugguccuacaucgucgagaccuccuccuccgacaacggcaccugcuaccccggcgacuucaucgacuacgaggagcuccgcgagcagcucuccuccgucuccuccuucgagcgcuucgagaucuuccccaagaccuccuccuggcccaaccacgacuccaacaagggcgucaccgccgccugcccccacgccggcgccaaguccuucuacaagaaccucaucuggcucgucaagaagggcaacuccuaccccaagcucuccaaguccuacaucaacgacaagggcaaggagguccucguccucuggggcauccaccaccccuccaccuccgccgaccagcagucccucuaccagaacgccgacgccuacgucuucgucggcaccucccgcuacuccaagaaguucaagcccgagaucgccauccgccccaagguccgcgaccaggagggccgcaugaacuaccacuggacccucgucgagcccggcgacaagaucaccuucgaggccaccggcaaccucgucgucccccgcuacgccuucgccauggagcgcaacgccggcuccggcaucaucaucuccgacacccccguccacgacugcaacaccaccugccagacccccaagggcgccaucaacaccucccuccccuuccagaacauccaccccaucaccaucggcaagugccccaaguacgucaaguccaccaagcuccgccucgccaccggccuccgcaacguccccuccauccagucccgcggccucuucggcgccaucgccggcuucaucgagggcggcuggaccggcauggucgacggcugguacggcuaccaccaccagaacgagcagggcuccggcuacgccgccgaccucaaguccacccagcacgccaucgacgagaucaccaacaaggucaacuccgucaucgagaagaugaacacccaguucaccgccgucggcaaggaguucaaccaccucgagaagcgcaucgagaaccucaacaagaaggucgacgacggcuuccucgacaucuggaccuacaacgccgagcuccucguccuccucgagaacgagcgcacccucgacuaccacgacuccaacgucaagaaccucuacgagaagguccgcucccagcucaagaacaacgccaaggagaucggcaacggcugcuucgaguucuaccacaagugcgacaacaccugcauggaguccgucaagaacggcaccuacgacuaccccaaguacuccgaggaggccaagcucaaccgcgaggagaucgacggcgucaagcucgaguccacccgcaucuaccagauccucgccaucuacuccaccgucgccuccucccucguccucgucgucucccucggcgccaucuccuucuggaugugcuccaacggcucccuccagugccgcaucugcaucuga

SEQ ID NO: 103465 - RNA, 1701 nt, Artificial Sequence; identical to SEQ ID NO: 98705
  derived and/or modified CDS sequence (opt2) from hemagglutinin__InfluenzaA__AEO01338

SEQ ID NO: 103466 - RNA, 1701 nt, Artificial Sequence; identical to SEQ ID NO: 102577
  derived and/or modified CDS sequence (opt2) from hemagglutinin__InfluenzaA__AEO01339

SEQ ID NO: 103467 - RNA, 1701 nt, Artificial Sequence; identical to SEQ ID NO: 103423
  derived and/or modified CDS sequence (opt2) from hemagglutinin__InfluenzaA__AEO01340

SEQ ID NO: 103468 - RNA, 1701 nt, Artificial Sequence; identical to SEQ ID NO: 103423
  derived and/or modified CDS sequence (opt2) from hemagglutinin__InfluenzaA__AEO01341

SEQ ID NO: 103469 - RNA, 1701 nt, Artificial Sequence; identical to SEQ ID NO: 98705
  derived and/or modified CDS sequence (opt2) from hemagglutinin__InfluenzaA__AEO01342

SEQ ID NO: 103470 - RNA, 1701 nt, Artificial Sequence
  derived and/or modified CDS sequence (opt2) from hemagglutinin__InfluenzaA__AEO01343
augaaggccauccucgucguccuccucuacaccuucgccaccgccaacgccgacacccucugcaucggcuaccacgccaacaacuccaccgacaccgucgacaccguccucgagaagaacgucaccgucacccacuccgucaaccuccucgaggacaagcacaacggcaagcucugcaagcuccgcggcgucgccccccuccaccucggcaagugcaacaucgccggcuggauccucggcaaccccgagugcgagucccucuccaccgccuccuccugguccuacaucgucgagaccuccaacuccgacaacggcaccugcuaccccggcgacuucaucgacuacgaggagcuccgcgagcagcucuccuccgucuccuccuucgagcgcuucgagaucuuccccaagaccuccuccuggcccaaccacgacuccaacaagggcgucaccgccgccugcccccacgccggcgccaaguccuucuacaagaaccucaucuggcucgucaagaagggcaacuccuaccccaagcucuccaaguccuacaucaacgacaagggcaaggagguccucguccucuggggcauccaccaccccuccaccuccgccgaccagcagucccucuaccagaacgccgacgccuacgucuucgucggcaccucccgcuacuccaagaaguucaagcccgagaucgccauccgccccaagguccgcgaccaggagggccgcaugaacuacuacuggacccucgucgagcccggcgacaagaucaccuucgaggccaccggcaaccucgucgucccccgcuacgccuucgccauggagcgcaacgccggcuccggcaucaucaucuccgacacccccguccacgacugcaacaccaccugccagacccccaagggcgccaucaacaccucccuccccuuccagaacauccaccccaucaccaucggcaagugccccaaguacgucaaguccaccaagcuccgccucgccaccggccuccgcaacguccccuccauccagucccgcggccucuucggcgccaucgccggcuucaucgagggcggcuggaccggcauggucgacggcugguacggcuaccaccaccagaacgagcagggcuccggcuacgccgccgaccucaaguccacccagaacgccaucgacaagaucaccaacaaggucaacuccgucaucgagaagaugaacacccaguucaccgccgucggcaaggaguucaaccaccucgagaagcgcaucgagaaccucaacaagaaggucgacgacggcuuccucgacaucuggaccuacaacgccgagcuccucguccuccucgagaacgagcgcacccucgacuaccacgacuccaacgucaagaaccucuacgagaagguccgcucccagcucaagaacaacgccaaggagaucggcaacggcugcuucgaguucuaccacaagugcgacaacaccugcauggaguccgucaagaacggcaccuacgacuaccccaaguacuccgaggaggccaagcucaaccgcgaggagaucgacggcgucaagcucgaguccacccgcaucuaccagauccucgccaucuacuccaccgucgccuccucccucguccucgucgucucccucggcgccaucuccuucuggaugugcuccaacggcucccuccagugccgcaucugcaucuga

SEQ ID NO: 103471 - RNA, 1701 nt, Artificial Sequence
  derived and/or modified CDS sequence (opt2) from hemagglutinin__InfluenzaA__AEO01344
augaaggccauccucgucguccuccucuacaccuucgccaccgccaacgccgacacccucugcaucggcuaccacgccaacaacuccaccgacaccgucgacaccguccucgagaagaacgucaccgucacccacuccgucaacauccucgaggacaagcacaacggcaagcucugcaagcuccgcggcgucgccccccuccaccucggcaagugcaacaucgccggcuggauccucggcaaccccgagugcgagucccucuccaccgccuccuccugguccuacaucgucgagaccuccuccuccgacaacggcaccugcuaccccggcgacuucaucgacuacgaggagcuccgcgagcagcucuccuccgucuccuccuucgagcgcuucgagaucuuccccaagaccuccuccuggcccaaccacgacuccaacaagggcgucaccgccgccugcccccacgccggcgccaaguccuucuacaagaaccucaucuggcucgucaagaagggcaacuccuaccccaagcucuccaaguccuacaucaacgacaagggcaaggagguccucguccucuggggcauccaccaccccuccaccuccgccgaccagcagucccucuaccagaacgccgacgccuacgucuucgucggcaccuccaaguacuccaagaaguucaagcccgagaucgccauccgccccaagguccgcgaccaggagggccgcaugaacuacuacuggacccucgucgagcccggcgacaagaucaccuucgaggccaccggcaaccucgucgucccccgcuacgccuucgccauggagcgcaacgccggcuccggcaucaucaucuccgacacccccguccacgacugcaacaccaccugccagacccccaagggcgccaucaacaccucccuccccuuccagaacauccaccccaucaccaucggcaagugccccaaguacgucaaguccaccaagcuccgccucgccaccggccuccgcaacguccccuccauccagucccgcggccucuucggcgccaucgccggcuucaucgagggcggcuggaccggcauggucgacggcugguacggcuaccaccaccagaacgagcagggcuccggcuacgccgccgaccucaaguccacccagaacgccaucgacgagaucaccaacaaggucaacuccgucaucgagaagaugaacacccaguucaccgccgucggcaaggaguucaaccaccucgagaagcgcaucgagaaccucaacaagaaggucgacgacggcuuccucgacaucuggaccuacaacgccgagcuccucguccuccucgagaacgagcgcacccucgacuaccacgacuccaacgucaagaaccucuacgagaagguccgcucccagcucaagaacaacgccaaggagaucggcaacggcugcuucgaguucuaccacaagugcgacaacaccugcauggaguccgucaagaacggcaccuacgacuaccccaaguacuccgaggaggccaagcucaaccgcgaggagaucgacggcgucaagcucgaguccacccgcaucuaccagauccucgccaucuacuccaccgucgccuccucccucguccucgucgucucccucggcgccaucuccuucuggaugugcuccaacggcucccuccagugccgcaucugcaucuga

SEQ ID NO: 103472 - RNA, 1701 nt, Artificial Sequence; identical to SEQ ID NO: 102577
  derived and/or modified CDS sequence (opt2) from hemagglutinin__InfluenzaA__AEO01345

SEQ ID NO: 103473 - RNA, 1701 nt, Artificial Sequence; identical to SEQ ID NO: 98705
  derived and/or modified CDS sequence (opt2) from hemagglutinin__InfluenzaA__AEO01346

SEQ ID NO: 103474 - RNA, 1701 nt, Artificial Sequence
  derived and/or modified CDS sequence (opt2) from hemagglutinin__InfluenzaA__AEO01347
augaaggccauccucgucguccuccucuacaccuucgccaccgccaacgccgacacccucugcaucggcuaccacgccaacaacuccaccgacaccgucgacaccguccucgagaagaacgucaccgucacccacuccgucaaccuccucgaggacaagcacaacggcaagcucugcaagcuccgcggcgucgccccccuccaccucggcaagugcaacaucgccggcuggauccucggcaaccccgagugcgagucccucuccaccgccuccuccugguccuacaucgucgagaccuccuccuccgacaacggcaccugcuaccccggcgacuucaucgacuacgaggagcuccgcgagcagcucuccuccgucuccuccuucgagcgcuucgagaucuuccccaagaccuccuccuggcccaaccacgacuccaacaagggcgucaccgccgccugcccccacgccggcgccaaguccuucuacaagaaccucaucuggcucgucaagaagggcaacuccuaccccaagcucuccaaguccuacaucaacgacaagggcaaggagguccucguccucuggggcauccaccaccccuccaccuccgccgaccagcagucccucuaccagaacgccgacgccuacgucuucgucggcaccucccgcuacuccaagaaguucaagcccgagaucgccauccgccccaagguccgcgaccaggagggccgcaugaacuacuacuggacccucgucgagcccggcgacaagaucaccuucgaggccaccggcaaccucgucgucccccgcuacgccuucgccauggagcgcaacgccggcuccggcaucaucaucuccgacacccccguccacgacugcaacaccaccugccagacccccaagggcgccaucaacaccucccuccccuuccagaacauccaccccaucaccaucggcgagugccccaaguacgucaaguccaccaagcuccgccucgccaccggccuccgcaacguccccuccauccagucccgcggccucuucggcgccaucgccggcuucaucgagggcggcuggaccggcauggucgacggcugguacggcuaccaccaccagaacgagcagggcuccggcuacgccgccgaccucaaguccacccagaacgccaucgacaagaucaccaacaaggucaacuccgucaucgagaagaugaacacccaguucaccgccgucggcaaggaguucaaccaccucgagaagcgcaucgagaaccucaacaagaaggucgacgacggcuuccucgacaucuggaccuacaacgccgagcuccucguccuccucgagaacgagcgcacccucgacuaccacgacuccaacgucaagaaccucuacgagaagguccgcucccagcucaagaacaacgccaaggagaucggcaacggcugcuucgaguucuaccacaagugcgacaacaccugcauggaguccgucaagaacggcaccuacgacuaccccaaguacuccgaggaggccaagcucaaccgcgaggagaucgacggcgucaagcucgaguccacccgcaucuaccagauccucgccaucuacuccaccgucgccuccucccucguccucgucgucucccucggcgccaucuccuucuggaugugcuccaacggcucccuccagugccgcaucugcaucuga

SEQ ID NO: 103475 - RNA, 1701 nt, Artificial Sequence
  derived and/or modified CDS sequence (opt2) from hemagglutinin__InfluenzaA__AEO01348
augaaggccauccucgucguccuccucuacaccuucgccaucgccaacgccgacacccucugcaucggcuaccacgccaacaacuccaccgacaccgucgacaccguccucgagaagaacgucaccgucacccacuccgucaaccuccucgaggacaagcacaacggcaagcucugcaagcuccgcggcgucgccccccuccaccucggcaagugcaacaucgccggcuggauccucggcaaccccgagugcgagucccucuccaccgccuccuccugguccuacaucgucgagaccuccuccuccgacaacggcaccugcuaccccggcgacuucaucgacuacgaggagcuccgcgagcagcucuccuccgucuccuccuucgagcgcuucgagaucuuccccaagaccuccuccuggcccaaccacgacuccaacaagggcgucaccgccgccugcccccacgccggcgccaaguccuucuacaagaaccucaucuggcucgucaagaagggcaacuccuaccccaagcucuccaaguccuacaucaacgacaagggcaaggagguccucguccucuggggcauccaccaccccuccaccuccgccgaccagcagucccucuaccagaacgccgacgccuacgucuucgucggcaccucccgcuacuccaagaaguucaagcccgagaucgccauccgccccaagguccgcgagcaggagggccgcaugaacuacuacuggacccucgucgagcccggcgacaagaucaccuucgaggccaccggcaaccucgucgucccccgcuacgccuucgccauggagcgcaacgccggcuccggcaucaucaucuccgacacccccguccacgacugcaacaccaccugccagacccccaagggcgccaucaacaccucccuccccuuccagaacauccaccccaucaccaucggcaagugccccaaguacgucaaguccaccaagcuccgccucgccaccggccuccgcaacguccccuccauccagucccgcggccucuucggcgccaucgccggcuucaucgagggcggcuggaccggcauggucgacggcugguacggcuaccaccaccagaacgagcagggcuccggcuacgccgccgaccucaaguccacccagaacgccaucgacgagaucaccaacaaggucaacuccgucaucgagaagaugaacacccaguucaccgccgucggcaaggaguucaaccaccucgagaagcgcaucgagaaccucaacaagaaggucgacgacggcuuccucgacaucuggaccuacaacgccgagcuccucguccuccucgagaacgagcgcacccucgacuaccacgacuccaacgucaagaaccucuacgagaagguccgcucccagcucaagaacaacgccaaggagaucggcaacggcugcuucgaguucuaccacaagugcgacaacaccugcauggaguccgucaagaacggcaccuacgacuaccccaaguacuccgaggaggccaagcucaaccgcgaggagaucgacggcgucaagcucgaguccacccgcaucuaccagauccucgccaucuacuccaccgucgccuccucccucguccucgucgucucccucggcgccaucuccuucuggaugugcuccaacggcucccuccagugccgcaucugcaucuga

SEQ ID NO: 103476 - RNA, 1701 nt, Artificial Sequence
  derived and/or modified CDS sequence (opt2) from hemagglutinin__InfluenzaA__AEO01349
augaaggccauccucgucguccuccucuacaccuucgccaccgccaacgccgacacccucugcaucggcuaccacgccaacaacuccaccgacaccgucgacaccguccucgagaagaacgucaccgucacccacuccgucaaccuccucgaggacaagcacaacggcaagcucugcaagcuccgcggcgucgccccccuccaccucggcaagugcaacaucgccggcuggauccucggcaaccccgagugcgagucccucuccaccgccuccuccugguccuacaucgucgagaccuccuccuccgagaacggcaccugcuaccccggcgacuucaucgacuacgaggagcuccgcgagcagcucuccuccgucuccuccuucgagcgcuucgagaucuuccccaagaccuccuccuggcccaaccacgacuccaacaagggcgucaccgccgccugcccccacgccggcgccaaguccuucuacaagaaccucaucuggcucgucaagaagggcaacuccuaccccaagcucuccaaguccuacaucaacgacaagggcaaggagguccucguccucuggggcauccaccaccccuccaccuccgccgaccagcagucccucuaccagaacgccgacgccuacgucuucgucggcaccucccgcuacuccaagaaguucaagcccgagaucgccauccgccccaagguccgcgaccaggagggccgcaugaacuacuacuggacccucgucgagcccggcgacaagaucaccuucgaggccaccggcaaccucgucgucccccgcuacgccuucgccauggagcgcaacgccggcuccggcaucaucaucuccgacacccccguccacgacugcaacaccaccugccagacccccaagggcgccaucaacaccucccuccccuuccagaacauccaccccaucaccaucggcaagugccccaaguacgucaaguccaccaagcuccgccucgccaccggccuccgcaacguccccuccauccagucccgcggccucuucggcgccaucgccggcuucaucgagggcggcuggaccggcauggucgacggcugguacggcuaccaccaccagaacgagcagggcuccggcuacgccgccgaccucaaguccacccagaacgccaucgacgagaucaccaacaaggucaacuccgucaucgagaagaugaacacccaguucaccgccgucggcaaggaguucaaccaccucgagaagcgcaucgagaaccucaacaagaaggucgacgacggcuuccucgacaucuggaccuacaacgccgagcuccucguccuccucgagaacgagcgcacccucgacuaccacgacuccaacgucaagaaccucuacgagaagguccgcucccagcucaagaacaacgccaaggagaucggcaacggcugcuucgaguucuaccacaagugcgacaacaccugcauggaguccgucaagaacggcaccuacgacuaccccaaguacuccaaggaggccaagcucaaccgcgaggagaucgacggcgucaagcucgaguccacccgcaucuaccagauccucgccaucuacuccaccgucgccuccucccucguccucgucgucucccucggcgccaucuccuucuggaugugcuccaacggcucccuccagugccgcaucugcaucuga

SEQ ID NO: 103477 - RNA, 1701 nt, Artificial Sequence
  derived and/or modified CDS sequence (opt2) from hemagglutinin__InfluenzaA__AEO01350
augaaggccauccucgucguccuccucuacaccuucgccaccaccaacgccgacacccucugcaucggcuaccacgccaacaacuccaccgacaccgucgacaccguccucgagaagaacgucaccgucacccacuccgucaaccuccucgaggacaagcacaacggcaagcucugcaagcuccgcggcgucgccccccuccaccucggcaagugcaacaucgccggcuggauccucggcaaccccgagugcgagucccucuccaccgccuccuccugguccuacaucgucgagaccuccuccuccgacaacggcaccugcuaccccggcgacuucaucgacuacgaggagcuccgcgagcagcucuccuccgucuccuccuucgagcgcuucgagaucuuccccaagaccuccuccuggcccaaccacgacuccaacaagggcgucaccgccgccugcccccacgccggcgccaaguccuucuacaagaaccucaucuggcucgucaagaagggcaacuccuaccccaagcucuccaaguccuacaucaacgacaagggcaaggagguccucguccucuggggcauccaccaccccuccaccuccgccgaccagcagucccucuaccagaacgccgacgccuacgucuucgucggcaccucccgcuacuccaagaaguucaagcccgagaucgccauccgccccaagguccgcgaccaggagggccgcaugaacuacuacuggacccucgucgagcccggcgacaagaucaccuucgaggccaccggcaaccucgucgucccccgcuacgccuucgccauggagcgcaacgccggcuccggcaucaucaucuccgacacccccguccacgacugcaacaccaccugccagacccccaagggcgccaucaacaccucccuccccuuccagaacauccaccccaucaccaucggcaagugccccaaguacgucaaguccaccaagcuccgccucgccaccggccuccgcaacguccccuccauccagucccgcggccucuucggcgccaucgccggcuucaucgagggcggcuggaccggcauggucgacggcugguacggcuaccaccaccagaacgagcagggcuccggcuacgccgccgaccucaaguccacccagcacgccaucgacgagaucaccaacaaggucaacuccgucaucgagaagaugaacacccaguucaccgccgucggcaaggaguucaaccaccucgagaagcgcaucgagaaccucaacaagaaggucgacgacggcuuccucgacaucuggaccuacaacgccgagcuccucguccuccucgagaacgagcgcacccucgacuaccacgacuccaacgucaagaaccucuacgagaagguccgcucccagcucaagaacaacgccaaggagaucggcaacggcugcuucgaguucuaccacaagugcgacaacaccugcauggaguccgucaagaacggcaccuacgacuaccccaaguacuccgaggaggccaagcucaaccgcgaggagaucgacggcgucaagcucgaguccacccgcaucuaccagauccucgccaucuacuccaccgucgccuccucccucguccucgucgucucccucggcgccaucuccuucuggaugugcuccaacggcucccuccagugccgcaucugcaucuga

SEQ ID NO: 103478 - RNA, 1701 nt, Artificial Sequence; identical to SEQ ID NO: 98705
  derived and/or modified CDS sequence (opt2) from hemagglutinin__InfluenzaA__AEO01351

SEQ ID NO: 103479 - RNA, 1701 nt, Artificial Sequence; identical to SEQ ID NO: 99869
  derived and/or modified CDS sequence (opt2) from hemagglutinin__InfluenzaA__AEO01352

SEQ ID NO: 103480 - RNA, 1701 nt, Artificial Sequence
  derived and/or modified CDS sequence (opt2) from hemagglutinin__InfluenzaA__AEO01353
augaaggccauccucgucguccuccucuacaccuucgccaccgccaacgccgacacccucugcaucggcuaccacgccaacaacuccaccgacaccgucgacaccguccucgagaagaacgucaccgucacccacuccgucaaccuccucgaggacaagcacaacggcaagcucugcaagcuccgcggcgucgccccccuccaccucggcaagugcaacaucgccggcuggauccucggcaaccccgagugcgagucccucuccaccgccuccuccugguccuacaucgucgagaccuccuccuccgacaacggcaccugcuaccccggcgacuucaucgacuacgaggagcuccgcgagcagcucuccuccgucuccuccuucgagcgcuucgagaucuuccccaagaccuccuccuggcccaaccacgacuccaacaagggcgucaccgccgccugcccccacgccggcgccaaguccuucuacaagaaccucaucuggcucgucaagaagggcaacuccuaccccaagcucuccaaguccuacaucaacgacaagggcaaggagguccucguccucuggggcauccaccaccccuccaccuccgccgaccagcagucccucuaccagaacgccgacgccuacgucuucgucggcaccucccgcuacuccaagaaguucaagcccgagaucgccauccgccccaagguccgcgaccaggagggccgcaugaacuacuacuggacccucgucgagcccggcgacaagaucaccuucgaggccaccggcaaccucgucgucccccgcuacgccuucgccauggagcgcaacgccggcuccggcaucaucaucuccgacacccccguccacgacugcaacaccaccugccagacccccaagggcgccaucaacaccucccuccccuuccagaacauccaccccaucaccaucggcaagugccccaaguacgucaaguccaccaagcuccgccucgccaccggccuccgcaacguccccuccauccagucccgcggccucuucggcgccaucgccggcuucaucgagggcggcuggaccggcauggucgacggcugguacggcuaccaccaccagaacgagcagggcuccggcuacgccgccgaccucaaguccacccagaacgccaucgacgagaucaccaacaaggucaacuccgucaucgagaagaugaacacccaguucaccgccgucggcaaggaguucaaccaccucgagaagcgcaucgagaaccucaacaagaaggucgacgacggcuuccucgacaucuggaccuacaacgccgagcuccucguccuccucgagaacgagcgcacccucgacuaccacgacuccaacgucaagaaccucuacgagaagguccgcucccagcucaagaacaacgccaaggagaucggcaacggcugcuucgaguucuaccacaagugcgacaacaccugcauggaguccgucaagaacggcaccuacgacuaccccaaguacuccgaggaggccaagcucaaccgcgaggagaucgacggcgucaagcucgaguccacccgcaucuaccagauccucgccaucuacuccaccgucgccuccucccucguccucgucgucuuccucggcgccaucuccuucuggaugugcuccaacggcucccuccagugccgcaucugcaucuga

SEQ ID NO: 103481 - RNA, 1701 nt, Artificial Sequence
  derived and/or modified CDS sequence (opt2) from hemagglutinin__InfluenzaA__AEO01354
augaaggccauccucgucguccuccucuacaaguucgccaccgccaacgccgacacccucugcaucggcuaccacgccaacaacuccaccgacaccgucgacaccguccucgagaagaacgucaccgucacccacuccgucaaccuccucgaggacaagcacaacggcaagcucugcaagcuccgcggcgucgccccccuccaccucggcaagugcaacaucgccggcuggauccucggcaaccccgagugcgagucccucuccaccgccuccuccugguccuacaucgucgagaccuccuccuccgacaacggcaccugcuaccccggcgacuucaucgacuacgaggagcuccgcgagcagcucuccuccgucuccuccuucgagcgcuucgagaucuuccccaagaccuccuccuggcccaaccacgacuccaacaagggcgucaccgccgccugcccccacgccggcgccaaguccuucuacaagaaccucaucuggcucgucaagaagggcaacuccuaccccaagcucuccaaguccuacaucaacgacaagggcaaggagguccucguccucuggggcauccaccaccccuccaccuccgccgaccagcagucccucuaccagaacgccgacgccuacgucuucgucggcaccucccgcuacuccaagaaguucaagcccgagaucgccauccgccccaagguccgcgaccaggagggccgcaugaacuacuacuggacccucgucgagcccggcgacaagaucaccuucgaggccaccggcaaccucgucgucccccgcuacgccuucgccauggagcgcaacgccggcuccggcaucaucaucuccgacacccccguccacgacugcaacaccaccugccagacccccaagggcgccaucaacaccucccuccccuuccagaacauccaccccaucaccaucggcaagugccccaaguacgucaaguccaccaagcuccgccucgccaccggccuccgcaacguccccuccauccagucccgcggccucuucggcgccaucgccggcuucaucgagggcggcuggaccggcauggucgacggcugguacggcuaccaccaccagaacgagcagggcuccggcuacgccgccgaccucaaguccacccagaacgccaucgacgagaucaccaacaaggucaacuccgucaucgagaagaugaacacccaguucaccgccgucggcaaggaguucaaccaccucgagaagcgcaucgagaaccucaacaagaaggucgacgacggcuuccucgacaucuggaccuacaacgccgagcuccucguccuccucgagaacgagcgcacccucgacuaccacgacuccaacgucaagaaccucuacgagaagguccgcucccagcucaagaacaacgccaaggagaucggcaacggcugcuucgaguucuaccacaagugcgacaacaccugcauggaguccgucaagaacggcaccuacgacuaccccaaguacuccgaggaggccaagcucaaccgcgaggagaucgacggcgucaagcucgaguccacccgcaucuaccagauccucgccaucuacuccaccgucgccuccucccucguccucgucgucucccucggcgccaucuccuucuggaugugcuccaacggcucccuccagugccgcaucugcaucuga

SEQ ID NO: 103482 - RNA, 1701 nt, Artificial Sequence; identical to SEQ ID NO: 100125
  derived and/or modified CDS sequence (opt2) from hemagglutinin__InfluenzaA__AEO01355

SEQ ID NO: 103483 - RNA, 1701 nt, Artificial Sequence; identical to SEQ ID NO: 98705
  derived and/or modified CDS sequence (opt2) from hemagglutinin__InfluenzaA__AEO01356

SEQ ID NO: 103484 - RNA, 1701 nt, Artificial Sequence
  derived and/or modified CDS sequence (opt2) from hemagglutinin__InfluenzaA__AEO01358
augaaggccauccucgucguccuccucuacaccuucgccaccgccaacgccgacacccucugcgucggcuaccacgccaacaacuccaccgacaccgucgacaccguccucgagaagaacgucaccgucacccacuccgucaaccuccucgaggacaagcacaacggcaagcucugcaagcuccgcggcgucgccccccuccaccucggcaagugcaacaucgccggcuggauccucggcaaccccgagugcgagucccucuccaccgccuccuccugguccuacaucgucgagaccuccuccuccgacaacggcaccugcuaccccggcgacuucaucgacuacgaggagcuccgcgagcagcucuccuccgucuccuccuucgagcgcuucgagaucuuccccaagaccuccuccuggcccaaccacgacuccaacaagggcgucaccgccgccugcccccacgccggcgccaaguccuucuacaagaaccucaucuggcucgucaagaagggcaacuccuaccccaagcucuccaaguccuacaucaacgacaagggcaaggagguccucguccucuggggcauccaccaccccuccaccuccgccgaccagcagucccucuaccagaacgccgacgccuacgucuucgucggcaccucccgcuacuccaagaaguucaagcccgagaucgccauccgccccaagguccgcgaccaggagggccgcaugaacuacuacuggacccucgucgagcccggcgacaagaucaccuucgaggccaccggcaaccucgucgucccccgcuacgccuucgccauggagcgcaacgccggcuccggcaucaucaucuccgacacccccgcccacgacugcaacaccaccugccagacccccaagggcgccaucaacaccucccuccccuuccagaacauccaccccaucaccaucggcaagugccccaaguacgucaaguccaccaagcuccgccucgccaccggccuccgcaacguccccuccauccagucccgcggccucuucggcgccaucgccggcuucaucgagggcggcuggaccggcauggucgacggcugguacggcuaccaccaccagaacgagcagggcuccggcuacgccgccgaccucaaguccacccagaacgccaucgacgagaucaccaacaaggucaacuccgucaucgagaagaugaacacccaguucaccgccgucggcaaggaguucaaccaccucgagaagcgcaucgagaaccucaacaagaaggucgacgacggcuuccucgacaucuggaccuacaacgccgagcuccucguccuccucgagaacgagcgcacccucgacuaccacgacuccaacgucaagaaccucuacgagaagguccgcucccagcucaagaacaacgccaaggagaucggcaacggcugcuucgaguucuaccacaagugcgacaacaccugcauggaguccgucaagaacggcaccuacgacuaccccaaguacuccgaggaggccaagcucaaccgcgaggagaucgacggcgucaagcucgaguccacccgcaucuaccagauccucgccaucuacuccaccgucgccuccucccucguccucgucgucucccucggcgccaucuccuucuggaugugcuccaacggcucccuccagugccgcaucugcaucuga

SEQ ID NO: 103485 - RNA, 1701 nt, Artificial Sequence; identical to SEQ ID NO: 100125
  derived and/or modified CDS sequence (opt2) from hemagglutinin__InfluenzaA__AEO01359

SEQ ID NO: 103486 - RNA, 1701 nt, Artificial Sequence; identical to SEQ ID NO: 103458
  derived and/or modified CDS sequence (opt2) from hemagglutinin__InfluenzaA__AEO01360

SEQ ID NO: 103487 - RNA, 1701 nt, Artificial Sequence; identical to SEQ ID NO: 99058
  derived and/or modified CDS sequence (opt2) from hemagglutinin__InfluenzaA__AEO01361

SEQ ID NO: 103488 - RNA, 1701 nt, Artificial Sequence; identical to SEQ ID NO: 103458
  derived and/or modified CDS sequence (opt2) from hemagglutinin__InfluenzaA__AEO01362

SEQ ID NO: 103489 - RNA, 1701 nt, Artificial Sequence; identical to SEQ ID NO: 99869
  derived and/or modified CDS sequence (opt2) from hemagglutinin__InfluenzaA__AEO01363

SEQ ID NO: 103490 - RNA, 1701 nt, Artificial Sequence
  derived and/or modified CDS sequence (opt2) from hemagglutinin__InfluenzaA__AEO01365
augaaggccauccucgucguccuccucuacaccuucgccaccgccaacgccgacacccucugcaucggcuaccacgccaacaacuccaccgacaccgucgacaccguccucaagaagaacgucaccgucacccacuccgucaacauccucgaggacaagcacaacggcaagcucugcaagcuccgcggcgucgccccccuccaccucggcaagugcaacaucgccggcuggauccucggcaaccccgagugcgagucccucuccaccgccuccuccugguccuacaucgucgagaccuccuccuccgacaacggcaccugcuaccccggcgacuucaucgacuacgaggagcuccgcgagcagcucuccuccgucuccuccuucgagcgcuucgagaucuuccccaagaccuccuccuggcccaaccacgacuccaacaagggcgucaccgccgccugcccccacgccggcgccaaguccuucuacaagaaccucaucuggcucgucaagaagggcaacuccuaccccaagcucuccaaguccuacaucaacgacaagggcaaggagguccucguccucuggggcauccaccaccccuccaccuccgccgaccagcagucccucuaccagaacgccgacgccuacgucuucgucggcaccucccgcuacuccaagaaguucaagcccgagaucgccauccgccccaagguccgcgaccaggagggccgcaugaacuacuacuggacccucgucgagcccggcgacaagaucaccuucgaggccaccggcaaccucgucgucccccgcuacgccuucgccauggagcgcuccgccggcuccggcaucaucaucuccgacacccccguccacgacugcaacaccaccugccagacccccaagggcgccaucaacaccucccuccccuuccagaacauccaccccaucaccaucggcaagugccccaaguacgucaaguccaccaagcuccgccucgccaccggccuccgcaacguccccuccauccagucccgcggccucuucggcgccaucgccggcuucaucgagggcggcuggaccggcauggucgacggcugguacggcuaccaccaccagaacgagcagggcuccggcuacgccgccgaccucaaguccacccagaacgccaucgacgagaucaccaacaaggucaacuccgucaucgagaagaugaacacccaguucaccgccgucggcaaggaguucaaccaccucgagaagcgcaucgagaaccucaacaagaaggucgacgacggcuuccucgacaucuggaccuacaacgccgagcuccucguccuccucgagaacgagcgcacccucgacuaccacgacuccaacgucaagaaccucuacgagaagguccgcucccagcucaagaacaacgccaaggagaucggcaacggcugcuucgaguucuaccacaagugcgacaacaccugcauggaguccgucaagaacggcaccuacgacuaccccaaguacuccgaggaggccaagcucaaccgcgaggagaucgacggcgucaagcucgaguccacccgcaucuaccagauccucgccaucuacuccaccgucgccuccucccucguccucgucgucucccucggcgccaucuccuucuggaugugcuccaacggcucccuccagugccgcaucugcaucuga

SEQ ID NO: 103491 - RNA, 1701 nt, Artificial Sequence
  derived and/or modified CDS sequence (opt2) from hemagglutinin__InfluenzaA__AEO01366
augaaggccauccucgucguccuccucuacaccuucgccaccgccaacgccgacacccucugcaucggcuaccacgccaacaacuccaccgacaccgucgacaccguccucgagaagaacgucaccgucacccacuccgucaaccuccucgaggacaagcacaacggcaagcucugcaagcuccgcggcgucgccccccuccaccucggcaagugcaacaucgccggcuggauccucggcaaccccgagugcgagucccucuccaccgccuccuccugguccuacaucgucgagaccuccuccuccgacaacggcaccugcuaccccggcgacuucaucgacuacgaggagcuccgcgagcagcucuccuccgucuccuccuucgagcgcuucgagaucuuccccaagaccuccuccuggcccaaccacgacuccaacaagggcgucaccgccgccugcccccacgccggcgccaaguccuucuacaagaaccucaucuggcucgucaagaagggcaacuccuaccccaagcucuccaaguccuacaucaacgacaagggcaaggagguccucguccucuggggcauccaccaccccuccaccuccgccgaccagcagucccucuaccagaacgccgacgccuacgucuucgucggcaccucccgcuacuccaagaaguucaagcccgagaucgccauccgccccaagguccgcgaccaggagggccgcaugaacuacuacuggacccucgucgagcccggcgacaagaucaccuucgaggccaccggcaaccucgucgucccccgcuacgccuucgccauggagcgcaacgccggcuccggcaucaucaucuccgacacccccguccacgacugcuccaccaccugccagacccccaagggcgccaucaacaccucccuccccuuccagaacguccaccccaucaccaucggcaagugccccaaguacgucaaguccaccaagcuccgccucgccaccggccuccgcaacguccccuccauccagucccgcggccucuucggcgccaucgccggcuucaucgagggcggcuggaccggcauggucgacggcugguacggcuaccaccaccagaacgagcagggcuccggcuacgccgccgaccucaaguccacccagaacgccaucgacgagaucaccaacaaggucaacuccgucaucgagaagaugaacacccaguucaccgccgucggcaaggaguucaaccaccucgagaagcgcaucgagaaccucaacaagaaggucgacgacggcuuccucgacaucuggaccuacaacgccgagcuccucguccuccucgagaacgagcgcacccucgacuaccacgacuccaacgucaagaaccucuacgagaagguccgcucccagcucaagaacaacgccaaggagaucggcaacggcugcuucgaguucuaccacaagugcgacaacaccugcauggaguccgucaagaacggcaccuacgacuaccccaaguacuccgaggaggccaagcucaaccgcgaggagaucgacggcgucaagcucgaguccacccgcaucuaccagauccucgccaucuacuccaccgucgccuccucccucguccucgucgucucccucggcgccaucuccuucuggaugugcuccaacggcucccuccagugccgcaucugcaucuga

SEQ ID NO: 103492 - RNA, 1701 nt, Artificial Sequence; identical to SEQ ID NO: 103463
  derived and/or modified CDS sequence (opt2) from hemagglutinin__InfluenzaA__AEO01367

SEQ ID NO: 103493 - RNA, 1701 nt, Artificial Sequence
  derived and/or modified CDS sequence (opt2) from hemagglutinin__InfluenzaA__AEO01368
augaaggccauccucgucguccuccucuacaccuucgccaccgccaacgccgacacccucugcaucggcuaccacgccaacaacuccaccgacaccgucgacaccguccucgagaagaacgucaccgucacccacuccgucaaccuccucgaggacaagcacaacggcaagcucugcaagcuccgcggcgucgccccccuccaccucggcaagugcaacaucgccggcuggauccucggcaaccccgagugcgagucccucuccaccgccuccuccugguccuacaucgucgagaccuccuccuccgacaacggcaccugcuaccccggcgacuucaucgacuacgaggagcuccgcgagcagcucuccuccgucuccuccuucgagcgcuucgagaucuuccccaacaccuccuccuggcccaaccacgacuccaacaagggcgucaccgccgccugcccccacgccggcgccaaguccuucuacaagaaccucaucuggcucgucaagaagggcaacuccuaccccaagcucuccaaguccuacaucaacgacaagggcaaggagguccucguccucuggggcauccaccaccccuccaccuccgccgaccagcagucccucuaccagaacgccgacgccuacgucuucgucggcaccucccgcuacuccaagaaguucaagcccgagaucgccauccgccccaagguccgcgaccaggagggccgcaugaacuacuacuggacccucgucgagcccggcgacaagaucaccuucgaggccaccggcaaccucgucgucccccgcuacgccuucgccauggagcgcaacgccggcuccggcaucaucaucuccgacacccccguccacgacugcaacaccaccugccagacccccaagggcgccaucaacaccucccuccccuuccagaacauccaccccaucaccaucggcaagugccccaaguacgucaaguccaccaagcuccgccucgccaccggccuccgcaacguccccuccauccagucccgcggccucuucggcgccaucgccggcuucaucgagggcggcuggaccggcauggucgacggcugguacggcuaccaccaccagaacgagcagggcuccggcuacgccgccgaccucaaguccacccagaacgccaucgacaagaucaccaacaaggucaacuccgucaucgagaagaugaacacccaguucaccgccgucggcaaggaguucaaccaccucgagaagcgcaucgagaaccucaacaagaaggucgacgacggcuuccucgacaucuggaccuacaacgccgagcuccucguccuccucgagaacgagcgcacccucgacuaccacgacuccaacgucaagaaccucuacgagaagguccgcucccagcucaagaacaacgccaaggagaucggcaacggcugcuucgaguucuaccacaagugcgacaacaccugcauggaguccgucaagaacggcaccuacgacuaccccaaguacuccgaggaggccaagcucaaccgcgaggagaucgacggcgucaagcucgaguccacccgcaucuaccagauccucgccaucuacuccaccgucgccuccucccucguccucgucgucucccucggcgccaucuccuucuggaugugcuccaacggcucccuccagugccgcaucugcaucuga

SEQ ID NO: 103494 - RNA, 1701 nt, Artificial Sequence; identical to SEQ ID NO: 98705
  derived and/or modified CDS sequence (opt2) from hemagglutinin__InfluenzaA__AEO01369

SEQ ID NO: 103495 - RNA, 1701 nt, Artificial Sequence; identical to SEQ ID NO: 103423
  derived and/or modified CDS sequence (opt2) from hemagglutinin__InfluenzaA__AEO01370

SEQ ID NO: 103496 - RNA, 1701 nt, Artificial Sequence; identical to SEQ ID NO: 103470
  derived and/or modified CDS sequence (opt2) from hemagglutinin__InfluenzaA__AEO01371

SEQ ID NO: 103497 - RNA, 1701 nt, Artificial Sequence; identical to SEQ ID NO: 100302
  derived and/or modified CDS sequence (opt2) from hemagglutinin__InfluenzaA__AEO01372

SEQ ID NO: 103498 - RNA, 1701 nt, Artificial Sequence; identical to SEQ ID NO: 100302
  derived and/or modified CDS sequence (opt2) from hemagglutinin__InfluenzaA__AEO01373

SEQ ID NO: 103499 - RNA, 1701 nt, Artificial Sequence
  derived and/or modified CDS sequence (opt2) from hemagglutinin__InfluenzaA__AEO01374
augaaggccauccucgucguccuccucuacaccuucgccaccgccaacgccgacacccucugcaucggcuaccacgccaacaacuccaccgacaccgucgacaccguccucgagaagaacgucaccgucacccacuccgucaaccuccucgaggacaagcacaacggcaagcucugcaagcuccgcggcgucgccccccuccaccucggcaagugcgacaucgccggcuggauccucggcaaccccgagugcgagucccucuccaccgccuccuccugguccuacaucgucgagaccuccuccuccgacaacggcaccugcuaccccggcgacuucaucgacuacgaggagcuccgcgagcagcucuccuccgucuccuccuucgagcgcuucgagaucuuccccaagaccuccuccuggcccaaccacgacuccaacaagggcgucaccgccgccugcccccacgccggcgccaaguccuucuacaagaaccucaucuggcucgucaagaagggcaacuccuaccccaagcucuccaaguccuacaucaacgacaagggcaaggagguccucguccucuggggcauccaccaccccuccaccuccgccgaccagcagucccucuaccagaacgccgacgccuacgucuucgucggcaccucccgcuacuccaagaaguucaagcccgagaucgccauccgccccaagguccgcgaccaggagggccgcaugaacuacuacuggacccucgucgagcccggcgacaagaucaccuucgaggccaccggcaaccucgucgucccccgcuacgccuucgccauggagcgcaacgccggcuccggcaucaucaucuccgacacccccguccacgacugcaacaccaccugccagacccccaagggcgccaucaacaccucccuccccuuccagaacauccaccccaucaccaucggcaagugccccaaguacaucaaguccaccaagcuccgccucgccaccggccuccgcaacguccccuccauccagucccgcggccucuucggcgccaucgccggcuucaucgagggcggcuggaccggcauggucgacggcugguacggcuaccaccaccagaacgagcagggcuccggcuacgccgccgaccucaaguccacccagcacgccaucgacgagaucaccaacaaggucaacuccgucaucgagaagaugaacacccaguucaccgccgucggcaaggaguucaaccaccucgagaagcgcaucgagaaccucaacaagaaggucgacgacggcuuccucgacaucuggaccuacaacgccgagcuccucguccuccucgagaacgagcgcacccucgacuaccacgacuccaacgucaagaaccucuacgagaagguccgcucccagcucaagaacaacgccaaggagaucggcaacggcugcuucgaguucuaccacaagugcgacaacaccugcauggaguccgucaagaacggcaccuacgacuaccccaaguacuccgaggaggccaagcucaaccgcgaggagaucgacggcgucaagcucgaguccacccgcaucuaccagauccucgccaucuacuccaccgucgccuccucccucguccucgucgucucccucggcgccaucuccuucuggaugugcuccaacggcucccuccagugccgcaucugcaucuga

SEQ ID NO: 103500 - RNA, 1701 nt, Artificial Sequence; identical to SEQ ID NO: 103474
  derived and/or modified CDS sequence (opt2) from hemagglutinin__InfluenzaA__AEO01375

SEQ ID NO: 103501 - RNA, 1701 nt, Artificial Sequence; identical to SEQ ID NO: 98705
  derived and/or modified CDS sequence (opt2) from hemagglutinin__InfluenzaA__AEO01376

SEQ ID NO: 103502 - RNA, 1701 nt, Artificial Sequence; identical to SEQ ID NO: 100873
  derived and/or modified CDS sequence (opt2) from hemagglutinin__InfluenzaA__AEO01377

SEQ ID NO: 103503 - RNA, 1701 nt, Artificial Sequence
  derived and/or modified CDS sequence (opt2) from hemagglutinin__InfluenzaA__AEO01378
augaaggccauccucgucguccuccucuacaccuucgccaccgccaacgccgacacccucugcaucggcuaccacgccaacaacuccaccgacaccgucgacaccguccucgagaagaacgucaccgucacccacuccgucaaccuccucgaggacaagcacaacggcaagcucugcaagcuccgcggcgucgccccccuccaccucggcaagugcaacaucgccggcuggauccucggcaaccccgagugcgagucccucuccaccgccuccuccugguccuacaucgucgagacccccuccuccgacaacggcaccugcuaccccggcgacuucaucgacuacgaggagcuccgcgagcagcucuccuccgucuccuccuucgagcgcuucgagaucuuccccaagaccuccuccuggcccaaccacgacuccaacaagggcgucaccgccgccugcccccacgccggcgccaaguccuucuacaagaaccucaucuggcucgucaagaagggcaacuccuaccccaagcucuccaaguccuacaucaacgacaagggcaaggagguccucguccucuggggcauccaccaccccuccaccuccgccgaccagcagucccucuaccagaacgccgacgccuacgucuucgucggcaccucccgcuacuccaagaaguucaagcccgagaucgccauccgccccaagguccgcgaccaggagggccgcaugaacuacuacuggacccucgucgagcccggcgacaagaucaccuucgaggccaccggcaaccucgucgucccccgcuacgccuucgccauggagcgcaacgccggcuccggcaucaucaucuccgacacccccguccacgacugcaacaccaccugccagacccccaagggcgccaucaacaccucccuccccuuccagaacauccaccccaucaccaucggcaagugccccaaguacgucaaguccaccaagcuccgccucgccaccggccuccgcaacguccccuccauccagucccgcggccucuucggcgccaucgccggcuucaucgagggcggcuggaccggcauggucgacggcugguacggcuaccaccaccagaacgagcagggcuccggcuacgccgccgaccucaaguccacccagaacgccaucgacgagaucaccaacaaggucaacuccgucaucgagaagaugaacacccaguucaccgccgucggcaaggaguucaaccaccucgagaagcgcaucgagaaccucaacaagaaggucgacgacggcuuccucgacaucuggaccuacaacgccgagcuccucguccuccucgagaacgagcgcacccucgacuaccacgacuccaacgucaagaaccucuacgagaagguccgcucccagcucaagaacaacgccaaggagaucggcaacggcugcuucgaguucuaccacaagugcgacaacaccugcauggaguccgucaagaacggcaccuacgacuaccccaaguacuccgaggaggccaagcucaaccgcgaggagaucgacggcgucaagcucgaguccacccgcaucuaccagauccucgccaucuacuccaccgucgccuccucccucguccucgucgucucccucggcgccaucuccuucuggaugugcuccaacggcucccuccagugccgcaucugcaucuga

SEQ ID NO: 103504 - RNA, 1701 nt, Artificial Sequence; identical to SEQ ID NO: 99869
  derived and/or modified CDS sequence (opt2) from hemagglutinin__InfluenzaA__AEO01379

SEQ ID NO: 103505 - RNA, 1701 nt, Artificial Sequence; identical to SEQ ID NO: 103474
  derived and/or modified CDS sequence (opt2) from hemagglutinin__InfluenzaA__AEO01380

SEQ ID NO: 103506 - RNA, 1701 nt, Artificial Sequence; identical to SEQ ID NO: 103474
  derived and/or modified CDS sequence (opt2) from hemagglutinin__InfluenzaA__AEO01381

SEQ ID NO: 103507 - RNA, 1701 nt, Artificial Sequence; identical to SEQ ID NO: 99869
  derived and/or modified CDS sequence (opt2) from hemagglutinin__InfluenzaA__AEO01382

SEQ ID NO: 103508 - RNA, 1701 nt, Artificial Sequence; identical to SEQ ID NO: 100302
  derived and/or modified CDS sequence (opt2) from hemagglutinin__InfluenzaA__AEO01383

SEQ ID NO: 103509 - RNA, 1701 nt, Artificial Sequence
  derived and/or modified CDS sequence (opt2) from hemagglutinin__InfluenzaA__AEO01384
augaaggccauccucgucguccuccucuacaccuucgccaccgccaacgccgacacccucugcaucggcuaccacgccaacaacuccaccgacaccgucgacaccguccucgagaagaacgucaccgucacccacuccgucaaccuccucgaggacaagcacaacggcaagcucugcaagcuccgcggcgucuccccccuccaccucggcaagugcaacaucgccggcuggauccucggcaaccccgagugcgagucccucuccaccgccuccuccugguccuacaucgucgagaccuccuccuccgacaacggcaccugcuaccccggcgacuucaucgacuacgaggagcuccgcgagcagcucuccuccgucuccuccuucgagcgcuucgagaucuuccccaagaccuccuccuggcccaaccacgacuccaacaagggcgucaccgccgccugcccccacgccggcgccaaguccuucuacaagaaccucaucuggcucgucaagaagggcaacuccuaccccaagcucuccaaguccuacaucaacgacaagggcaaggagguccucguccucuggggcauccaccaccccuccaccuccgccgaccagcagucccucuaccagaacgccgacgccuacgucuucgucggcaccucccgcuacuccaagaaguucaagcccgagaucgccauccgccccaagguccgcgaccaggagggccgcaugaacuacuacuggacccucgucgagcccggcgacaagaucaccuucgaggccaccggcaaccucgucgucccccgcuacgccuucgccauggagcgcaacgccggcuccggcaucaucaucuccgacacccccguccacgacugcaacaccaccugccagacccccaagggcgccaucaacaccucccuccccuuccagaacauccaccccaucaccaucggcaagugccccaaguacgucaaguccaccaagcuccgccucgccaccggccuccgcaacguccccuccauccagucccgcggccucuucggcgccaucgccggcuucaucgagggcggcuggaccggcauggucgacggcugguacggcuaccaccaccagaacgagcagggcuccggcuacgccgccgaccucaaguccacccagaacgccaucgacgagaucaccaacaaggucaacuccgucaucgagaagaugaacacccaguucaccgccgucggcaaggaguucaaccaccucgagaagcgcaucgagaaccucaacaagaaggucgacgacggcuuccucgacaucuggaccuacaacgccgagcuccucguccuccucgagaacgagcgcacccucgacuaccacgacuccaacgucaagaaccucuacgagaagguccgcucccagcucaagaacaacgccaaggagaucggcaacggcugcuucgaguucuaccacaagugcgacaacaccugcauggaguccgucaagaacggcaccuacgacuaccccaaguacuccgaggaggccaagcucaaccgcgaggagaucgacggcgucaagcucgaguccacccgcaucuaccagauccucgccaucuacuccaccgucgccuccucccucguccucgucgucucccucggcgccaucuccuucuggaugugcuccaacggcucccuccagugccgcaucugcaucuga

SEQ ID NO: 103510 - RNA, 1701 nt, Artificial Sequence
  derived and/or modified CDS sequence (opt2) from hemagglutinin__InfluenzaA__AEO01385
augaaggccauccucgucguccuccucuacaccuucgccaccgccaacgccgacacccucugcaucggcuaccacgccaacaacuccaccgacaccgucgacaccguccucgagaagaacgucaccgucacccacuccgucaacauccucgaggacaagcacaacggcaagcucugcaagcuccgcggcgucgccccccuccaccucggcaagugcaacaucgccggcuggauccucggcaaccccgagugcgagucccucuccaccgccuccuccugguccuacaucgucgagaccuccuccuccgacaacggcaccugcuaccccggcgacuucaucgacuacgaggagcuccgcgagcagcucuccuccgucuccuccuucgagcgcuucgagaucuuccccaagaccuccuccuggcccaaccacgacuccaacaagggcgucaccgccgccugcccccacgccggcgccaaguccuucuacaagaaccucaucuggcucgucaagaagggcaacuccuaccccaagcucuccaaguccuacaucaacgacaagggcaaggagguccucguccucuggggcauccaccaccccuccaccuccgccgaccagcagucccucuaccagaacgccaacgccuacgucuucgucggcaccucccgcuacuccaagaaguucaagcccgagaucgccauccgccccaagguccgcgaccaggagggccgcaugaacuacuacuggacccucgucgagcccggcgacaagaucaccuucgaggccaccggcaaccucgucgucccccgcuacgccuucgccauggagcgcaacgccggcuccggcaucaucaucuccgacacccccguccacgacugcaacaccaccugccagacccccaagggcgccaucaacaccucccuccccuuccagaacauccaccccaucaccaucggcaagugccccaaguacgucaaguccaccaagcuccgccucgccaccggccuccgcaacguccccuccauccagucccgcggccucuucggcgccaucgccggcuucaucgagggcggcuggaccggcauggucgacggcugguacggcuaccaccaccagaacgagcagggcuccggcuacgccgccgaccucaaguccacccagaacgccaucgacgagaucaccaacaaggucaacuccgucaucgagaagaugaacacccaguucaccgccgucggcaaggaguucaaccaccucgagaagcgcaucgagaaccucaacaagaaggucgacgacggcuuccucgacaucuggaccuacaacgccgagcuccucguccuccucgagaacgagcgcacccucgacuaccacgacuccaacgucaagaaccucuacgagaagguccgcucccagcucaagaacaacgccaaggagaucggcaacggcugcuucgaguucuaccacaagugcgacaacaccugcauggaguccgucaagaacggcaccuacgacuaccccaaguacuccgaggaggccaagcucaaccgcgaggagaucgacggcgucaagcucgaguccacccgcaucuaccagauccucgccaucuacuccaccgucgccuccucccucguccucgucgucucccucggcgccaucuccuucuggaugugcuccaacggcucccuccagugccgcaucugcaucuga

SEQ ID NO: 103511 - RNA, 1701 nt, Artificial Sequence; identical to SEQ ID NO: 103414
  derived and/or modified CDS sequence (opt2) from hemagglutinin__InfluenzaA__AEO01386

SEQ ID NO: 103512 - RNA, 1701 nt, Artificial Sequence
  derived and/or modified CDS sequence (opt2) from hemagglutinin__InfluenzaA__AEO01387
augaaggccauccucgucguccuccucuacaccuucgccaccgccaacgccgacacccucugcaucggcuaccacgccaacaacuccaccgacaccgucgacaccguccucgagaagaacgucaccgucacccacuccgucaacauccucgaggacaagcacaacggcaagcucugcaagcuccgcggcgucgccccccuccaccucggcaagugcaacaucgccggcuggauccucggcaaccccgagugcgagucccucuccaccgccuccuccugguccuacaucgucgagaccuccuccuccgacaacggcaccugcuaccccggcgacuucaucgacuacgaggagcuccgcgagcagcucuccuccgucuccuccuucgagcgcuucgagaucuuccccaagaccuccuccuggcccaaccacgacuccaacaagggcgucaccgccgccugcccccacgccggcgccaaguccuucuacaagaaccucaucuggcucgucaagaagggcaacuccuaccccaagcucuccaaguccuacaucaacgacaagggcaaggagguccucguccucuggggcauccaccaccccuccaccuccgccgaccagcagucccucuaccagaacgccgacgccuacgucuucgucggcaccucccgcuacuccaagaaguucaagcccgagaucgccauccgccccaagguccgcgaccaggagggccgcaugaacuacuacuggacccucgucgagcccggcgacaagaucaccuucgaggccaccggcaaccucgucgucccccgcuacgccuucgccauggagcgcaacgccggcuccggcaucaucaucuccgacacccccguccacgacugcaacaccaccugccagacccccaagggcgccaucaacaccucccuccccuuccagaacauccaccccaucaccaucggcaagugccccaaguacgucaaguccaccaagcuccgccucgccaccggccuccgcaacguccccuccauccagucccgcggccucuucggcgccaucgccggcuucaucgagggcggcuggaccggcauggucgacggcugguacggcuaccaccaccagaacgagcagggcuccggcuacgccgccgaccucaaguccacccagaacgccaucgacgagaucaccaacaaggucaacuccgucaucgagaagaugaacauccaguucaccgccgucggcaaggaguucaaccaccucgagaagcgcaucgagaaccucaacaagaaggucgacgacggcuuccucgacaucuggaccuacaacgccgagcuccucguccuccucgagaacgagcgcacccucgacuaccacgacuccaacgucaagaaccucuacgagaagguccgcucccagcucaagaacaacgccaaggagaucggcaacggcugcuucgaguucuaccacaagugcgacaacaccugcauggaguccgucaagaacggcaccuacgacuaccccaaguacuccgaggaggccaagcucaaccgcgaggagaucgacggcgucaagcucgaguccacccgcaucuaccagauccucgccaucuacuccaccgucgccuccucccucguccucgucgucucccucggcgccaucuccuucuggaugugcuccaacggcucccuccagugccgcaucugcaucuga

SEQ ID NO: 103513 - RNA, 1701 nt, Artificial Sequence
  derived and/or modified CDS sequence (opt2) from hemagglutinin__InfluenzaA__AEO01388
augaaggccauccucgucguccuccucuacaccuucgccaccgccaacgccgacacccucugcaucggcuaccacgccaacaacuccaccgacaccgucgacaccguccucgagaagaacgucaccgucacccacuccgucaaccuccucgaggacaagcacaacggcaagcucugcaagcuccgcggcgucgccccccuccaccucggcaagugcaacaucgccggcuggauccucggcaaccccgagugcgagucccucuccaccgccuccuccugguccuacaucgucgagaccuccuccuccgacaacggcaccugcuaccccggcgacuucaucgacuacgaggagcuccgcgagcagcucuccuccgucuccuccuucgagaaguucgagaucuuccccaagaccuccuccuggcccaaccacgacuccaacaagggcgucaccgccgccugcccccacgccggcgccaaguccuucuacaagaaccucaucuggcucgucaagaagggcaacuccuaccccaagcucuccaaguccuacaucaacgacaagggcaaggagguccucguccucuggggcauccaccaccccuccaccuccgccgaccagcagucccucuaccagaacgccgacgccuacgucuucgucggcaccucccgcuacuccaagaaguucaagcccgagaucgccauccgccccaagguccgcgaccaggagggccgcaugaacuacuacuggacccucgucgagcccggcgacaagaucaccuucgaggccaccggcaaccucgucgucccccgcuacgccuucgccauggagcgcaacgccggcuccggcaucaucaucuccgacacccccguccacgacugcaacaccaccugccagacccccaagggcgccaucaacaccucccuccccuuccagaacauccaccccaucaccaucggcaagugccccaaguacgucaaguccaccaagcuccgccucgccaccggccuccgcaacguccccuccauccagucccgcggccucuucggcgccaucgccggcuucaucgagggcggcuggaccggcauggucgacggcugguacggcuaccaccaccagaacgagcagggcuccggcuacgccgccgaccucaaguccacccagaacgccaucgacaagaucaccaacaaggucaacuccgucaucgagaagaugaacacccaguucaccgccgucggcaaggaguucaaccaccucgagaagcgcaucgagaaccucaacaagaaggucgacgacggcuuccucgacaucuggaccuacaacgccgagcuccucguccuccucgagaacgagcgcacccucgacuaccacgacuccaacgucaagaaccucuacgagaagguccgcucccagcucaagaccaacgccaaggagaucggcaacggcugcuucgaguucuaccacaagugcgacaacaccugcauggaguccgucaagaacggcaccuacgacuaccccaaguacuccgaggaggccaagcucaaccgcgaggagaucgacggcgucaagcucgaguccacccgcaucuaccagauccucgccaucuacuccaccgucgccuccucccucguccucgucgucucccucggcgccaucuccuucuggaugugcuccaacggcucccuccagugccgcaucugcaucuga

SEQ ID NO: 103514 - RNA, 1701 nt, Artificial Sequence
  derived and/or modified CDS sequence (opt2) from hemagglutinin__InfluenzaA__AEO01389
augaaggccauccucgucguccuccucuacaccuucgccaccgccaacgccgacacccucugcaucggcuaccacgccaacaacuccaccgacaccgucgacaccguccucgagaagaacgucaccgucacccacuccgucaaccuccucgaggacaagcacaacggcaagcucugcaagcuccgcggcgucgccccccuccaccucggcaagugcaacaucgccggcuggauccucggcaaccccgagugcgagucccucuccaccgccuccuccugguccuacaucgucgagaccuccuccuccgacaacggcaccugcuaccccggcgacuucaucgacuacgaggagcuccgcgagcagcucuccuccgucuccuccuucgagcgcuucgagaucuuccccaagaccuccuccuggcccaaccacgacuccaacaagggcgucaccgccgccugcccccacgccggcaccaaguccuucuacaagaaccucaucuggcucgucaagaagggcaacuccuaccccaagcucuccaaguccuacaucaacgacaagggcaaggagguccucguccucuggggcauccaccaccccuccaccuccgccgaccagcagucccucuaccagaacgccgacgccuacgucuucgucggcaccucccgcuacuccaagaaguucaagcccgagaucgccauccgccccaagguccgcgaccaggagggccgcaugaacuacuacuggacccucgucgagcccggcgacaagaucaccuucgaggccaccggcaaccucgucgucccccgcuacgccuucgccauggagcgcaacgccggcuccggcaucaucaucuccgacacccccguccacgacugcaacaccaccugccagacccccaagggcgccaucaacaccucccuccccuuccagaacauccaccccaucaccaucggcaagugccccaaguacgucaaguccaccaagcuccgccucgccaccggccuccgcaacguccccuccauccagucccgcggccucuucggcgccaucgccggcuucaucgagggcggcuggaccggcauggucgacggcugguacggcuaccaccaccagaacgagcagggcuccggcuacgccgccgaccucaaguccacccagaacgccaucgacaagaucaccaacaaggucaacuccgucaucgagaagaugaacacccaguucaccgccgucggcaaggaguucaaccaccucgagaagcgcaucgagaaccucaacaagaaggucgacgacggcuuccucgacaucuggaccuacaacgccgagcuccucguccuccucgagaacgagcgcacccucgacuaccacgacuccaacgucaagaaccucuacgagaagguccgcucccagcucaagaacaacgccaaggagaucggcaacggcugcuucgaguucuaccacaagugcgacaacaccugcauggaguccgucaagaacggcaccuacgacuaccccaaguacuccgaggaggccaagcucaaccgcgaggagaucgacggcgucaagcucgaguccacccgcaucuaccagauccucgccaucuacuccaccgucgccuccucccucguccucgucgucucccucggcgccaucuccuucuggaugugcuccaacggcucccuccagugccgcaucugcaucuga

SEQ ID NO: 103515 - RNA, 1701 nt, Artificial Sequence
  derived and/or modified CDS sequence (opt2) from hemagglutinin__InfluenzaA__AEO01390
augaaggccauccucgucguccuccucuacaccuucgccaucgccaacgccgacacccucugcaucggcuaccacgccaacaacuccaccgacaccgucgacaccguccucgagaagaacgucaccgucacccacuccgucaaccuccucgaggacaagcacaacggcaagcucugcaagcuccgcggcgucgccccccuccaccucggcaagugcaacaucgccggcuggauccucggcaaccccgagugcgagucccucuccaccgccuccuccugguccuacaucgucgagaccuccuccuccgacaacggcaccugcuaccccggcgacuucaucgacuacgaggagcuccgcgagcagcucuccuccgucuccuccuucgagcgcuucgagaucuuccccaagaccuccuccuggcccaaccacgacuccaacaagggcgucaccgccgccugcccccacgccggcgccaaguccuucuacaagaaccucaucuggcucgucaagaagggcaacuccuaccccaagcucuccaaguccuacaucaacgacaagggcaaggagguccucguccucuggggcauccaccaccccuccaccuccgccgaccagcagucccucuaccagaacgccgacgccuacgucuucgucgagaccucccgcuacuccaagaaggucaagcccgagaucgccauccgcccccgcguccgcgaccaggagggccgcaugaacuacuacuggacccucgucgagcccggcgacaagaucaccuucgaggccaccggcaaccucgucgucccccgcuacgccuucgccauggagcgcaacgccggcuccggcaucaucaucuccgacacccccguccacgacugcaacaccaccugccagacccccaagggcgccaucaacaccucccuccccuuccagaacauccaccccaucaccaucggcaagugccccaaguacgucaaguccaccaagcuccgccucgccaccggccuccgcaacguccccuccauccagucccgcggccucuucggcgccaucgccggcuucaucgagggcggcuggaccggcauggucgacggcugguacggcuaccaccaccagaacgagcagggcuccggcuacgccgccgaccucaaguccacccagcacgccaucgacgagaucaccaacaaggucaacuccgucaucgagaagaugaacacccaguucaccgccgucggcaaggaguucaaccaccucgagaagcgcaucgagaaccucaacaagaaggucgacgacggcuuccucgacaucuggaccuacaacgccgagcuccucguccuccucgagaacgagcgcacccucgacuaccacgacuccaacgucaagaaccucuacgagaagguccgcucccagcucaagaacaacgccaaggagaucggcaacggcugcuucgaguucuaccacaagugcgacaacaccugcauggaguccgucaagaacggcaccuacgacuaccccaaguacuccgaggucgccaagcucaaccgcgaggagaucaacggcgucaagcucgaguccacccgcaucuaccagauccucgccaucuacuccaccgucgccuccucccucguccucgucgucucccucggcgccaucuccuucuggaugugcuccaacggcucccuccagugccgcaucugcaucuga

SEQ ID NO: 103516 - RNA, 1701 nt, Artificial Sequence; identical to SEQ ID NO: 103414
  derived and/or modified CDS sequence (opt2) from hemagglutinin__InfluenzaA__AEO01391

SEQ ID NO: 103517 - RNA, 1701 nt, Artificial Sequence; identical to SEQ ID NO: 103423
  derived and/or modified CDS sequence (opt2) from hemagglutinin__InfluenzaA__AEO01392

SEQ ID NO: 103518 - RNA, 1701 nt, Artificial Sequence; identical to SEQ ID NO: 100302
  derived and/or modified CDS sequence (opt2) from hemagglutinin__InfluenzaA__AEO01393

SEQ ID NO: 103519 - RNA, 1701 nt, Artificial Sequence; identical to SEQ ID NO: 99806
  derived and/or modified CDS sequence (opt2) from hemagglutinin__InfluenzaA__AEO01394

SEQ ID NO: 103520 - RNA, 1701 nt, Artificial Sequence
  derived and/or modified CDS sequence (opt2) from hemagglutinin__InfluenzaA__AEO01395
augaaggccauccucgucguccuccucuacaccuucgccaccgccaacgccgacacccucugcaucggcuaccacgccaacaacuccaccgacaccgucgacaccguccucgagaagaacgucaccgucacccacuccgucaaccuccucgaggacaagcacaacggcaagcucugcaagcuccgcggcgucgccccccuccaccucggcaagugcaacaucgccggcuggauccucggcaaccccgagugcgagucccucuccaccgccuccuccugguccuacaucgucgagaccuccuccuccgacaacggcaccugcuaccccggcgacuuccucgacuacgaggagcuccgcgagcagcucuccuccgucuccuccuucgagcgcuucgagaucuuccccaagaccuccuccuggcccaaccacgacuccaacaagggcgucaccgccgccugcccccacgccggcgccaaguccuucuacaagaaccucaucuggcucgucaagaagggcaacuccuaccccaagcucuccaaguccuacaucaacgacaagggcaaggagguccucguccucuggggcauccaccaccccuccaccuccgccgaccagcagucccucuaccagaacgccgacgccuacgucuucgucggcaccucccgcuacuccaagaaguucaagcccgagaucgccauccgccccaagguccgcgagcaggagggccgcaugaacuacuacuggacccucgucgagcccggcgacaagaucaccuucgaggccaccggcaaccucgucgucccccgcuacgccuucgccauggagcgcaacgccggcuccggcaucaucaucuccgacacccccguccacgacugcaacaccaccugccagacccccaagggcgccaucaacaccucccuccccuuccagaacauccaccccaucaccaucggcaagugccccaaguacgucaaguccaccaagcuccgccucgccaccggccuccgcaacguccccuccauccagucccgcggccucuucggcgccaucgccggcuucaucgagggcggcuggaccggcauggucgacggcugguacggcuaccaccaccagaacgagcagggcuccggcuacgccgccgaccucaaguccacccagaacgccaucgacgagaucaccaacaaggucaacuccgucaucgagaagaugaacacccaguucaccgccgucggcaaggaguucaaccaccucgagaagcgcaucgagaaccucaacaagaaggucgacgacggcuuccucgacaucuggaccuacaacgccgagcuccucguccuccucgagaacgagcgcacccucgacuaccacgacuccaacgucaagaaccucuacgagaagguccgcucccagcucaagaacaacgccaaggagaucggcaacggcugcuucgaguucuaccacaagugcgacaacaccugcauggaguccgucaagaacggcaccuacgacuaccccaaguacuccgaggaggccaagcucaaccgcgaggagaucgacggcgucaagcucgaguccacccgcaucuaccagauccucgccaucuacuccaccgucgccuccucccucguccucgucgucucccucggcgccaucuccuucuggaugugcuccaacggcucccuccagugccgcaucugcaucuga

SEQ ID NO: 103521 - RNA, 1701 nt, Artificial Sequence; identical to SEQ ID NO: 99806
  derived and/or modified CDS sequence (opt2) from hemagglutinin__InfluenzaA__AEO01396

SEQ ID NO: 103522 - RNA, 1701 nt, Artificial Sequence
  derived and/or modified CDS sequence (opt2) from hemagglutinin__InfluenzaA__AEO01397
augaaggccauccucgucguccuccucuacaccuucgccaccgccaacgccgacacccucugcaucggcuaccacgccaacaacuccaccgacaccgucgacaccguccucgagaagaacgucaccgucacccacuccgucaacauccucgaggacaagcacaacggcaagcucugcaagcuccgcggcgucgccccccuccaccucggcaagugcaacaucgccggcuggauccucggcaaccccgagugcgagucccucuccaccgccuccuccugguccuacaucgucgagaccuccuccuccgacaacggcaccugcuaccccggcgacuucaucgacuacgaggagcuccgcgagcagcucuccuccgucuccuccuucgagcgcuucgagaucuuccccaagaccuccuccuggcccaaccacgacuccaacaagggcgucaccgccgccugcccccacgccggcgccaaguccuucuacaagaaccucaucuggcucgucaagaagggcaacuccuaccccaagcucuccaaguccuacaucaacgacaagggcaaggagguccucguccucuggggcauccaccaccccuccaccuccgccgaccagcagucccucuaccagaacaccgacgccuacgucuucgucggcaccucccgcuacuccaagaaguucaagcccgagaucgccauccgccccaagguccgcgaccaggagggccgcaugaacuacuacuggacccucgucgagcccggcgacaagaucaccuucgaggccaccggcaaccucgucgucccccgcuacgccuucgccauggagcgcaacgccggcuccggcaucaucaucuccgacacccccguccacgacugcaacaccaccugccagacccccaagggcgccaucaacaccucccuccccuuccagaacauccaccccaucaccaucggcaagugccccaaguacgucaaguccaccaagcuccgccucgccaccggccuccgcaacguccccuccauccagucccgcggccucuucggcgccaucgccggcuucaucgagggcggcuggaccggcauggucgacggcugguacggcuaccaccaccagaacgagcagggcuccggcuacgccgccgaccucaaguccacccagaacgccaucgacgagaucaccaacaaggucaacuccgucaucgagaagaugaacacccaguucaccgccgucggcaaggaguucaaccaccucgagaagcgcaucgagaaccucaacaagaaggucgacgacggcuuccucgacaucuggaccuacaacgccgagcuccucguccuccucgagaacgagcgcacccucgacuaccacgacuccaacgucaagaaccucuacgagaagguccgcucccagcucaagaacaacgccaaggagaucggcaacggcugcuucgaguucuaccacaagugcgacaacaccugcauggaguccgucaagaacggcaccuacgacuaccccaaguacuccgaggaggccaagcucaaccgcgaggagaucgacggcgucaagcucgaguccacccgcaucuaccagauccucgccaucuacuccaccgucgccuccucccucguccucgucgucucccucggcgccaucuccuucuggaugugcuccaacggcucccuccagugccgcaucugcaucuga

SEQ ID NO: 103523 - RNA, 1701 nt, Artificial Sequence
  derived and/or modified CDS sequence (opt2) from hemagglutinin__InfluenzaA__AEO01398
augaaggccauccucgucguccuccucuacaccuucgccaccgccaacgccgacacccucugcaucggcuaccacgccaacaacuccaccgacaccgucgacaccguccucgagaagaacgucaccgucacccacuccgucaaccuccucgaggacaagcacaacggcaagcucugcaagcuccgcggcgucgccccccuccaccucggcaagugcaacaucgccggcuggauccucggcaaccccgagugcgagucccucuccaccgccuccuccugguccuacaucgucgagaccuccuccuccgacaacggcaccugcuaccccggcgacuucaucgacuacgaggagcuccgcgagcagcucuccuccgucuccuccuucgagcgcuucgagaucuuccccaagaccuccuccuggcccaaccacgacuccaacaagggcgucaccgccgccugcccccacgccggcgccaaguccuucuacaagaaccucaucuggcucgucaagaagggcaacuccuaccccaagcucuccaaguccuacaucaacgacaagggcaaggagguccucguccucuggggcauccaccaccccuccaccuccgccgaccagcagucccucuaccagaacgccgacgccaacgucuucgucggcaccucccgcuacuccaagaaguucaagcccgagaucgccauccgccccaagguccgcggccaggagggccgcaugaacuacuacuggacccucgucgagcccggcgacaagaucaccuucgaggccaccggcaaccucgucgucccccgcuacgccuucgccauggagcgcaacgccggcuccggcaucaucaucuccgacacccccguccacgacugcaacaccaccugccagacccccaagggcgccaucaacaccucccuccccuuccagaacauccaccccaucaccaucggcaagugccccaaguacgucaaguccaccaagcuccgccucgccaccggccuccgcaacguccccuccauccagucccgcggccucuucggcgccaucgccggcuucaucgagggcggcuggaccggcauggucgacggcugguacggcuaccaccaccagaacgagcagggcuccggcuacgccgccgaccucaaguccacccagaacgccaucgacgagaucaccaacaaggucaacuccgucaucgagaagaugaacacccaguucaccgccgucggcaaggaguucaaccaccucgagaagcgcaucgagaaccucaacaagaaggucgacgacggcuuccucgacaucuggaccuacaacgccgagcuccucguccuccucgagaacgagcgcacccucgacuaccacgacuccaacgucaagaaccucuacgagaagguccgcaaccagcucaagaacaacgccaaggagaucggcaacggcugcuucgaguucuaccacaagugcgacaacaccugcauggaguccgucaagaacggcaccuacgacuaccccaaguacuccgaggaggccaagcucaaccgcgaggagaucgacggcgucaagcucgaguccacccgcaucuaccagauccucgccaucuacuccaccgucgccuccucccucguccucgucgucucccucggcgccaucuccuucuggaugugcuccaacggcucccuccagugccgcaucugcaucuga

SEQ ID NO: 103524 - RNA, 1701 nt, Artificial Sequence; identical to SEQ ID NO: 103423
  derived and/or modified CDS sequence (opt2) from hemagglutinin__InfluenzaA__AEO01399

SEQ ID NO: 103525 - RNA, 1701 nt, Artificial Sequence; identical to SEQ ID NO: 98705
  derived and/or modified CDS sequence (opt2) from hemagglutinin__InfluenzaA__AEO01402

SEQ ID NO: 103526 - RNA, 1701 nt, Artificial Sequence; identical to SEQ ID NO: 99869
  derived and/or modified CDS sequence (opt2) from hemagglutinin__InfluenzaA__AEO01403

SEQ ID NO: 103527 - RNA, 1701 nt, Artificial Sequence; identical to SEQ ID NO: 98705
  derived and/or modified CDS sequence (opt2) from hemagglutinin__InfluenzaA__AEO01404

SEQ ID NO: 103528 - RNA, 1701 nt, Artificial Sequence
  derived and/or modified CDS sequence (opt2) from hemagglutinin__InfluenzaA__AEO01405
augaaggccauccucgucguccuccucuacaccuucgccaccgccaacgccgacacccucugcaucggcuaccacgccaacaacuccaccgacaccgucgacaccguccucgagaagaacgucaccgucacccacuccgucaaccuccucgaggacaagcacaacggcaagcucugcaagcuccgcggcgucgccccccuccaccucggcaagugcaacaucgccggcuggauccucggcaaccccgagugcgagucccucuccaccgccuccuccugguccuacaucgucgagaccuccuccuccgacaacggcaccugcuaccccggcgacuucaucgacuacgaggagcuccgcgagcagcucuccuccgucuccuccuucgagcgcuucgagaucuuccccaagaccuccuccuggcccaaccacgacuccaacaagggcgucaccgccgccugcccccacgccggcgccaaguccuucuacaagaaccucaucuggcucgucaagaagggcaacuccuaccccaagcucuccaaguccuacaucaacgacaagggcaaggagguccucguccucuggggcauccaccaccccuccaccuccgccgaccagcagucccucuaccagaacgccgacgccuacgucuucgucggcaccucccgcuacuccaagaaguucaagcccgagaucgccauccgccccaagguccgcgaccaggagggccgcaugaacuacuacuggacccucgucgagcccggcgacaagaucaccuucgaggccaccggcaaccucgucgucccccgcuacgccuucgccauggagcgcaacgccggcuccggcaucaucaucuccgacacccccguccacgacugcaacaccaccugccagacccccaagggcgccaucaacaccucccuccccuuccagaacauccaccccaucaccaucggcaagugccccaaguacgucaaguccaccaagcuccgccucgccaccggccuccgcaacguccccuccauccagucccgcggccucuucggcgccaucgccggcuucaucgagggcggcuggaccggcauggucgacggcugguacggcuaccaccaccagaacgagcagggcuccggcuacgccgccgaccucaaguccacccagaacgccaucgacgagaucaccaacaaggucaacuccgucaucgagaagaugaacacccaguucaccgccgucggcaaggaguucaaccaccucgagaagcgcaucgagaaccucaacaagaaggucgacgacggcuuccucgacaucuggaccuacaacgccgagcuccucguccuccucgagaacgagcgcacccucgacuaccacgacuccaacgucaagaaccucuacgagaagguccgcucccagcucaagaacaacgccaaggagaucggcaacggcugcuucgaguucuaccacaagugcgacaacaccugcauggaguccgucaagaacggcaccuacgacuaccccaaguacuccgaggaggccaagcucaaccgcgaggagaucgacggcgucaagcucgaguccaccaugaucuaccagauccucgccaucuacuccaccgucgccuccucccucguccucgucgucucccucggcgccaucuccuucuggaugugcuccaacggcucccuccagugccgcaucugcaucuga

SEQ ID NO: 103529 - RNA, 1701 nt, Artificial Sequence
  derived and/or modified CDS sequence (opt2) from hemagglutinin__InfluenzaA__AEO01407
augaaggccauccucgucguccuccucuacaccuucgccaccgccaacgccgacacccucugcaucggcuaccacgccaacaacuccaccgacaccgucgacaccguccucgagaagaacgucaccgucacccacuccgucaaccuccucgaggacaagcacaacggcaagcucugcaagcuccgcggcgucgccccccuccaccucggcaagugcaacaucgccggcuggauccucggcaaccccgagugcgagucccucuccaccgccuccuccugguccuacaucgucgagaccuccuccuccgacaacggcaccugcuaccccggcgacuucaucgacuacgaggagcuccgcgagcagcucuccuccgucuccuccuucgagcgcuucgagaucuuccccaagaccuccuccuggcccaaccacgacuccaacaagggcgucaccgccgccugcccccacgccggcgccaaguccuucuacaagaaccucaucuggcucgucaagaagggcaacuccuaccccaagcucuccaaguccuacaucaacgacaagggcaaggagguccucguccucuggggcauccaccaccccuccaccuccgccgaccagcagucccucuaccagaacgccgacgccuacgucuucgucggcaccucccgcuacuccaagaaguucaagcccgagaucgccauccgccccaagguccgcgaccaggagggccgcaugaacuacuacuggacccucgucgagcccggcgacaagaucaccuucgaggccaccggcaaccucgucgucccccgcuacgccuucgccauggagcgcaacgccggcuccggcaucaucaucuccgacacccccguccacgacugcaacaccaccugccagacccccaagggcgccaucaacaccucccuccccuuccagaacauccaccccaucaccaucggcaagugccccaaguacgucaaguccaccaagcuccgccucgccaccggccuccgcaacguccccuccauccagucccgcggccucuucggcgccaucgccggcuucaucgagggcggcuggaccggcauggucgacggcugguacggcuaccaccaccagaacgagcagggcuccggcuacgccgccgaccucaaguccacccagcacgccaucgacgagaucaccaacaaggucaacuccgucaucgagaagaugaacacccaguucaccgccgucggcaaggaguucaaccaccucgagaagcgcaucgagaaccucaacaagaaggucgacgacggcuuccucgacaucuggaccuacaacgccgagcuccucguccuccucgagaacgagcgcacccucgacuaccacgacuccaacgucaagaaccucuacgagaagguccgcucccagcucaagaacaacgccaaggagaucggcaacggcugcuucgaguucuaccacaagugcgacaacaccugcauggaguccgucaagaacggcaccuacgacuaccccaaguacuccgaggaggccaagcucaaccgcgaggagaucaacggcgucaagcucgaguccacccgcaucuaccagauccucgccaucuacuccaccgucgccuccucccucguccucgucgucucccucggcgccaucuccuucuggaugugcuccaacggcucccuccagugccgcaucugcaucuga

SEQ ID NO: 103530 - RNA, 1701 nt, Artificial Sequence
  derived and/or modified CDS sequence (opt2) from hemagglutinin__InfluenzaA__AEO01408
augaaggccauccucgucguccuccucuacaccuucgccaccgccaacgccgacacccucugcaucggcuaccacgccaacaacuccaccgacaccgucgacaccguccucgagaagaacgucaccgucacccacuccgucaaccuccucgaggacaagcacaacggcaagcucugcaagcuccgcggcgucgccccccuccaccucggcaagugcaacaucgccggcuggauccucggcaaccccgagugcgagucccucuccaccgccuccuccugguccuacaucgucgagaccuccuccuccgacaacggcaccugcuaccccggcgacuucaucgacuacgaggagcuccgcgagcagcucuccuccgucuccuccuucgagcgcuucgagaucuuccccaagaccuccuccuggcccaaccacgacuccaacaagggcgucaccgccgccugcccccacgccggcgccaaguccuucuacaagaaccucaucuggcucgucaagaagggcaacuccuaccccaagcucuccaaguccuacaucaacgacaagggcaaggagguccucguccucuggggcauccaccaccccuccaccuccgccgaccagcagucccucuaccagaacgccgacgccuacgucuucgucggcaccucccgcuacuccaagaaguucaagcccgagaucgccauccgccccaagguccgcgagcaggagggccgcaugaacuacuacuggacccucgucgagcccggcgacaagaucaccuucgaggccaccggcaaccucgucgucccccgcuacgccuucgccauggagcgcaacgccggcuccggcaucaucaucuccgacacccccguccacgacugcaacaccaccugccagacccccaagggcgccaucaacaccucccuccccuuccagaacauccaccccaucaccaucggcaagugccccaaguacgucaaguccaccaagcuccgccucgccaccggccuccgcaacguccccuccauccagucccgcggccucuucggcgccaucgccggcuucaucgagggcggcuggaccggcauggucgacggcugguacggcuaccaccaccagaacgagcagggcuccggcuacgccgccgaccucaaguccacccagaacgccaucgacgagaucaccaacaaggucaacuccgucaucgagaagaugaacacccaguucaccgccgucggcaaggaguucaaccaccucgagaagcgcaucgagaaccucaacaagaagaucgacgacggcuuccucgacaucuggaccuacaacgccgagcuccucguccuccucgagaacgagcgcacccucgacuaccacgacuccaacgucaagaaccucuacgagaagguccgcucccagcucaagaacaacgccaaggagaucggcaacggcugcuucgaguucuaccacaagugcgacaacaccugcauggaguccgucaagaacggcaccuacgacuaccccaaguacuccgaggaggccaagcucaaccgcgaggagaucgacggcgucaagcucgaguccacccgcaucuaccagauccucgccaucuacuccaccgucgccuccucccucguccucgucgucucccucggcgccaucuccuucuggaugugcuccaacggcucccuccagugccgcaucugcaucuga

SEQ ID NO: 103531 - RNA, 1701 nt, Artificial Sequence; identical to SEQ ID NO: 99807
  derived and/or modified CDS sequence (opt2) from hemagglutinin__InfluenzaA__AEO01409

SEQ ID NO: 103532 - RNA, 1701 nt, Artificial Sequence; identical to SEQ ID NO: 103423
  derived and/or modified CDS sequence (opt2) from hemagglutinin__InfluenzaA__AEO01410

SEQ ID NO: 103533 - RNA, 1701 nt, Artificial Sequence; identical to SEQ ID NO: 102124
  derived and/or modified CDS sequence (opt2) from hemagglutinin__InfluenzaA__AEO01411

SEQ ID NO: 103534 - RNA, 1701 nt, Artificial Sequence; identical to SEQ ID NO: 99058
  derived and/or modified CDS sequence (opt2) from hemagglutinin__InfluenzaA__AEO01412

SEQ ID NO: 103535 - RNA, 1701 nt, Artificial Sequence
  derived and/or modified CDS sequence (opt2) from hemagglutinin__InfluenzaA__AEO01413
augaaggccauccucgucguccuccucuacaccuucgccaccgccaacgccgacacccucugcaucggcuaccacgccaacaacuccaccgacaccgucgacaccguccucgagaagaacgucaccgucacccacuccgucaaccuccucgaggacaagcacaacggcaagcucugcaagcuccgcggcgucgccccccuccaccucggcaagugcaacaucgccggcuggauccucggcaaccccgagugcgagucccucuccaccgccuccuccugguccuacaucgucgagaccuccuccuccgacaacggcaccugcuaccccggcgacuucaucgacuacgaggagcuccgcgagcagcucuccuccgucuccuccuucgagcgcuucgagaucuuccccaagaccuccuccuggcccaaccacgacuccaacaagggcgucaccgccgccugcccccacgccggcgccaaguccuucuacaagaaccucaucuggcucgucaagaagggcaacuccuaccccaagcucuccaaguccuacaucaacgacaagggcaaggagguccucguccucuggggcauccaccaccccuccaccuccgccgaccagcagucccucuaccagaacgccgacgccuacgucuucgucggcaccucccgcuacuccaagaaguucaagcccgagaucgccauccgccccaagguccgcgaccaggagggccgcaugaacuacuacuggacccucgucgagcccggcgacaagaucaccuucgaggccaccggcaaccucgucgucccccgcuacgccuucgccauggagcgcaacgccggcuccggcaucaucaucuccgacacccccguccacgacugcaacaccaccugccagacccccaagggcgccaucaacaccucccuccccuuccagaacauccaccccaucaccaucggcaagugccccaaguacgucaaguccaccaagcuccgccucgccaccggccuccgcaacguccccuccauccagucccgcggccucuucggcgccaucgccggcuucaucgagggcggcuggaccggcauggucgacggcugguacggcuaccaccaccagaacgagcagggcuccggcuacgccgccgaccucaaguccacccagaacgccaucgacaagaucaccaacaaggucaacuccgucaucgagaagaugaacacccaguucaccgccgucggcaaggaguucaaccaccucgagaagcgcaucgagaaccucaacaagaaggucgacgacggcuuccucgacaucuggaccuacaacgccgagcuccucguccuccucgagaacgagcgcacccucgacuaccacgacuccaacgucaagaaccucuacgagaagguccgcucccagcucaaguccaacgccaaggagaucggcaacggcugcuucgaguucuaccacaagugcgacaacaccugcauggaguccgucaagaacggcaccuacgacuaccccaaguacuccgaggaggccaagcucaaccgcgaggagaucgacggcgucaagcucgaguccacccgcaucuaccagauccucgccaucuacuccaccgucgccuccucccucguccucgucgucucccucggcgccaucuccuucuggaugugcuccaacggcucccuccagugccgcaucugcaucuga

SEQ ID NO: 103536 - RNA, 1701 nt, Artificial Sequence
  derived and/or modified CDS sequence (opt2) from hemagglutinin__InfluenzaA__AEO01414
augaaggccauccucgucguccuccucuacaccuucgccaccgccaacgccgacacccucugcaucggcuaccacgccaacaacuccaccgacaccgucgacaccguccucgagaagaacgucaccgucacccacuccgucaaccuccucgaggacaagcacaacggcaagcucugcaagcuccgcggcgucgccccccuccaccucggcaagugcaacaucgccggcuggauccucggcaaccccgagugcgagucccucuccaccgccuccuccugguccuacaucgucgagaccuccuccuccgacaacggcaccugcuaccccggcgacuucaucgacuacgaggagcuccgcgagcagcucuccuccgucuccuccuucgagcgcuucgagaucuuccccaagaccuccuccuggcccaaccacgacuccaacaagggcgucaccgccgccugcccccacgccggcgccaaguccuucuacaagaaccucaucuggcucgucaagaagggcaacuccuaccccaagcucuccaaguccuacaucaacgacaagggcaaggagguccucguccucuggggcauccaccaccccuccaccuccgccgaccagcagucccucuaccagaacgccgacgccuacgucuucgucggcaccucccgcuacuccaagaaguucaagcccgagaucgccauccgccccaagguccgcgaccaggagggccgcaugaacuacuacuggacccucgucgagcccggcgacaagaucaccuucgaggccaccggcaaccucgucgucccccgcuacgccuucgccauggagcgcaacaccggcuccggcaucaucaucuccgacacccccguccacgacugcuccaccaccugccagacccccaagggcgccaucaacaccucccuccccuuccagaacguccaccccaucaccaucggcaagugccccaaguacgucaaguccaccaagcuccgccucgccaccggccuccgcaacguccccuccauccagucccgcggccucuucggcgccaucgccggcuucaucgagggcggcuggaccggcauggucgacggcugguacggcuaccaccaccagaacgagcagggcuccggcuacgccgccgaccucaaguccacccagaacgccaucgacgagaucaccaacaaggucaacuccgucaucgagaagaugaacacccaguucaccgccgucggcaaggaguucaaccaccucgagaagcgcaucgagaaccucaacaagaaggucgacgacggcuuccucgacaucuggaccuacaacgccgagcuccucguccuccucgagaacgagcgcacccucgacuaccacgacuccaacgucaagaaccucuacgagaagguccgcucccagcucaagaacaacgccaaggagaucggcaacggcugcuucgaguucuaccacaagugcgacaacaccugcauggaguccgucaagaacggcaccuacgacuaccccaaguacuccgaggaggccaagcucaaccgcgaggagaucgacggcgucaagcucgaguccacccgcaucuaccagauccucgccaucuacuccaccgucgccuccucccucguccucgucgucucccucggcgccaucuccuucuggaugugcuccaacggcucccuccagugccgcaucugcaucuga

SEQ ID NO: 103537 - RNA, 1701 nt, Artificial Sequence; identical to SEQ ID NO: 102336
  derived and/or modified CDS sequence (opt2) from hemagglutinin__InfluenzaA__AEO01416

SEQ ID NO: 103538 - RNA, 1701 nt, Artificial Sequence; identical to SEQ ID NO: 99869
  derived and/or modified CDS sequence (opt2) from hemagglutinin__InfluenzaA__AEO01418

SEQ ID NO: 103539 - RNA, 1701 nt, Artificial Sequence; identical to SEQ ID NO: 99869
  derived and/or modified CDS sequence (opt2) from hemagglutinin__InfluenzaA__AEO01419

SEQ ID NO: 103540 - RNA, 1701 nt, Artificial Sequence
  derived and/or modified CDS sequence (opt2) from hemagglutinin__InfluenzaA__AEO01420
augaaggccauccucgucguccuccucuacaccuucgccaccgccaacgccgacacccucugcaucggcuaccacgccaacaacuccaccgacaccgucgacaccguccucgagaagaacgucaccgucacccacuccgucaaccuccucgaguacaagcacaacggcaagcucugcaagcuccgcggcgucgccccccuccaccucggcaagugcaacaucgccggcuggauccucggcaaccccgagugcgagucccucuccaccgccuccuccugguccuacaucgucgagaccuccaacuccgacaacggcaccugcuaccccggcgacuucaucgacuacgaggagcuccgcgagcagcucuccuccgucuccuccuucgagcgcuucgagaucuuccccaagaccuccuccuggcccaaccacgacuccaacaagggcgucaccgccgccugcccccacgccggcgccaaguccuucuacaagaaccucaucuggcucgucaagaagggcaacuccuaccccaagcucuccaaguccuacaucaacgacaagggcaaggagguccucguccucuggggcauccaccaccccuccaccuccgccgaccagcagucccucuaccagaacgccgacgccuacgucuucgucggcaccucccgcuacuccaagaaguucaagcccgagaucgccauccgccccaagguccgcgaccaggagggccgcaugaacuacuacuggacccucgucgagcccggcgacaagaucaccuucgaggccaccggcaaccucgucgucccccgcuacgccuucgccauggagcgcaacgccggcuccggcaucaucaucuccgacacccccguccacgacugcaacaccaccugccagacccccaagggcgccaucaacaccucccuccccuuccagaacauccaccccaucaccaucggcaagugccccaaguacgucaaguccaccaagcuccgccucgccaccggccuccgcaacguccccuccauccagucccgcggccucuucggcgccaucgccggcuucaucgagggcggcuggaccggcauggucgacggcugguacggcuaccaccaccagaacgagcagggcuccggcuacgccgccgaccucaaguccacccagaacgccaucgacgagaucaccaacaaggucaacuccgucaucgagaagaugaacacccaguucaccgccgucggcaaggaguucaaccaccucgagaagcgcaucgagaaccucaacaagaaggucgacgacggcuuccucgacaucuggaccuacaacgccgagcuccucguccuccucgagaacgagcgcacccucgacuaccacgacuccaacgucaagaaccucuacgagaagguccgcucccagcucaagaacaacgccaaggagaucggcaacggcugcuucgaguucuaccacaagugcgacaacaccugcauggaguccgucaagaacggcaccuacgacuaccccaaguacuccgaggaggccaagcucaaccgcgaggagaucgacggcgucaagcucgaguccacccgcaucuaccagauccucgccaucuacuccaccgucgccuccucccucguccucgucgucucccucggcgccaucuccuucuggaugugcuccaacggcucccuccagugccgcaucugcaucuga

SEQ ID NO: 103541 - RNA, 1701 nt, Artificial Sequence
  derived and/or modified CDS sequence (opt2) from hemagglutinin__InfluenzaA__AEO01421
augaaggccauccucgucguccuccucuacaccuucgccaccgccaacgccgacacccucugcaucggcuaccacgccaacaacuccaccgacaccgucgacaccguccucgagaagaacgucaccgucacccacuccgucaaccuccucgaggacaagcacaacggcaagcucugcaagcuccgcggcgucgccccccuccaccucggcaagugcaacaucgccggcuggauccucggcaaccccgagugcgagucccucuccaccgccuccuccugguccuacaucgucgagaccuccuccuccgacaacggcaccugcuaccccggcgacuucaucgacuacgaggagcuccgcgagcagcucuccuccgucuccuccuucgagaaguucgagaucuuccccaagaccuccuccuggcccaaccacgacuccaacaagggcgucaccgccgccugcccccacgccggcgccaaguccuucuacaagaaccucaucuggcucgucaagaagggcaacuccuaccccaagcucuccaaguccuacaucaacgacaagggcaaggagguccucguccucuggggcauccaccaccccuccaccuccgccgaccagcagucccucuaccagaacgccgacgccuacgucuucgucggcaccucccgcuacuccaagaaguucaagcccgagaucgccauccgccccaagguccgcgaccaggagggccgcaugaacuacuacuggacccucgucgagcccggcgacaagaucaccuucgaggccaccggcaaccucgucgucccccgcuacgccuucgccauggagcgcaacgccggcuccggcaucaucaucuccgacacccccguccacgacugcaacaccaccugccagacccccaagggcgccaucaacaccucccuccccuuccagaacauccaccccaucaccaucggcaagugccccaaguacgucaaguccaccaagcuccgccucgccaccggccuccgcaacguccccuccauccagucccgcggccucuucggcgccaucgccggcuucaucgagggcggcuggaccggcauggucgacggcugguacggcuaccaccaccagaacgagcagggcuccggcuacgccgccgaccucaaguccacccagaacgccaucgacaagaucaccaacaaggucaacuccgucaucgagaagaugaacacccaguucaccgccgucggcaaggaguucaaccaccucgagaagcgcaucgagaaccucaacaagaaggucgacgacggcuuccucgacaucuggaccuacaacgccgagcuccucguccuccucgagaacgagcgcacccucgacuaccacgacuccaacgucaagaaccucuacgagaagguccgcucccagcucaagaacaacgccaaggagaucggcaacggcugcuucgaguucuaccacaagugcgacaacaccugcauggaguccgucaagaacggcaccuacgacuaccccaaguacuccgaggaggccaagcucaaccgcgaggagaucgacggcgucaagcucgaguccacccgcaucuaccagauccucgccaucuacuccaccgucgccuccucccucguccucgucgucucccucggcgccaucuccuucuggaugugcuccaacggcucccuccagugccgcaucugcaucuga

SEQ ID NO: 103542 - RNA, 1701 nt, Artificial Sequence
  derived and/or modified CDS sequence (opt2) from hemagglutinin__InfluenzaA__AEO01422
augaaggccauccucgucguccuccucuacaccuucgccaucgccaacgccgacacccucugcaucggcuaccacgccaacaacuccaccgacaccgucgacaccguccucgagaagaacgucaccgucacccacuccgucaaccuccucgaggacaagcacaacggcaagcucugcaagcuccgcggcgucgccccccuccaccucggcaagugcaacaucgccggcuggauccucggcaaccccgagugcgagucccucuccaccgccuccuccugguccuacaucgucgagaccuccuccuccgacaacggcaccugcuaccccggcgacuucaucgacuacgaggagcuccgcgagcagcucuccuccgucuccuccuucgagcgcuucgagaucuuccccaagaccuccuccuggcccaaccacgacuccaacaagggcgucaccgccgccugcccccacgccggcgccaaguccuucuacaagaaccucaucuggcucgucaagaagggcaaccucuaccccaagcucuccaaguccuacaucaacgacaagggcaaggagguccucguccucuggggcauccaccaccccuccaccuccgccgaccagcagucccucuaccagaacgccgacgccuacgucuucgucggcaccucccgcuacuccaagaaguucaagcccgagaucgccauccgccccaagguccgcgaccaggagggccgcaugaacuacuacuggacccucgucgagcccggcgacaagaucaccuucgaggccaccggcaaccucgucgucccccgcuacgccuucgccauggagcgcaacgccggcuccggcaucaucaucuccgacacccccguccacgacugcaacaccaccugccagacccccaagggcgccaucaacaccucccuccccuuccagaacauccaccccaucaccaucggcaagugccccaaguacgucaaguccaccaagcuccgccucgccaccggccuccgcaacguccccuccauccagucccgcggccucuucggcgccaucgccggcuucaucgagggcggcuggaccggcauggucgacggcugguacggcuaccaccaccagaacgagcagggcuccggcuacgccgccgaccucaaguccacccagcacgccaucgacgagaucaccaacaaggucaacuccgucaucgagaagaugaacacccaguucaccgccgucggcaaggaguucaaccaccucgagaagcgcaucgagaaccucaacaagaaggucgacgacggcuuccucgacaucuggaccuacaacgccgagcuccucguccuccucgagaacgagcgcacccucgacuaccacgacuccaacgucaagaaccucuacgagaagguccgcucccagcucaagaacaacgccaaggagaucggcaacggcugcuucgaguucuaccacaagugcgacaacaccugcauggaguccgucaagaacggcaccuacgacuaccccaaguacuccgaggaggccaagcucaaccgcgaggagaucaacggcgucaagcucgaguccacccgcaucuaccagauccucgccaucuacuccaccgucgccuccucccucguccucgucgucucccucggcgccaucuccuucuggaugugcuccaacggcucccuccagugccgcaucugcaucuga

SEQ ID NO: 103543 - RNA, 1701 nt, Artificial Sequence
  derived and/or modified CDS sequence (opt2) from hemagglutinin__InfluenzaA__AEO01423
augaaggccauccucaucguccuccucuacaccuucgccaccgccaacgccgacacccucugcaucggcuaccacgccaacaacuccaccgacaccgucgacaccguccucgagaagaacgucaccgucacccacuccgucaaccuccucgaggacaagcacaacggcaagcucugcaagcuccgcggcgucgccccccuccaccucggcaagugcaacaucgccggcuggauccucggcaaccccgagugcgagucccucuccaccgccuccuccugguccuacaucgucgagaccuccuccuccgacaacggcaccugcuaccccggcgacuucaucgacuacgaggagcuccgcgagcagcucuccuccgucuccuccuucgagcgcuucgagaucuuccccaagaccuccuccuggcccaaccacgacuccaacaagggcgucaccgccgccugcccccacgccggcgccaaguccuucuacaagaaccucaucuggcucgucaagaagggcaacuccuaccccaagcucuccaaguccuacaucaacgacaagggcaaggagguccucguccucuggggcauccaccaccccuccaccuccgccgaccagcagucccucuaccagaacgccgacgccuacgucuucgucggcaccucccgcuacuccaagaaguucaagcccgagaucaccauccgccccaagguccgcgaccaggagggccgcaugaacuacuacuggacccucgucgagcccggcgacaagaucaccuucgaggccaccggcaaccucgucgucccccgcuacgccuucgccauggagcgcaacgccggcuccggcaucaucaucuccgacacccccguccacgacugcaacaccaccugccagacccccaagggcgccaucaacaccucccuccccuuccagaacauccaccccaucaccaucggcaagugccccaaguacgucaaguccaccaagcuccgccucgccaccggccuccgcaacguccccuccauccagucccgcggccucuucggcgccaucgccggcuucaucgagggcggcuggaccggcauggucgacggcugguacggcuaccaccaccagaacgagcagggcuccggcuacgccgccgaccucaaguccacccagaacgccaucgacgagaucaccaacaaggucaacuccgucaucgagaagaugaacacccaguucaccgccgucggcaaggaguucaaccaccucgagaagcgcaucgagaaccucaacaagaaggucgacgacggcuuccucgacaucuggaccuacaacgccgagcuccucguccuccucgagaacgagcgcacccucgacuaccacgacuccaacgucaagaaccucuacgagaagguccgcucccagcucaagaacaacgccaaggagaucggcaacggcugcuucgaguucuaccacaagugcgacaacaccugcauggaguccgucaagaacggcaccuacgacuaccccaaguacuccgaggaggccaagcucaaccgcgaggagaucgacggcgucaagcucgaguccacccgcaucuaccagauccucgccaucuacuccaccgucgccuccucccucguccucgucgucucccucggcgccaucuccuucuggaugugcuccaacggcucccuccagugccgcaucugcaucuga

SEQ ID NO: 103544 - RNA, 1701 nt, Artificial Sequence; identical to SEQ ID NO: 103541
  derived and/or modified CDS sequence (opt2) from hemagglutinin__InfluenzaA__AEO01424

SEQ ID NO: 103545 - RNA, 1701 nt, Artificial Sequence; identical to SEQ ID NO: 103541
  derived and/or modified CDS sequence (opt2) from hemagglutinin__InfluenzaA__AEO01425

SEQ ID NO: 103546 - RNA, 1701 nt, Artificial Sequence; identical to SEQ ID NO: 98705
  derived and/or modified CDS sequence (opt2) from hemagglutinin__InfluenzaA__AEO01426

SEQ ID NO: 103547 - RNA, 1701 nt, Artificial Sequence
  derived and/or modified CDS sequence (opt2) from hemagglutinin__InfluenzaA__AEO01427
augaaggccauccucgucguccuccucuacaccuucgccaccgccaacuccgacacccucugcaucggcuaccacgccaacaacuccaccgacaccgucgacaccguccucgagaagaacgucaccgucacccacuccgucaaccuccucgaggacaagcacaacggcaagcucugcaagcuccgcggcgucgccccccuccaccucggcaagugcaacaucgccggcuggauccucggcaaccccgagugcgagucccucuccaccgccuccuccugguccuacaucgucgagaccuccuccuccgacaacggcaccugcuaccccggcgacuucaucgacuacgaggagcuccgcgagcagcucuccuccgucuccuccuucgagcgcuucgagaucuuccccaagaccuccuccuggcccaaccacgacuccaacaagggcgucaccgccgccugcccccacgccggcgccaaguccuucuacaagaaccucaucuggcucgucaagaagggcaacuccuaccccaagcucuccaaguccuacaucaacgacaagggcaaggagguccucguccucuggggcauccaccaccccuccaccuccgccgaccagcagucccucuaccagaacgccgacgccuacgucuucgucggcaccucccgcuacuccaagaaguucaagcccgagaucgccauccgccccaagguccgcgaccaggagggccgcaugaacuacuacuggacccucgucgagcccggcgacaagaucaccuucgaggccaccggcaaccucgucgucccccgcuacgccuucgccauggagcgcaacgccggcuccggcaucaucaucuccgacacccccguccacgacugcaacaccaccugccagacccccaagggcgccaucaacaccucccuccccuuccagaacauccaccccaucaccaucggcaagugccccaaguacgucaaguccaccaagcuccgccucgccaccggccuccgcaacguccccuccauccagucccgcggccucuucggcgccaucgccggcuucaucgagggcggcuggaccggcauggucgacggcugguacggcuaccaccaccagaacgagcagggcuccggcuacgccgccgaccucaaguccacccagaacgccaucgacaagaucaccaacaaggucaacuccgucaucgagaagaugaacacccaguucaccgccgucggcaaggaguucaaccaccucgagaagcgcaucgagaaccucaacaagaaggucgacgacggcuuccucgacaucuggaccuacaacgccgagcuccucguccuccucgagaacgagcgcacccucgacuaccacgacuccaacgucaagaaccucuacgagaagguccgcucccagcucaagaacaacgccaaggagaucggcaacggcugcuucgaguucuaccacaagugcgacaacaccugcauggaguccgucaagaacggcaccuacgacuaccccaaguacuccgaggaggccaagcucaaccgcgaggagaucgacggcgucaagcucgaguccacccgcaucuaccagauccucgccaucuacuccaccgucgccuccucccucguccucgucgucucccucggcgccaucuccuucuggaugugcuccaacggcucccuccagugccgcaucugcaucuga

SEQ ID NO: 103548 - RNA, 1701 nt, Artificial Sequence
  derived and/or modified CDS sequence (opt2) from hemagglutinin__InfluenzaA__AEO01428
augaaggccauccucgucguccuccucuacaccuucgccaccgccaacgccgacacccucugcaucggcuaccacgccaacaacuccaccgacaccgucgacaccguccucgagaagaacgucaccgucacccacuccgucaaccuccucgaggacaagcacaacggcaagcucugcaagcuccgcggcgucgccccccuccaccucggcaagugcaacaucgccggcuggauccucggcaaccccgagugcgagucccucuccaccgccuccuccugguccuacaucgucgagaccuccuccuccgacaacggcaccugcuaccccggcgacuucaucgacuacgaggagcuccgcgagcagcucuccuccgucuccuccuucgagcgcuucgagaucuuccccaagaccuccuccuggcccgaccacgacuccaacaagggcgucaccgccgccugcccccacgccggcgccaaguccuucuacaagaaccucaucuggcucgucaagaagggcaacuccuaccccaagcucuccaaguccuacaucaacgacaagggcaaggagguccucguccucuggggcauccaccaccccuccaccuccgccgaccagcagucccucuaccagaacgccgacgccuacgucuucgucggcaccucccgcuacuccaagaaguucaagcccgagaucgccauccgccccaagguccgcgaccaggagggccgcaugaacuacuacuggacccucgucgagcccggcgacaagaucaccuucgaggccaccggcaaccucgucgucccccgcuacgccuucgccauggagcgcaacgccggcuccggcaucaucaucuccgacacccccguccacgacugcaacaccaccugccagacccccaagggcgccaucaacaccucccuccccuuccagaacauccaccccaucaccaucggcaagugccccaaguacgucaaguccaccaagcuccgcauggccaccggccuccgcaacguccccuccauccagucccgcggccucuucggcgccaucgccggcuucaucgagggcggcuggaccggcauggucgacggcugguacggcuaccaccaccagaacgagcagggcuccggcuacgccgccgaccucaaguccacccagaacgccaucgacgagaucaccaacaaggucaacuccgucaucgagaagaugaacacccaguucaccgccgucggcaaggaguucaaccaccucgagaagcgcaucgagaaccucaacaagaaggucgacgacggcuuccucgacaucuggaccuacaacgccgagcuccucguccuccucgagaacgagcgcacccucgacuaccacgacuccaacgucaagaaccucuacgagaagguccgcucccagcucaagaacaacgccaaggagaucggcaacggcugcuucgaguucuaccacaagugcgacaacaccugcauggaguccgucaagaacggcaccuacgacuaccccaaguacuccgaggaggccaagcucaaccgcgaggagaucgacggcgucaagcucgaguccacccgcaucuaccagauccucgccaucuacuccaccgucgccuccucccucguccucgucgucucccucggcgccaucuccuucuggaugugcuccaacggcucccuccagugccgcaucugcaucuga

SEQ ID NO: 103549 - RNA, 1701 nt, Artificial Sequence; identical to SEQ ID NO: 99869
  derived and/or modified CDS sequence (opt2) from hemagglutinin__InfluenzaA__AEO01429

SEQ ID NO: 103550 - RNA, 1701 nt, Artificial Sequence
  derived and/or modified CDS sequence (opt2) from hemagglutinin__InfluenzaA__AEO01430
augaaggccauccucgucguccuccucuacaccuucgccaccgccaacgccgacacccucugcaucggcuaccacgccaacaacuccaccgacaccgucgacaccguccucgagaagaacgucaccgucacccacuccgucaaccuccucgaggacaagcacaacggcaagcucugcaagcuccgcggcgucgccccccuccaccucggcaagugcaacaucgccggcuggauccucggcaaccccgagugcgagucccucuccaccgccuccuccugguccuacaucgucgagaccuccuccuccgacaacggcaccugcuaccccggcgacuucaucgacuacgaggagcuccgcgagcagcucuccuccgucuccuccuucgagcgcuucgagaucuuccccaagaccuccuccuggcccaaccacgacuccaacaagggcgucaccgccgccugcccccacgacggcgccaaguccuucuacaagaaccucaucuggcucgucaagaagggcaacuccuaccccaagcucuccaaguccuacaucaacgacaagggcaaggagguccucguccucuggggcauccaccaccccuccaccuccgccgaccagcagucccucuaccagaacgccgacgccuacgucuucgucggcaccucccgcuacuccaagaaguucaagcccgagaucgccauccgccccaagguccgcgaccaggagggccgcaugaacuacuacuggacccucgucgagcccggcgacaagaucaccuucgaggccaccggcaaccucgucgucccccgcuacgccuucgccauggagcgcaacgccggcuccggcaucaucaucuccgacacccccguccacgacugcaacaccaccugccagacccccaagggcgccaucaacaccucccuccccuuccagaacauccaccccaucaccaucggcaagugccccaaguacgucaaguccaccaagcuccgccucgccaccggccuccgcaacguccccuccauccagucccgcggccucuucggcgccaucgccggcuucaucgagggcggcuggaccggcauggucgacggcugguacggcuaccaccaccagaacgagcagggcuccggcuacgccgccgaccucaaguccacccagaacgccaucgacgagaucaccaacaaggucaacuccgucaucgagaagaugaacacccaguucaccgccgucggcaaggaguucaaccaccucgagaagcgcaucgagaaccucaacaagaaggucgacgacggcuuccucgacaucuggaccuacaacgccgagcuccucguccuccucgagaacgagcgcacccucgacuaccacgacuccaacgucaagaaccucuacgagaagguccgcucccagcucaagaacaacgccaaggagaucggcaacggcugcuucgaguucuaccacaagugcgacaacaccugcauggaguccgucaagaacggcaccuacgacuaccccaaguacuccgaggaggccaagcucaaccgcgaggagaucgacggcgucaagcucgaguccacccgcaucuaccagauccucgccaucuacuccaccgucgccuccucccucguccucgucgucucccucggcgccaucuccuucuggaugugcuccaacggcucccuccagugccgcaucugcaucuga

SEQ ID NO: 103551 - RNA, 1701 nt, Artificial Sequence; identical to SEQ ID NO: 103423
  derived and/or modified CDS sequence (opt2) from hemagglutinin__InfluenzaA__AEO01431

SEQ ID NO: 103552 - RNA, 1701 nt, Artificial Sequence; identical to SEQ ID NO: 98705
  derived and/or modified CDS sequence (opt2) from hemagglutinin__InfluenzaA__AEO01432

SEQ ID NO: 103553 - RNA, 1701 nt, Artificial Sequence
  derived and/or modified CDS sequence (opt2) from hemagglutinin__InfluenzaA__AEO01434
augaaggccauccucgucguccuccucuacaccuucgccaccgccaacgccgacacccucugcaucggcuaccacgccaacaacuccaccgacaccgucgacaccguccucgagaagaacgucaccgucacccacuccgucaaccuccucgaggacaagcacaacggcaagcucugcaagcuccgcggcgucgccccccuccaccucggcgagugcaacaucgccggcuggauccucggcaaccccgagugcgagucccucuccaccgccuccuccugguccuacaucgucgagaccuccuccuccgacaacggcaccugcuaccccggcgacuucaucgacuacgaggagcuccgcgagcagcucuccuccgucuccuccuucgagcgcuucgagaucuuccccaagaccuccuccuggcccaaccacgacuccaacaagggcgucaccgccgccugcccccacgccggcgccaaguccuucuacaagaaccucaucuggcucgucaagaagggcaacuccuaccccaagcucaacaaguccuacaucaacgacaagggcaaggagguccucguccucuggggcauccaccaccccuccaccuccgccgaccagcagucccucuaccagaacgccgacgccuacgucuucgucggcaccucccgcuacuccaagaaguucaagcccgagaucgccauccgccccaagguccgcgaccaggagggccgcaugaacuacuacuggacccucgucgagcccggcgacaagaucaccuucgaggccaccggcaaccucgucgucccccgcuacgccuucgccauggagcgcaacgccggcuccggcaucaucaucuccgacacccccguccacgacugcaacaccaccugccagacccccaagggcgccaucaacaccucccuccccuuccagaacauccaccccaucaccaucggcgagugccccaaguacgucaaguccaccaagcuccgccucgccaccggccuccgcaacguccccuccauccagucccgcggccucuucggcgccaucgccggcuucaucgagggcggcuggaccggcauggucgacggcugguacggcuaccaccaccagaacgagcagggcuccggcuacgccgccgaccucaaguccacccagaacgccaucgacaagaucaccaacaaggucaacuccgucaucgagaagaugaacacccaguucaccgccgucggcaaggaguucaaccaccucgagaagcgcaucgagaaccucaacaagaaggucgacgacggcuuccucgacaucuggaccuacaacgccgagcuccucguccuccucgagaacgagcgcacccucgacuaccacgacuccaacgucaagaaccucuacgagaagguccgcucccagcucaagaacaacgccaaggagaucggcaacggcugcuucgaguucuaccacaagugcgacaacaccugcauggaguccgucaagaacggcaccuacgacuaccccaaguacuccgaggaggccaagcucaaccgcgaggagaucgacggcgucaagcucgaguccacccgcaucuaccagauccucgccaucuacuccaccgucgccuccucccucguccucgucgucucccucggcgccaucuccuucuggaugugcuccaacggcucccuccagugccgcaucugcaucuga

SEQ ID NO: 103554 - RNA, 1701 nt, Artificial Sequence
  derived and/or modified CDS sequence (opt2) from hemagglutinin__InfluenzaA__AEO01435
augaaggccauccucgucguccuccucuacaccuucgccaccgccaacgccgacacccucugcaucggcuaccacgccaacaacuccaccgacaccgucgacaccguccucgagaagaacgucaccgucacccacuccgucaaccuccucgaggacaagcacaacggcaagcucugcaagcuccgcggcgucgccccccuccaccucggcaagugcaacaucgccggcuggauccucggcaaccccgagugcgagucccucuccaccgccuccuccugguccuacaucgucgagaccuccuccuccgacaacggcaccugcuaccccggcgacuucaucgacuacgaggagcuccgcgagcagcucuccuccgucuccuccuucgagcgcuucgagaucuuccccaagaccuccuccuggcccaaccacgacuccaacaagggcgucaccgccgccugcccccacgccggcgccaaguccuucuacaagaaccucaucuggcucgucaagaagggcaacuccuaccccaagcucuccaaguccuacaucaacgacaagggcaaggagguccucguccucuggggcauccaccaccccuccaccuccgccgaccagcagucccucuaccagaacgccgacgccuacgucuucgucggcaccucccgcuacuccaagaaguucaagcccgagaucgccauccgccccaagguccgcgaccaggagggccgcaugaacuacuacuggacccucgucgagcccggcgacaagaucaccuucgaggccaccggcaaccucgucgucccccgcuacgccuucgccauggagcgcaacgccggcuccggcaucaucaucuccgacacccccgucuacgacugcaacaccaccugccagacccccaagggcgccaucaacaccucccuccccuuccagaacauccaccccaucaccaucggcaagugccccaaguacgucaaguccaccaagcuccgccucgccaccggccuccgcaacguccccuccauccagucccgcggccucuucggcgccaucgccggcuucaucgagggcggcuggaccggcauggucgacggcugguacggcuaccaccaccagaacgagcagggcuccggcuacgccgccgaccucaaguccacccagaacgccaucgacaagaucaccaacaaggucaacuccgucaucgagaagaugaacacccaguucaccgccgucggcaaggaguucaaccaccucgagaagcgcaucgagaaccucaacaagaaggucgacgacggcuuccucgacaucuggaccuacaacgccgagcuccucguccuccucgagaacgagcgcacccucgacuaccacgacuccaacgucaagaaccucuacgagaagguccgcaaccagcucaagaacaacgccaaggagaucggcaacggcugcuucgaguucuaccacaagugcgacaacaccugcauggaguccgucaagaacggcaccuacgacuaccccaaguacuccgaggaggccaagcucaaccgcgaggagaucgacggcgucaagcucgaguccacccgcaucuaccagauccucgccaucuacuccaccgucgccuccucccucguccucgucgucucccucggcgccaucuccuucuggaugugcuccaacggcucccuccagugccgcaucugcaucuga

SEQ ID NO: 103555 - RNA, 1701 nt, Artificial Sequence; identical to SEQ ID NO: 103541
  derived and/or modified CDS sequence (opt2) from hemagglutinin__InfluenzaA__AEO01436

SEQ ID NO: 103556 - RNA, 1701 nt, Artificial Sequence; identical to SEQ ID NO: 103423
  derived and/or modified CDS sequence (opt2) from hemagglutinin__InfluenzaA__AEO01437

SEQ ID NO: 103557 - RNA, 1701 nt, Artificial Sequence; identical to SEQ ID NO: 103474
  derived and/or modified CDS sequence (opt2) from hemagglutinin__InfluenzaA__AEO01438

SEQ ID NO: 103558 - RNA, 1701 nt, Artificial Sequence; identical to SEQ ID NO: 99058
  derived and/or modified CDS sequence (opt2) from hemagglutinin__InfluenzaA__AEO01440

SEQ ID NO: 103559 - RNA, 1701 nt, Artificial Sequence
  derived and/or modified CDS sequence (opt2) from hemagglutinin__InfluenzaA__AEO01441
augaaggccauccucgucguccuccucuacaccuucgccaccgccaacgccgacacccucugcaucggcuaccacgccaacaacuccaccgacaccgucgacaccguccucgagaagaacgucaccgucacccacuccgucaaccuccucgaggacaagcacaacggcaagcucugcaagcuccgcggcgucgccccccuccaccucggcaagugcaacaucgccggcuggauccucggcaaccccgagugcgagucccucuccaccgccuccuccugguccuacaucgucgagaccuccuccuccgacaacggcaccugcuaccccggcgacuucaucgacuacgaggagcuccgcgagcagcucuccuccgucuccuccuucgagcgcuucgagaucuuccccaagaccuccuccuggcccaaccacgacuccaacaagggcgucaccgccgccugcccccacgccggcgccaaguccuucuacaagaaccucaucuggcucgucaagaagggcaacuccuaccccaagcucuccaaguccuacaucaacgacaagggcaaggagguccucguccucuggggcauccaccaccccuccaccuccgccgaccagcagucccucuaccagaacgccgacgccuacgucuucgucggcaccucccgcuacuccaagaaguucaagcccgagaucgccauccgccccaagguccgcgaccaggagggccgcaugaacuacuacuggacccucgucgagcccggcgacaagaucaccuucgaggccaccggcaaccucgucgucccccgcuacgccuucgccauggagcgcaacgacggcuccggcaucaucaucuccgacacccccguccacgacugcaacaccaccugccagacccccaagggcgccaucaacaccucccuccccuuccagaacauccaccccaucaccaucggcaagugccccaaguacgucaaguccaccaagcuccgccucgccaccggccuccgcaacguccccuccauccagucccgcggccucuucggcgccaucgccggcuucaucgagggcggcuggaccggcauggucgacggcugguacggcuaccaccaccagaacgagcagggcuccggcuacgccgccgaccucaaguccacccagaacgccaucgacaagaucaccaacaaggucaacuccgucaucgagaagaugaacacccaguucaccgccgucggcaaggaguucaaccaccucgagaagcgcaucgagaaccucaacaagaaggucgacgacggcuuccucgacaucuggaccuacaacgccgagcuccucguccuccucgagaacgagcgcacccucgacuaccacgacuccaacgucaagaaccucuacgagaagguccgcucccagcucaagaacaacgccaaggagaucggcaacggcugcuucgaguucuaccacaagugcgacaacaccugcauggaguccgucaagaacggcaccuacgacuaccccaaguacuccgaggaggccaagcucaaccgcgaggagaucgacggcgucaagcucgaguccacccgcaucuaccagauccucgccaucuacuccaccgucgccuccucccucguccucgucgucucccucggcgccaucuccuucuggaugugcuccaacggcucccuccagugccgcaucugcaucuga

SEQ ID NO: 103560 - RNA, 1701 nt, Artificial Sequence; identical to SEQ ID NO: 100125
  derived and/or modified CDS sequence (opt2) from hemagglutinin__InfluenzaA__AEO01442

SEQ ID NO: 103561 - RNA, 1701 nt, Artificial Sequence
  derived and/or modified CDS sequence (opt2) from hemagglutinin__InfluenzaA__AEO01443
augaaggccauccucgucguccuccucuacaccuucgccaccgccaacgccgacacccucugcaucggcuaccacgccaacaacuccaccgacaccgucgacaccguccucgagaagaacgucaccgucacccacuccgucaaccuccucgaggacaagcacaacggcaagcucugcaagcuccgcggcgucgccccccuccaccucggcaagugcaacaucgccggcuggauccucggcaaccccgagugcgagucccucuccaccgccuccuccugguccuacaucgucgagaccuccuccuccgacaacggcaccugcuaccccggcgacuucaucgacuacgaggagcuccgcgagcagcucuccuccgucuccuccuucgagcgcuucgagaucuuccccaagaccuccuccuggcccaaccacgacuccaacaagggcgucaccgccgccugcccccacgccggcgccaaguccuucuacaagaaccucaucuggcucgucaagaaggagaacuccuaccccaagcucuccaaguccuacaucaacgacaagggcaaggagguccucguccucuggggcauccaccaccccuccaccuccgccgaccagcagucccucuaccagaacgccgacgccuacgucuucgucggcaccucccgcuacuccaagaaguucaagcccgagaucgccauccgccccaagguccgcgaccaggagggccgcaugaacuacuacuggacccucgucgagcccggcgacaagaucaccuucgaggccaccggcaaccucgucgucccccgcuacgccuucgccauggagcgcaacgccggcuccggcaucaucaucuccgacacccccguccacgacugcaacaccaccugccagacccccaagggcgccaucaacaccucccuccccuuccagaacauccaccccaucaccaucggcaagugccccaaguacgucaaguccaccaagcuccgccucgccaccggccuccgcaacguccccuccauccagucccgcggccucuucggcgccaucgccggcuucaucgagggcggcuggaccggcauggucgacggcugguacggcuaccaccaccagaacgagcagggcuccggcuacgccgccgaccucaaguccacccagaacgccaucgacaagaucaccaacaaggucaacuccgucaucgagaagaugaacacccaguucaccgccgucggcaaggaguucaaccaccucgagaagcgcaucgagaaccucaacaagaaggucgacgacggcuuccucgacaucuggaccuacaacgccgagcuccucguccuccucgagaacgagcgcacccucgacuaccacgacuccaacgucaagaaccucuacgagaagguccgcucccagcucaagaacaacgccaaggagaucggcaacggcugcuucgaguucuaccacaagugcgacaacaccugcauggaguccgucaagaacggcaccuacgacuaccccaaguacuccgaggaggccaagcucaaccgcgaggagaucgacggcgucaagcucgaguccacccgcaucuaccagauccucgccaucuacuccaccgucgccuccucccucguccucgucgucucccucggcgccaucuccuucuggaugugcuccaacggcucccuccagugccgcaucugcaucuga

SEQ ID NO: 103562 - RNA, 1701 nt, Artificial Sequence
  derived and/or modified CDS sequence (opt2) from hemagglutinin__InfluenzaA__AEO01444
augaaggccauccucgucguccuccucuacaccuucgccaccgccaacgccgacacccucugcaucggcuaccacgccaacaacuccaccgacaccgucgacaccguccucgagaagaacgucaccgucacccacuccgucaaccuccucgaggacaagcacaacggcaagcucugcaagcuccgcggcgucgccccccuccaccucggcaagugcaacaucgccggcuggauccucggcaaccccgagugcgagucccucuccaccgccuccuccugguccuacaucgucgagaccuccaacuccgacaacggcaccugcuaccccggcgacuucaucgacuacgaggagcuccgcgagcagcucuccuccgucuccuccuucgagcgcuucgagaucuuccccaagaccuccuccuggcccaaccacgacuccgacaagggcgucaccgccgccugcccccacgccggcgccaaguccuucuacaagaaccucaucuggcucgucaagaagggcaacuccuaccccaagcucuccaaguccuacaucaacgacaagggcaaggagguccucguccucuggggcauccaccaccccuccaccuccgccgaccagcagucccucuaccagaacgccgacgccuacgucuucgucggcaccucccgcuacuccaagaaguucaagcccgagaucgccauccgccccaagguccgcgaccaggagggccgcaugaacuacuacuggacccucgucgagcccggcgacaagaucaccuucgaggccaccggcaaccucgucgucccccgcuacgccuucgccauggagcgcaacgccggcuccggcaucaucaucuccgacacccccguccacgacugcaacaccaccugccagacccccaagggcgccaucaacaccucccuccccuuccagaacauccaccccaucaccaucggcaagugccccaaguacgucaaguccaccaagcuccgccucgccaccggccuccgcaacguccccuccauccagucccgcggccucuucggcgccaucgccggcuucaucgagggcggcuggaccggcauggucgacggcugguacggcuaccaccaccagaacgagcagggcuccggcuacgccgccgaccucaaguccacccagaacgccaucgacaagaucaccaacaaggucaacuccgucaucgagaagaugaacacccaguucaccgccgucggcaaggaguucaaccaccucgagaagcgcaucgagaaccucaacaagaaggucgacgacggcuuccucgacaucuggaccuacaacgccgagcuccucguccuccucgagaacgagcgcacccucgacuaccacgacuccaacgucaagaaccucuacgagaagguccgcucccagcucaagaacaacgccaaggagaucggcaacggcugcuucgaguucuaccacaagugcgacaacaccugcauggaguccgucaagaacggcaccuacgacuaccccaaguacuccgaggaggccaagcucaaccgcgaggagaucgacggcgucaagcucgaguccacccgcaucuaccagauccucgccaucuacuccaccgucgccuccucccucguccucgucgucucccucggcgccaucuccuucuggaugugcuccaacggcucccuccagugccgcaucugcaucuga

SEQ ID NO: 103563 - RNA, 1701 nt, Artificial Sequence; identical to SEQ ID NO: 100873
  derived and/or modified CDS sequence (opt2) from hemagglutinin__InfluenzaA__AEO01445

SEQ ID NO: 103564 - RNA, 1701 nt, Artificial Sequence; identical to SEQ ID NO: 103423
  derived and/or modified CDS sequence (opt2) from hemagglutinin__InfluenzaA__AEO01446

SEQ ID NO: 103565 - RNA, 1701 nt, Artificial Sequence
  derived and/or modified CDS sequence (opt2) from hemagglutinin__InfluenzaA__AEO01447
augaaggccauccucgucguccuccucuacaccuucgccaccgccaacgccgacacccucugcaucggcuaccacgccaacaacuccaccgacaccgucgacaccguccucgagaagaacgucaccgucacccacuccgucaaccuccucgaggacaagcacaacggcaagcucugcaagcuccgcggcgucgccccccuccaccucggcaagugcaacaucgccggcuggauccucggcaaccccgagugcgagucccucuccaccgccuccuccugguccuacaucgucgagaccuccuccuccgacaacggcaccugcuaccccggcgacuucaucgacuacgaggagcuccgcgagcagcucuccuccgucuccuccuucgagcgcuucgagaucuuccccaagaccuccuccuggcccaaccacgacuccaacaagggcgucaccgccgccugcccccacgccggcgccaaguccuucuacaagaaccucaucuggcucgucaagaagggcaacuccuaccccaagcucuccaaguccuacaucaacgacaagggcaaggagguccucguccucuggggcauccaccaccccuccaccuccgccgaccagcagucccucuaccagaacgccgacgccuacgucuucgucggcaccucccgcuacuccaagaaguucaagcccgagaucgccauccgccccaagguccgcgaccaggagggccgcaugaacuacuacuggacccucgucgagcccggcgacaagaucaccuucgaggccaccggcaaccucgucgucccccgcuacgccuucgccauggagcgcaacgccggcuccggcaucaucaucuccgacacccccguccacgacugcaacaccaccugccagacccccaagggcgccaucaacaccucccuccccuuccagaacauccaccccaucaccaucggcaagugccccaaguacgucaaguccaccaagcuccgccucgccaccggccuccgcaacguccccuccauccagucccgcggccucuucggcgccaucgccggcuucaucgagggcggcuggaccggcauggucgacggcugguacggcuaccaccaccagaacgagcagggcuccggcuacgccgccgaccucaaguccacccagaacgccaucgacgagaucaccaacaaggucaacuccgucaucgagaagaugaacacccaguucaccgccgucggcaaggaguucaaccaccucgagaagcgcaucgagaaccucaacaagaaggucgacgacggcuuccucgacaucuggaccuacaacgccgagcuccucguccuccucgagaacgagcgcacccucgacuaccacgacuccaacgucaagaaccucuacgagaagguccgcucccagcucaagaacaacgccaaggagaucggcaacggcugcuucgaguucuaccacaagugcgacaacaccugcauggaguccgucaagaacggcaccuacgacuaccccaaguacuccgaggaggccaagcucaaccgcgaggagaucgacggcgucaagcucgaguccacccgcaucuaccagauccucgccaucuacuccaccaucgccuccucccucguccucgucgucucccucggcgccaucuccuucuggaugugcuccaacggcucccuccagugccgcaucugcaucuga

SEQ ID NO: 103566 - RNA, 1701 nt, Artificial Sequence; identical to SEQ ID NO: 99058
  derived and/or modified CDS sequence (opt2) from hemagglutinin__InfluenzaA__AEO01448

SEQ ID NO: 103567 - RNA, 1701 nt, Artificial Sequence; identical to SEQ ID NO: 103541
  derived and/or modified CDS sequence (opt2) from hemagglutinin__InfluenzaA__AEO01449

SEQ ID NO: 103568 - RNA, 1701 nt, Artificial Sequence
  derived and/or modified CDS sequence (opt2) from hemagglutinin__InfluenzaA__AEO01450
augaaggccauccucgucguccuccucuacaccuucgccaccgccaacgccgacacccucugcaucggcuaccacgccaacaacuccaccgacaccgucgacaccguccucgagaagaacgucaccgucacccacuccgucaaccuccucgaggacaagcacaacggcaagcucugcaagcuccgcggcgucgccccccuccaccucggcaagugcaacaucgccggcuggauccucggcaaccccgagugcgagucccucuccaccgccuccuccugguccuacaucgucgagaccuccuccuccgacaacggcaccugcuaccccggcgacuucaucgacuacgaggagcuccgcgagcagcucuccuccgucuccuccuucgagcgcuucgagaucuuccccaagaccuccuccuggcccaaccacgacuccaacaagggcgucaccgccgccugcccccacgccggcgccaaguccuucuacaagaaccucaucuggcucgucaagaagggcaacuccuaccccaagcucuccaaguccuacaucaacgacaagggcaaggagguccucguccucuggggcauccaccaccccuccaccuccaccgaccagcagucccucuaccagaacgccgacgccuacgucuucgucggcaccucccgcuacuccaagaaguucaagcccgagaucgccauccgccccaagguccgcgaccaggagggccgcaugaacuacuacuggacccucgucgagcccggcgacaagaucaccuucgaggccaccggcaaccucgucgucccccgcuacgccuucgccauggagcgcaacgccggcuccggcaucaucaucuccgacacccccguccacgacugcaacaccaccugccagacccccaagggcgccaucaacaccucccuccccuuccagaacauccaccccaucaccaucggcaagugccccaaguacgucaaguccaccaagcuccgccucgccaccggccuccgcaacguccccuccauccagucccgcggccucuucggcgccaucgccggcuucaucgagggcggcuggaccggcauggucgacggcugguacggcuaccaccaccagaacgagcagggcuccggcuacgccgccgaccucaaguccacccagcacgccaucgacgagaucaccaacaaggucaacuccgucaucgagaagaugaacacccaguucaccgccgucggcaaggaguucaaccaccucgagaagcgcaucgagaaccucaacaagaaggucgacgacggcuuccucgacaucuggaccuacaacgccgagcuccucguccuccucgagaacgagcgcacccucgacuaccacgacuccaacgucaagaaccucuacgagaagguccgcucccagcucaagaacaacgccaaggagaucggcaacggcugcuucgaguucuaccacaagugcgacaacaccugcauggaguccgucaagaacggcaccuacgacuaccccaaguacuccgaggaggccaagcucaaccgcgaggagaucgacggcgucaagcucgaguccacccgcaucuaccagauccucgccaucuacuccaccgucgccuccucccucguccucgucgucucccucggcgccaucuccuucuggaugugcuccaacggcucccuccagugccgcaucugcaucuga

SEQ ID NO: 103569 - RNA, 1701 nt, Artificial Sequence; identical to SEQ ID NO: 98705
  derived and/or modified CDS sequence (opt2) from hemagglutinin__InfluenzaA__AEO01451

SEQ ID NO: 103570 - RNA, 1701 nt, Artificial Sequence
  derived and/or modified CDS sequence (opt2) from hemagglutinin__InfluenzaA__AEO01452
augaaggccauccucgucguccuccucuacaccuucgccaccgccaacgccgacacccucugcaucggcuaccacgccaacaacuccaccgacaccgucgacaccguccucgagaagaacgucaccgucacccacuccgucaaccuccucgaggacaagcacaacggcaagcucugcaagcuccgcggcgucgccccccuccaccucggcaagugcaacaucgccggcuggauccucggcaaccccgagugcgagucccucuccaccgccuccuccugguccuacaucgucgagaccuccuccuccgacaacggcaccugcuaccccggcgacuucaucgacuacgaggagcuccgcgagcagcucuccuccgucuccuccuucgagcgcuucgagaucuuccccaagaccuccuccuggcccaaccacgacuccaacaagggcgucaccgccgccugcccccacgccgaggccaaguccuucuacaagaaccucaucuggcucgucaagaagggcaacuccuaccccaagcucuccaaguccuacaucaacgacaagggcaaggagguccucguccucuggggcauccaccaccccuccaccuccgccgaccagcagucccucuaccagaacgccgacgccuacgucuucgucggcaccucccgcuacuccaagaaguucaagcccgagaucgccauccgccccaagguccgcgaccaggagggccgcaugaacuacuacuggacccucgucgagcccggcgacaagaucaccuucgaggccaccggcaaccucgucgucccccgcuacgccuucgccauggagcgcaacgccggcuccggcaucaucaucuccgacacccccgcccacgacugcaacaccaccugccagacccccaagggcgccaucaacaccucccuccccuuccagaacauccaccccaucaccaucggcaagugccccaaguacgucaaguccaccaagcuccgccucgccaccggccuccgcaacguccccuccauccagucccgcggccucuucggcgccaucgccggcuucaucgagggcggcuggaccggcauggucgacggcugguacggcuaccaccaccagaacgagcagggcuccggcuacgccgccgaccucaaguccacccagaacgccaucgacgagaucaccaacaaggucaacuccgucaucgagaagaugaacacccaguucaccgccgucggcaaggaguucaaccaccucgagaagcgcaucgagaaccucaacaagaaggucgacgacggcuuccucgacaucuggaccuacaacgccgagcuccucguccuccucgagaacgagcgcacccucgacuaccacgacuccaacgucaagaagcucuacgagaagguccgcucccagcucaagaacaacgccaaggagaucggcaacggcugcuucgaguucuaccacaagugcgacaacaccugcauggaguccgucaagaacggcaccuacgacuaccccaaguacuccgaggaggccaagcucaaccgcgaggagaucgacggcgucaagcucgaguccacccgcaucuaccagauccucgccaucuacuccaccgucgccuccucccucguccucgucgucucccucggcgccaucuccuucuggaugugcuccaacggcucccuccagugccgcaucugcaucuga

SEQ ID NO: 103571 - RNA, 1701 nt, Artificial Sequence
  derived and/or modified CDS sequence (opt2) from hemagglutinin__InfluenzaA__AEO01453
augaaggccauccucgucguccuccucuacaccuucgccaucgccaacgccgacacccucugcaucggcuaccacgccaacaacuccaccgacaccgucgacaccguccucgagaagaacgucaccgucacccacuccgucaaccuccucgaggacaagcacaacggcaagcucugcaagcuccgcggcgucgccccccuccaccucggcaagugcaacaucgccggcuggauccucggcaaccccgagugcgagucccucuccaccgccuccuccugguccuacaucgucgagaccuccuccuccgacaacggcaccugcuaccccggcgacuucaucgacuacgaggagcuccgcgagcagcucuccuccgucuccuccuucgagcgcuucgagaucuuccccaagaccuccuccuggcccaaccacgacuccaacaagggcgucaccgccgccugcccccacgccggcgccaaguccuucuacaagaaccucaucuggcucgucaagaagggcaacuccuaccccaagcucuccaaguccuacaucaacgacaagggcaaggagguccucguccucuggggcguccaccaccccuccaccuccgccgaccagcagucccucuaccagaacgccgacgccuacgucuucgucggcaccucccgcuacuccaagaaguucaagcgcgagaucgccauccgccccaagguccgcgaccaggagggccgcaugaacuacuacuggacccucgucgagcccggcgacaagaucaccuucgaggccaccggcaaccucgucgucccccgcuacgccuucgccauggagcgcaacgccggcuccggcaucaucaucuccgacacccccguccacgacugcaacaccaccugccagacccccaagggcgccaucaacaccucccuccccuuccagaacauccaccccaucaccaucggcaagugccccaaguacgucaaguccaccaagcuccgccucgccaccggccuccgcaacguccccuccauccagucccgcggccucuucggcgccaucgccggcuucaucgagggcggcuggaccggcauggucgacggcugguacggcuaccaccaccagaacgagcagggcuccggcuacgccgccgaccucaaguccacccagcacgccaucgacgagaucaccaacaaggucaacuccgucaucgagaagaugaacacccaguucaccgccgucggcaaggaguucaaccaccucgagaagcgcaucgagaaccucaacaagaaggucgacgacggcuuccucgacaucuggaccuacaacgccgagcuccucguccuccucgagaacgagcgcacccucgacuaccacgacuccaacgucaagaaccucuacgagaagguccgcucccagcucaagaacaacgccaaggagaucggcaacggcugcuucgaguucuaccacaagugcgacaacaccugcauggaguccgucaagaacggcaccuacgacuaccccaaguacuccgaggaggccaagcucaaccgcgaggagaucaacggcgucaagcucgaguccacccgcaucuaccagauccucgccaucuacuccaccgucgccuccucccucguccucgucgucucccucggcgccaucuccuucuggaugugcuccaacggcucccuccagugccgcaucugcaucuga

SEQ ID NO: 103572 - RNA, 1701 nt, Artificial Sequence
  derived and/or modified CDS sequence (opt2) from hemagglutinin__InfluenzaA__AEO01454
augaaggccauccucgucguccuccucuacaccuucgccaccgccaacgccgacacccucugcaucggcuaccacgccaacaacuccaccgacaccgucgacaccguccucgagaagaacgucaccgucacccacuccgucaacauccucgaggacaagcacaacggcaagcucugcaagcuccgcggcgucgccccccuccaccucggcaagugcaacaucgccggcuggauccucggcaaccccgagugcgagucccucuccaccgccuccuccugguccuacaucgucgagaccuccuccuccgacaacggcaccugcuaccccggcgacuucaucgacuacgaggagcuccgcgagcagcucuccuccgucuccuccuucgagcgcuucgagaucuuccccaagaccuccuccuggcccaaccacgacuccaacaagggcgucaccgccgccugcccccacgccggcgccaaguccuucuacaagaaccucaucuggcucgucaagaagggcaacuccuaccccaagcucuccaaguccuacaucaacgacaagggcaaggagguccucguccucuggggcauccaccaccccuccaccuccgccgaccagcagucccucuaccagaacgccgacgccuacgucuucgucggcaccucccgcuacuccaagaaguucaagcccgagaucgccauccgccccaagguccgcgaccaggagggccgcaugaacuacuacuggacccucgucgagcccggcgacaagaucaccuucgaggccaccggcaaccucgucgucccccgcuacgccuucgccauggagcgcaacgccggcuccggcaucaucaucuccgacacccccguccacgacugcaacaccaccugccagacccccaagggcgccaucaacaccucccuccccuuccagaacauccaccccaccaccaucggcaagugccccaaguacgucaaguccaccaagcuccgccucgccaccggccuccgcaacguccccuccauccagucccgcggccucuucggcgccaucgccggcuucaucgagggcggcuggaccggcauggucgacggcugguacggcuaccaccaccagaacgagcagggcuccggcuacgccgccgaccucaaguccacccagaacgccaucgacgagaucaccaacaaggucaacuccgucaucgagaagaugaacacccaguucaccgccgucggcaaggaguucaaccaccucgagaagcgcaucgagaaccucaacaagaaggucgacgacggcuuccucgacaucuggaccuacaacgccgagcuccucguccuccucgagaacgagcgcacccucgacuaccacgacuccaacgucaagaaccucuacgagaagguccgcucccagcucaagaacaacgccaaggagaucggcaacggcugcuucgaguucuaccacaagugcgacaacaccugcauggaguccgucaagaacggcaccuacgacuaccccaaguacuccgaggaggccaagcucaaccgcgaggagaucgacggcgucaagcucgaguccacccgcaucuaccagauccucgccaucuacuccaccgucgccuccucccucguccucgucgucucccucggcgccaucuccuucuggaugugcuccaacggcucccuccagugccgcaucugcaucuga

SEQ ID NO: 103573 - RNA, 1701 nt, Artificial Sequence
  derived and/or modified CDS sequence (opt2) from hemagglutinin__InfluenzaA__AEO01455
augaaggccauccucgucguccuccucuacaccuucgccaccgccaacgccgacacccucugcaucggcuaccacgccaacaacuccaccgacaccgucgacaccguccucgagaagaacgucaccgucacccacuccgucaaccuccucgaggacaagcacaacggcaagcucugcaagcuccgcggcgucgccccccuccaccucggcaagugcaacaucgccggcuggauccucggcaaccccgagugcgagucccucuccaccgccuccuccugguccuacaucgucgagaccuccuccuccgacaacggcaccugcuaccccggcgacuucaucgacuacgaggagcuccgcgagcagcucuccuccgucuccuccuucgagcgcuucgagaucuuccccaagaccuccuccuggcccaaccacgacuccaacaagggcgucaccgccgccugcccccacgccggcgccaaguccuucuacaagaaccucaucuggcucgucaagaagggcaacuccuaccccaagcucuccaaguccuacaucaacgacaagggcaaggagguccucguccucuggggcauccaccaccccuccaccuccgccgaccagcagucccucuaccagaacgccgacgccuacgucuucgucggcaccucccgcuacuccaagaaguucaagcccgagaucgccauccgccccaagguccgcgagcaggagggccgcaugaacuacuacuggacccucgucgagcccggcgacaagaucaccuucgaggccaccggcaaccucgucgucccccgcuacgccuucgccauggagcgcaacgccggcuccggcaucaucaucuccgacacccccguccacgacugcaacaccaccugccagacccccaagggcgccaucaacaccucccuccccuuccagaacauccaccccaucaccaucggcaagugccccaaguacgucaaguccaccaagcuccgccucgccaccggccuccgcaacauccccuccauccagucccgcggccucuucggcgccaucgccggcuucaucgagggcggcuggaccggcauggucgacggcugguacggcuaccaccaccagaacgagcagggcuccggcuacgccgccgaccucaaguccacccagaacgccaucgacgagaucaccaacaaggucaacuccgucaucgagaagaugaacacccaguucaccgccgucggcaaggaguucaaccaccucgagaagcgcaucgagaaccucaacaagaaggucgacgacggcuuccucgacaucuggaccuacaacgccgagcuccucguccuccucgagaacgagcgcacccucgacuaccacgacuccaacgucaagaaccucuacgagaagguccgcucccagcucaagaacaacgccaaggagaucggcaacggcugcuucgaguucuaccacaagugcgacaacaccugcauggaguccgucaagaacggcaccuacgacuaccccaaguacuccgaggaggccaagcucaaccgcgaggagaucgacggcgucaagcucgaguccacccgcaucuaccagauccucgccaucuacuccaccgucgccuccucccucguccucgucgucucccucggcgccaucuccuucuggaugugcuccaacggcucccuccagugccgcaucugcaucuga

SEQ ID NO: 103574 - RNA, 1701 nt, Artificial Sequence
  derived and/or modified CDS sequence (opt2) from hemagglutinin__InfluenzaA__AEO01456
augaaggccauccucaucguccuccucuacaccuucgccaccgccaacgccgacacccucugcaucggcuaccacgccaacaacuccaccgacaccgucgacacccuccucgagaagaacgucaccgucacccacuccgucaaccuccucgaggacaagcacaacggcaagcucugcaagcuccgcggcgucgccccccuccaccucggcaagugcaacaucgccggcuggauccucggcaaccccgagugcgagucccucuccaccgccuccuccugguccuacaucgucgagaccuccuccuccgacaacggcaccugcuaccccggcgacuucaucgacuacgaggagcuccgcgagcagcucuccuccgucuccuccuucgagcgcuucgagaucuuccccaagaccuccuccuggcccaaccacgacuccaacaagggcgucaccgccgccugcccccacgccggcgccaaguccuucuacaagaaccucaucuggcucgucaagaagggcaacuccuaccccaagcucuccaaguccuacaucaacgacaagggcaaggagguccucguccucuggggcauccaccaccccuccaccuccgccgaccagcagucccucuaccagaacgccgacgccuacgucuucgucggcaccucccgcuacuccaagaaguucaagcccgagaucgccauccgccccaagguccgcgaccaggagggccgcaugaacuacuacuggacccucgucgagcccggcgacaagaucaccuucgaggccaccggcaaccucgucgucccccgcuacgccuucgccauggaccgcaacgccggcuccggcaucaucaucuccgacgcccccguccacgacugcaacaccaccugccagacccccaagggcgccaucaacaccucccuccccuuccagaacauccaccccaucaccaucggcaagugccccaaguacgucaaguccaccaagcuccgccucgccaccggccuccgcaacguccccuccauccagucccgcggccucuucggcgccaucgccggcuucaucgagggcggcuggaccggcauggucgacggcugguacggcuaccaccaccagaacgagcagggcuccggcuacgccgccgaccucaaguccacccagaacgccaucgacgagaucaccaacaaggucaacuccgucaucgagaagaugaacacccaguucaccgccgucggcaaggaguucaaccaccucgagaagcgcaucgagaaccucaacaagaaggucgacgacggcuuccucgacaucuggaccuacaacgccgagcuccucguccuccucgagaacgagcgcacccucgacuaccacgacuccaacgucaagaaccucuacgagaagguccgcucccagcucaagaacaacgccaaggagaucggcaacggcugcuucgaguucuaccacaagugcgacaacaccugcauggaguccgucaagaacggcaccuacgacuaccccaaguacuccgaggaggccaagcucaaccgcgaggagaucgacggcgucaagcucgaguccacccgcaucuaccagauccucgccaucuacuccaccgucgccuccucccucguccucgucgucucccucggcgccaucuccuucuggaugugcuccaacggcucccuccagugccgcaucugcaucuga

SEQ ID NO: 103575 - RNA, 1701 nt, Artificial Sequence; identical to SEQ ID NO: 103474
  derived and/or modified CDS sequence (opt2) from hemagglutinin__InfluenzaA__AEO01457

SEQ ID NO: 103576 - RNA, 1701 nt, Artificial Sequence; identical to SEQ ID NO: 103470
  derived and/or modified CDS sequence (opt2) from hemagglutinin__InfluenzaA__AEO01458

SEQ ID NO: 103577 - RNA, 1701 nt, Artificial Sequence; identical to SEQ ID NO: 103470
  derived and/or modified CDS sequence (opt2) from hemagglutinin__InfluenzaA__AEO01459

SEQ ID NO: 103578 - RNA, 1701 nt, Artificial Sequence; identical to SEQ ID NO: 100125
  derived and/or modified CDS sequence (opt2) from hemagglutinin__InfluenzaA__AEO01461

SEQ ID NO: 103579 - RNA, 1701 nt, Artificial Sequence; identical to SEQ ID NO: 99806
  derived and/or modified CDS sequence (opt2) from hemagglutinin__InfluenzaA__AEO01462

SEQ ID NO: 103580 - RNA, 1701 nt, Artificial Sequence; identical to SEQ ID NO: 99058
  derived and/or modified CDS sequence (opt2) from hemagglutinin__InfluenzaA__AEO01463

SEQ ID NO: 103581 - RNA, 1701 nt, Artificial Sequence
  derived and/or modified CDS sequence (opt2) from hemagglutinin__InfluenzaA__AEO01464
augaaggccauccucgucguccuccucuacaccuucgccaccgccaacgccgacacccucugcaucggcuaccacgccaacaacuccaccgacaccgucgacacccuccucgagaagaacgucaccgucacccacuccgucaaccuccucgaggacaagcacaacggcaagcucugcaagcuccgcggcgucgccccccuccaccucggcaagugcaacaucgccggcuggauccucggcaaccccgagugcgagucccucuccaccgccuccuccugguccuacaucgucgagaccuccuccuccgacaacggcaccugcuaccccggcgacuucaucgacuacgaggagcuccgcgagcagcucuccuccgucuccuccuucgagcgcuucgagaucuuccccaagaccuccuccuggcccaaccacgacuccaacaagggcgucaccgccgccugcccccacgccggcgccaaguccuucuacaagaaccucaucuggcucgucaagaagggcaacuccuaccccaagcucuccaaguccuacaucaacgacaagggcaaggagguccucguccucuggggcauccaccaccccuccaccuccgccgaccagcagucccucuaccagaacgccgacgccuacgucuucgucggcaccucccgcuacuccaagaaguucaagcccgagaucgccauccgccccaagguccgcgaccaggagggccgcaugaacuacuacuggacccucgucgagcccggcgacaagaucaccuucgaggccaccggcaaccucgucgucccccgcuacgccuucgccauggaccgcaacgccggcuccggcaucaucaucuccgacaccuccguccacgacugcaacaccaccugccagacccccaagggcgccaucaacaccucccuccccuuccagaacauccaccccaucaccaucggcaagugccccaaguacgucaaguccaccaagcuccgccucgccaccggccuccgcaacguccccuccauccagucccgcggccucuucggcgccaucgccggcuucaucgagggcggcuggaccggcauggucgacggcugguacggcuaccaccaccagaacgagcagggcuccggcuacgccgccgaccucaaguccacccagaacgccaucgacgagaucaccaacaaggucaacuccgucaucgagaagaugaacacccaguucaccgccgucggcaaggaguucaaccaccucgagaagcgcaucgagaaccucaacaagaaggucgacgacggcuuccucgacaucuggaccuacaacgccgagcuccucguccuccucgagaacgagcgcacccucgacuaccacgacuccaacgucaagaaccucuacgagaagguccgcucccagcucaagaacaacgccaaggagaucggcaacggcugcuucgaguucuaccacaagugcgacaacaccugcauggaguccgucaagaacggcaccuacgacuaccccaaguacuccgaggaggccaagcucaaccgcgaggagaucgacggcgucaagcucgaguccacccgcaucuaccagauccucgccaucuacuccaccgucgccuccucccucguccucgucgucucccucggcgccaucuccuucuggaugugcuccaacggcucccuccagugccgcaucugcaucuga

SEQ ID NO: 103582 - RNA, 1701 nt, Artificial Sequence; identical to SEQ ID NO: 103561
  derived and/or modified CDS sequence (opt2) from hemagglutinin__InfluenzaA__AEO01465

SEQ ID NO: 103583 - RNA, 1701 nt, Artificial Sequence; identical to SEQ ID NO: 100577
  derived and/or modified CDS sequence (opt2) from hemagglutinin__InfluenzaA__AEO01466

SEQ ID NO: 103584 - RNA, 1701 nt, Artificial Sequence; identical to SEQ ID NO: 99058
  derived and/or modified CDS sequence (opt2) from hemagglutinin__InfluenzaA__AEO01467

SEQ ID NO: 103585 - RNA, 1701 nt, Artificial Sequence; identical to SEQ ID NO: 99869
  derived and/or modified CDS sequence (opt2) from hemagglutinin__InfluenzaA__AEO01468

SEQ ID NO: 103586 - RNA, 1701 nt, Artificial Sequence; identical to SEQ ID NO: 98705
  derived and/or modified CDS sequence (opt2) from hemagglutinin__InfluenzaA__AEO01469

SEQ ID NO: 103587 - RNA, 1701 nt, Artificial Sequence
  derived and/or modified CDS sequence (opt2) from hemagglutinin__InfluenzaA__AEO01470
augaaggccauccucgucguccuccucuacaccuucgccaccgccaacgccgacacccucugcaucggcuaccacgccaacaacuccaccgacaccgucgacaccguccucgagaagaacgucaccgucacccacuccgucaaccuccucgaggacaagcacaacggcaagcucugcaagcuccgcggcgucgccccccuccaccucggcaagugcaacaucgccggcuggauccucggcaaccccgagugcgagucccucuccaccgccuccuccugguccuacaucgucgagaccuccuccuccgacaacggcaccugcuaccccggcgacuucaucgacuacgaggagcuccgcgagcagcucuccuccgucuccuccuucgagcgcuucgagaucuuccccaagaccuccuccuggcccaaccacgacuccaacaagggcgucaccgccgccugcccccacgccggcgccaaguccuucuacaagaaccucaucuggcucgucaagaagggcaacuccuaccccaagcucuccaaguccuacaucaacgacaagggcaaggagguccucguccucuggggcauccaccaccccuccaccuccgccgaccagcagucccucuaccagaacgccgacgccuacgucuucgucggcaccucccgcuacuccaagaaguucaagcccgagaucgccauccgccccaagguccgcgaccaggagggccgcaugaacuacuacuggacccucgucgagcccggcgacaagaucaccuucgaggccaccggcaaccucgucaucccccgcuacgccuucgccauggagcgcaacgccggcuccggcaucaucaucuccgacacccccguccacgacugcaacaccaccugccagacccccaagggcgccaucaacaccucccuccccuuccagaacauccaccccaucaccaucggcaagugccccaaguacgucaaguccaccaagcuccgccucgccaccggccuccgcaacguccccuccauccagucccgcggccucuucggcgccaucgccggcuucaucgagggcggcuggaccggcauggucgacggcugguacggcuaccaccaccagaacgagcagggcuccggcuacgccgccgaccucaaguccacccagaacgccaucgacgagaucaccaacaaggucaacuccgucaucgagaagaugaacacccaguucaccgccgucggcaaggaguucaaccaccucgagaagcgcaucgagaaccucaacaagaaggucgacgacggcuuccucgacaucuggaccuacaacgccgagcuccucguccuccucgagaacgagcgcacccucgacuaccacgacuccaacgucaagaaccucuacgagaagguccgcucccagcucaagaacaacgccaaggagaucggcaacggcugcuucgaguucuaccacaagugcgacaacaccugcauggaguccgucaagaacggcaccuacgacuaccccaaguacuccgaggaggccaagcucaaccgcgaggagaucgacggcgucaagcucgaguccacccgcaucuaccagauccucgccaucuacuccaccgucgccuccucccucguccucgucgucucccucggcgccaucuccuucuggaugugcuccaacggcucccuccagugccgcaucugcaucuga

SEQ ID NO: 103588 - RNA, 1701 nt, Artificial Sequence; identical to SEQ ID NO: 103414
  derived and/or modified CDS sequence (opt2) from hemagglutinin__InfluenzaA__AEO01471

SEQ ID NO: 103589 - RNA, 1701 nt, Artificial Sequence; identical to SEQ ID NO: 100332
  derived and/or modified CDS sequence (opt2) from hemagglutinin__InfluenzaA__AEO01472

SEQ ID NO: 103590 - RNA, 1701 nt, Artificial Sequence
  derived and/or modified CDS sequence (opt2) from hemagglutinin__InfluenzaA__AEO01473
augaaggccauccucgucguccuccucuacaccuucgccaccgccaacgccgacacccucugcaucggcuaccacgccaacaacuccaccgacaccgucgacaccguccucgagaagaacgucaccgucacccacuccgucaaccuccucgaggacaagcacaacggcaagcucugcaagcuccgcggcgucgccccccuccaccucggcaagugcaacaucgccggcuggauccucggcaaccccgagugcgagucccucuccaccgccuccuccugguccuacaucgucgagaccuccuccuccgacaacggcaccugcuaccccggcgacuucaucgacuacgaggagcuccgcgagcagcucuccuccgucuccuccuucgagcgcuucgagaucuuccccaagaccuccuccuggcccaaccacgacuccaacaagggcgucaccgccgccugcccccacgccggcgccaaguccuucuacaagaaccucaucuggcucgucaagaagggcaacuccuaccccaagcucaacaaguccuacaucaacgacaagggcaaggagguccucguccucuggggcauccaccaccccuccaccuccgccgaccagcagucccucuaccagaacgccgacgccuacgucuucgucggcaccucccgcuacuccaagaaguucaagcccgagaucgccauccgccccaagguccgcgaccaggagggccgcaugaacuacuacuggacccucgucgagcccggcgacaagaucaccuucgaggccaccggcaaccucgucgucccccgcuacgccuucgccauggagcgcaacgccggcuccggcaucaucaucuccgacacccccguccacgacugcaacaccaccugccagacccccgagggcgccaucaacaccucccuccccuuccagaacauccaccccaucaccaucggcgagugccccaaguacgucaaguccaccaagcuccgccucgccaccggccuccgcaacguccccuccauccagucccgcggccucuucggcgccaucgccggcuucaucgagggcggcuggaccggcauggucgacggcugguacggcuaccaccaccagaacgagcagggcuccggcuacgccgccgaccucaaguccacccagaacgccaucgacaagaucaccaacaaggucaacuccgucaucgagaagaugaacacccaguucaccgccgucggcaaggaguucaaccaccucgagaagcgcaucgagaaccucaacaagaaggucgacgacggcuuccucgacaucuggaccuacaacgccgagcuccucguccuccucgagaacgagcgcacccucgacuaccacgacuccaacgucaagaaccucuacgagaagguccgcucccagcucaagaacaacgccaaggagaucggcaacggcugcuucgaguucuaccacaagugcgacaacaccugcauggaguccgucaagaacggcaccuacgacuaccccaaguacuccgaggaggccaagcucaaccgcgaggagaucgacggcgucaagcucgaguccacccgcaucuaccagauccucgccaucuacuccaccgucgccuccucccucguccucgucgucucccucggcgccaucuccuucuggaugugcuccaacggcucccuccagugccgcaucugcaucuga

SEQ ID NO: 103591 - RNA, 1701 nt, Artificial Sequence
  derived and/or modified CDS sequence (opt2) from hemagglutinin__InfluenzaA__AEO01474
augaaggccauccucgucguccuccucuacaccuucgccaccgccaacgccgacacccucugcaucggcuaccacgccaacaacuccaccgacaccgucgacaccguccucgagaagaacgucaccgucacccacuccgucaaccuccucgaggacaagcacaacggcaagcucugcaagcuccgcggcgucgccccccuccaccucggcaagugcaacaucgccggcuggauccucggcaaccccgagugcgagucccucuccaccgccuccuccugguccuacaucgucgagaccuccuccuccgacaacggcaccugcuaccccggcgacuucaucgacuacgaggagcuccgcgagcagcucuccuccgucuccuccuucgagcgcuucgagaucuuccccaagaccuccuccuggcccaaccacgacuccgacaagggcgucaccgccgccugcccccacgccggcgccaaguccuucuacaagaaccucaucuggcucgucaagaagggcaacuccuaccccaagcucuccaaguccuacaucaacgacaagggcaaggagguccucguccucuggggcauccaccaccccuccaccuccgccgaccagcagucccucuaccagaacgccgacgccuacgucuucgucggcaccucccgcuacuccaagaaguucaagcccgagaucgccauccgccccaagguccgcgaccaggagggccgcaugaacuacuacuggacccucgucgagcccggcgacaagaucaccuucgaggccaccggcaaccucgucgucccccgcuacgccuucgccauggagcgcaacgccggcuccggcaucaucaucuccgacacccccguccacgacugcaacaccaccugccagacccccaagggcgccaucaacaccucccuccccuuccagaacauccaccccaucaccaucggcaagugccccaaguacgucaaguccaccaagcuccgccucgccaccggccuccgcaacguccccuccauccagucccgcggccucuucggcgccaucgccggcuucaucgagggcggcuggaccggcauggucgacggcugguacggcuaccaccaccagaacgagcagggcuccggcuacgccgccgaccucaaguccacccagaacgccaucgacaagaucaccaacaaggucaacuccgucaucgagaagaugaacacccaguucaccgccgucggcaaggaguucaaccaccucgagaagcgcaucgagaaccucaacaagaaggucgacgacggcuuccucgacaucuggaccuacaacgccgagcuccucguccuccucgagaacgagcgcacccucgacuaccacgacuccaacgucaagaaccucuacgagaagguccgcucccagcucaagaacaacgccaaggagaucggcaacggcugcuucgaguucuaccacaagugcgacaacaccugcauggaguccgucaagaacggcaccuacgacuaccccaaguacuccgaggaggccaagcucaaccgcgaggagaucgacggcgucaagcucgaguccacccgcaucuaccagauccucgccaucuacuccaccgucgccuccucccucguccucgucgucucccucggcgccaucuccuucuggaugugcuccaacggcucccuccagugccgcaucugcaucuga

SEQ ID NO: 103592 - RNA, 1701 nt, Artificial Sequence
  derived and/or modified CDS sequence (opt2) from hemagglutinin__InfluenzaA__AEO01475
augaaggccauccucgucguccuccucuacaccuucgccaccgccaacgccgacacccucugcaucggcuaccacgccaacaacuccaccgacaccgucgacaccguccucgagaagaacgucaccgucacccacuccgucaaccuccucgaggacaagcacaacggcaagcucugcaagcuccgcggcgucgccccccuccaccucggcaagugcaacaucgccggcuggauccucggcaaccccgagugcgagucccucuccaccgccuccuccugguccuacaucgucgagaccuccaacuccgacaacggcaccugcuaccccggcgacuucaucgacuacgaggagcuccgcgagcagcucuccuccgucuccuccuucgagcgcuucgagaucuuccccaagaccuccuccuggcccaaccacgacuccaacaagggcgucaccgccgccugcccccacgccggcgccaaguccuucuacaagaaccucaucuggcucgucaagaagggcaacuccuaccccaagcucuccaaguccuacaucaacgacaagggcaaggagguccucguccucuggggcauccaccaccccuccaccuccgccgaccagcagucccucuaccagaacgccgacgccuacgucuucgucggcaccucccgcuacuccaagaaguucaagcccgagaucgccauccgccccaagguccgcgaccaggagggccgcaugaacuacuacuggacccucgucgagcccggcgacaagaucaccuucgaggccaccggcaaccucgucgucccccgcuacgccuucgccauggagcgcaacgccggcuccggcaucaucaucuccgacacccccguccacgacugcaacaccaccugccagacccccaagggcgccaucaacaccucccuccccuuccagaacauccaccccaucaccaucggcaagugccccaaguacgucaaguccaccaagcuccgccucgccaccggccuccgcaacguccccuccauccagucccgcggccucuucggcgccaucgccggcuucaucgagggcggcuggaccggcauggucgacggcugguacggcuaccaccaccagaacgagcagggcuccggcuacgccgccgaccucaaguccacccagcacgccaucgacgagaucaccaacaaggucaacuccgucaucgagaagaugaacacccaguucaccgccgucggcaaggaguucaaccaccucgagaagcgcaucgagaaccucaacaagaaggucgacgacggcuuccucgacaucuggaccuacaacgccgagcuccucguccuccucgagaacgagcgcacccucgacuaccacgacuccaacgucaagaaccucuacgagaagguccgcucccagcucaagaacaacgccaaggagaucggcaacggcugcuucgaguucuaccacaagugcgacaacaccugcauggaguccgucaagaacggcaccuacgacuaccccaaguacuccgaggaggccaagcucaaccgcgaggagaucgacggcgucaagcucgaguccacccgcaucuaccagauccucgccaucuacuccaccgucgccuccucccucguccucgucgucucccucggcgccaucuccuucuggaugugcuccaacggcucccuccagugccgcaucugcaucuga

SEQ ID NO: 103593 - RNA, 1701 nt, Artificial Sequence
  derived and/or modified CDS sequence (opt2) from hemagglutinin__InfluenzaA__AEO01476
augaaggccauccucgucguccuccucuacaccuucuccaccgccaacgccgacacccucugcaucggcuaccacgccaacaacuccaccgacaccgucgacaccguccucgagaagaacgucaccgucacccacuccgucaaccuccucgaggacaagcacaacggcaagcucugcaagcuccgcggcgucgccccccuccaccucggcaagugcaacaucgccggcuggauccucggcaaccccgagugcgagucccucuccaccgccuccuccugguccuacaucgucgagaccuccuccuccgacaacggcaccugcuaccccggcgacuucaucgacuacgaggagcuccgcgagcagcucuccuccgucuccuccuucgagcgcuucgagaucuuccccaagaccuccuccuggcccaaccacgacuccaacaagggcgucaccgccgccugcccccacgccggcgccaaguccuucuacaagaaccucaucuggcucgucaagaagggcaacuccuaccccaagcucuccaaguccuacaucaacgacaagggcaaggagguccucguccucuggggcauccaccaccccuccaccuccgccgaccagcagucccucuaccagaacgccgacgccuacgucuucgucggcaccucccgcuacuccaagaaguucaagcccgagaucgccauccgccccaagguccgcgaccaggagggccgcaugaacuacuacuggacccucgucgagcccggcgacaagaucaccuucgaggccaccggcaaccucgucgucccccgcuacgccuucgccauggagcgcaacgccggcuccggcaucaucaucuccgacacccccguccacgacugcaacaccaccugccagacccccaagggcgccaucaacaccucccuccccuuccagaacauccaccccaucaccaucggcaagugccccaaguacgucaaguccaccaagcuccgccucgccaccggccuccgcaacguccccuccauccagucccgcggccucuucggcgccaucgccggcuucaucgagggcggcuggaccggcauggucgacggcugguacggcuaccaccaccagaacgagcagggcuccggcuacgccgccgaccucaaguccacccagaacgccaucgacgagaucaccaacaaggucaacuccgucaucgagaagaugaacacccaguucaccgccgucggcaaggaguucaaccaccucgagaagcgcaucgagaaccucaacaagaaggucgacgacggcuuccucgacaucuggaccuacaacgccgagcuccucguccuccucgagaacgagcgcacccucgacuaccacgacuccaacgucaagaaccucuacgagaagguccgcucccagcucaagaacaacgccaaggagaucggcaacggcugcuucgaguucuaccacaagugcgacaacaccugcauggaguccgucaagaacggcaccuacgacuaccccaaguacuccgaggaggccaagcucaaccgcgaggagaucgacggcgucaagcucgaguccacccgcaucuaccagauccucgccaucuacuccaccgucgccuccucccucguccucgucgucucccucggcgccaucuccuucuggaugugcuccaacggcucccuccagugccgcaucugcaucuga

SEQ ID NO: 103594 - RNA, 1701 nt, Artificial Sequence
  derived and/or modified CDS sequence (opt2) from hemagglutinin__InfluenzaA__AEO01477
augaaggccauccucgucguccuccucuacaccuucgccaccgccaacgccgacacccucugcaucggcuaccacgccaacaacuccaccgacaccgucgacaccguccucgagaagaacgucaccgucacccacuccgucaaccuccucgaggacaagcacaacggcaagcucugcaagcuccgcggcgucgccccccuccaccucggcaagugcaacaucgccggcuggauccucggcaaccccgagugcgagucccucuccaccgccuccuccugguccuacaucgucgagaccuccuccuccgacaacggcaccugcuaccccggcgacuucaucgacuacgaggagcuccgcgagcagcucuccuccgucuccuccuucgagcgcuucgagaucuuccccaagaccuccuccuggcccaaccacgacuccaacaagggcgucaccgccgccugcccccacgccggcgccaaguccuucuacaagaaccucaucuggcucgucaagaagggcaacuccuaccccaagcucuccaaguccuacaucaacgacaagggcaaggagguccucguccucuggggcauccaccaccccuccaccuccgccgaccagcagucccucuaccagaacgccgacgccuacgccuucgucggcaccucccgcuacuccaagaaguucaagcccgagaucgccauccgccccaagguccgcgagcaggagggccgcaugaacuacuacuggacccucgucgagcccggcgacaagaucaccuucgaggccaccggcaaccucgucgucccccgcuacgccuucgccauggagcgcaacgccggcuccggcaucaucaucuccgacacccccguccacgacugcaacaccaccugccagacccccaagggcgccaucaacaccucccuccccuuccagaacauccaccccaucaccaucggcaagugccccaaguacgucaaguccaccaagcuccgccucgccaccggccuccgcaacguccccuccauccagucccgcggccucuucggcgccaucgccggcuucaucgagggcggcuggaccggcauggucgacggcugguacggcuaccaccaccagaacgagcagggcuccggcuacgccgccgaccucaaguccacccagaacgccaucgacgagaucaccaacaaggucaacuccgucaucgagaagaugaacacccaguucaccgccgucggcaaggaguucaaccaccucgagaagcgcaucgagaaccucaacaagaaggucgacgacggcuuccucgacaucuggaccuacaacgccgagcuccucguccuccucgagaacgagcgcacccucgacuaccacgacuccaacgucaagaaccucuacgagaagguccgcucccagcucaagaacaacgccaaggagaucggcaacggcugcuucgaguucuaccacaagugcgacaacaccugcauggaguccgucaagaacggcaccuacgacuaccccaaguacuccgaggaggccaagcucaaccgcgaggagaucgacggcgucaagcucgaguccacccgcaucuaccagauccucgccaucuacuccaccgucgccuccucccucguccucgucgucucccucggcgccaucuccuucuggaugugcuccaacggcucccuccagugccgcaucugcaucuga

SEQ ID NO: 103595 - RNA, 1701 nt, Artificial Sequence; identical to SEQ ID NO: 100033
  derived and/or modified CDS sequence (opt2) from hemagglutinin__InfluenzaA__AEO01478

SEQ ID NO: 103596 - RNA, 1701 nt, Artificial Sequence; identical to SEQ ID NO: 103423
  derived and/or modified CDS sequence (opt2) from hemagglutinin__InfluenzaA__AEO01479

SEQ ID NO: 103597 - RNA, 1701 nt, Artificial Sequence; identical to SEQ ID NO: 103470
  derived and/or modified CDS sequence (opt2) from hemagglutinin__InfluenzaA__AEO01480

SEQ ID NO: 103598 - RNA, 1701 nt, Artificial Sequence
  derived and/or modified CDS sequence (opt2) from hemagglutinin__InfluenzaA__AEO01482
augaaggccauccucgucguccuccucuacaccuucgccaccgccaacgccgacacccucugcaucggcuaccacgccaacaacuccaccgacaccgucgacaccguccucgagaagaacgucaccgucacccacuccgucaaccuccucgaggacaagcacaacggcaagcucugcaagcuccgcggcgucgccccccuccaccucggcaagugcaacaucgccggcuggauccucggcaaccccgagugcgagucccucuccaccgccuccuccugguccuacaucgucgagaccuccuccuccgacaacggcaccugcuaccccggcgacuucaucgacuacgaggagcuccgcgagcagcucuccuccgucuccuccuucgagcgcuucgagaucuuccccaagaccuccuccuggcccaaccacgacuccaacaagggcgucaccgccgccugcccccacgccggcgccaaguccuucuacaagaaccucaucuggcucgucaagaagggcaacuccuaccccaagcucuccaaguccuacaucaacgacaagggcaaggagguccucguccucuggggcauccaccaccccuccaccuccgccgaccagcagucccucuaccagaacgccgacgccuacgucuucgucggcaccucccgcuacuccaagaaguucaagcccgagaucgccauccgccccaagguccgcgaccaggagggccgcaugaacuacuacuggacccucgucgagcccggcgacaagaucaccuucgaggccaccggcaaccucgucgucccccgcuacgccuucgccauggagcgcaacgccggcuccggcaucaucaucuccgacacccccguccacgacugcaacaccaccugccagacccccaagggcgccaucaacaccucccuccccuuccagaacauccaccccaucaccaucggcaagugccccaaguacgucaaguccaccaagcuccgccucgccaccggccuccgcaacguccccuccauccagucccgcggccucuucggcgccaucgccggcuucaucgagggcggcuggaccggcauggucgacggcugguacggcuaccaccaccagaacgagcagggcuccggcuacgccgccgaccucaaguccacccagaacgccaucgacaagaucaccaacaaggucaacuccgucaucgagaagaugaacacccaguucaccgccgucggcaaggaguucaaccaccucgagaagcgcaucgagaaccucaacaagaaggucgacgacggcuuccucgacaucuggaccuacaacgccgagcuccucguccuccucgagaacgagcgcacccucgacuaccacgacuccaacgucaagaaccucuacgagaagguccgcucccagcucaagaacaacgccaaggagaucggcaacggcugcuucgaguucuaccacaagugcaacaacaccugcauggaguccgucaagaacggcaccuacgacuaccccaaguacuccgaggaggccaagcucaaccgcgaggagaucgacggcgucaagcucgaguccacccgcaucuaccagauccucgccaucuacuccaccgucgccuccucccucguccucgucgucucccucggcgccaucuccuucuggaugugcuccaacggcucccuccagugccgcaucugcaucuga

SEQ ID NO: 103599 - RNA, 1701 nt, Artificial Sequence
  derived and/or modified CDS sequence (opt2) from hemagglutinin__InfluenzaA__AEO01483
augaaggccauccucgucguccuccucuacaccuucgccaccgccaacgccgacacccucugcaucggcuaccacgccaacaacuccaccgacaccgucgacaccguccucgagaagaacgucaccgucacccacuccgucaaccuccucgaggacaagcacaacggcaagcucugcaagcuccgcggcgucgccccccuccaccucggcaagugcaacaucgccggcuggauccucggcaaccccgagugcgagucccucuccaccgccuccuccugguccuacaucgucgagaccuccaacuccgacaacggcaccugcuaccccggcgacuucaucgacuacgaggagcuccgcgagcagcucuccuccgucuccuccuucgagcgcuucgagaucuuccccaagaccuccuccuggcccaaccacgacuccaacaagggcgucaccgccgccugcccccacgccggcgccaaguccuucuacaagaaccucaucuggcucgucaagaagggcaacuccuaccccaagcucuccaaguccuacaucaacgacaagggcaaggagguccucguccucuggggcauccaccaccccuccaccuccgccgaccagcagucccucuaccagaacgccgacgccuacgucuucgucggcaccucccgcuacuccaagaaguucaagcccgagaucgccauccgccccaagguccgcgaccaggagggccgcaugaacuacuacuggacccucgucgagcccggcgacaagaucaccuucgaggccaccggcaaccucgucgucccccgcuacgccuucgccauggagcgcaacgccggcuccggcaucaucaucuccgacacccccguccacgacugcaacaccaccugccagacccccaagggcgccaucaacaccucccuccccuuccagaacauccaccccaucaccaucggcaagugccccaaguacgucaaguccaccaagcuccgccucgccaccggccuccgcaacguccccuccauccagucccgcggccucuucggcgccaucgccggcuucaucgagggcggcuggaccggcauggucgacggcugguacggcuaccaccaccagaacgagcagggcuccggcuacgccgccgaccucaaguccacccagaacgccaucgacaagaucaccaacaaggucaacuccgucaucgagaagaugaacacccaguucaccgccgucggcaaggaguucaaccaccucgagaagcgcaucgagaaccucaacaagaaggucgacgacggcuuccucgacaucuggaccuacaacgccgagcuccucguccuccucgagaacgagcgcacccucgacuaccacgacuccaacgucaagaaccucuacgagaagguccgcucccagcucaagaacaacgccaaggagaucggcaacggcugcuucgaguucuaccacaagugcgacaacaccugcauggaguccgucaagaacggcaccuacgacuaccccaaguacuccgaggaggccaagcucaaccgcgaggagaucgacggcgucaagcucgaguccacccgcaucuaccagauccucgccaucuacuccaccgccgccuccucccucguccucgucgucucccucggcgccaucuccuucuggaugugcuccaacggcucccuccagugccgcaucugcaucuga

SEQ ID NO: 103600 - RNA, 1701 nt, Artificial Sequence
  derived and/or modified CDS sequence (opt2) from hemagglutinin__InfluenzaA__AEO01484
augaaggccauccucgucguccuccucuacaccuucgccaccgccaacgccgacacccucugcaucggcuaccacgccaacaacuccaccgacaccgucgacaccguccucgagaagaacgucaccgucacccacuccgucaaccuccucgaggacaagcacaacggcaagcucugcaagcucaagggcgucgccccccuccaccucggcaagugcgacaucgccggcuggauccucggcaaccccgagugcgagucccucuccaccgccuccuccugguccuacaucgucgagaccuccuccuccgacaacggcaccugcuaccccggcgacuucaucgacuacgaggagcuccgcgagcagcucuccuccgucuccuccuucgagcgcuucgagaucuuccccaagaccuccuccuggcccaaccacgacuccaacaagggcgucaccgccgccugcccccacgccggcgccaaguccuucuacaagaaccucaucuggcucgucaagaagggcaacuccuaccccaagcucuccaaguccuacaucaacgacaagggcaaggagguccucguccucuggggcauccaccaccccuccaccuccgccgaccagcagucccucuaccagaacgccgacgccuacgucuucgucggcaccucccgcuacuccaagaaguucaagcccgagaucgccauccgccccaagguccgcgaccaggagggccgcaugaacuacuacuggacccucgucgagcccggcgacaagaucaccuucgaggccaccggcaaccucgucgucccccgcuacgccuucgccauggagcgcaacgccggcuccggcaucaucaucuccgacacccccguccacgacugcaacaccaccugccagacccccaagggcgccaucaacaccucccuccccuuccagaacauccaccccaucaccaucggcaagugccccaaguacgucaaguccaccaagcuccgccucgccaccggccuccgcaacguccccuccauccagucccgcggccucuucggcgccaucgccggcuucaucgagggcggcuggaccggcauggucgacggcugguacggcuaccaccaccagaacgagcagggcuccggcuacgccgccgaccucaaguccacccagcacgccaucgacgagaucaccaacaaggucaacuccgucaucgagaagaugaacacccaguucaccgccgucggcaaggaguucaaccaccucgagaagcgcaucgagaaccucaacaagaaggucgacgacggcuuccucgacaucuggaccuacaacgccgagcuccucguccuccucgagaacgagcgcacccucgacuaccacgacuccaacgucaagaaccucuacgagaagguccgcucccagcucaagaacaacgccaaggagaucggcaacggcugcuucgaguucuaccacaagugcgacaacaccugcauggaguccgucaagaacggcaccuacgacuaccccaaguacuccgaggaggccaagcucaaccgcgaggagaucgacggcgucaagcucgaguccacccgcaucuaccagauccucgccaucuacuccaccgucgccuccucccucguccucgucgucucccucggcgccaucuccuucuggaugugcuccaacggcucccuccagugccgcaucugcaucuga

SEQ ID NO: 103601 - RNA, 1701 nt, Artificial Sequence
  derived and/or modified CDS sequence (opt2) from hemagglutinin__InfluenzaA__AEO01485
augaaggccauccucgucguccuccucuacaccuucgccaccgccaacgccgacacccucugcaucggcuaccacgccaacaacuccaccgacaccgucgacaccguccucgagaagaacgucaccgucacccacuccgucaaccuccucgaggacaagcacaacggcaagcucugcaagcuccgcggcgucgccccccuccaccucggcaagugcaacaucgccggcuggauccucggcaaccccgagugcgagucccucuccaccgccuccuccugguccuacaucgucgagaccuccuccuccgacaacggcaccugcuaccccggcgacuucaucgacuacgaggagcuccgcgagcagcucuccuccgucuccuccuucgagcgcuucgagaucuuccccaagaccuccuccuggcccaaccacgacuccaacaagggcgucaccgccgccugcccccacgccggcgccaaguccuucuacaagaaccucaucuggcucgucaagaagggcaacuccuaccccaagcucuccaaguccuacaucaacgacaagggcaaggagguccucguccucuggggcauccaccaccccuccaccuccgccgaccagcagucccucuaccagaacgccgacgccuacgucuucgucggcaccucccgcuacuccaagaaguucaagcccgagaucaccauccgccccaagguccgcgaccaggagggccgcaugaacuacuacuggacccucgucgagcccggcgacaagaucaccuucgaggccaccggcaaccucgucgucccccgcuacgccuucgccauggagcgcaacgccggcuccggcaucaucaucuccgacacccccguccacgacugcaacaccaccugccagacccccaagggcgccaucaacaccucccuccccuuccagaacauccaccccaucaccaucggcaagugccccaaguacgucaaguccaccaagcuccgccucgccaccggccuccgcaacguccccuccauccagucccgcggccucuucggcgccaucgccggcuucaucgagggcggcuggaccggcauggucgacggcugguacggcuaccaccaccagaacgagcagggcuccggcuacgccgccgaccucaaguccacccagaacgccaucgacgagaucaccaacaaggucaacuccgucaucgagaagaugaacacccaguucaccgccgucggcaaggaguucaaccaccucgagaagcgcaucgagaaccucaacaagaaggucgacgacggcuuccucgacaucuggaccuacaacgccgagcuccucguccuccucgagaacgagcgcacccucgacuaccacgacuccaacgucaagaaccucuacgagaagguccgcucccagcucaagaacaacgccaaggagaucggcaacggcugcuucgaguucuaccacaagugcgacaacaccugcauggaguccgucaagaacggcaccuacgacuaccccaaguacuccgaggaggccaagcucaaccgcgaggagaucgacggcgucaagcucgaguccacccgcaucuaccagauccucgccaucuacuccaccgucgccuccucccucguccucgucgucucccucggcgccaucuccuucuggaugugcuccaacggcucccuccagugccgcaucugcaucuga

SEQ ID NO: 103602 - RNA, 1701 nt, Artificial Sequence
  derived and/or modified CDS sequence (opt2) from hemagglutinin__InfluenzaA__AEO01487
augaaggccauccucgucguccuccucuacaccuucgccaccgccaacgccgacacccucugcaucggcuaccacgccaacaacuccaccgacaccgucgacaccguccucgagaagaacgucaccgucacccacuccgucaaccuccucgaggacaagcacaacggcaagcucugcaagcuccgcggcgucgccccccuccaccucggcaagugcaacaucgccggcuggauccucggcaaccccgagugcgagucccucuccaccgccuccuccugguccuacaucgucgagaccuccuccuccgacaacggcaccugcuaccccggcgacuucaucgacuacgaggagcuccgcgagcagcucuccuccgucuccuccuucgagcgcuucgagaucuuccccaagaccuccuccuggcccaaccacgacuccaacaagggcgucaccgccgccugcccccacgccggcgccaaguccuucuacaagaaccucaucuggcucgucaagaagggcaacuccuaccccaagcucuccaaguccuacaucaacgacaagggcaaggagguccucguccucuggggcauccaccaccccuccaccuccgccgaccagcagucccucuaccagaacgccgacgccuacgucuucgucggcaccucccgcuacuccaagaaguucaagcccgagaucgccauccgccccaagguccgcgaccaggagggccgcaugaacuacuacuggacccucgucgagcccggcgacaagaucaccuucgaggccaccggcaaccucgucgucccccgcuacgccuucgccauggagcgcaacgccggcuccggcaucaucaucuccgacacccccguccacgacugcaacaccaccugccagacccccaagggcgccaucaacaccucccuccccuuccagaacauccaccccaucaccaucggcaagugccccaaguacgucaaguccaccaagcuccgccucgccaccggccuccgcaacguccccuccauccagucccgcggccucuucggcgccaucgccggcuucaucgagggcggcuggaccggcauggucgacggcugguacggcuaccaccaccagaacgagcagggcuccggcuacgccgccgaccucaaguccacccagaacgccaucgacgagaucaccaacaaggucaacuccgucaucgagaagaugaacacccaguucaccgccgucggcaaggaguucaaccaccucgagaagcgcaucgagaaccucaacaagaaggucgacgacggcuuccucgacaucuggaccuacaacgccgagcuccucguccuccucgagaacgagcgcacccucgacuaccacgacuccaacgucaagaaccucuacgagaagguccgcucccagcucaagaacaacgccaaggagaucggcaacggcugcuucgaguucuaccacaagugcgacaacaccugcauggaguccgucaagaacggcaccuacgacuaccccaaguacuccgaggaggccaagcucaaccgcgaggagaucgacggcgucacccucgaguccacccgcaucuaccagauccucgccaucuacuccaccgucgccuccucccucguccucgucgucucccucggcgccaucuccuucuggaugugcuccaacggcucccuccagugccgcaucugcaucuga

SEQ ID NO: 103603 - RNA, 1701 nt, Artificial Sequence
  derived and/or modified CDS sequence (opt2) from hemagglutinin__InfluenzaA__AEO01488
augaaggccauccucgucguccuccucuacaccuucgccaccgccaacgccgacacccucugcaucggcuaccacgccaacaacuccaccgacaccgucgacaccguccucgagaagaacgucaccgucacccacuccgucaaccuccucgaggacaagcacaacggcaagcucugcaagcuccgcggcgucgccccccuccaccucggcaagugcaacaucgccggcuggauccucggcaaccccgagugcgagucccucuccaccgccuccuccugguccuacaucgucgagaccuccuccuccgacaacggcaccugcuaccccggcgacuucaucgacuacgaggagcuccgcgagcagcucuccuccgucuccuccuucgagcgcuucgagaucuuccccaagaccuccuccuggcccaaccacgacuccaacaagggcgucaccgccgccugcccccacgccggcgccaaguccuucuacaagaaccucaucuggcucgucaagaagggcaacuccuaccccaagcucuccaaguccuacaucaacgacaagggcaaggagguccucguccucuggggcauccaccaccccuccaccuccgccgaccagcagucccucuaccagaacgccgacgccuacgucuucgucggcaccucccgcuacuccaagaaguucaagcccgagaucgccauccgccccaagguccgcgaccaggagggccgcaugaacuacuacuggacccucgucgagcccggcgacaagaucaccuucgaggccaccggcaaccucgucgucccccgcuacgccuucaccauggagcgcaacgccggcuccggcaucaucaucuccgacacccccguccacgacugcaacaccaccugccagacccccaagggcgccaucaacaccucccuccccuuccagaacauccaccccaucaccaucggcaagugccccaaguacgucaaguccaccaagcuccgccucgccaccggccuccgcaacguccccuccauccagucccgcggccucuucggcgccaucgccggcuucaucgagggcggcuggaccggcauggucgacggcugguacggcuaccaccaccagaacgagcagggcuccggcuacgccgccgaccucaaguccacccagaacgccaucgacggcaucaccaacaaggucaacuccgucaucgagaagaugaacacccaguucaccgccgucggcaaggaguucaaccaccucgagaagcgcaucgagaaccucaacaagaaggucgacgacggcuuccucgacaucuggaccuacaacgccgagcuccucguccuccucgagaacgagcgcacccucgacuaccacgacuccaacgucaagaaccucuacgagaagguccgcucccagcucaagaacaacgccaaggagaucggcaacggcugcuucgaguucuaccacaagugcgacaacaccugcauggaguccgucaagaacggcaccuacgacuaccccaaguacuccgaggaggccaagcucaaccgcgaggagaucgacggcgucaagcucgaguccacccgcaucuaccagauccucgccaucuacuccaccgucgccuccucccucguccucgucgucucccucggcgccaucuccuucuggaugugcuccaacggcucccuccagugccgcaucugcaucuga

SEQ ID NO: 103604 - RNA, 1701 nt, Artificial Sequence
  derived and/or modified CDS sequence (opt2) from hemagglutinin__InfluenzaA__AEO01489
augaaggccauccucgucguccuccucuacaccuucgccaccgccaacgccgacacccucugcaucggcuaccacgccaacaacuccaccgacaccgucgacaccguccucgagaagaacgucaccgucacccacuccgucaaccuccucgaggacaagcacaacggcaagcucugcaagcuccgcggcgucgccccccuccaccucggcaagugcaacaucgccggcuggauccucggcaaccccgagugcgagucccucuccaccgccuccuccugguccuacaucgucgagaccuccuccuccgacaacggcaccugcuaccccggcgacuucaucgacuacgaggagcuccgcgagcagcucuccuccgucuccuccuucgagcgcuucgagaucuuccccaagaccuccuccuggcccaaccacgacuccaacaagggcgucaccgccgccugcccccacgccggcgccaaguccuucuacaagaaccucaucuggcucgucaagaagggcaacuccuaccccaagcucuccaaguccuacaucaacgacaagggcaaggagguccucguccucuggggcauccaccaccccuccaccuccgccgaccagcagucccucuaccagaacgccgacgccuacgucuucgucggcaccucccgcuacuccaagaaguuccgccccgagaucgccauccgccccaagguccgcgaccaggagggccgcaugaacuacuacuggacccucgucgagcccggcgacaagaucaccuucgaggccaccggcaaccucgucgucccccgcuacgccuucgccauggagcgcaacgccggcuccggcaucaucaucuccgacacccccguccacgacugcaacaccaccugccagacccccaagggcgccaucaacaccucccuccccuuccagaacauccaccccaucaccaucggcaagugccccaaguacgucaaguccaccaagcuccgccucgccaccggccuccgcaacguccccuccauccagucccgcggccucuucggcgccaucgccggcuucaucgagggcggcuggaccggcauggucgacggcugguacggcuaccaccaccagaacgagcagggcuccggcuacgccgccgaccucaaguccacccagaacgccaucgacgagaucaccaacaaggucaacuccgucaucgagaagaugaacacccaguucaccgccgucggcaaggaguucaaccaccucgagaagcgcaucgagaaccucaacaagaaggucgacgacggcuuccucgacaucuggaccuacaacgccgagcuccucguccuccucgagaacgagcgcacccucgacuaccacgacuccaacgucaagaaccucuacgagaagguccgcucccagcucaagaacaacgccaaggagaucggcaacggcugcuucgaguucuaccacaagugcgacaacaccugcauggaguccgucaagaacggcaccuacgacuaccccaaguacuccgaggaggccaagcucaaccgcgaggagaucgacggcgucaagcucgaguccacccgcaucuaccagauccucgccaucuacuccaccgucgccuccucccucguccucgucgucucccucggcgccaucuccuucuggaugugcuccaacggcucccuccagugccgcaucugcaucuga

SEQ ID NO: 103605 - RNA, 1701 nt, Artificial Sequence
  derived and/or modified CDS sequence (opt2) from hemagglutinin__InfluenzaA__AEO01490
augaaggccauccucgucguccuccucuacaccuucgccaccgccaacgccgacacccucugcaucggcuaccacgccaacaacuccaccgacaccgucgacaccguccucgagaagaacgucaccgucacccacuccgucaaccuccucgaggacaagcacaacggcaagcucugcaagcuccgcggcgucgccccccuccaccucggcaagugcaacaucgccggcuggauccucggcaaccccgagugcgagucccucuccaccgccuccuccugguccuacaucgucgagaccuccuccuccgacaacggcaccugcuaccccggcgacuucaucgacuacgaggagcuccgcgagcagcucuccuccgucuccuccuucgagcgcuucgagaucuuccccaagaccuccuccuggcccaaccacgacuccaacaagggcgucaccgccgccugcccccacgccggcgccaaguccuucuacaagaaccucaucuggcucgucaagaagggcaacuccuaccccaagcucuccaaguccuacaucaacgacaagggcaaggagguccucguccucuggggcauccaccaccccuccaccuccgccgaccagcagucccucuaccagaacgccgacgccuacgucuucgucggcaccucccgcuacuccaagaaguucaagcccgagaucgccauccgccccaagguccgcgaccaggagggccgcaugaacuacuacuggacccucgucgagcccggcgacaagaucaccuucgaggccaccggcaaccucgucgucccccgcuacgccuucgccauggagcgcaacgccggcuccggcaucaucaucuccgacacccccguccacgacugcaacaccaccugccagacccccaagggcgccaucaacaccucccuccccuuccagaacauccaccccaucaccaucggcaagugccccaaguacgucaaguccaccaagcuccgcauggccaccggccuccgcaacguccccuccauccagucccgcggccucuucggcgccaucgccggcuucaucgagggcggcuggaccggcauggucgacggcugguacggcuaccaccaccagaacgagcagggcuccggcuacgccgccgaccucaaguccacccagaacgccaucgacgagaucaccaacaaggucaacuccgucaucgagaagaugaacacccaguucaccgccgucggcaaggaguucaaccaccucgagaagcgcaucgagaaccucaacaagaaggucgacgacggcuuccucgacaucuggaccuacaacgccgagcuccucguccuccucgagaacgagcgcacccucgacuaccacgacuccaacgucaagaaccucuacgagaagguccgcaaccagcucaagaacaacgccaaggagaucggcaacggcugcuucgaguucuaccacaagugcgacaacaccugcauggaguccgucaagaacggcaccuacgacuaccccaaguacuccgaggaggccaagcucaaccgcgaggagaucgacggcgucaagcucgaguccacccgcaucuaccagauccucgccaucuacuccaccgucgccuccucccucguccucgucgucucccucggcgccaucuccuucuggaugugcuccaacggcucccuccagugccgcaucugcaucuga

SEQ ID NO: 103606 - RNA, 1701 nt, Artificial Sequence
  derived and/or modified CDS sequence (opt2) from hemagglutinin__InfluenzaA__AEO01491
augaaggccauccucgucguccuccucuacaccuucgccaccgccaacgccgacacccucugcaucggcuaccacgccaacaacuccaccgacaccgucgacaccguccucgagaagaacgucaccgucacccacuccgucaaccuccucgaggacaaguacaacggcaagcucugcaagcuccgcggcgucgccccccuccaccucggcaagugcaacaucgccggcuggauccucggcaaccccgagugcgagucccucuccaccgccuccuccugguccuacaucgucgagaccuccuccuccgacaacggcaccugcuaccccggcgacuucaucgacuacgaggagcuccgcgagcagcucuccuccgucuccuccuucgagcgcuucgagaucuuccccaagaccuccuccuggcccaaccacgacuccaacaagggcgucaccgccgccugcccccacgccggcgccaaguccuucuacaagaaccucaucuggcucgucaagaagggcaacuccuaccccaagcucuccaaguccuacaucaacgacaagggcaaggagguccucguccucuggggcauccaccaccccuccaccuccgccgaccagcagucccucuaccagaacgccgacgccuacgucuucgucggcaccucccgcuacuccaagaaguucaagcccgagaucgccauccgccccaagguccgcgaccaggagggccgcaugaacuaccacuggacccucgucgagcccggcgacaagaucaccuucgaggccaccggcaaccucgucgucccccgcuacgccuucgccauggagcgcaacgccggcuccggcaucaucaucuccgacacccccguccacgacugcaacaccaccugccagacccccaagggcgccaucaacaccucccuccccuuccagaacauccaccccaucaccaucggcaagugccccaaguacgucaaguccaccaagcuccgccucgccaccggccuccgcaacguccccuccauccagucccgcggccucuucggcgccaucgccggcuucaucgagggcggcuggaccggcauggucgacggcugguacggcuaccaccaccagaacgagcagggcuccggcuacgccgccgaccucaaguccacccagaacgccaucgacgagaucaccaacaaggucaacuccgucaucgagaagaugaacacccaguucaccgccgucggcaaggaguucaaccaccucgagaagcgcaucgagaaccucaacaagaaggucgacgacggcuuccucgacaucuggaccuacaacgccgagcuccucguccuccucgagaacgagcgcacccucgacuaccacgacuccaacgucaagaaccucuacgagaagguccgcucccagcucaagaacaacgccaaggagaucggcaacggcugcuucgaguucuaccacaagugcgacaacaccugcauggaguccgucaagaacggcaccuacgacuaccccaaguacuccgaggaggccaagcucaaccgcgaggagaucgacggcgucaagcucgaguccacccgcaucuaccagauccucgccaucuacuccaccgucgccuccucccucguccucgucgucucccucggcgccaucuccuucuggaugugcuccaacggcucccuccagugccgcaucugcaucuga

SEQ ID NO: 103607 - RNA, 1701 nt, Artificial Sequence; identical to SEQ ID NO: 103474
  derived and/or modified CDS sequence (opt2) from hemagglutinin__InfluenzaA__AEO01492

SEQ ID NO: 103608 - RNA, 1701 nt, Artificial Sequence
  derived and/or modified CDS sequence (opt2) from hemagglutinin__InfluenzaA__AEO01493
augaaggccauccucgucguccuccucuacaccuucgccaccgccaacgccgacacccucugcaucggcuaccacgccaacaacuccaccgacaccgucgacaccguccucgagaagaacgucaccgucacccacuccgucaacauccucgaggacaagcacaacggcaagcucugcaagcuccgcggcgucgccccccuccaccucggcaagugcaacaucgccggcuggauccucggcaaccccgagugcgagucccucuccaccgccuccuccugguccuacaucgucgagaccuccuccuccgacaacggcaccugcuaccccggcgacuucaucgacuacgaggagcuccgcgagcagcucuccuccgucuccuccuucgagcgcuucgagaucuuccccaagaccuccuccuggcccaaccacgacuccaacaagggcgucaccgccgccugcccccacgccggcgccaaguccuucuacaagaaccucaucuggcucgucaagaagggcaacuccuaccccaagcucuccaaguccuacaucaacgacaagggcaaggagguccucguccucuggggcauccaccaccccuccaccuccgccgaccagcagucccucuaccagaacgccgacgccuacgucuucgucggcaccucccgcuacuccaagaaguucaagcccgagaucgccauccgccccaagguccgcgaccaggagggccgcaugaacuacuacuggacccucgucgagcccggcgacaagaucaccuucgaggccaccggcaaccucgucgucccccgcuacgccuucgccauggagcgcuccgccggcuccggcaucaucaucuccgacacccccguccacgacugcaacaccaccugccagacccccaagggcgccaucaacaccucccuccccuuccagaacauccaccccaucaccaucggcaagugccccaaguacgucaaguccaccaagcuccgccucgccaccggccuccgcaacguccccuccauccagucccgcggccucuucggcgccaucgccggcuucaucgagggcggcuggaccggcauggucgacggcugguacggcuaccaccaccagaacgagcagggcuccggcuacgccgccgaccucaaguccacccagaacgccaucgacgagaucaccaacaaggucaacuccgucaucgagaagaugaacacccaguucaccgccgucggcaaggaguucaaccaccucgagaagcgcaucgagaaccucaacaagaaggucgacgacggcuuccucgacaucuggaccuacaacgccgagcuccucguccuccucgagaacgagcgcacccucgacuaccacgacuccaacgucaagaaccucuacgagaagguccgcucccagcucaagaacaacgccaaggagaucggcaacggcugcuucgaguucuaccacaagugcgacaacaccugcauggaguccgucaagaacggcaccuacgacuaccccaaguacuccgaggaggccaagcucaaccgcgaggagaucgacggcgucaagcucgaguccacccgcaucuaccagauccucgccaucuacuccaccgucgccuccucccucguccucgucgucucccucggcgccaucuccuucuggaugugcuccaacggcucccuccagugccgcaucugcaucuga

SEQ ID NO: 103609 - RNA, 1701 nt, Artificial Sequence
  derived and/or modified CDS sequence (opt2) from hemagglutinin__InfluenzaA__AEO01494
augaaggccauccucgucguccuccucuacaccuucgccaccgccaacgccgacacccucugcaccggcuaccacgccaacaacuccaccgacaccgucgacaccguccucgagaagaacgucaccgucacccacuccgucaaccuccucgaggacaagcacaacggcaagcucugcaagcuccgcggcgucgccccccuccaccucggcaagugcaacaucgccggcuggauccucggcaaccccgagugcgagucccucuccaccgccuccuccugguccuacaucgucgagaccuccuccuccgacaacggcaccugcuaccccggcgacuucaucgacuacgaggagcuccgcgagcagcucuccuccgucuccuccuucgagcgcuucgagaucuuccccaagaccuccuccuggcccaaccacgacuccaacaagggcgucaccgccgccugcccccacgccggcgccaaguccuucuacaagaaccucaucuggcucgucaagaagggcaacuccuaccccaagcucuccaaguccuacaucaacgacaagggcaaggagguccucguccucuggggcauccaccaccccuccaccuccgccgaccagcagucccucuaccagaacgccgacgccuacgucuucgucggcaccucccgcuacuccaagaaguucaagcccgagaucgccauccgccccaagguccgcgaccaggagggccgcaugaacuacuacuggacccucgucgagcccggcgacaagaucaccuucgaggccaccggcaaccucgucgucccccgcuacgccuucgccauggagcgcaacgccggcuccggcaucaucaucuccgacacccccguccacgacugcaacaccaccugccagacccccaagggcgccaucaacaccucccuccccuuccagaacauccaccccaucaccaucggcaagugccccaaguacgucaaguccaccaagcuccgccucgccaccggccuccgcaacguccccuccauccagucccgcggccucuucggcgccaucgccggcuucaucgagggcggcuggaccggcauggucgacggcugguacggcuaccaccaccagaacgagcagggcuccggcuacgccgccgaccucaaguccacccagaacgccaucgacgagaucaccaacaaggucaacuccgucaucgagaagaugaacacccaguucaccgccgucggcaaggaguucaaccaccucgagaagcgcaucgagaaccucaacaagaaggucgacgacggcuuccucgacaucuggaccuacaacgccgagcuccucguccuccucgagaacgagcgcacccucgacuaccacgacuccaacgucaagaaccucuacgagaagguccgcaaccagcucaagaacaacgccaaggagaucggcaacggcugcuucgaguucuaccacaagugcgacaacaccugcauggaguccgucaagaacggcaccuacgacuaccccaaguacuccgaggaggccaagcucaaccgcgaggagaucgacggcgucaagcucgaguccacccgcaucuaccagauccucgccaucuacuccaccgucgccuccucccucguccucgucgucucccucggcgccaucuccuucuggaugugcuccaacggcucccuccagugccgcaucugcaucuga

SEQ ID NO: 103610 - RNA, 1701 nt, Artificial Sequence; identical to SEQ ID NO: 100302
  derived and/or modified CDS sequence (opt2) from hemagglutinin__InfluenzaA__AEO01496

SEQ ID NO: 103611 - RNA, 1701 nt, Artificial Sequence; identical to SEQ ID NO: 99058
  derived and/or modified CDS sequence (opt2) from hemagglutinin__InfluenzaA__AEO01497

SEQ ID NO: 103612 - RNA, 1701 nt, Artificial Sequence; identical to SEQ ID NO: 100302
  derived and/or modified CDS sequence (opt2) from hemagglutinin__InfluenzaA__AEO01498

SEQ ID NO: 103613 - RNA, 1701 nt, Artificial Sequence
  derived and/or modified CDS sequence (opt2) from hemagglutinin__InfluenzaA__AEO01499
augaaggccauccucgucguccuccucuacaccuucgccaucgccaacgccgacacccucugcaucggcuaccacgccaacaacuccaccgacaccgucgacaccguccucgagaagaacgucaccgucacccacuccgucaaccuccucgaggacaagcacaacggcaagcucugcaagcuccgcggcgucgccccccuccaccucggcaagugcaacaucgccggcuggauccucggcaaccccgagugcgagucccucuccaccgccuccuccugguccuacaucgucgagaccuccuccuccgacaacggcaccugcuaccccggcgacuucaucgacuacgaggagcuccgcgagcagcucuccuccgucuccuccuucgagcgcuucgagaucuuccccaagaccuccuccuggcccaaccacgacuccaacaagggcgucaccgccgccugcccccacgccggcgccaaguccuucuacaagaaccucaucuggcucgucaagaagggcaacuccuaccccaagcucuccaaguccuacaucaacgacaagggcaaggagguccucguccucuggggcauccaccaccccuacaccuccgccgaccagcagucccucuaccagaacgccgacgccuacgucuucgucggcaccucccgcuacuccaagaaguucaagcccgagaucgccauccgccccaagguccgcgaccaggagggccgcaugaacuacuacuggacccucgucgagcccggcgacaagaucaccuucgaggccaccggcaaccucgucgucccccgcuacgccuucgccauggagcgcaacgccggcuccggcaucaucaucuccgacacccccguccacgacugcaacaccaccugccagacccccaagggcgccaucaacaccucccuccccuuccagaacauccaccccaucaccaucggcaagugccccaaguacgucaaguccaccaagcuccgccucgccaccggccuccgcaacguccccuccauccagucccgcggccucuucggcgccaucgccggcuucaucgagggcggcuggaccggcauggucgacggcugguacggcuaccaccaccagaacgagcagggcuccggcuacgccgccgaccucaaguccacccagcacgccaucgacgagaucaccaacaaggucaacuccgucaucgagaagaugaacacccaguucaccgccgucggcaaggaguucaaccaccucgagaagcgcaucgagaaccucaacaagaaggucgacgacggcuuccucgacaucuggaccuacaacgccgagcuccucguccuccucgagaacgagcgcacccucgacuaccacgacuccaacgucaagaaccucuacgagaagguccgcucccagcucaagaacaacgccaaggagaucggcaacggcugcuucgaguucuaccacaagugcgacaacaccugcauggaguccgucaagaacggcaccuacgacuaccccaaguacuccgaggaggccaagcucaaccgcgaggagaucaacggcgucaagcucgaguccacccgcaucuaccagauccucgccaucuacuccaccgucgccuccucccucguccucgucgucucccucggcgccaucuccuucuggaugugcuccaacggcucccuccagugccgcaucugcaucuga

SEQ ID NO: 103614 - RNA, 1701 nt, Artificial Sequence; identical to SEQ ID NO: 99806
  derived and/or modified CDS sequence (opt2) from hemagglutinin__InfluenzaA__AEO01500

SEQ ID NO: 103615 - RNA, 1701 nt, Artificial Sequence; identical to SEQ ID NO: 99869
  derived and/or modified CDS sequence (opt2) from hemagglutinin__InfluenzaA__AEO01501

SEQ ID NO: 103616 - RNA, 1701 nt, Artificial Sequence; identical to SEQ ID NO: 99869
  derived and/or modified CDS sequence (opt2) from hemagglutinin__InfluenzaA__AEO01502

SEQ ID NO: 103617 - RNA, 1701 nt, Artificial Sequence; identical to SEQ ID NO: 100125
  derived and/or modified CDS sequence (opt2) from hemagglutinin__InfluenzaA__AEO01503

SEQ ID NO: 103618 - RNA, 1701 nt, Artificial Sequence; identical to SEQ ID NO: 100302
  derived and/or modified CDS sequence (opt2) from hemagglutinin__InfluenzaA__AEO01505

SEQ ID NO: 103619 - RNA, 1701 nt, Artificial Sequence; identical to SEQ ID NO: 99806
  derived and/or modified CDS sequence (opt2) from hemagglutinin__InfluenzaA__AEO01506

SEQ ID NO: 103620 - RNA, 1701 nt, Artificial Sequence; identical to SEQ ID NO: 103414
  derived and/or modified CDS sequence (opt2) from hemagglutinin__InfluenzaA__AEO01507

SEQ ID NO: 103621 - RNA, 1701 nt, Artificial Sequence; identical to SEQ ID NO: 100302
  derived and/or modified CDS sequence (opt2) from hemagglutinin__InfluenzaA__AEO01508

SEQ ID NO: 103622 - RNA, 1701 nt, Artificial Sequence; identical to SEQ ID NO: 100033
  derived and/or modified CDS sequence (opt2) from hemagglutinin__InfluenzaA__AEO01510

SEQ ID NO: 103623 - RNA, 1701 nt, Artificial Sequence
  derived and/or modified CDS sequence (opt2) from hemagglutinin__InfluenzaA__AEO01511
augaaggccauccucgucguccuccucuacaccuucgccaccgccaacgccgacacccucugcaucggcuaccacgccaacaacuccaccgacaccgucgacaccguccucgagaagaacgucaccgucacccacuccgucaaccuccucgaggacaagcacaacggcaagcucugcaagcuccgcggcgucaccccccuccaccucggcaagugcaacaucgccggcuggauccucggcaaccccgagugcgagucccucuccaccaccuccuccugguccuacaucgucgagaccuccuccuccgacaacggcaccugcuaccccggcgacuucaucgacuacgaggagcuccgcgagcagcucuccuccgucuccuccuucgagcgcuucgagaucuuccccaagaccuccuccuggcccaaccacgacuccaacaagggcgucaccgccgccugcccccacgccggcgccaaguccuucuacaagaaccucaucuggcucgucaagaagggcaacuccuaccccaagcucuccaaguccuacaucaacgacaagggcaaggagguccucguccucuggggcauccaccaccccuccaccuccgccgaccagcagucccucuaccagaacgccgacgccuacgucuucgucggcaccucccgcuacuccaagaaguucaagcccgagaucgccauccgccccaagguccgcgagcaggagggccgcaugaacuacuacuggacccucgucgagcccggcgacaagaucaccuucgaggccaccggcaaccucgucgucccccgcuacgccuucgccauggagcgcaacgccggcuccggcaucaucaucuccgacacccccguccacgacugcaacaccaccugccagacccccaagggcgccaucaacaccucccuccccuuccagaacauccaccccaucaccaucggcaagugccccaaguacgucaaguccaccaagcuccgccucgccaccggccuccgcaacguccccuccauccagucccgcggccucuucggcgccaucgccggcuucaucgagggcggcuggaccggcauggucgacggcugguacggcuaccaccaccagaacgagcagggcuccggcuacgccgccgaccucaaguccacccagaacgccaucgacaagaucaccaacaaggucaacuccgucaucgagaagaugaacacccaguucaccgccgucggcaaggaguucaaccaccucgagaagcgcaucgagaaccucaacaagaaggucgacgacggcuuccucgacaucuggaccuacaacgccgagcuccucguccuccucgagaacgagcgcacccucgacuaccacgacuccaacgucaagaaccucuacgagaagguccgcucccagcucaagaacaacgccaaggagaucggcaacggcugcuucgaguucuaccacaagugcgacaacaccugcauggaguccgucaagaacggcaccuacgacuaccccaaguacuccgaggaggccaagcucaaccgcgaggagaucgacggcgucaagcucgaguccacccgcaucuaccagauccucgccaucuacuccaccgucgccuccucccucguccucgucgucucccucggcgccaucuccuucuggaugugcuccaacggcucccuccagugccgcaucugcaucuga

SEQ ID NO: 103624 - RNA, 1701 nt, Artificial Sequence
  derived and/or modified CDS sequence (opt2) from hemagglutinin__InfluenzaA__AEO01512
augaaggccauccucgucguccuccucuacaccuucgccaccgccaacgccgacacccucugcaucggcuaccacgccaacaacuccaccgacaccgucgacaccguccucgagaagaacgucaccgucacccacuccgucaaccuccucgaggacaagcacaacggcaagcucugcaagcuccgcggcgucgccccccuccaccucggcaagugcaacaucgccggcuggauccucggcaaccccgagugcgagucccucuccaccgccuccuccugguccuacaucgucgagaccuccuccuccgacaacggcaccugcuaccccggcgacuucaucgacuacgaggagcuccgcgagcagcucuccuccgucuccuccuucgagcgcuucgagaucuuccccaagaccuccuccuggcccaaccacgacuccaacaagggcgucaccgccgccugcccccacgccggcgccaaguccuucuacaagaaccucaucuggcucgucaagaagggcaacuccuaccccaagcucuccaaguccuacaucaacgacaagggcaaggagguccucguccucuggggcauccaccaccccuccaccuccgccgaccagcagucccucuaccagaacgccgacgccuacgucuucgucggcaccucccgcuacuccaagaaguucaagcccgagaucgccauccgccccaagguccgcgagcaggagggccgcaugaacuacuacuggacccucgucgagcccggcgacaagaucaccuucgaggccaccggcaaccucgucgucccccgcuacgccuucgccauggagcgcaacgccggcuccggcaucaucaucuccgacacccccguccacgacugcaacaccaccugccagacccccaagggcgccaucaacaccucccuccccuuccagaacauccaccccaucaccaucggcaagugccccaaguacgucaaguccaccaagcuccgccucgccaccggccuccgcaacguccccuccauccagucccgcggccucuucggcgccaucgccggcuucaucgagggcggcuggaccggcauggucgacggcugguacggcuaccaccaccagaacgagcagggcuccggcuacgccgccgaccucaaguccacccagaacgccaucgacgagaucaccaacaaggucaacuccgucaucgagaagaugaacacccaguucaccgccgucggcaaggaguucaaccaccucgagaagcgcaucgagaaccucaacaagaaggucgacgacggcuuccucgacaucuggaccuacaacgccgagcuccucguccuccucgagaacgagcgcacccucgacuaccacgacuccaacgucaagaaccucuacgagaagguccgcucccagcucaagaacaacgccaaggagaucggcaacggcugcuucgaguucuaccacaagugcgacaacaagugcauggaguccgucaagaacggcaccuacgacuaccccaaguacuccgaggaggccaagcucaaccgcgaggagaucgacggcgucaagcucgaguccacccgcaucuaccagauccucgccaucuacuccaccgucgccuccucccucguccucgucgucucccucggcgccaucuccuucuggaugugcuccaacggcucccuccagugccgcaucugcaucuga

SEQ ID NO: 103625 - RNA, 1701 nt, Artificial Sequence
  derived and/or modified CDS sequence (opt2) from hemagglutinin__InfluenzaA__AEO01513
augaaggccauccucgccguccuccucuacaccuucgccaccgccaacgccgacacccucugcaucggcuaccacgccaacaacuccaccgacaccgucgacaccguccucgagaagaacgucaccgucacccacuccgucaacauccucgaggacaagcacaacggcaagcucugcaagcuccgcggcgucgccccccuccaccucggcaagugcaacaucgccggcuggauccucggcaaccccgagugcgagucccucuccaccgccuccuccugguccuacaucgucgagaccuccuccuccgacaacggcaccugcuaccccggcgacuucaucgacuacgaggagcuccgcgagcagcucuccuccgucuccuccuucgagcgcuucgagaucuuccccaagaccuccuccuggcccaaccacgacuccaacaagggcgucaccgccgccugcccccacgccggcgccaaguccuucuacaagaaccucaucuggcucgucaagaagggcaacuccuaccccaagcucuccaaguccuacaucaacgacaagggcaaggagguccucguccucuggggcauccaccaccccuccaccuccgccgaccagcagucccucuaccagaacgccgacgccuacgucuucgucggcuccucccgcuacuccaagaaguucaagcccgagaucgccauccgccccaagguccgcgaccaggagggccgcaugaacuacuacuggacccucgucgagcccggcgacaagaucaccuucgaggccaccggcaaccucgucgucccccgcuacgccuucgccauggagcgcaacgccggcuccggcaucaucaucuccgacacccccguccacgacugcaacaccaccugccagacccccaagggcgccaucaacaccucccuccccuuccagaacauccaccccgucaccaucggcaagugccccaaguacgucaaguccaccaagcuccgccucgccaccggccuccgcaacguccccuccauccagucccgcggccucuucggcgccaucgccggcuucaucgagggcggcuggaccggcauggucgacggcugguacggcuaccaccaccagaacgagcagggcuccggcuacgccgccgaccucaaguccacccagaacgccaucgacgagaucaccaacaaggucaacuccgucaucgagaagaugaacacccaguucaccgccgucggcaaggaguucaaccaccucgagaagcgcaucgagaaccucaacaagaaggucgacgacggcuuccucgacaucuggaccuacaacgccgagcuccucguccuccucgagaacgagcgcacccucgacuaccacgacuccaacgucaagaaccucuacgagaagguccgcucccagcucaagaacaacgccaaggagaucggcaacggcugcuucgaguucuaccacaagugcgacaacaccugcauggaguccgucaagaacggcaccuacgacuaccccaaguacuccgaggaggccaagcucaaccgcgaggagaucgacggcgucaagcucgaguccacccgcaucuaccagauccucgccaucuacuccaccgucgccuccucccucguccucgucgucucccucggcgccaucuccuucuggaugugcuccaacggcucccuccagugccgcaucugcaucuga

SEQ ID NO: 103626 - RNA, 1701 nt, Artificial Sequence
  derived and/or modified CDS sequence (opt2) from hemagglutinin__InfluenzaA__AEO01514
augaaggccauccucgucguccuccucuacaccuucgccaccgccaacgccgacacccucugcaucggcuaccacgccaacaacuccaccgacaccgucgacaccguccucgagaagaacgucaccgucacccacuccgucaaccuccucgaggacaugcacaacggcaagcucugcaagcuccgcggcgucgccccccuccaccucggcaagugcaacaucgccggcuggauccucggcaaccccgagugcgagucccucuccaccgccuccuccugguccuacaucgucgagaccuccuccuccgacaacggcaccugcuaccccggcgacuucaucgacuacgaggagcuccgcgagcagcucuccuccgucuccuccuucgagcgcuucgagaucuuccccaagaccuccuccuggcccaaccacgacuccaacaagggcgucaccgccgccugcccccacgccggcgccaaguccuucuacaagaaccucaucuggcucgucaagaagggcaacuccuaccccaagcucuccaaguccuacaucaacgacaagggcaaggagguccucguccucuggggcauccaccaccccuccaccuccgccgaccagcagucccucuaccagaacgccgacgccuacgucuucgucggcaccucccgcuacuccaagaaguucaagcccgagaucgccauccgccccaagguccgcgagcaggagggccgcaugaacuacuacuggacccucgucgagcccggcgacaagaucaccuucgaggccaccggcaaccucgucgucccccgcuacgccuucgccauggagcgcaacgccggcuccggcaucaucaucuccgacacccccguccacgacugcaacaccaccugccagacccccaagggcgccaucaacaccucccuccccuuccagaacauccaccccaucaccaucggcaagugccccaaguacgucaaguccaccaagcuccgccucgccaccggccuccgcaacguccccuccauccagucccgcggccucuucggcgccaucgccggcuucaucgagggcggcuggaccggcauggucgacggcugguacggcuaccaccaccagaacgagcagggcuccggcuacgccgccgaccucaaguccacccagaacgccaucgacaagaucaccaacaaggucaacuccgucaucgagaagaugaacacccaguucaccgccgucggcaaggaguucaaccaccucgagaagcgcaucgagaaccucaacaagaaggucgacgacggcuuccucgacaucuggaccuacaacgccgagcuccucguccuccucgagaacgagcgcacccucgacuaccacgacuccaacgucaagaaccucuacgagaagguccgcucccagcucaagaacaacgccaaggagaucggcaacggcugcuucgaguucuaccacaagugcgacaacaccugcauggaguccgucaagaacggcaccuacgacuaccccaaguacuccgaggaggccaagcucaaccgcgaggagaucgacggcgucaagcucgaguccacccgcaucuaccagauccucgccaucuacuccaccgucgccuccucccucguccucgucgucucccucggcgccaucuccuucuggaugugcuccaacggcucccuccagugccgcaucugcaucuga

SEQ ID NO: 103627 - RNA, 1701 nt, Artificial Sequence; identical to SEQ ID NO: 100892
  derived and/or modified CDS sequence (opt2) from hemagglutinin__InfluenzaA__AEO01515

SEQ ID NO: 103628 - RNA, 1701 nt, Artificial Sequence; identical to SEQ ID NO: 103474
  derived and/or modified CDS sequence (opt2) from hemagglutinin__InfluenzaA__AEO01516

SEQ ID NO: 103629 - RNA, 1701 nt, Artificial Sequence
  derived and/or modified CDS sequence (opt2) from hemagglutinin__InfluenzaA__AEO01517
augaaggccauccucgucguccuccucuacaccuucgccaccgccaacgccgacacccucugcaucggcuaccacgccaacaacuccaccgacaccgucgacaccguccucgagaagaacgucaccgucacccacuccgucaaccuccucgaggacaagcacaacggcaagcucugcaagcuccgcggcgucgccccccuccaccucggcaagugcaacaucgccggcuggauccucggcaaccccgagugcgagucccucuccaccgccuccuccugguccuacaucgucgagaccuccuccuccgacaacggcaccugcuaccccggcgacuucaucgacuacgaggagcuccgcgagcagcucuccuccgucuccuccuucgagcgcuucgagaucuuccccaagaccuccuccuggcccaaccacgacuccaacaagggcgucaccgccgccugcccccacgccggcgccaaguccuucuacaagaaccucaucuggcucgucaagaaggagaacuccuaccccaagcucuccaaguccuacaucaacgacaagggcaaggagguccucguccucuggggcauccaccaccccuccaccuccgccgaccagcagucccucuaccagaacgccgacgccuacgucuucgucggcaccucccgcuacuccaagaaguucaagcccgagaucgccauccgccccaagguccgcgaccaggagggccgcaugaacuacuacuggacccucgucgagcccggcgacaagaucaccuucgaggccaccggcaaccucgucgucccccgcuacgccuucgccauggagcgcaacgccggcuccggcaucaucaucuccgacacccccguccacgacugcaacaccaccugccagacccccgagggcgccaucaacaccucccuccccuuccagaacauccaccccaucaccaucggcaagugccccaaguacgucaaguccaccaagcuccgccucgccaccggccuccgcaacguccccuccauccagucccgcggccucuucggcgccaucgccggcuucaucgagggcggcuggaccggcauggucgacggcugguacggcuaccaccaccagaacgagcagggcuccggcuacgccgccgaccucaaguccacccagaacgccaucgacgagaucaccaacaaggucaacuccgucaucgagaagaugaacacccaguucaccgccgucggcaaggaguucaaccaccucgagaagcgcaucgagaaccucaacaagaaggucgacgacggcuuccucgacaucuggaccuacaacgccgagcuccucguccuccucgagaacgagcgcacccucgacuaccacgacuccaacgucaagaaccucuacgagaagguccgcucccagcucaagaacaacgccaaggagaucggcaacggcugcuucgaguucuaccacaagugcgacaacaccugcauggaguccgucaagaacggcaccuacgacuaccccaaguacuccgaggaggccaagcucaaccgcgaggagaucgacggcgucaagcucgaguccacccgcaucuaccagauccucgccaucuacuccaccgucgccuccucccucguccucgucgucucccucggcgccaucuccuucuggaugugcuccaacggcucccuccagugccgcaucugcaucuga

SEQ ID NO: 103630 - RNA, 1701 nt, Artificial Sequence
  derived and/or modified CDS sequence (opt2) from hemagglutinin__InfluenzaA__AEO01518
augaaggccauccucgucguccuccucuacaccuucgccaccgccaacgccgacacccucugcaucggcuaccacgccaacaacuccaccgacaccgucgacaccguccucgagaagaacgucaccgucacccacuccgucaaccuccucgaggacaagcacaacggcaagcucugcaagcuccgcggcgucgccccccuccaccucggcaagugcaacaucgccggcuggauccucggcaaccccgagugcgagucccucuccaccgccuccuccugguccuacaucgucgagaccuccuccuccgacaacggcaccugcuaccccggcgacuucaucgacuacgaggagcuccgcgagcagcucuccuccgucuccuccuucgagcgcuucgagaucuuccccaagaccuccuccuggcccaaccacgacuccaacaagggcgucaccgccgccugcccccacgccggcgccaaguccuucuacaagaaccucaucuggaucgucaagaagggcaacuccuaccccaagcucaacaaguccuacaucaacgacaagggcaaggagguccucguccucuggggcauccaccaccccuccaccuccgccgaccagcagucccucuaccagaacgccgacgccuacgucuucgucggcaccucccgcuacuccaagaaguucaagcccgagaucgccauccgccccaagguccgcgaccaggagggccgcaugaacuacuacuggacccucgucgagcccggcgacaagaucaccuucgaggccaccggcaaccucgucgucccccgcuacgccuucgccauggagcgcaacgccggcuccggcaucaucaucuccgacacccccguccacgacugcaacaccaccugccagacccccaagggcgccaucaacaccucccuccccuuccagaacauccaccccaucaccaucggcgagugccccaaguacgucaaguccaccaagcuccgccucgccaccggccuccgcaacguccccuccauccagucccgcggccucuucggcgccaucgccggcuucaucgagggcggcuggaccggcauggucgacggcugguacggcuaccaccaccagaacgagcagggcuccggcuacgccgccgaccucaaguccacccagaacgccaucgacaagaucaccaacaaggucaacuccgucaucgagaagaugaacacccaguucaccgccgucggcaaggaguucaaccaccucgagaagcgcaucgagaaccucaacaagaaggucgacgacggcuuccucgacaucuggaccuacaacgccgagcuccucguccuccucgagaacgagcgcacccucgacuaccacgacuccaacgucaagaaccucuacgagaagguccgcucccagcucaagaacaacgccaaggagaucggcaacggcugcuucgaguucuaccacaagugcgacaacaccugcauggaguccgucaagaacggcaccuacgacuaccccaaguacuccgaggaggccaagcucaaccgcgaggagaucgacggcgucaagcucgaguccacccgcaucuaccagauccucgccaucuacuccaccgucgccuccucccucguccucgucgucucccucggcgccaucuccuucuggaugugcuccaacggcucccuccagugccgcaucugcaucuga

SEQ ID NO: 103631 - RNA, 1701 nt, Artificial Sequence
  derived and/or modified CDS sequence (opt2) from hemagglutinin__InfluenzaA__AEO01519
augaaggccauccucgucguccuccucuacaccuucgccaccgccaacgccgacacccucugcaucggcuaccacgccaacaacuccaccgacaccgucgacaccguccucgagaagaacgucaccgucacccacuccgucaaccuccucgaggacaagcacaacggcaagcucugcaagcuccgcggcgucgccccccuccaccucggcaagugcaacaucgccggcuggauccucggcaaccccgagugcgagucccucuccaccgccuccuccugguccuacaucgucgagaccuccuccuccgacaacggcaccugcuaccccggcgacuucaucgacuacgaggagcuccgcgagcagcucuccuccgucuccuccuucgagcgcuucgagaucuuccccaagaccuccuccuggcccaaccacgacuccaacaagggcgucaccgccgccugcccccacgccggcgccaaguccuucuacaagaaccucaucuggcucgucaagaagggcaacuccuaccccaagcucuccaaguccuacaucaacgacaagggcaaggagguccucguccucuggggcauccaccaccccuccaccuccgccgaccagcagucccucuaccagaacgccgacgccuacgucuucgucggcaccucccgcuacuccaagaaguuccgccccgagaucgccauccgccccaagguccgcgagcaggagggccgcaugaacuacuacuggacccucgucgagcccggcgacaagaucaccuucgaggccaccggcaaccucgucgucccccgcuacgccuucgccauggagcgcaacgccggcuccggcaucaucaucuccgacacccccguccacgacugcaacaccaccugccagacccccaagggcgccaucaacaccucccuccccuuccagaacauccaccccaucaccaucggcaagugccccaaguacgucaaguccaccaagcuccgccucgccaccggccuccgcaacauccccuccauccagucccgcggccucuucggcgccaucgccggcuucaucgagggcggcuggaccggcauggucgacggcugguacggcuaccaccaccagaacgagcagggcuccggcuacgccgccgaccucaaguccacccagaacgccaucgacgagaucaccaacaaggucaacuccgucaucgagaagaugaacacccaguucaccgccgucggcaaggaguucaaccaccucgagaagcgcaucgagaaccucaacaagaaggucgacgacggcuuccucgacaucuggaccuacaacgccgagcuccucguccuccucgagaacgagcgcacccucgacuaccacgacuccaacgucaagaaccucuacgagaagguccgcucccagcucaagaacaacgccaaggagaucggcaacggcugcuucgaguucuaccacaagugcgacaacaccugcauggaguccgucaagaacggcaccuacgacuaccccaaguacuccgaggaggccaagcucaaccgcgaggagaucgacggcgucaagcucgaguccacccgcaucuaccagauccucgccaucuacuccaccgucgccuccucccucguccucgucgucucccucggcgccaucuccuucuggaugugcuccaacggcucccuccagugccgcaucugcaucuga

SEQ ID NO: 103632 - RNA, 1701 nt, Artificial Sequence; identical to SEQ ID NO: 101610
  derived and/or modified CDS sequence (opt2) from hemagglutinin__InfluenzaA__AEO01520

SEQ ID NO: 103633 - RNA, 1701 nt, Artificial Sequence; identical to SEQ ID NO: 100332
  derived and/or modified CDS sequence (opt2) from hemagglutinin__InfluenzaA__AEO01521

SEQ ID NO: 103634 - RNA, 1701 nt, Artificial Sequence; identical to SEQ ID NO: 102124
  derived and/or modified CDS sequence (opt2) from hemagglutinin__InfluenzaA__AEO01522

SEQ ID NO: 103635 - RNA, 1701 nt, Artificial Sequence; identical to SEQ ID NO: 99869
  derived and/or modified CDS sequence (opt2) from hemagglutinin__InfluenzaA__AEO01523

SEQ ID NO: 103636 - RNA, 1701 nt, Artificial Sequence; identical to SEQ ID NO: 103463
  derived and/or modified CDS sequence (opt2) from hemagglutinin__InfluenzaA__AEO01524

SEQ ID NO: 103637 - RNA, 1701 nt, Artificial Sequence
  derived and/or modified CDS sequence (opt2) from hemagglutinin__InfluenzaA__AEO01525
augaaggccauccucgucguccuccucuacaccuucgccaccgccaacgccgacacccucugcaucggcuaccacgccaacaacuccaccgacaccgucgacaccguccucgagaagaacgucaccgucacccacuccgucaaccuccucgaggacaagcacaacggcaagcucugcaagcuccgcggcgucgccccccuccaccucggcaagugcaacaucgccggcuggauccucggcaaccccgagugcgagucccucuccaccgccuccuccugguccuacaucgucgagaccuccuccuccggcaacggcaccugcuaccccggcgacuucaucgacuacgaggagcuccgcgagcagcucuccuccgucuccuccuucgagcgcuucgagaucuuccccaagaccuccuccuggcccaaccacgacuccaacaagggcgucaccgccgccugcccccacgccggcgccaaguccuucuacaagaaccucaucuggcucgucaagaagggcaacuccuacccccgccucuccaaguccuacaucaacgacaagggcaaggagguccucguccucuggggcauccaccaccccuccaccuccgccgaccagcagucccucuaccagaacgccgacgccuacgucuucgucggcaccucccgcuacuccaagaaguucaagcccgagaucgccauccgccccaagguccgcgaccaggagggccgcaugaacuacuacuggacccucgucgagcccggcgacaagaucaccuucgaggccaccggcaaccucgucgucccccgcuacgccuucgccauggagcgcaacgccggcuccggcaucaucaucuccgacacccccguccacgacugcaacaccaccugccagacccccaagggcgccaucaacaccucccuccccuuccagaacauccaccccaucaccaucggcaagugccccaaguacgucaaguccaccaagcuccgccucgccaccggccuccgcaacguccccuccauccagucccgcggccucuucggcgccaucgccggcuucaucgagggcggcuggaccggcauggucgacggcugguacggcuaccaccaccagaacgagcagggcuccggcuacgccgccgaccucaaguccacccagaacgccaucgacgagaucaccaacaaggucaacuccgucaucgagaagaugaacacccaguucaccgccgucggcaaggaguucaaccaccucgagaagcgcaucgagaaccucaacaagaaggucgacgacggcuuccucgacaucuggaccuacaacgccgagcuccucguccuccucgagaacgagcgcacccucgacuaccacgacuccaacgucaagaaccucuacgagaagguccgcucccagcucaagaacaacgccaaggagaucggcaacggcugcuucgaguucuaccacaagugcgacaacaccugcauggaguccgucaagaacggcaccuacgacuaccccaaguacuccgaggaggccaagcucaaccgcgaggagaucgacggcgucaagcucgaguccacccgcaucuaccagauccucgccaucuacuccaccgucgccuccucccucguccucgucgucucccucggcgccaucuccuucuggaugugcuccaacggcucccuccagugccgcaucugcaucuga

SEQ ID NO: 103638 - RNA, 1701 nt, Artificial Sequence; identical to SEQ ID NO: 99869
  derived and/or modified CDS sequence (opt2) from hemagglutinin__InfluenzaA__AEO01526

SEQ ID NO: 103639 - RNA, 1701 nt, Artificial Sequence; identical to SEQ ID NO: 102646
  derived and/or modified CDS sequence (opt2) from hemagglutinin__InfluenzaA__AEO01527

SEQ ID NO: 103640 - RNA, 1701 nt, Artificial Sequence
  derived and/or modified CDS sequence (opt2) from hemagglutinin__InfluenzaA__AEO01529
augaaggccauccucgucguccuccucuacaccuucgccaccgccaacgccgacacccucugcaucggcuaccacgccaacaacuccaccgacaccgucgacaccguccucgagaagaacgucaccgucacccacuccgucaacauccucgaggacaagcacaacggcaagcucugcaagcuccgcggcgucgccccccuccaccucggcaagugcaacaucgccggcuggauccucggcaaccccgagugcgagucccucuccaccgccuccuccugguccuacaucgucgagaccuccuccuccgacaacggcaccugcuaccccggcgacuucaucgacuacgaggagcuccgcgagcagcucuccuccgucuccuccuucgagcgcuucgagaucuuccccaagaccuccuccuggcccaaccacgacuccaacaagggcgucaccgccgccugcccccacgccggcgccaaguccuucuacaagaaccucaucuggcucgucaagaagggcaacuccuaccccaagcucuccaaguccuacaucaacgacaagggcaaggagguccucguccucuggggcauccaccaccccuccaccuccgccgaccagcagucccucuaccagaacgccgacgccuacgucuucgucggcuccucccgcuacuccaagaaguucaagcccgagaucgccauccgccccaagguccgcgaccaggagggccgcaugaacuacuacuggacccucgucgagcccggcgacaagaucaccuucgaggccaccggcaaccucgucgucccccgcuacgccuucgccauggagcgcaacgccggcuccggcaucaucaucuccgacacccccguccacgacugcaacaccaccugccagacccccaagggcgccaucaacaccucccuccccuuccagaacauccaccccaucaccaucggcaagugccccaaguacgucaaguccaccaagcuccgccucgccaccggccuccgcaacguccccuccauccagucccgcggccucuucggcgccaucgccggcuucaucgagggcggcuggaccggcauggucgacggcugguacggcuaccaccaccagaacgagcagggcuccggcuacgccgccgaccucaaguccacccagaacgccaucgacgagaucaccaacaaggucaacuccgucaucgagaagaugaacacccaguucaccgccgucggcaaggaguucaaccaccucgagaagcgcaucgagaaccucaacaagaaggucgacgacggcuuccucgacaucuggaccuacaacgccgagcuccucguccuccucgagaacgagcgcacccucgacuaccacgacuccaacgucaagaaccucuacgagaagguccgcucccagcucaagaacaacgccaaggaggucggcaacggcugcuucgaguucuaccacaagugcgacaacaccugcauggaguccgucaagaacggcaccuacgacuaccccaaguacuccgaggaggccaagcucaaccgcgagaagaucgacggcgucaagcucgaguccacccgcaucuaccagauccucgccaucuacuccaccgccgccuccucccucguccucgucgucucccucggcgccaucuccuucuggaugugcuccaacggcucccuccagugccgcaucugcaucuga

SEQ ID NO: 103641 - RNA, 1701 nt, Artificial Sequence; identical to SEQ ID NO: 99869
  derived and/or modified CDS sequence (opt2) from hemagglutinin__InfluenzaA__AEO01530

SEQ ID NO: 103642 - RNA, 1701 nt, Artificial Sequence
  derived and/or modified CDS sequence (opt2) from hemagglutinin__InfluenzaA__AEO01531
augaaggccauccucgucguccuccucuacaccuucgccaccgccaacaccgacacccucugcaucggcuaccacgccaacaacuccaccgacaccgucgacaccguccucgagaagaacgucaccgucacccacuccgucaaccuccucgaggacaagcacaacggcaagcucugcaagcuccgcggcgucgccccccuccaccucggcaagugcaacaucgccggcuggauccucggcaaccccgagugcgagucccucuccaccgccuccuccugguccuacaucgucgagaccuccuccuccgacaacggcaccugcuaccccggcgacuucaucgacuacgaggagcuccgcgagcagcucuccuccgucuccuccuucgagcgcuucgagaucuuccccaagaccuccuccuggcccaaccacgacuccaacaagggcgucaccgccgccugcccccacgccggcgccaaguccuucuacaagaaccucaucuggcucgucaagaagggcaacuccuaccccaagcucuccaaguccuacaucaacgacaagggcaaggagguccucguccucuggggcauccaccaccccuccaccuccgccgaccagcagucccucuaccagaacgccgacgccuacgucuucgucggcaccucccgcuacuccaagaaguucaagcccgagaucgccauccgccccaagguccgcgagcaggagggccgcaugaacuacuacuggacccucgucgagcccggcgacaagaucaccuucgaggccaccggcaaccucgucgucccccgcuacgccuucgccauggagcgcaacgccggcuccggcaucaucaucuccgacacccccguccacgacugcaacaccaccugccagacccccaagggcgccaucaacaccucccuccccuuccagaacauccaccccaucaccaucggcaagugccccaaguacgucaaguccaccaagcuccgccucgccaccggccuccgcaacguccccuccauccagucccgcggccucuucggcgccaucgccggcuucaucgagggcggcuggaccggcauggucgacggcugguacggcuaccaccaccagaacgagcagggcuccggcuacgccgccgaccucaaguccacccagaacgccaucgacaagaucaccaacaaggucaacuccgucaucgagaagaugaacacccaguucaccgccgucggcaaggaguucaaccaccucgagaagcgcaucgagaaccucaacaagaaggucgacgacggcuuccucgacaucuggaccuacaacgccgagcuccucguccuccucgagaacgagcgcacccucgacuaccacgacuccaacgucaagaaccucuacgagaagguccgcucccagcucaagaacaacgccaaggagaucggcaacggcugcuucgaguucuaccacaagugcgacaacaccugcauggaguccgucaagaacggcaccuacgacuaccccaaguacuccgaggaggccaagcucaaccgcgaggagaucgacggcgucaagcucgaguccacccgcgucuaccagauccucgccaucuacuccaccgucgccuccucccucguccucgucgucucccucggcgccaucuccuucuggaugugcuccaacggcucccuccagugccgcaucugcaucuga

SEQ ID NO: 103643 - RNA, 1701 nt, Artificial Sequence; identical to SEQ ID NO: 103474
  derived and/or modified CDS sequence (opt2) from hemagglutinin__InfluenzaA__AEO01532

SEQ ID NO: 103644 - RNA, 1701 nt, Artificial Sequence
  derived and/or modified CDS sequence (opt2) from hemagglutinin__InfluenzaA__AEO01533
augaaggccauccucgucguccuccucuacaccuucgccaccgccaacgccgacacccucugcaucggcuaccacgccaacaacuccaccgacaccgucgacaccguccucgagaagaacgucaccgucacccacuccgucgaccuccucgaggacaagcacaacggcaagcucugcaagcuccgcggcgucgccccccuccaccucggcaagugcaacaucgccggcuggauccucggcaaccccgagugcgagucccucuccaccgccuccuccugguccuacaucgucgagaccuccuccuccgacaacggcaccugcuaccccggcgacuucaucgacuacgaggagcuccgcgagcagcucuccuccgucuccuccuucgagcgcuucgagaucuuccccaagaccuccuccuggcccaaccacgacuccaacaagggcgucaccgccgccugcccccacgccggcgccaaguccuucuacaagaaccucaucuggcucgucaagaagggcaacuccuaccccaagcucuccaaguccuacaucaacgacaagggcaaggagguccucguccucuggggcauccaccaccccuccaccuccgccgaccagcagucccucuaccagaacgccgacgccuacgucuucgucggcaccucccgcuacuccaagaaguucaagcccgagaucgccauccgccccaagguccgcgaccaggagggccgcaugaacuacuacuggacccucgucgagcccggcgacaagaucaccuucgaggccaccggcaaccucgucgucccccgcuacgccuucgccauggagcgcaacgccggcuccggcaucaucaucuccgacacccccguccacgacugcaacaccaccugccagacccccaagggcgccaucaacaccucccuccccuuccagaacauccaccccaucaccaucggcaagugccccaaguacgucaaguccaccaagcuccgccucgccaccggccuccgcaacguccccuccauccagucccgcggccucuucggcgccaucgccggcuucaucgagggcggcuggaccggcauggucgacggcugguacggcuaccaccaccagaacgagcagggcuccggcuacgccgccgaccucaaguccacccagaacgccaucgacgagaucaccaacaaggucaacuccgucaucgagaagaugaacacccaguucaccgccgucggcaaggaguucaaccaccucgagaagcgcaucgagaaccucaacaagaaggucgacgacggcuuccucgacaucuggaccuacaacgccgagcuccucguccuccucgagaacgagcgcacccucgacuaccacgacuccaacgucaagaaccucuacgagaagguccgcucccagcucaagaacaacgccaaggagaucggcaacggcugcuucgaguucuaccacaagugcgacaacaccugcauggaguccgucaagaacggcaccuacgacuaccccaaguacuccgaggaggccaagcucaaccgcgaggagaucgacggcgucaagcucgaguccacccgcaucuaccagauccucgccaucuacuccaccgucgccuccucccucguccucgucgucucccucggcgccaucuccuucuggaugugcuccaacggcucccuccagugccgcaucugcaucuga

SEQ ID NO: 103645 - RNA, 1701 nt, Artificial Sequence
  derived and/or modified CDS sequence (opt2) from hemagglutinin__InfluenzaA__AEO01534
augaaggccauccucgucguccuccucuacaccuucgccaccgccaacgccgacacccucugcaucggcuaccacgccaacaacuccaccgacaccgucgacaccguccucgagaagaacgucaccgucacccacuccgucaaccuccucgaggacaagcacaacggcaagcucugcaagcuccgcggcgucgccccccuccaccucggcaagugcaacaucgccggcuggauccucggcaaccccgagugcgagucccucuccaccgcccgcuccugguccuacaucgucgagaccuccuccuccgacaacggcaccugcuaccccggcgacuucaucgacuacgaggagcuccgcgagcagcucuccuccgucuccuccuucgagcgcuucgagaucuuccccaagaccuccuccuggcccaaccacgacuccaacaagggcgucaccgccgccugcccccacgccggcgccaaguccuucuacaagaaccucaucuggcucgucaagaagggcaacuccuaccccaagcucuccaaguccuacaucaacgacaagggcaaggagguccucguccucuggggcauccaccaccccuccaccuccgccgaccagcagucccucuaccagaacgccgacgccuacgucuucgucggcaccucccgcuacuccaagaaguucaagcccgagaucgccauccgccccaagguccgcgaccaggagggccgcaugaacuacuacuggacccucgucgagcccggcgacaagaucaccuucgaggccaccggcaaccucgucgucccccgcuacgccuucgccauggagcgcaacgccggcuccggcaucaucaucuccgacacccccguccacgacugcaacaccaccugccagacccccaagggcgccaucaacaccucccuccccuuccagaacauccaccccaucaccaucggcaagugccccaaguacgucaaguccaccaagcuccgccucgccaccggccuccgcaacguccccuccauccagucccgcggccucuucggcgccaucgccggcuucaucgagggcggcuggaccggcauggucgacggcugguacggcuaccaccaccagaacgagcagggcuccggcuacgccgccgaccucaaguccacccagcacgccaucgacgagaucaccaacaaggucaacuccgucaucgagaagaugaacacccaguucaccgccgucggcaaggaguucaaccaccucgagaagcgcaucgagaaccucaacaagaaggucgacgacggcuuccucgacaucuggaccuacaacgccgagcuccucguccuccucgagaacgagcgcacccucgacuaccacgacuccaacgucaagaaccucuacgagaagguccgcucccagcucaagaacaacgccaaggagaucggcaacggcugcuucgaguucuaccacaagugcgacaacaccugcauggaguccgucaagaacggcaccuacgacuaccccaaguacuccgaggaggccaagcucaaccgcgaggagaucgacggcgucaagcucgaguccacccgcaucuaccagauccucgccaucuacuccaccgucgccuccucccucguccucgucgucucccucggcgccaucuccuucuggaugugcuccaacggcucccuccagugccgcaucugcaucuga

SEQ ID NO: 103646 - RNA, 1701 nt, Artificial Sequence; identical to SEQ ID NO: 100354
  derived and/or modified CDS sequence (opt2) from hemagglutinin__InfluenzaA__AEO01535

SEQ ID NO: 103647 - RNA, 1701 nt, Artificial Sequence; identical to SEQ ID NO: 99869
  derived and/or modified CDS sequence (opt2) from hemagglutinin__InfluenzaA__AEO01536

SEQ ID NO: 103648 - RNA, 1701 nt, Artificial Sequence; identical to SEQ ID NO: 101610
  derived and/or modified CDS sequence (opt2) from hemagglutinin__InfluenzaA__AEO01537

SEQ ID NO: 103649 - RNA, 1701 nt, Artificial Sequence
  derived and/or modified CDS sequence (opt2) from hemagglutinin__InfluenzaA__AEO01538
augaaggccauccucgucguccuccucuacaccuucgccaccgccaacgccgacacccucugcaucggcuaccacgccaacaacuccaccgacaccgucgacaccguccucgagaagaacgucaccgucacccacuccgucaaccuccucgaggacaagcacaacggcaagcucugcaagcucggcggcgucgccccccuccaccucggcaagugcaacaucgccggcuggauccucggcaaccccgagugcgagucccucuccaccgccuccuccugguccuacaucgucgagaccuccuccuccgacaacggcaccugcuaccccggcgacuucaucgacuacgaggagcuccgcgagcagcucuccuccgucuccuccuucgagcgcuucgagaucuuccccaagaccuccuccuggcccaaccacgacuccaacaagggcgucaccgccgccugcccccacgccggcgccaaguccuucuacaagaaccucaucuggcucgucaagaagggcaacuccuaccccaagcucuccaaguccuacaucaacgacaagggcaaggagguccucguccucuggggcauccaccaccccuccaccuccgccgaccagcagucccucuaccagaacgccgacgccuacgucuucgucggcaccucccgcuacuccaagaaguucaagcccgagaucgccauccgccccaagguccgcgaccaggagggccgcaugaacuacuacuggacccucgucgagcccggcgacaagaucaccuucgaggccaccggcaaccucgucgucccccgcuacgccuucgccauggagcgcaacgccggcuccggcaucaucaucuccgacacccccguccacgacugcaacaccaccugccagacccccaagggcgccaucaacaccucccuccccuuccagaacauccaccccaucaccaucggcaagugccccaaguacgucaaguccaccaagcuccgccucgccaccggccuccgcaacguccccuccauccagucccgcggccucuucggcgccaucgccggcuucaucgagggcggcuggaccggcauggucgacggcugguacggcuaccaccaccagaacgagcagggcuccggcuacgccgccgaccucaaguccacccagaacgccaucgacgagaucaccaacaaggucaacuccgucaucgagaagaugaacacccaguucaccgccgucggcaaggaguucaaccaccucgagaagcgcaucgagaaccucaacaagaaggucgacgacggcuuccucgacaucuggaccuacaacgccgagcuccucguccuccucgagaacgagcgcacccucgacuaccacgacuccaacgucaagaaccucuacgagaagguccgcucccagcucaagaacaacgccaaggagaucggcaacggcugcuucgaguucuaccacaagugcgacaacaccugcauggaguccgucaagaacggcaccuacgacuaccccaaguacuccgaggaggccaagcucaaccgcgaggagaucgacggcgucaagcucgaguccacccgcaucuaccagauccucgccaucuacuccaccgucgccuccucccucguccucgucgucucccucggcgccaucuccuucuggaugugcuccaacggcucccuccagugccgcaucugcaucuga

SEQ ID NO: 103650 - RNA, 1701 nt, Artificial Sequence; identical to SEQ ID NO: 100332
  derived and/or modified CDS sequence (opt2) from hemagglutinin__InfluenzaA__AEO01539

SEQ ID NO: 103651 - RNA, 1701 nt, Artificial Sequence
  derived and/or modified CDS sequence (opt2) from hemagglutinin__InfluenzaA__AEO01540
augaaggccauccucgucguccuccucuacaccuucgccaucgccaacgccgacacccucugcaucggcuaccacgccaacaacuccaccgacaccgucgacaccguccucgagaagaacgucaccgucacccacuccgucaaccuccucgaggacaagcacaacgagaagcucugcaagcuccgcggcgucgccccccuccaccucggcaagugcaacaucgccggcuggauccucggcaaccccgagugcgagucccucuccaccgccuccuccugguccuacaucgucgagaccuccuccuccgacaacggcaccugcuaccccggcgacuucaucgacuacgaggagcuccgcgagcagcucuccuccgucuccuccuucgagcgcuucgagaucuuccccaagaccuccuccuggcccaaccacgacuccaacaagggcgucaccgccgccugcccccacgccggcgccaaguccuucuacaagaaccucaucuggcucgucaagaagggcaacuccuaccccaagcucuccaaguccuacaucaacgacaagggcaaggagguccucguccucuggggcauccaccaccccuccaccuccgccgaccagcagucccucuaccagaacgccgacgccuacgucuucgucggcaccucccgcuacuccaagaaguucaagcccgagaucgccauccgccccaagguccgcgaccaggagggccgcaugaacuacuacuggacccucgucgagcccggcgacaagaucaccuucgaggccaccggcaaccucgucgucccccgcuacgccuucgccauggagcgcaacgccggcuccggcaucaucaucuccgacacccccguccacgacugcaacaccaccugccagacccccaagggcgccaucaacaccucccuccccuuccagaacauccaccccaucaccaucggcaagugccccaaguacgucaaguccaccaagcuccgccucgccaccggccuccgcaacguccccuccauccagucccgcggccucuucggcgccaucgccggcuucaucgagggcggcuggaccggcauggucgacggcugguacggcuaccaccaccagaacgagcagggcuccggcuacgccgccgaccucaaguccacccagcacgccaucgacgagaucaccaacaaggucaacuccgucaucgagaagaugaacacccaguucaccgccgucggcaaggaguucaaccaccucgagaagcgcaucgagaaccucaacaagaaggucgacgacggcuuccucgacaucuggaccuacaacgccgagcuccucguccuccucgagaacgagcgcacccucgacuaccacgacuccaacgucaagaaccucuacgagaagguccgcucccagcucaagaacaacgccaaggagaucggcaacggcugcuucgaguucuaccacaagugcgacaacaccugcauggaguccgucaagaacggcaccuacgacuaccccaaguacuccgaggaggccaagcucaaccgcgaggagaucaacggcgucaagcucgaguccacccgcaucuaccagauccucgccaucuacuccaccgucgccuccucccucguccucgucgucucccucggcgccaucuccuucuggaugugcuccaacggcucccuccagugccgcaucugcaucuga

SEQ ID NO: 103652 - RNA, 1701 nt, Artificial Sequence; identical to SEQ ID NO: 100125
  derived and/or modified CDS sequence (opt2) from hemagglutinin__InfluenzaA__AEO01541

SEQ ID NO: 103653 - RNA, 1701 nt, Artificial Sequence; identical to SEQ ID NO: 99869
  derived and/or modified CDS sequence (opt2) from hemagglutinin__InfluenzaA__AEO01542

SEQ ID NO: 103654 - RNA, 1701 nt, Artificial Sequence; identical to SEQ ID NO: 99806
  derived and/or modified CDS sequence (opt2) from hemagglutinin__InfluenzaA__AEO01543

SEQ ID NO: 103655 - RNA, 1701 nt, Artificial Sequence; identical to SEQ ID NO: 99806
  derived and/or modified CDS sequence (opt2) from hemagglutinin__InfluenzaA__AEO01544

SEQ ID NO: 103656 - RNA, 1701 nt, Artificial Sequence
  derived and/or modified CDS sequence (opt2) from hemagglutinin__InfluenzaA__AEO01545
augaaggccauccucgucguccuccucuacaccuucgccaccgccaacgccgacacccucugcaucggcuaccacgccaacaacuccaccgacaccgucgacaccguccucgagaagaacgucaccgucacccacuccgucaaccuccucgaggacaagcacuccggcaagcucugcaagcuccgcggcgucgccccccuccaccucggcaagugcaacaucgccggcuggauccucggcaaccccgagugcgagucccucuccaccgccuccuccugguccuacaucgucgagaccuccuccuccgacaacggcaccugcuaccccggcgacuucgucgacuacgaggagcuccgcgagcagcucuccuccgucuccuccuucgagcgcuucgagaucuuccccaagaccuccuccuggcccaaccacgacuccaacaagggcgucaccgccgccugcccccacgccggcgccaaguccuucuacaagaaccucaucuggcucgucaagaagggcaacuccuaccccaagcucuccaaguccuacaucaacgacaagggcaaggagguccucguccucuggggcauccaccaccccuccaccuccgccgaccagcagucccucuaccagaacgccgacgccuacgucuucgucggcaccucccgcuacuccaagaaguucaagcccgagaucgccauccgccccaagguccgcgaccaggagggccgcaugaacuacuacuggacccucgucgagcccggcgacaagaucaccuucgaggccaccggcaaccucgucgucccccgcuacgccuucgccauggagcgcaacgccggcuccggcaucaucaucuccgacacccccguccacgacugcaacaccaccugccagacccccaagggcgccaucaacaccucccuccccuuccagaacauccaccccaucaccaucggcaagugccccaaguacgucaaguccaccaagcuccgccucgccaccggccuccgcaacguccccuccauccagucccgcggccucuucggcgccaucgccggcuucaucgagggcggcuggaccggcauggucgacggcugguacggcuaccaccaccagaacgagcagggcuccggcuacgccgccgaccucaaguccacccagaacgccaucgacaagaucaccaacaaggucaacuccgucaucgagaagaugaacacccaguucaccgccgucggcaaggaguucaaccaccucgagaagcgcaucgagaaccucaacaagaaggucgacgacggcuuccucgacaucuggaccuacaacgccgagcuccucguccuccucgagaacgagcgcacccucgacuaccacgacuccaacgucaagaaccucuacgagaagguccgcucccagcucaagaacaacgccaaggagaucggcaacggcugcuucgaguucuaccacaagugcgacaacaccugcauggaguccgucaagaacggcaccuacgacuaccccaaguacuccgaggaggccaagcucaaccgcgaggagaucgacggcgucaagcucgaguccacccgcaucuaccagauccucgccaucuacuccaccgucgccuccucccucguccucgucgucucccucggcgccaucuccuucuggaugugcuccaacggcucccuccagugccgcaucugcaucuga

SEQ ID NO: 103657 - RNA, 1701 nt, Artificial Sequence; identical to SEQ ID NO: 98692
  derived and/or modified CDS sequence (opt2) from hemagglutinin__InfluenzaA__AEO01546

SEQ ID NO: 103658 - RNA, 1701 nt, Artificial Sequence; identical to SEQ ID NO: 98692
  derived and/or modified CDS sequence (opt2) from hemagglutinin__InfluenzaA__AEO01547

SEQ ID NO: 103659 - RNA, 1701 nt, Artificial Sequence; identical to SEQ ID NO: 98885
  derived and/or modified CDS sequence (opt2) from hemagglutinin__InfluenzaA__AEO01548

SEQ ID NO: 103660 - RNA, 1701 nt, Artificial Sequence; identical to SEQ ID NO: 98796
  derived and/or modified CDS sequence (opt2) from hemagglutinin__InfluenzaA__AEO01549

SEQ ID NO: 103661 - RNA, 1701 nt, Artificial Sequence; identical to SEQ ID NO: 98705
  derived and/or modified CDS sequence (opt2) from hemagglutinin__InfluenzaA__AEO01550

SEQ ID NO: 103662 - RNA, 1701 nt, Artificial Sequence; identical to SEQ ID NO: 98705
  derived and/or modified CDS sequence (opt2) from hemagglutinin__InfluenzaA__AEO01551

SEQ ID NO: 103663 - RNA, 1701 nt, Artificial Sequence; identical to SEQ ID NO: 98705
  derived and/or modified CDS sequence (opt2) from hemagglutinin__InfluenzaA__AEO01552

SEQ ID NO: 103664 - RNA, 1701 nt, Artificial Sequence; identical to SEQ ID NO: 98705
  derived and/or modified CDS sequence (opt2) from hemagglutinin__InfluenzaA__AEO01553

SEQ ID NO: 103665 - RNA, 1701 nt, Artificial Sequence; identical to SEQ ID NO: 98705
  derived and/or modified CDS sequence (opt2) from hemagglutinin__InfluenzaA__AEO01554

SEQ ID NO: 103666 - RNA, 1701 nt, Artificial Sequence; identical to SEQ ID NO: 98885
  derived and/or modified CDS sequence (opt2) from hemagglutinin__InfluenzaA__AEO01555

SEQ ID NO: 103667 - RNA, 1701 nt, Artificial Sequence; identical to SEQ ID NO: 98705
  derived and/or modified CDS sequence (opt2) from hemagglutinin__InfluenzaA__AEO01557

SEQ ID NO: 103668 - RNA, 1701 nt, Artificial Sequence; identical to SEQ ID NO: 98705
  derived and/or modified CDS sequence (opt2) from hemagglutinin__InfluenzaA__AEO01558

SEQ ID NO: 103669 - RNA, 1701 nt, Artificial Sequence
  derived and/or modified CDS sequence (opt2) from hemagglutinin__InfluenzaA__AEO01559
augaaggccauccucgucguccuccucuacaccuucgccaccgccaacgccgacacccucugcaucggcuaccacgccaacaacuccaccgacaccgucgacaccguccucgagaagaacgucaccgucacccacuccgucaaccuccucgaggacaagcacaacggcaagcucugcaagcuccgcggcgucgccccccuccaccucggcaagugcaacaucgccggcuggauccucggcaaccccgagugcgagucccucuccaccgccuccuccugguccuacaucgucgagaccuccuccuccgacaacggcaccugcuaccccggcgacuucaucgacuacgaggagcuccgcgagcagcucuccuccgucuccuccuucgagcgcuucgagaucuuccccaagaccuccuccuggcccaaccacgacuccaacaagggcgucaccgccgccugcccccacgccggcgccaaguccuucuacaagaaccucaucuggcucgucaagaagggcaacuccuaccccaagcucuccaaguccuacaucaacgacaagggcaaggagguccucguccucuggggcauccaccaccccuccaccuccgccgaccagcagucccucuaccagaacgccgacgccuacgucuucgucggcaccucccgcuacuccaagaaguucaagcccgagaucgccauccgccccaagguccgcgaccaggagggccgcaugaacuacuacuggacccucgucgagcccggcgacaagaucaccuucgaggccaccggcaaccucgucgucccccgcuacgccuucgccauggagcgcaacgccggcuccggcaucaucaucuccgacacccccguccaggacugcaacaccaccugccagacccccaagggcgccaucaacaccucccuccccuuccagaacauccaccccaucaccaucggcaagugccccaaguacgucaaguccaccaagcuccgccucgccaccggccuccgcaacguccccuccauccagucccgcggccucuucggcgccaucgccggcuucaucgagggcggcuggaccggcauggucgacggcugguacggcuaccaccaccagaacgagcagggcuccggcuacgccgccgaccucaaguccacccagaacgccaucgacgagaucaccaacaaggucaacuccgucaucgagaagaugaacacccaguucaccgccgucggcaaggaguucaaccaccucgagaagcgcaucgagaaccucaacaagaaggucgacgacggcuuccucgacaucuggaccuacaacgccgagcuccucguccuccucgagaacgagcgcacccucgacuaccacgacuccaacgucaagaaccucuacgagaagguccgcucccagcucaagaacaacgccaaggagaucggcaacggcugcuucgaguucuaccacaagugcgacaacaccugcauggaguccgucaagaacggcaccuacgacuaccccaaguacuccgaggaggccaagcucaaccgcgaggagaucgacggcgucaagcucgaguccacccgcaucuaccagauccucgccaucuacuccaccgucgccuccucccucguccucgucgucucccucggcgccaucuccuucuggaugugcuccaacggcucccuccagugccgcaucugcaucuga

SEQ ID NO: 103670 - RNA, 1701 nt, Artificial Sequence; identical to SEQ ID NO: 98705
  derived and/or modified CDS sequence (opt2) from hemagglutinin__InfluenzaA__AEO01560

SEQ ID NO: 103671 - RNA, 1701 nt, Artificial Sequence; identical to SEQ ID NO: 98705
  derived and/or modified CDS sequence (opt2) from hemagglutinin__InfluenzaA__AEO01561

SEQ ID NO: 103672 - RNA, 1701 nt, Artificial Sequence; identical to SEQ ID NO: 98705
  derived and/or modified CDS sequence (opt2) from hemagglutinin__InfluenzaA__AEO01562

SEQ ID NO: 103673 - RNA, 1701 nt, Artificial Sequence; identical to SEQ ID NO: 98705
  derived and/or modified CDS sequence (opt2) from hemagglutinin__InfluenzaA__AEO01563

SEQ ID NO: 103674 - RNA, 1701 nt, Artificial Sequence; identical to SEQ ID NO: 98705
  derived and/or modified CDS sequence (opt2) from hemagglutinin__InfluenzaA__AEO01564

SEQ ID NO: 103675 - RNA, 1701 nt, Artificial Sequence; identical to SEQ ID NO: 98705
  derived and/or modified CDS sequence (opt2) from hemagglutinin__InfluenzaA__AEO01565

SEQ ID NO: 103676 - RNA, 1701 nt, Artificial Sequence; identical to SEQ ID NO: 98692
  derived and/or modified CDS sequence (opt2) from hemagglutinin__InfluenzaA__AEO01566

SEQ ID NO: 103677 - RNA, 1701 nt, Artificial Sequence; identical to SEQ ID NO: 98947
  derived and/or modified CDS sequence (opt2) from hemagglutinin__InfluenzaA__AEO01567

SEQ ID NO: 103678 - RNA, 1701 nt, Artificial Sequence; identical to SEQ ID NO: 98887
  derived and/or modified CDS sequence (opt2) from hemagglutinin__InfluenzaA__AEO01568

SEQ ID NO: 103679 - RNA, 1701 nt, Artificial Sequence; identical to SEQ ID NO: 98887
  derived and/or modified CDS sequence (opt2) from hemagglutinin__InfluenzaA__AEO01569

SEQ ID NO: 103680 - RNA, 1701 nt, Artificial Sequence; identical to SEQ ID NO: 98947
  derived and/or modified CDS sequence (opt2) from hemagglutinin__InfluenzaA__AEO01570

SEQ ID NO: 103681 - RNA, 1701 nt, Artificial Sequence; identical to SEQ ID NO: 98887
  derived and/or modified CDS sequence (opt2) from hemagglutinin__InfluenzaA__AEO01571

SEQ ID NO: 103682 - RNA, 1701 nt, Artificial Sequence; identical to SEQ ID NO: 98947
  derived and/or modified CDS sequence (opt2) from hemagglutinin__InfluenzaA__AEO01572

SEQ ID NO: 103683 - RNA, 1701 nt, Artificial Sequence; identical to SEQ ID NO: 98692
  derived and/or modified CDS sequence (opt2) from hemagglutinin__InfluenzaA__AEO01573

SEQ ID NO: 103684 - RNA, 1701 nt, Artificial Sequence; identical to SEQ ID NO: 98705
  derived and/or modified CDS sequence (opt2) from hemagglutinin__InfluenzaA__AEO01574

SEQ ID NO: 103685 - RNA, 1701 nt, Artificial Sequence; identical to SEQ ID NO: 98692
  derived and/or modified CDS sequence (opt2) from hemagglutinin__InfluenzaA__AEO01575

SEQ ID NO: 103686 - RNA, 1701 nt, Artificial Sequence; identical to SEQ ID NO: 98692
  derived and/or modified CDS sequence (opt2) from hemagglutinin__InfluenzaA__AEO01576

SEQ ID NO: 103687 - RNA, 1701 nt, Artificial Sequence; identical to SEQ ID NO: 98692
  derived and/or modified CDS sequence (opt2) from hemagglutinin__InfluenzaA__AEO01577

SEQ ID NO: 103688 - RNA, 1701 nt, Artificial Sequence; identical to SEQ ID NO: 98947
  derived and/or modified CDS sequence (opt2) from hemagglutinin__InfluenzaA__AEO01578

SEQ ID NO: 103689 - RNA, 1701 nt, Artificial Sequence; identical to SEQ ID NO: 98947
  derived and/or modified CDS sequence (opt2) from hemagglutinin__InfluenzaA__AEO01579

SEQ ID NO: 103690 - RNA, 1701 nt, Artificial Sequence; identical to SEQ ID NO: 98692
  derived and/or modified CDS sequence (opt2) from hemagglutinin__InfluenzaA__AEO01581

SEQ ID NO: 103691 - RNA, 1701 nt, Artificial Sequence; identical to SEQ ID NO: 98692
  derived and/or modified CDS sequence (opt2) from hemagglutinin__InfluenzaA__AEO01582

SEQ ID NO: 103692 - RNA, 1701 nt, Artificial Sequence; identical to SEQ ID NO: 98692
  derived and/or modified CDS sequence (opt2) from hemagglutinin__InfluenzaA__AEO01583

SEQ ID NO: 103693 - RNA, 1701 nt, Artificial Sequence; identical to SEQ ID NO: 98692
  derived and/or modified CDS sequence (opt2) from hemagglutinin__InfluenzaA__AEO01584

SEQ ID NO: 103694 - RNA, 1701 nt, Artificial Sequence; identical to SEQ ID NO: 98692
  derived and/or modified CDS sequence (opt2) from hemagglutinin__InfluenzaA__AEO01585

SEQ ID NO: 103695 - RNA, 1701 nt, Artificial Sequence; identical to SEQ ID NO: 98692
  derived and/or modified CDS sequence (opt2) from hemagglutinin__InfluenzaA__AEO01586

SEQ ID NO: 103696 - RNA, 1701 nt, Artificial Sequence; identical to SEQ ID NO: 98692
  derived and/or modified CDS sequence (opt2) from hemagglutinin__InfluenzaA__AEO01587

SEQ ID NO: 103697 - RNA, 1701 nt, Artificial Sequence; identical to SEQ ID NO: 98692
  derived and/or modified CDS sequence (opt2) from hemagglutinin__InfluenzaA__AEO01588

SEQ ID NO: 103698 - RNA, 1701 nt, Artificial Sequence; identical to SEQ ID NO: 98705
  derived and/or modified CDS sequence (opt2) from hemagglutinin__InfluenzaA__AEO01589

SEQ ID NO: 103699 - RNA, 1701 nt, Artificial Sequence; identical to SEQ ID NO: 98705
  derived and/or modified CDS sequence (opt2) from hemagglutinin__InfluenzaA__AEO01590

SEQ ID NO: 103700 - RNA, 1701 nt, Artificial Sequence; identical to SEQ ID NO: 98705
  derived and/or modified CDS sequence (opt2) from hemagglutinin__InfluenzaA__AEO01591

SEQ ID NO: 103701 - RNA, 1701 nt, Artificial Sequence; identical to SEQ ID NO: 98692
  derived and/or modified CDS sequence (opt2) from hemagglutinin__InfluenzaA__AEO01592

SEQ ID NO: 103702 - RNA, 1701 nt, Artificial Sequence; identical to SEQ ID NO: 98705
  derived and/or modified CDS sequence (opt2) from hemagglutinin__InfluenzaA__AEO01593

SEQ ID NO: 103703 - RNA, 1701 nt, Artificial Sequence; identical to SEQ ID NO: 98692
  derived and/or modified CDS sequence (opt2) from hemagglutinin__InfluenzaA__AEO01594

SEQ ID NO: 103704 - RNA, 1701 nt, Artificial Sequence; identical to SEQ ID NO: 98692
  derived and/or modified CDS sequence (opt2) from hemagglutinin__InfluenzaA__AEO01595

SEQ ID NO: 103705 - RNA, 1701 nt, Artificial Sequence; identical to SEQ ID NO: 98885
  derived and/or modified CDS sequence (opt2) from hemagglutinin__InfluenzaA__AEO01596

SEQ ID NO: 103706 - RNA, 1701 nt, Artificial Sequence; identical to SEQ ID NO: 98705
  derived and/or modified CDS sequence (opt2) from hemagglutinin__InfluenzaA__AEO01597

SEQ ID NO: 103707 - RNA, 1701 nt, Artificial Sequence
  derived and/or modified CDS sequence (opt2) from hemagglutinin__InfluenzaA__AEO01598
augaaggccauccucgucguccuccucuacaccuucgccaccgccaacgccgacacccucugcaucggcuaccacgccaacaacuccaccgacaccgucgacaccguccucgagaagaacgucaccgucacccacuccgucaaccuccucgaggacaagcacaacggcaagcucugcaagcuccgcggcgucgccccccuccaccucggcaagugcaacaucgccggcuggauccucggcaaccccgagugcgagucccucuccaccgccuccuccugguccuacaucgucgagaccuccuccuccgacaacggcaccugcuaccccggcgacuucaucgacuacgaggagcuccgcgagcagcucuccuccgucuccuccuucgagcgcuucgagauguuccccaagaccuccuccuggcccaaccacgacuccaacaacggcgucaccgccgccugcccccacgccggcgccaaguccuucuacaagaaccucaucuggcucgucaagaagggcaacuccuaccccaagcucuccaaguccuacaucaacgacaagggcaaggagguccucguccucuggggcauccaccaccccuccaccuccgccgaccagcagucccucuaccagaacgccgacgccuacgucuucgucggcuccucccgcuacuccaagaaguucaagcccgagaucgccauccgccccaagguccgcgaccaggagggccgcaugaacuacuacuggacccucgucgagcccggcgacaagaucaccuucgaggccaccggcaaccucgucgucccccgcuacgccuucgccauggagcgcaacgccggcuccggcaucaucaucuccgacacccccguccacgacugcaacaccaccugccagacccccaagggcgccaucaacaccucccuccccuuccagaacauccaccccaucaccaucggcaagugccccaaguacgucaaguccaccaagcuccgccucgccaccggccuccgcaacguccccuccauccagucccgcggccucuucggcgccaucgccggcuucaucgagggcggcuggaccggcauggucgacggcugguacggcuaccaccaccagaacgagcagggcuccggcuacgccgccgaccucaaguccacccagaacgccaucgacgagaucaccaacaaggucaacuccgucaucgagaagaugaacacccaguucaccgccgucggcaaggaguucaaccaccucgagaagcgcaucgagaaccucaacaagaaggucgacgacggcuuccucgacaucuggaccuacaacgccgagcuccucguccuccucgagaacgagcgcacccucgacuaccacgacuccaacgucaagaaccucuacgagaagguccgcucccagcucaagaacaacgccaaggagaucggcaacggcugcuucgaguucuaccacaagugcgacaacaccugcauggaguccgucaagaacggcaccuacgacuaccccaaguacuccgaggaggccaagcucaaccgcgaggagaucgacggcgucaagcucgaguccacccgcaucuaccagauccucgccaucuacuccaccgucgccuccucccucguccucgucgucucccucggcgccaucuccuucuggaugugcuccaacggcucccuccagugccgcaucugcaucuga

SEQ ID NO: 103708 - RNA, 1701 nt, Artificial Sequence; identical to SEQ ID NO: 98705
  derived and/or modified CDS sequence (opt2) from hemagglutinin__InfluenzaA__AEO01599

SEQ ID NO: 103709 - RNA, 1701 nt, Artificial Sequence; identical to SEQ ID NO: 98705
  derived and/or modified CDS sequence (opt2) from hemagglutinin__InfluenzaA__AEO01600

SEQ ID NO: 103710 - RNA, 1701 nt, Artificial Sequence; identical to SEQ ID NO: 98705
  derived and/or modified CDS sequence (opt2) from hemagglutinin__InfluenzaA__AEO01601

SEQ ID NO: 103711 - RNA, 1701 nt, Artificial Sequence; identical to SEQ ID NO: 98705
  derived and/or modified CDS sequence (opt2) from hemagglutinin__InfluenzaA__AEO01602

SEQ ID NO: 103712 - RNA, 1701 nt, Artificial Sequence; identical to SEQ ID NO: 98705
  derived and/or modified CDS sequence (opt2) from hemagglutinin__InfluenzaA__AEO01603

SEQ ID NO: 103713 - RNA, 1701 nt, Artificial Sequence; identical to SEQ ID NO: 98705
  derived and/or modified CDS sequence (opt2) from hemagglutinin__InfluenzaA__AEO01604

SEQ ID NO: 103714 - RNA, 1701 nt, Artificial Sequence; identical to SEQ ID NO: 98705
  derived and/or modified CDS sequence (opt2) from hemagglutinin__InfluenzaA__AEO01605

SEQ ID NO: 103715 - RNA, 1701 nt, Artificial Sequence
  derived and/or modified CDS sequence (opt2) from hemagglutinin__InfluenzaA__AEO01606
augaaggccauccucgucguccuccucuacaccuucgccaccgccaacgccgacacccucugcaucggcuaccacgccaacaacuccaccgacaccgucgacaccguccucgagaagaacgucaccgucacccacuccgucaaccuccucgaggacaagcacaacggcaagcucugcaagcuccgcggcgucgccccccuccaccucggcaagugcaacaucgccggcuggauccucggcaaccccgagugcgagucccucuccaccgccuccuccugguccuacaucgucgagaccuccuccuccgacaacggcaccugcuaccccggcgacuucaucgacuacgaggagcuccgcgagcagcucuccuccgucuccuccuucgagcgcuucgagaucuuccccaagaccuccuccuggcccaaccacgacuccaacaagggcgucaccgccgccugcccccacgccggcgccaaguccuucuacaagaaccucaucuggcucgucaagaagggcaacuccuaccccaagcucuccaaguccuacaucaacgacaagggcaaggagguccucguccucuggggcauccaccaccccuccaccuccgccgaccagcagucccucuaccagaacgccgacgccuacgucuucgucggcaccucccgcuacuccaagaaguucaagcccgagaucgccauccgccccaagguccgcgaccaggagggccgcaugaacuacuacuggacccucgucgagcccggcgacaagaucaccuucgaggccaccggcaaccucgucgucccccgcuacgccuucgccauggagcgcaacgccggcuccggcaucaucaucuccgacacccccguccacgacugcaacaccaccugccagacccccaagggcgccaucaacaccucccuccccuuccagaacauccaccccaucaccaucggcaagugccccaaguacgucaaguccaccaagcuccgccucgccaccggccuccgcaacguccccuccauccagucccgcggccucuucggcgccaucgccggcuucaucgagggcggcuggaccggcauggucgacggcugguacggcuaccaccaccagaacgagcagggcuccggcuacgccgccgaccucaaguccacccagaacgccaucgacgagaucaccaacaaggucaacuccgucaucgagaagaugaacacccaguucaccgccgucggcaaggaguucaaccaccucgagaagcgcaucgagaaccucaacaagaaggucgacgacggcuuccucgacaucuggaccuacaacgccgagcuccucguccuccucgagaacgagcgcacccucgacuaccacgacuccaacgucaagaaccucuacgagaaggucaagucccagcucaagaacaacgccaaggagaucggcaacggcugcuucgaguucuaccacaagugcgacaacaccugcauggaguccgucaagaacggcaccuacgacuaccccaaguacuccgaggaggccaagcucaaccgcgaggagaucgacggcgucaagcucgaguccacccgcaucuaccagauccucgccaucuacuccaccgucgccuccucccucguccucgucgucucccucggcgccaucuccuucuggaugugcuccaacggcucccuccagugccgcaucugcaucuga

SEQ ID NO: 103716 - RNA, 1701 nt, Artificial Sequence; identical to SEQ ID NO: 98947
  derived and/or modified CDS sequence (opt2) from hemagglutinin__InfluenzaA__AEO01607

SEQ ID NO: 103717 - RNA, 1701 nt, Artificial Sequence; identical to SEQ ID NO: 101610
  derived and/or modified CDS sequence (opt2) from hemagglutinin__InfluenzaA__AEO01608

SEQ ID NO: 103718 - RNA, 1701 nt, Artificial Sequence; identical to SEQ ID NO: 103470
  derived and/or modified CDS sequence (opt2) from hemagglutinin__InfluenzaA__AEO01609

SEQ ID NO: 103719 - RNA, 1701 nt, Artificial Sequence
  derived and/or modified CDS sequence (opt2) from hemagglutinin__InfluenzaA__AEO01610
augaaggccauccucgucguccuccucuacaccuucgccaccaccaacgccgacacccucugcaucggcuaccacgccaacaacuccaccgacaccgucgacaccguccucgagaagaacgucaccgucacccacuccgucaaccuccucgaggacaagcacaacggcaagcucugcaagcuccgcggcgucgccccccuccaccucggcaagugcaacaucgccggcuggauccucggcaaccccgagugcgagucccucuccaccgccuccuccugguccuacaucgucgagaccuccuccuccgacaacggcaccugcuaccccggcgacuucaucgacuacgaggagcuccgcgagcagcucuccuccgucuccuccuucgagcgcuucgagaucuuccccaagaccuccuccuggcccaaccacgacuccaacaagggcgucaccgccgccugcccccacgccggcgccaaguccuucuacaagaaccucaucuggcucgucaagaagggcaacuccuaccccaagcucuccaaguccuacaucaacgacaagggcaaggagguccucguccucuggggcauccaccaccccuccaccuccgccgaccagcagucccucuaccagaacgccgacgccuacgucuucgucggcaccucccgcuacuccaagaaguucaagcccgagaucgccauccgccccaagguccgcgaccaggagggccgcaugaacuacuacuggacccucgucgagcccggcgacaagaucaccuucgaggccaccggcaaccucgucgucccccgcuacgccuucgccauggagcgcaacgccggcuccggcaucaucaucuccgacacccccguccacgacugcaacaccaccugccagacccccaagggcgccaucaacaccucccuccccuuccagaacauccaccccaucaccaucggcaagugccccaaguacgucaaguccaccaagcuccgccucgccaccggccuccgcaacguccccuccauccagucccgcggccucuucggcgccaucgccggcuucaucgagggcggcuggaccggcauggucgacggcugguacggcuaccaccaccagaacgagcagggcuccggcuacgccgccgaccucaaguccacccagcacgccaucgacgagaucaccaacaaggucaacuccgucaucgagaagaugaacacccaguucaccgccgucggcaaggaguucaaccaccucgagaagcgcaucgagaaccucaacaagaaggucgacgacggcuuccucgacaucuggaccuacaacgccgagcuccucguccuccucgagaacgagcgcacccucgacuaccacgacuccaacgucaagaaccucuacgagaagguccgcucccagcucaagaacaacgccaaggagaucggcaacggcugcuucgaguucuaccacaagugcgacaacaccugcauggaguccgucaagaacggcaccuacgacuaccccaaguacuccgaggaggccaagcucaaccgcgaggagaucgacggcgucaagcucgaguccacccgcaucuaccagauccucgccaucuacuccaccgucgccuccucccucguccucgucgucucccucggcgccaucuccuucuggaugugcuccaacggcucccuccagugccgcgucugcaucuga

SEQ ID NO: 103720 - RNA, 1701 nt, Artificial Sequence
  derived and/or modified CDS sequence (opt2) from hemagglutinin__InfluenzaA__AEO01611
augaaggccauccucgucguccuccucuacaccuucgccaccgccaacgccgacacccucugcaucggcuaccacgccaacaacuccaccgacaccgucgacaccguccucgagaagaacgucaccgucacccacuccgucaaccuccucgaggacaagcacaacggcaagcucugcaagcuccgcggcgucgccccccuccaccucggcaagugcaacaucgccggcuggauccucggcaaccccgagugcgagucccucuccaccgccuccuccugguccuacaucgucgagaccuccuccuccgacaacggcaccugcuaccccggcgacuucaucgacuacgaggagcuccgcgagcagcucuccuccgucuccuccuucgagcgcuucgagaucuuccccaagaccuccuccuggcccaaccacgacuccaacaagggcgucaccgccgccugcccccacgccggcgccaaguccuucuacaagaaccucaucuggcucgucaagaagggcaacuccuaccccaagcucuccaaguccuacaucaacgacaagggccgcgagguccucguccucuggggcauccaccaccccuccaccuccgccgaccagcagucccucuaccagaacgccgacgccuacgucuucgucggcaccucccgcuacuccaagaaguucaagcccgagaucgccauccgccccaagguccgcgaccaggagggccgcaugaacuacuacuggacccucgucgagcccggcgacaagaucaccuucgaggccaccggcaaccucgucgucccccgcuacgccuucgccauggagcgcaacgccggcuccggcaucaucaucuccgacacccccguccacgacugcaacaccaccugccagacccccaagggcgccaucaacaccucccuccccuuccagaacauccaccccaucaccaucggcgagugccccaaguacgucaaguccaccaagcuccgccucgccaccggccuccgcaacguccccuccauccagucccgcggccucuucggcgccaucgccggcuucaucgagggcggcuggaccggcauggucgacggcugguacggcuaccaccaccagaacgagcagggcuccggcuacgccgccgaccucaaguccacccagaacgccaucgacaagaucaccaacaaggucaacuccgucaucgagaagaugaacacccaguucaccgccgucggcaaggaguucaaccaccucgagaagcgcaucgagaaccucaacaagaaggucgacgacggcuuccucgacaucuggaccuacaacgccgagcuccucguccuccucgagaacgagcgcacccucgacuaccacgacuccaacgucaagaaccucuacgagaagguccgcucccagcucaagaacaacgccaaggagaucggcaacggcugcuucgaguucuaccacaagugcgacaacaccugcauggaguccgucaagaacggcaccuacgacuaccccaaguacuccgaggaggccaagcucaaccgcgaggagaucgacggcgucaagcucgaguccacccgcaucuaccagauccucgccaucuacuccaccgccgccuccucccucguccucgucgucucccucggcgccaucuccuucuggaugugcuccaacggcucccuccagugccgcaucugcaucuga

SEQ ID NO: 103721 - RNA, 1701 nt, Artificial Sequence
  derived and/or modified CDS sequence (opt2) from hemagglutinin__InfluenzaA__AEO01612
augaaggccauccucgucguccuccucuacaccuucgccaccgccaacgccgacacccucugcaucggcuaccacgccaacaacuccaccgacaccgucgacaccguccucgagaagaacgucaccgucacccacuccgucaaccuccucgaggacaagcacaacggcaagcucugcaagcuccgcggcgucgccccccuccaccucggcaagugcaacaucgccggcuggauccucggcaaccccgagugcgagucccucuccaccgccuccuccugguccuacaucgucgagaccuccuccuccgacaacggcaccugcuaccccggcgacuucaucgacuacgaggagcuccgcgagcagcucuccuccgucuccuccuucgagcgcuucgagaucuuccccaagaccuccuccuggcccaaccacgacuccaacaagggcgccaccgccgccugcccccacgccggcgccaaguccuucuacaagaaccucaucuggcucgucaagaagggcaacuccuaccccaagcucuccaaguccuacaucaacgacaagggcaaggagguccucguccucuggggcauccaccaccccuccaccuccgccgaccagcagucccucuaccagaacgccgacgccuacgucuucgucggcaccucccgcuacuccaagaaguucaagcccgagaucgccauccgccccaagguccgcgaccaggagggccgcaugaacuacuacuggacccucgucgagcccggcgacaagaucaccuucgaggccaccggcaaccucgucgucccccgcuacgccuucgccauggagcgcaacgccggcuccggcaucaucaucuccgacacccccguccacgacugcaacaccaccugccagacccccaagggcgccaucaacaccucccuccccuuccagaacauccaccccaucaccaucggcaagugccccaaguacgucaaguccaccaagcuccgccucgccaccggccuccgcaacguccccuccauccagucccgcggccucuucggcgccaucgccggcuucaucgagggcggcuggaccggcauggucgacggcugguacggcuaccaccaccagaacgagcagggcuccggcuacgccgccgaccucaaguccacccagaacgccaucgacgagaucaccaacaaggucaacuccgucaucgagaagaugaacacccaguucaccgccgucggcaaggaguucaaccaccucgagaagcgcaucgagaaccucaacaagaaggucgacgacggcuuccucgacaucuggaccuacaacgccgagcuccucguccuccucgagaacgagcgcacccucgacuaccacgacuccaacgucaagaaccucuacgagaagguccgcucccagcucaagaacaacgccaaggagaucggcaacggcugcuucgaguucuaccacaagugcgacaacaccugcauggaguccgucaagaacggcaccuacgacuaccccaaguacuccgaggaggccaagcucaaccgcgaggagaucgacggcgucaagcucgaguccacccgcaucuaccagauccucgccaucuacuccaccgucgccuccucccucguccucgucgucucccucggcgccaucuccuucuggaugugcuccaacggcucccuccagugccgcaucugcaucuga

SEQ ID NO: 103722 - RNA, 1701 nt, Artificial Sequence; identical to SEQ ID NO: 101302
  derived and/or modified CDS sequence (opt2) from hemagglutinin__InfluenzaA__AEO01613

SEQ ID NO: 103723 - RNA, 1701 nt, Artificial Sequence
  derived and/or modified CDS sequence (opt2) from hemagglutinin__InfluenzaA__AEO01614
augaaggccauccucgucguccuccucuacaccuucgccaccgccaacgccgacacccucugcaucggcuaccacgccaacaacuccaccgacaccgucgacaccguccucgagaagaacgucaccgucacccacuccgucaaccuccucgaggacaagcacaacggcaagcucugcaagcucaagggcgucgccccccuccaccucggcaagugcaacaucgccggcuggauccucggcaaccccgagugcgagucccucuccaccgccuccuccugguccuacaucgucgagaccuccuccuccgacaacggcaccugcuaccccggcgacuucaucgacuacgaggagcuccgcgagcagcucuccuccgucuccuccuucgagcgcuucgagaucuuccccaagaccuccuccuggcccaaccacgacuccaacaagggcgucaccgccgccugcccccacgccggcgccaaguccuucuacaagaaccucaucuggcucgucaagaagggcaacuccuaccccaagcucuccaaguccuacaucaacgacaagggcaaggagguccucguccucuggggcauccaccaccccuccaccuccgccgaccagcagucccucuaccagaacgccgacgccuacgucuucgucggcaccucccgcuacuccaagaaguucaagcccgagaucgccauccgccccaagguccgcgaccaggagggccgcaugaacuacuacuggacccucgucgagcccggcgacaagaucaccuucgaggccaccggcaaccucgucgucccccgcuacgccuucgccauggagcgcaacgccggcuccggcaucaucaucuccgacacccccguccacgacugcaacaccaccugccagacccccaagggcgccaucaacaccucccuccccuuccagaacauccaccccaucaccaucggcaagugccccaaguacgucaaguccaccaagcuccgccucgccaccggccuccgcaacauccccuccauccagucccgcggccucuucggcgccaucgccggcuucaucgagggcggcuggaccggcauggucgacggcugguacggcuaccaccaccagaacgagcagggcuccggcuacgccgccgaccucaaguccacccagaacgccaucgacgagaucaccaacaaggucaacuccgucaucgagaagaugaacacccaguucaccgccgucggcaaggaguucaaccaccucgagaagcgcaucgagaaccucaacaagaaggucgacgacggcuuccucgacaucuggaccuacaacgccgagcuccucguccuccucgagaacgagcgcacccucgacuaccacgacuccaacgucaagaaccucuacgagaagguccgcucccagcucaagaacaacgccaaggagaucggcaacggcugcuucgaguucuaccacaagugcgacaacaccugcauggaguccgucaagaacggcaccuacgacuaccccaaguacuccgaggaggccaagcucaaccgcgaggagaucgacggcgucaagcucgaguccacccgcaucuaccagauccucgccaucuacuccaccgucgccuccucccucguccucgucgucucccucggcgccaucuccuucuggaugugcuccaacggcucccuccagugccgcaucugcaucuga

SEQ ID NO: 103724 - RNA, 1701 nt, Artificial Sequence
  derived and/or modified CDS sequence (opt2) from hemagglutinin__InfluenzaA__AEO01615
augaaggccauccucgucguccuccucuacaccuucgccaccgccaacgccgacacccucugcaucggcuaccacgccaacaacuccaccgacaccgucgacaccguccucgagaagaacgucaccgucacccacuccgucaaccuccucgaggacaagcacaacggcaagcucugcaagcuccgcggcgucgccccccuccaccucggcaagugcaacaucgccggcuggauccucggcaaccccgagugcgagucccucuccaccgccuccuccugguccuacaucgucgagaccuccuccuccgacaacggcaccugcuaccccggcgacuucaucgacuacgaggagcuccgcgagcagcucuccuccgucuccuccuucgagcgcuucgagaucuuccccaagaccuccuccuggcccaaccacgacuccaacaagggcgucaccgccgccugcccccacgccggcgccaaguccuucuacaagaaccucaucuggcucgucaagaagggcaacuccuaccccaagcucuccaaguacuacaucaacgacaagggcaaggagguccucguccucuggggcauccaccaccccuccaccuccgccgaccagcagucccucuaccagaacgccgacgccuacgucuucgucggcaccucccgcuacuccaagaaguucaagcccgagaucgccauccgccccaagguccgcgagcaggagggccgcaugaacuacuacuggacccucgucgagcccggcgacaagaucaccuucgaggccaccggcaaccucgucgucccccgcuacgccuucgccauggagcgcaacgccggcuccggcaucaucaucuccgacacccccguccacgacugcaacaccaccugccagacccccaagggcgccaucaacaccucccuccccuuccagaacauccaccccaucaccaucggcaagugccccaaguacgucaaguccaccaagcuccgccucgccaccggccuccgcaacguccccuccauccagucccgcggccucuucggcgccaucgccggcuucaucgagggcggcuggaccggcauggucgacggcugguacggcuaccaccaccagaacgagcagggcuccggcuacgccgccgaccucaaguccacccagaacgccaucgacaagaucaccaacaaggucaacuccgucaucgagaagaugaacacccaguucaccgccgucggcaaggaguucaaccaccucgagaagcgcaucgagaaccucaacaagaaggucgacgacggcuuccucgacaucuggaccuacaacgccgagcuccucguccuccucgagaacgagcgcacccucgacuaccacgacuccaacgucaagaaccucuacgagaagguccgcucccagcucaagaacaacgccaaggagaucggcaacggcugcuucgaguucuaccacaagugcgacaacaccugcauggaguccgucaagaacggcaccuacgacuaccccaaguacuccgaggaggccaagcucaaccgcgaggagaucgacggcgucaagcucgaguccacccgcaucuaccagauccucgccaucuacuccaccgucgccuccucccucguccucgucgucucccucggcgccaucuccuucuggaugugcuccaacggcucccuccagugccgcaucugcaucuga

SEQ ID NO: 103725 - RNA, 1701 nt, Artificial Sequence; identical to SEQ ID NO: 99058
  derived and/or modified CDS sequence (opt2) from hemagglutinin__InfluenzaA__AEO01616

SEQ ID NO: 103726 - RNA, 1701 nt, Artificial Sequence; identical to SEQ ID NO: 99869
  derived and/or modified CDS sequence (opt2) from hemagglutinin__InfluenzaA__AEO01617

SEQ ID NO: 103727 - RNA, 1701 nt, Artificial Sequence; identical to SEQ ID NO: 100302
  derived and/or modified CDS sequence (opt2) from hemagglutinin__InfluenzaA__AEO01619

SEQ ID NO: 103728 - RNA, 1701 nt, Artificial Sequence; identical to SEQ ID NO: 103414
  derived and/or modified CDS sequence (opt2) from hemagglutinin__InfluenzaA__AEO01620

SEQ ID NO: 103729 - RNA, 1701 nt, Artificial Sequence; identical to SEQ ID NO: 103561
  derived and/or modified CDS sequence (opt2) from hemagglutinin__InfluenzaA__AEO01621

SEQ ID NO: 103730 - RNA, 1701 nt, Artificial Sequence
  derived and/or modified CDS sequence (opt2) from hemagglutinin__InfluenzaA__AEO01625
augaagaccaucaucgcccucuccuacauccucugccucgucuccgcccagaagcuccccggcaacgacaacuccaccgccacccucugccucggccaccacgccguccccaacggcaccaucgucaagaccaucaccaacgaccagaucgaggucaccaacgccaccgagcucguccaguccuccuccaccggcgagaucugcgacuccccccaccagguccucgacggcgagaacugcacccucaucgacgcccuccucggcgacccccagugcgacggcuuccagaacaagaagugggaccucuucgucgagcgcuccaaggccuacuccaacugcuaccccuacgacguccccgacuacgccucccuccgcucccucgucgccuccuccggcacccucgaguucaacaacgaguccuucaacuggaccggcgucacccagaacggcaccuccuccgccugcauccgccgcuccaacaacuccuucuucucccgccucaacuggcucacccacuccaaguucaaguaccccgcccucaacgucaccaugcccaacaacgaggaguucgacaagcucuacaucuggggcguccaccaccccggcaccgacaacgaccagaucuuccucuacgcccaggccuccggccgcaucaccgucuccaccaagcgcucccagcagaccgucauccccaacaucggcucccgcccccgcguccgcaacauccccucccgcaucuccaucuacuggaccaucgucaagcccggcgacauccuccucaucaacuccaccggcaaccucaucgccccccgcggcuacuucaagauccgcuccggcaaguccuccaucaugcgcuccgacgcccccaucggcaagugcaacuccgagugcaucacccccaacggcuccauccccaacgacaagcccuuccagaacgucaaccgcaucaccuacggcgccugcccccgcuacgucaagcagaacacccucaagcucgccaccggcaugcgcaacguccccgagaagcagacccgcggcaucuucggcgccaucgccggcuucaucgagaacggcugggagggcauggucgacggcugguacggcuuccgccaccagaacuccgagggcaucggccaggccgccgaccucaaguccacccaggccgccaucgaccagaucaacggcaagcucaaccgccucaucggcaagaccaacgagaaguuccaccagaucgagaaggaguucuccgaggucgagggccgcauccaggaccucgagaaguacgucgaggacaccaagaucgaccucugguccuacaacgccgagcuccucgucgcccucgagaaccagcacaccaucgaccucaccgacuccgagaugaacaagcucuucgagaagaccaagaagcagcuccgcgagaacgccgaggacaugggcaacggcugcuucaagaucuaccacaagugcgacaacgccugcaucggcuccauccgcaacggcaccuacgaccacgaggucuaccgcgacgaggcccucaacaaccgcuuccagaucaagggcgucgagcucaaguccggcuacaaggacuggauccucuggaucuccuucgccaucuccugcuuccuccucugcgucgcccuccucggcuucaucaugugggccugccagaagggcaacauccgcugcaacaucugcaucuga

SEQ ID NO: 103731 - RNA, 1701 nt, Artificial Sequence
  derived and/or modified CDS sequence (opt2) from hemagglutinin__InfluenzaA__AEO01636
augaaguccaucaucgcccucuccuacauccucugccucgucuccgcccagaagcuccccggcaacgacaacuccaccgccacccucugccucggccaccacgccguccccaacggcaccaucgucaagaccaucaccaacgaccagaucgaggucaccaacgccaccgagcucguccaguccuccuccaccggcgagaucugcgacuccccccaccagguccucgacggcgagaacugcacccucaucgacgcccuccucggcgacccccagugcgacggcuuccagaacaagaagugggaccucuucgucgagcgcuccaaggccuacuccaacugcuaccccuacgacguccccgacuacgccucccuccgcucccucgucgccuccuccggcacccucgaguucaacaacgaguccuucaacuggaccggcgucacccagaacggcaccuccuccgccugcauccgccgcuccaacaacuccuucuucucccgccucaacuggcucacccacuccaaguucaaguaccccgcccucaacgucaccaugcccaacaacgaggaguucgacaagcucuacaucuggggcguccaccaccccggcaccgacaacgaccagaucuuccucuacgcccaggccuccggccgcaucaccgucuccaccaagcgcucccagcagaccgucauccccaacaucggcucccgcccccgcguccgcaacauccccucccgcaucuccaucuacuggaccaucgucaagcccggcgacauccuccucaucaacuccaccggcaaccucaucgccccccgcggcuacuucaagauccgcuccggcaaguccuccaucaugcgcuccgacgcccccaucggcaagugcaacuccgagugcaucacccccaacggcuccauccccaacgacaagcccuuccagaacgucaaccgcaucaccuacggcgccugcccccgcuacgucaagcagaacacccucaagcucgccaccggcaugcgcaacguccccgagaagcagacccgcggcaucuucggcgccaucgccggcuucaucgagaacggcugggagggcauggucgacggcugguacggcuuccgccaccagaacuccgagggcaucggccaggccgccgaccucaaguccacccaggccgccaucgaccagaucaacggcaagcucaaccgccucaucggcaagaccaacgagaaguuccaccagaucgagaaggaguucuccgaggucgagggccgcauccaggaccucgagaaguacgucgaggacaccaagaucgaccucugguccuacaacgccgagcuccucgucgcccucgagaaccagcacaccaucgaccucaccgacuccgagaugaacaagcucuucgagaagaccaagaagcagcuccgcgagaacgccgaggacaugggcaacggcugcuucaagaucuaccacaagugcgacaacgccugcaucggcuccauccgcaacggcaccuacgaccacgacgucuaccgcgacgaggcccucaacaaccgcuuccagaucaagggcgucgagcucaaguccggcuacaaggacuggauccucuggaucuccuucgccaucuccugcuuccuccucugcgucgcccuccucggcuucaucaugugggccugccagaagggcaacauccgcugcaacaucugcaucuga

SEQ ID NO: 103732 - RNA, 1701 nt, Artificial Sequence
  derived and/or modified CDS sequence (opt2) from hemagglutinin__InfluenzaA__AEO01642
augaagaccaucaucgcccucuccuacauccucugccucgucuccgcccagaagcuccccggcaacgacaacuccaccgccacccucugccucggccaccacgccguccccaacggcaccaucgucaagaccaucaccaacgaccagaucgaggucaccaacgccaccgagcucguccaguccuccuccaccggcgagaucugcaacuccccccaccagauccucgacggcgagaacugcacccucaucgacgcccuccucggcgacccccagugcgacggcuuccagaacaagaagugggaccucuucgucgagcgcuccaaggccuacuccaacugcuaccccuacgacguccccgacuacgccucccuccgcucccucgucgccuccuccggcacccucgaguucaacaacgaguccuucaacuggaccggcgucacccagaacggcaccuccuccgccugcauccgccgcuccaacaacuccuucuucucccgccucaacuggcucacccaccucaaguucaaguaccccgcccucaacgucaccaugcccaacaacgaggaguucgacaagcucuacaucuggggcguccaccaccccggcaccgacaacgaccagaucuuccucuacgcccaggccuccggccgcaucaccgucuccaccaagcgcucccagcagaccgucauccccaacaucggcucccgcccccgcguccgcaacauccccucccgcaucuccaucuacuggaccaucgucaagcccggcgacauccuccucaucaacuccaccggcaaccucaucgccccccgcggcuacuucaagauccgcuccggcaaguccuccaucaugcgcuccgacgcccccaucggcaagugcaacuccaagugcaucacccccaacggcuccauccccaacgacaagcccuuccagaacgucaaccgcgucaccuacggcgccugcccccgcuacgucaagcagaacacccucaagcucgccaccggcaugcgcaacguccccgagaagcagacccgcggcaucuucggcgccaucgccggcuucaucgagaacggcugggagggcauggucgacggcugguacggcuuccgccaccagaacuccgagggcaucggccaggccgccgaccucaaguccacccaggccgccaucgaccagaucaacggcaagcucaaccgccucaucggcaagaccaacgagaaguuccaccagaucgagaaggaguucuccgaggucgagggccgcauccaggaccucgagaaguacgucgaggacaccaagaucgaccucugguccuacaacgccgagcuccucgucgcccucgagaaccagcacaccaucgaccucaccgacuccgagaugaacaagcucuucgagaagaccaagaagcagcuccgcgagaacgccgaggacaugggcaacggcugcuucaagaucuaccacaagugcgacaacgccugcaucggcuccauccgcaacggcaccuacgaccacgacgucuaccgcgacgaggcccucaacaaccgcuuccagaucaagggcgucgagcucaaguccggcuacaaggacuggauccucuggaucuccuucgccaucuccugcuuccuccucugcgucgcccuccucggcuucaucaugugggccugccagaagggcaacauccgcugcaacaucugcaucuga

SEQ ID NO: 103733 - RNA, 1698 nt, Artificial Sequence
  derived and/or modified CDS sequence (opt2) from hemagglutinin__InfluenzaA__AEO01663
augaaggucaagcuccucguccuccucugcaccuucgccgccaccuacgccgacaccaucugcaucggcuaccacgccaacaacuccaccgacaccgucgacaccguccucgagaagaacgucaccgucacccacuccgucaaccuccucgagaacucccacaacggcaagcucugccuccucaagggcaucgccccccuccagcucggcaacugcuccgucgccggcuggauccucggcaaccccgagugcgagcuccucaucuccaaggaguccugguccuacaucgucgagaagcccaaccccgagaacggcaccugcuaccccggccacuucgccgacuacgaggagcuccgcgagcagcucuccuccgucuccuccuucgagcgcuucgagaucuuccccaaggaguccuccuggcccaaccacaccgucaccggcgucuccgccuccugcucccacaacggcgaguccuccuucuaccgcaaccuccucuggcucaccggcaagaacggccucuaccccaaccucuccaaguccuacgccaacaacaaggagaaggagguccucguccucuggggcguccaccacccccccaacaucggcgaccagaaggcccucuaccacaccgagaacgccuacgucuccgucgucuccucccacuacucccgcaaguucacccccgagaucgccaagcgccccaagguccgcgaccaggagggccgcaucaacuacuacuggacccuccucgagcccggcgacaccaucaucuucgaggccaacggcaaccuccgcgccccccgcuacgccuucgcccucucccgcggcuucggcuccggcaucaucaacuccaacgcccccauggacaagugcgacgccaagugccagaccccccagggcgccaucaacuccucccuccccuuccagaacguccaccccguccccaucggcgagugccccaaguacguccgcuccgccaagcuccgcauggucaccggccuccgcaacauccccuccauccagucccgcggccucuucggcgccaucgccggcuucaucgagggcggcuggaccggcauggucgacggcugguacggcuaccaccaccagaacgagcagggcuccggcuacgccgccgaccagaaguccacccagaacgccaucaacggcaucaccaacaaggucaacuccgucaucgagaagaugaacacccaguucaccgccgucggcaaggaguucaacaagcucgagcgccgcauggagaaccucaacaagaaggucgacgacggcuucaucgacaucuggaccuacaacgccgagcuccucguccuccucgagaacgagcgcacccucgacuuccacgacuccaacgucaagaaccucuacgagaaggucaagucccagcucaagaacaacgccaaggagaucggcaacggcugcuucgaguucuaccacaagugcaacgacgagugcauggaguccgucaagaacggcaccuacgacuaccccaaguacuccgaggaguccaagcucaaccgcgagaagaucgacggcguccgccucgaguccaugggcgucuaccagauccucgccaucuacuccaccgucgccuccucccucguccuccucgucucccucggcgccaucuccuucuggaugugcuccaacggcucccuccagugccgcaucugcaucuga

SEQ ID NO: 103734 - RNA, 1698 nt, Artificial Sequence
  derived and/or modified CDS sequence (opt2) from hemagglutinin__InfluenzaA__AEO01674
augaaggucaagcuccucguccuccucugcaccuucaccgccaccuacgccgacaccaucugcaucggcuaccacgccaacaacuccaccgacaccgucgacaccguccucgagaagaacgucaccgucacccacuccgucaaccuccucgagaacucccacaacggcaagcucugccuccucaagggcaucgccccccuccagcucggcaacugcuccgucgccggcuggauccucggcaaccccgagugcgagcuccucaucuccaaggaguccugguccuacaucgucgagaagcccaaccccgagaacggcaccugcuaccccggccacuucgccgacuacgaggagcuccgcgagcagcucuccuccgucuccuccuucgagcgcuucgagaucuuccccaaggaguccuccuggcccaaccacaccgucaccggcgucuccgccuccugcucccacaacggcgaguccuccuucuaccgcaaccuccucuggcucaccggcaagaacggccucuaccccaaccucuccaaguccuacgccaacaacaaggagaaggagguccucguccucuggggcguccaccacccccccaacaucggcgaccagaaggcccucuaccacaccgagaacgccuacgucuccgucgucuccucccacuacucccgcaaguucacccccgagaucgccaagcgccccaagguccgcgaccaggagggccgcaucaacuacuacuggacccuccucgagcccggcgacaccaucaucuucgaggccaacgagaaccucaaggccccccgcuacgccuucgcccucucccgcggcuucggcuccggcaucaucaacuccaaggcccccauggacaagugcgacgccaagugccagaccccccagggcgccaucaacuccucccuccccuuccagaacguccaccccgucaccaucggcgagugccccaaguacguccgcuccgccaagcuccgcauggucaccggccuccgcaacauccccuccauccagucccgcggccucuucggcgccaucgccggcuucaucgagggcggcuggaccggcauggucgacggcugguacggcuaccaccaccagaacgagcagggcuccggcuacgccgccgaccagaaguccacccagaacgccaucaacggcaucaccaacaaggucaacuccgucaucgagaagaugaacacccaguucaccgccgucggcaaggaguucaacaagcucgagcgccgcauggagaaccucaacaagaaggucgacgacggcuucaucgacaucuggaccuacaacgccgagcuccucguccuccucgagaacgagcgcacccucgacuuccacgacuccaacgucaagaaccucuacgagaaggucaagucccagcucaagaacaacgccaaggagaucggcaacggcugcuucgaguucuaccacaagugcaacgacgagugcauggaguccgucaagaacggcaccuacgacuaccccaaguacuccgaggaguccaagcucaaccgcgagaagaucgacggcguccgccucgaguccaugggcgucuaccagauccucgccaucuacuccaccgucgccuccucccucguccuccucgucucccucggcgccaucuccuucuggaugugcuccaacggcucccuccagugccgcaucugcaucuga

SEQ ID NO: 103735 - RNA, 1701 nt, Artificial Sequence; identical to SEQ ID NO: 103730
  derived and/or modified CDS sequence (opt2) from hemagglutinin__InfluenzaA__AEO01691

SEQ ID NO: 103736 - RNA, 1698 nt, Artificial Sequence
  derived and/or modified CDS sequence (opt2) from hemagglutinin__InfluenzaA__AEO01699
augaaggucaagcuccucguccuccucugcaccuucaccgccaccuacgccgacaccaucugcaucggcuaccacgccaacaacuccaccgacaccgucgacaccguccucgagaagaacgucaccgucacccacuccgucaaccuccucgagaacucccacaacggcaagcucugccuccucaagggcaucgccccccuccagcucggcaacugcuccgucgccggcuggauccucggcaaccccgagugcgagcuccucaucuccaaggaguccugguccuacaucgucgagaagcccaaccccgagaacggcaccugcuaccccggccacuucgccgacuacgaggagcuccgcgagcagcucuccuccgucuccuccuucgagcgcuucgagaucuuccccaaggaguccuccuggcccaaccacaccgucaccggcgucuccgccuccugcucccacaacggcgaguccuccuucuaccgcaaccuccucuggcucaccggcaagaacggccucuaccccaaccucuccaaguccuacgccaacaacaaggagaaggagguccucguccucuggggcguccaccacccccccaacaucggcgaccagaaggcccucuaccacaccgagaacgccuacgucuccgucgucuccucccacuacucccgcaaguucacccccgagaucgccaagcgccccaagguccgcgaccaggagggccgcaucaacuacuacuggacccuccucgagccccgcgacaccaucaucuucgaggccaacggcaaccucaucgccccccgcuacgccuucgcccucucccgcggcuucggcuccggcaucaucaacuccaacgcccccauggacaagugcgacgccaagugccagaccccccagggcgccaucaacuccucccuccccuuccagaacguccaccccgucaccaucggcgagugccccaaguacguccgcuccgccaagcuccgcauggucaccggccuccgcaacauccccuccauccccucccgcggccucuucggcgccaucgccggcuucaucgagggcggcuggaccggcauggucgacggcugguacggcuaccaccaccagaacgagcagggcuccggcuacgccgccgaccagaaguccacccagaacgccaucaacggcaucaccaacaaggucaacuccgucaucgagaagaugaacacccaguucaccgccgucggcaaggaguucaacaagcucgagcgccgcauggagaaccucaacaagaaggucgacgacggcuucaucgacaucuggaccuacaacgccgagcuccucguccuccucgagaacgagcgcacccucgacuuccacgacuccaacgucaagaaccucuacgagaaggucaagucccagcucaagaacaacgccaaggagaucggcaacggcugcuucgaguucuaccacaagugcaacgacgagugcauggaguccgucaagaacggcaccuacgacuaccccaaguacuccgaggaguccaagcucaaccgcgagaagaucgacggcgucaagcucgaguccaugggcgccuaccagauccucgccaucuacuccaccggcgccuccucccucguccuccucgucucccucggcgccaucuccuucuggaugugcuccaacggcucccuccagcgccgcaucugcaucuga

SEQ ID NO: 103737 - RNA, 1698 nt, Artificial Sequence
  derived and/or modified CDS sequence (opt2) from hemagglutinin__InfluenzaA__AEO01709
augaaggucaagcuccucguccuccucugcaccuucaccgccaccuacgccgacaccaucugcaucggcuaccacgccaacaacuccaccgacaccgucgacaccguccucgagaagaacgucaccgucacccacuccgucaaccuccucgagaacucccacaacggcaagcucugccuccucaagggcaucgccccccuccagcucggcaacugcuccgucgccggcuggauccucggcaaccccgagugcgagcuccucaucuccaaggaguccugguccuacaucgucgagaagcccaaccccgagaacggcaccugcuaccccggccacuucgccgacuacgaggagcuccgcgagcagcucuccuccgucuccuccuucgagcgcuucgagaucuuccccaaggaguccuccuggcccaaccacaccgucaccggcgucuccgccuccugcucccacaacggcgaguccuccuucuaccgcaaccuccucuggcucaccggcaagaacggccucuaccccaaccucuccaaguccuacgccaacaacaaggagaaggagguccucguccucuggggcguccaccacccccccaacaucggcgaccagaaggcccucuaccacaccgagaacgccuacgucuccgucgucuccucccacuacucccgcaaguucacccccgagaucgccaagcgccccaagcuccgcgaccaggacggccgcaucaacuacuacuggacccuccucgagcccggcgacaccaccaucuucgaggccaacggcaaccucaucgccccccgcuacgccuucgcccucucccgcggcuucggcuccggcaucaucaacuccaacgcccccauggacaagugcgacgccaagugccagaccccccagggcgccaucaacuccucccuccccuuccagaacguccaccccgucaccaucggcgagugccccaaguacguccgcuccgccaagcuccgcauggucaccggccuccgcaacauccccuccauccagucccgcggccucuucggcgccaucgccggcuucaucgagggcggcuggaccggcauggucgacggcugguacggcuaccaccaccagaacgagcagggcuccggcuacgccgccgaccagaaguccacccagaacgccaucaacggcaucaccaacaaggucaacuccgucaucgagaagaugaacacccaguucaccgccgucggcaaggaguucaacaagcucgagcgccgcauggagaaccucaacaagaaggucgacgacggcuucaucgacaucuggaccuacaacgccgagcuccucguccuccucgagaacgagcgcacccucgacuuccacgacuccaacgucaagaaccucuacgagaaggucaagucccagcucaagaacaacgccaaggagaucggcaacggcugcuucgagcucuaccucaagugcaacggcgagugcauggaguccgucaagaacggcaccuacgacuaccccaaguacuccgaggaguccaagcucaaccgcgagaagaucgacggcgucaagcucgaguccaugggcgucuaccagauccucgccaucuacuccaccgucgccuccucccucguccuccucgucucccucggcgccaucuccuucuggaugugcuccaacggcucccuccagugccgcaucugcaucuga

SEQ ID NO: 103738 - RNA, 1701 nt, Artificial Sequence; identical to SEQ ID NO: 99869
  derived and/or modified CDS sequence (opt2) from hemagglutinin__InfluenzaA__AEO37530

SEQ ID NO: 103739 - RNA, 1701 nt, Artificial Sequence
  derived and/or modified CDS sequence (opt2) from hemagglutinin__InfluenzaA__AEO72176
augaaggccauccucgucguccuccucuacaccuucgccaccgccaacgccgacacccucugcaucggcuaccacgccaacaacuccaccgacaccgucgacaccguccucgagaagaacgucaccgucacccacuccgucaaccuccucgaggacaagcacaacggcaagcucugcaagcuccgcggcgucgccccccuccaccucggcaagugcaacaucgccggcuggauccucggcaaccccgagugcgagucccucuccaccgccuccuccugguccuacaucgucgagaccuccuccuccgacaacggcaccugcuaccccggcgacuucaucgacuacgaggagcuccgcgagcagcucuccuccgucuccuccuucgagcgcuucgagaucuuccccaagaccuccuccuggcccaaccacgacuccaacaagggcgucaccgccgccugcccccacgccggcgccaaguccuucuacaagaaccucaucuggcucgucaagaagggcaacuccuaccccaagcucuccaaguccuacaucaacgacaagggcaaggagguccucguccucuggggcauccaccaccccuccaccaccgccgaccagcagucccucuaccagaacgccgacaccuacgucuucgucggcaccucccgcuacuccaagaaguucaagcccgagaucgccauccgccccaagguccgcgaccaggagggccgcaugaacuacuacuggacccucgucgagcccggcgacaagaucaccuucgaggccaccggcaaccucgucgucccccgcuacgccuucgccauggagcgcaacgccggcuccggcaucaucaucuccgacacccccguccacgacugcaacaccaccugccagacccccaagggcgccaucaacaccucccuccccuuccagaacauccaccccaucaccaucggcaagugccccaaguacgucaaguccaccaagcuccgccucgccaccggccuccgcaacguccccuccauccagucccgcggccucuucggcgccaucgccggcuucaucgagggcggcuggaccggcauggucgacggcugguacggcuaccaccaccagaacgagcagggcuccggcuacgccgccgaccucaaguccacccagaacgccaucgacaagaucaccaacaaggucaacuccgucaucgagaagaugaacacccaguucaccgccgucggcaaggaguucaaccaccucgagaagcgcaucgagaaccucaacaagaaggucgacgacggcuuccucgacaucuggaccuacaacgccgagcuccucguccuccucgagaacgagcgcacccucgacuaccacgacuccaacgucaagaaccucuacgagaagguccgcaaccagcucaagaacaacgccaaggagaucggcaacggcugcuucgaguucuaccacaagugcgacaacaccugcauggaguccgucaagaacggcaccuacgacuaccccaaguacuccgaggaggccaagcucaaccgcgaggagaucgacggcgucaagcucgaguccacccgcaucuaccagauccucgccaucuacuccaccgucgccuccucccucguccucgccgucucccucggcgccaucuccuucuggaugugcuccaacggcucccuccagugccgcaucugcaucuga

SEQ ID NO: 103740 - RNA, 1704 nt, Artificial Sequence
  derived and/or modified CDS sequence (opt2) from hemagglutinin__InfluenzaA__AEO88980
auggagaagaucguccuccuccucgccaucgucucccucgucaaguccgaccagaucugcaucggcuaccacgccaacaacuccaccgagcaggucgacaccaucauggagaagaacgucaccgucacccacgcccaggacauccucgagaagacccacaacggcaagcucugcgaccucgacggcgucaagccccucauccuccgcgacugcuccgucgccggcuggcuccucggcaaccccaugugcgacgaguucaucaacguccccgagugguccuacaucgucgagaaggccaaccccgccaacgaccucugcuaccccggcaacuucaacgacuacgaggagcucaagcaccuccucucccgcaucaaccacuucgagaagauccagaucauccccaaguccuccugguccgaccacgaggccuccuccggcgucuccuccgccugccccuaccagggcacccccuccuucuuccgcaacgucgucuggcucaucaagaagaacaacaccuaccccaccaucaagcgcuccuacaacaacaccaaccaggaggaccuccucauccucuggggcauccaccacuccaacgacgccgccgagcagaccaagcucuaccagaaccccaccaccuacaucuccgucggcaccuccacccucaaccagcgccucguccccaagaucgccacccgcuccaaggucaacggccaguccggccgcauggacuucuucuggaccauccucaagcccaacgacgccaucaacuucgaguccaacggcaacuucaucgcccccgaguacgccuacaagaucgucaagaagggcgacuccgccaucaugaaguccgaggucgaguacggcaacugcaacaccaagugccagacccccaucggcgccaucaacuccuccaugcccuuccacaacauccacccccucaccaucggcgagugccccaaguacgucaaguccaacaagcucguccucgccaccggccuccgcaacuccccccuccgcgagcgccgccgcaagcgcggccucuucggcgccaucgccggcuucaucgagggcggcuggcagggcauggucgacggcugguacggcuaccaccacuccaacgagcagggcuccggcuacgccgccgacaaggaguccacccagaaggccaucgacggcgucaccaacaaggucaacuccaucaucgacaagaugaacacccaguucgaggccgucggccgcgaguucaacaaccucgagcgccgcaucgagaaccucaacaagaagauggaggacggcuuccucgacgucuggaccuacaacgccgagcuccucguccucauggagaacgagcgcacccucgacuuccacgacuccaacgucaagaaccucuacgacaagguccgccuccagcuccgcgacaacgccaaggagcucggcaacggcugcuucgaguucuaccacaagugcgacaacgagugcauggaguccguccgcaacggcaccuacgacuacccccaguacuccgaggaggcccgccucaagcgcgaggagaucuccggcgucaagcucgaguccaucggcaccuaccagauccucuccaucuacuccaccgucgccuccucccucgcccucgccaucauggucgccggccucucccucuggaugugcuccaacggcucccuccagugccgcaucugcaucuga

SEQ ID NO: 103741 - RNA, 1704 nt, Artificial Sequence
  derived and/or modified CDS sequence (opt2) from hemagglutinin__InfluenzaA__AEO89021
auggagaagaucguccuccuccucgccaucgucucccucgucaaguccgaccagaucugcaucggcuaccacgccaacaacuccaccgagcaggucgacaccaucauggagaagaacgucaccgucacccacgcccaggacauccucgagaagacccacaacggcaagcucugcgaccucgacggcgucaagccccucauccuccgcgacugcuccgucgccggcuggcuccucggcaaccccaugugcgacgaguucaucaacguccccgagugguccuacaucgucgagaaggccaaccccgccaacgaccucugcuaccccggcaacuucaacgacuacgaggagcucaagcaccuccucucccgcaucaaccacuucgagaagauccccaucauccccaaguccuccugguccgaccacgaggccuccuccggcgucuccuccgccugccccuaccagggcacccccuccuucuuccgcaacgucgucuggcucaucaagaagaacaacaccuaccccaccaucaagcgcuccuacaacaacaccaaccaggaggaccuccucauccucuggggcauccaccacuccaacaacgccgccgagcagaccaagcucuaccagaaccccaccaccuacaucuccgucggcaccuccacccucaaccuccgccucguccccaagaucgccacccgcuccaaggucaacggccaguccggccgcauggacuucuucuggaccauccucaagcccaacgacgccaucaacuucgaguccaacggcaacuucaucgcccccgaguacgccuacaagaucgucaagaagggcgacuccgccaucaugaaguccgaggucgaguacggcaacugcaacaccaagugccagacccccaucggcgccaucaacuccuccaugcccuuccacaacauccacccccucaccaucggcgagugccccaaguacgucaaguccaacaagcucguccucgccaccggccuccgcaacuccccccuccgcgagcgccgccgcaagcgcggccucuucggcgccaucgccggcuucaucgagggcggcuggcagggcauggucgacggcugguacggcuaccaccacuccaacgagcagggcuccggcuacgccgccgacaaggaguccacccagaaggccaucgacggcgucaccaacaaggucaacuccaucaucgacaagaugaacacccaguucgaggccgucggccgcgaguucaacaaccucgagcgccgcaucgagaaccucaacaagaagauggaggacggcuuccucgacgucuggaccuacaacgccgagcuccucguccucauggagaacgagcgcacccucgacuuccacgacuccaacgucaagaaccucuacgacaagguccgccuccagcuccgcgacaacgccaaggagcucggcaacggcugcuucgaguucuaccacaagugcgacaacgagugcauggaguccguccgcaacggcaccuacgacuacccccaguacuccgaggaggcccgccucaagcgcgaggagaucuccggcgucaagcucgaguccaucggcaccuaccagauccucuccaucuacuccaccgucgccuccucccucgcccucgccaucauggucgccggccucucccucuggaugugcuccaacggcucccuccagugccgcaucugcaucuga

SEQ ID NO: 103742 - RNA, 1704 nt, Artificial Sequence
  derived and/or modified CDS sequence (opt2) from hemagglutinin__InfluenzaA__AEO89030
auggagaagaucguccuccuccucgccaucgucucccucgucaaguccgaccagaucugcaucggcuaccacgccaacaacuccaccgagcaggucgacaccaucauggagaagaacgucaccgucacccacgcccaggacauccucgagaagacccacaacggcaagcucugcgaccucgacggcgucaagccccucauccuccgcgacugcuccgucgccggcuggcuccucggcaaccccaugugcgacgaguucaucaacguccccgagugguccuacaucgucgagaaggccaaccccgccaacgaccucugcuaccccggcaacuucaacgacuacgaggagcucaagcaccuccucucccgcaucaaccacuucgagaagauccagaucauccccaaguccuccugguccgaccacgaggccuccuccggcgucuccuccgucugccccuaccagggcacccccuccuucuuccgcaacgucgucuggcucaucaagaagaacaacaccuaccccaccaucaagcgcuccuacaacaacaccaaccaggaggaccuccucauccucuggggcauccaccacuccaacgacgccgccgagcagaccaagcucuaccagaaccccaccaccuacaucuccgucggcaccuccacccucaaccagcgccucguccccaagaucgccacccgcuccaaggucaacggccaguccggccgcauggacuucuucuggaccguccucaagcccaacgacgccaucaacuucgaguccaacggcaacuucaucgcccccgaguacgccuacaagaucgucaagaagggcgacuccgccaucaugaaguccgaggucgaguacggcaacugcaacaccaagugccagacccccaucggcgccaucaacuccuccaugcccuuccacaacauccacccccucaccaucggcgagugccccaaguacgucaaguccaacaagcucguccucgccaccggccuccgcaacuccccccuccgcgagcgccgccgcaagcgcggccucuucggcgccaucgccggcuucaucgagggcggcuggcagggcauggucgacggcugguacggcuaccaccacuccaacgagcagggcuccggcuacgccgccgacaaggaguccacccagaaggccaucgacggcgucaccaacaaggucaacuccaucaucgacaagaugaacacccaguucgaggccgucggccgcgaguucaacaaccucgagcgccgcaucgagaaccucaacaagaagauggaggacggcuuccucgacgucuggaccuacaacgccgagcuccucguccucauggagaacgagcgcacccucgacuuccacgacuccaacgucaagaaccucuacgacaagguccgccuccagcuccgcgacaacgccaaggagcucggcaacggcugcuucgaguucuaccacaagugcgacaacgagugcauggaguccguccgcaacggcaccuacgacuacccccaguacuccgaggaggcccgccucaagcgcgaggagaucuccggcgucaagcucgaguccaucggcaccuaccagauccucuccaucuacuccaccgucgccuccucccucgcccucgccaucauggucgccggccucucccucuggaugugcuccaacggcucccuccagugccgcaucugcaucuga

SEQ ID NO: 103743 - RNA, 1704 nt, Artificial Sequence
  derived and/or modified CDS sequence (opt2) from hemagglutinin__InfluenzaA__AEO89048
auggagaagaucgucuuccuccucgccaucgucucccucgucaaguccgaccagaucugcaucggcuaccacgccaacaacuccaccgagcaggucgacaccaucauggagaagaacgucaccgucacccacgcccaggacauccucgagaagacccacaacggcaagcucugcgaccucgacggcgucaagccccucauccuccgcgacugcuccgucgccggcuggcuccucggcaaccccaugugcgacgaguucaucaacguccccgagugguccuacaucgucgagaaggccaaccccgccaacgaccucugcuaccccggcaacuucaacgacuacgaggagcucaagcaccuccucucccgcaucaaccacuucgagaagauccagaucauccccaaguccuccugguccgaccacgaggccuccuccggcgucuccuccgccugccccuaccagggcacccccuccuucuuccgcaacgucaucuggcucaucaagaagaacaacaccuaccccaccaucaagcgcuccuacaacaacaccaaccaggaggaccuccucauccucuggggcauccaccacuccaacgacgccgccgagcagaccaagcucuaccagaaccccaccaccuacaucuccgucggcaccuccacccucaaccagcgccucguccccaagaucgccacccgcuccaaggucaacggccaguccggccgcauggacuucuucuggaccauccucaagcccaacgacgccaucaacuucgaguccaacggcaacuucaucgcccccgaguacgccuacaagaucgucaagaagggcgacuccgccauccucaaguccgaggucgaguacggcaacugcaacaccaagugccagacccccaucggcgccaucaacuccuccaugcccuuccacaacauccacccccucaccaucggcgagugccccaaguacgucaaguccaacaagcucguccucgccaccggccuccgcaacuccccccuccgcgagcgccgccgcaagcgcggccucuucggcgccaucgccggcuucaucgagggcggcuggcagggcauggucgacggcugguacggcuaccaccacuccaacgagcagggcuccggcuacgccgccgacaaggaguccacccagaaggccaucgacggcgucaccaacaaggucaacuccaucaucgacaagaugaacacccaguucgaggccgucggccgcgaguucaacaaccucgagcgccgcaucgagaaccucaacaagaagauggaggacggcuuccucgacgucuggaccuacaacgccgagcuccucguccucauggagaacgagcgcacccucgacuuccacgacuccaacgucaagaaccucuacgacaagguccgccuccagcuccgcgacaacgccaaggagcucggcaacggcugcuucgaguucuaccacaagugcgacaacgagugcauggaguccguccgcaacggcaccuacgacuacccccaguacuccgaggaggcccgccucaagcgcgaggagaucuccggcgucaagcucgaguccaucggcaccuaccagauccucuccaucuacuccaccgucgccuccucccucgcccucgccaucauggucgccggccucucccucuggaugugcuccaacggcucccuccagugccgcaucugcaucuga

SEQ ID NO: 103744 - RNA, 1704 nt, Artificial Sequence
  derived and/or modified CDS sequence (opt2) from hemagglutinin__InfluenzaA__AEO89065
auggagaagaucguccuccuccucgccaucgucucccucgucaaguccgaccagaucugcaucggcuaccacgccaacaacuccaccgagcaggucgacaccaucauggagaagaacgucaccgucacccacgcccaggacauccucgagaagacccacaacggcaagcucugcgaccucgacggcgucaagccccucauccuccgcgacugcuccgucgccggcuggcuccucggcaaccccaugugcgacgaguucaucaacguccccgagugguccuacaucgucgagaaggccaaccccgccaacgaccucugcuaccccggcaacuucaacgacuacgaggagcucaagcaccuccucucccgcaucaaccacuucgagaagauccagaucauccccaaguccuccugguccgaccacgaggccuccuccggcgucuccuccgucugccccuaccagggcacccccuccuucuuccgcaacgucgucuggcucaucaagaagaacaacaccuaccccaccaucaagcgcuccuacaacaacaccaaccaggaggaccuccucauccucuggggcauccaccacuccaacgacgccgccgagcagaccaagcucuaccagaaccccaccaccuacaucuccgucggcaccuccacccucaaccuccgccucguccccaagaucgccacccgcuccaaggucaacggccaguccggccgcauggacuucuucuggaccauccucaagcccuccgacgccaucaacuucgaguccaacggcaacuucaucgcccccgaguacgccuacaagaucgucaagaagggcgacuccgccaucaugaaguccgaggucgaguacggcaacugcaacaccaagugccagacccccaucggcgccaucaacuccuccaugcccuuccacaacauccacccccucaccaucggcgagugccccaaguacgucaaguccaacaagcucguccucgccaccggccuccgcaacuccccccuccgcgagcgccgccgcaagcgcggccucuucggcgccaucgccggcuucaucgagggcggcuggcagggcauggucgacggcugguacggcuaccaccacuccaacgagcagggcuccggcuacgccgccgacaaggaguccacccagaaggccaucgacggcgucaccaacaaggucaacuccaucaucgacaagaugaacacccaguucgaggccgucggccgcgaguucaacaaccucgagcgccgcaucgagaaccucaacaagaagauggaggacggcuuccucgacgucuggaccuacaacgccgagcuccucguccucauggagaacgagcgcacccucgacuuccacgacuccaacgucaagaaccucuacgacaagguccgccuccagcuccgcgacaacgccaaggagcucggcaacggcugcuucgaguucuaccacaagugcgacaacgagugcauggaguccguccgcaacggcaccuacgacuacccccaguacuccgaggaggcccgccucaagcgcgaggagaucuccggcgucaagcucgaguccaucggcaccuaccagauccucuccaucuacuccaccgucgccuccucccucgcccucgccaucauggucgccggccucucccucuggaugugcuccaacggcucccuccagugccgcaucugcaucuga

SEQ ID NO: 103745 - RNA, 1704 nt, Artificial Sequence
  derived and/or modified CDS sequence (opt2) from hemagglutinin__InfluenzaA__AEO89082
auggagaagaucguccuccuccucgccaucgucucccucgucaaguccgaccagaucugcaucggcuaccacgccaacaacuccaccgagcaggucgacaccaucauggagaagaacgucaccgucacccacgcccaggacauccucgagaagacccacaacggcaagcucugcgaccucgacggcgucaagccccucauccuccgcgacugcuccgucgccggcuggcuccucggcaaccccaugugcgacgaguucaucaacguccccgagugguccuacaucgucgagaaggccaaccccgccaacgaccucugcuaccccggcaacuucaacgacuacgaggagcucaagcaccuccucucccgcaucaaccacuucgagaagauccagaucauccccaaguccuccugguccgaccacgacaccuccuccggcgucuccuccgccugccccuaccagggcacccccuccuucuuccgcaacgucgucuggcucaucaagaagaacaacaccuaccccaccaucaagcgcuccuacaacaacaccaacaaggaggaccuccucauccucuggggcauccaccacuccaacgacgccgccgagcagaccaagcucuaccagaaccccaccaccuacaucuccgucggcaccuccacccucaaccagcgccucguccccaagaucgccacccgcuccaaggucaacggccaguccggccgcauggacuucuucuggaccauccucaagcccaacgacgccaucaacuucgaguccaacggcaacuucaucgcccccgaguacgccuacaagaucgucaagaagggcgacuccgccaucaugaaguccgaggucgaguacggcaacugcaacaccaagugccagacccccaucggcgccaucaacuccuccaugcccuuccacaacauccacccccucaccaucggcgagugccccaaguacgucaaguccaacaagcucguccucgccaccggccuccgcaacuccccccuccgcgagcgccgccgcaagcgcggccucuucggcgccaucgccggcuucaucgagggcggcuggcagggcauggucgacggcugguacggcuaccaccacuccaacgagcagggcuccggcuacgccgccgacaaggaguccacccagaaggccaucgacggcgucaccaacaaggucaacuccaucaucgacaagaugaacacccaguucgaggccgucggccgcgaguucaacaaccucgagcgccgcaucgagaaccucaacaagaagauggaggacggcuuccucgacgucuggaccuacaacgccgagcuccucguccucauggagaacgagcgcacccucgacuuccacgacuccaacgucaagaaccucuacgacaagguccgccuccagcuccgcgacaacgccaaggagcucggcaacggcugcuucgaguucuaccacaagugcgacaacgagugcauggaguccguccgcaacggcaccuacgacuacccccaguacuccgaggaggcccgccucaagcgcgaggagaucuccggcgucaagcucgaguccaucggcaccuaccagauccucuccaucuacuccaccgucgccuccucccucgcccucgccaucauggucgccggccucucccucuggaugugcuccaacggcucccuccagugccgcaucugcaucuga

SEQ ID NO: 103746 - RNA, 1704 nt, Artificial Sequence
  derived and/or modified CDS sequence (opt2) from hemagglutinin__InfluenzaA__AEO89091
auggagaagaccgucuuccuccucgccaucgucucccucgucaaguccgaccagaucugcaucggcuaccacgccaacaacuccaccgagcaggucgacaccaucauggagaagaacgucaccgucacccacgcccagaacauccucgagaagacccacaacggcaagcucugcgacaucgacggcgucaagccccucauccucaaggacugcuccgucgccggcuggcuccucggcaaccccaugugcgacgaguucaucaacguccccgagugguccuacaucgucgagaaggccaaccccgccaacgaccucugcuaccccggcaacuucaacgacuacgaggagcucaagcaccuccucucccgcaucaaccacuucgagaagauccagaucauccccaaguccuccugguccgaccacgaggccuccuccggcgucuccuccaccugccccuaccagggcacccccuccuucuuccgcaacgucgucuggcucaucaagaagaacaacaccuaccccaccaucaagcgcuccuacaacaacaccaaccaggaggaccuccucauccucuggggcauccaccacuccaacgacgaggccgagcaggccaagcucuaccagaaccccaccaccuacaucuccgucggcaccuccacccucaaccagcgccucguccccaagaucgccacccgcuccaaggucaacggccaguccggccgcauggacuucuucuggaccauccucaagcccaacgacgccaucaacuucgaguccaacggcaacuucaucgcccccgaguacgccuacaagaucgucaagaagggcgacuccgccaucaugaaguccgaggucgaguacggcaacugcaacaccaagugccagacccccaucggcgccaucaacuccuccaugcccuuccacaacauccacccccucaccaucggcgagugccccaaguacgucaaguccaacaagcucguccucgccaccggccuccgcaacuccccccuccgcgagcgccgccgcaagcgcggccucuucggcgccaucgccggcuucaucgagggcggcuggcagggcauggucgacggcugguacggcuaccaccacuccaacgagcagggcuccggcuacgccgccgacaaggaguccacccagaaggccaucgacggcgucaccaacaaggucaacuccaucaucgacaagaugaacacccaguucgaggccgucggccgcgaguucaacaaccucgagcgccgcaucgagaaccucaacaagaagauggaggacggcuuccucgacgucuggaccuacaacgccgagcuccucguccucauggagaacgagcgcacccucgacuuccacgacuccaacgucaagaaccucuacgacaagguccgccuccagcuccgcgacaacgccaaggagcucggcaacggcugcuucgaguucuaccacaagugcgacgacgagugcauggaguccguccgcaacggcaccuacgacuacccccaguacuccgaggaggcccgccucaagcgcgaggagaucuccggcgucaagcucgaguccaucggcaccuaccagauccucuccaucuacuccaccgucgccuccucccucgcccucgccaucaugauggccggccucucccucuggaugugcuccaacggcucccuccagugccgcaucugcaucuga

SEQ ID NO: 103747 - RNA, 1704 nt, Artificial Sequence
  derived and/or modified CDS sequence (opt2) from hemagglutinin__InfluenzaA__AEO89100
auggagaagaucguccccuuccucgccaucaucucccucgucaaguccgaccagaucugcaucggcuaccacgccaacaacuccaccgagcaggucgacaccaucauggagaagaacgucaccgucacccacgcccaggacauccucgagaagacccacaacggcaagcucugcgaccucgacggcgucaagccccucauccuccgcgacugcuccgucgccggcuggcuccucggcaaccccaugugcgacgaguucaucaacguccccgagugguccuacaucgucgagaaggccaaccccgccaacgaccucugcuaccccggcaacuucaacgacuacgaggagcucaagcaccuccucucccgcaucaaccacuucgagaagauccagaucauccccaagaacuccugguccgaccacgaggccuccuccggcgucuccuccgccugccccuaccagggcacccccuccuucuuccgcaacgucgucuggcucaucaagaagaacaacaccuaccccaccaucaagcgcuccuacaacaacaccaaccaggaggaccuccucauccucuggggcauccaccacuccaacgacgccgccgagcagaccaagcucuaccagaaccccaccaccuacaucuccgucggcaccuccacccucaaccagcgccucguccccaagaucgccacccgcuccaaggucaacggccaguccggccgcauggacuucuucuggaccauccucaagcccaacgacgccaucaacuucgaguccaacggcaacuucaucgcccccgaguacgccuacaagaucgucaagaagggcgacuccgccaucaugaaguccgaggucgaguacggcaacugcaacaccaagugccagacccccaucggcgccaucaacuccuccaugcccuuccacaacauccacccccucaccaucggcgagugccccaaguacgucaaguccaacaagcucguccucgccaccggccuccgcaacuccccccuccgcgagcgccgccgcaagcgcggccucuucggcgccaucgccggcuucaucgagggcggcuggcagggcauggucgacggcugguacggcuuccaccacuccaacgagcagggcuccggcuacgccgccgacaaggaguccacccagaaggccaucgacggcgucaccaacaaggucaacuccaucaucgacaagaugaacacccaguucgaggccgucggccgcgaguucaacaaccucgagcgccgcaucgagaaccucaacaagaagauggaggacggcuuccucgacgucuggaccuacaacgccgagcuccucguccucauggagaacgagcgcacccucgacuuccacgacuccaacgucaagaaccucuacgacaagguccgccuccagcuccgcgacaacgccaaggagcucggcaacggcugcuucgaguucuaccacaagugcgacgacgagugcauggaguccgucaagaacggcaccuacgacuacccccaguacuccgaggaggcccgccucaagcgcgaggagaucuccggcgucaagcucgaguccaucggcaccuaccagauccucuccaucuacuccaccgucgccuccucccucgcccucgccaucauggucgccggccucucccucuggaugugcuccaacggcucccuccagugccgcaucugcaucuga

SEQ ID NO: 103748 - RNA, 1704 nt, Artificial Sequence
  derived and/or modified CDS sequence (opt2) from hemagglutinin__InfluenzaA__AEO89109
auggagaagaucguccuccuccucgccaucgucucccucgucaaguccgaccagaucugcaucggcuaccacgccaacaacuccaccgagcaggucgacaccaucauggagaagaacgucaccgucacccacgcccaggacauccucgagaagacccacaacggcaagcucugcgaccucgacggcgucaagccccucauccuccgcgacugcuccgucgccggcuggcuccucggcaaccccaugugcgacgaguucaucaacguccccgagugguccuacaucgucgagaaggccaaccccgccaacgaccucugcuaccccggcaacuucaacgacuacgaggagcucaagcaccuccucucccgcaucaaccacuucgagaagauccagaucauccccaaguccuccugguccgaccacgaggccuccuccggcgucuccuccgccugccccuaccagggcacccccuccuucuuccgcaacgucgucuggcucaucaagaagaacaacaccuaccccaccaucaagcgcuccuacaacaacaccaaccaggagaaccuccucauccucuggggcauccaccacuccaacgacgccgccgagcagaucaagcucuaccagaaccccaccaccuacaucuccgucggcaccuccacccucaaccagcgccucgucaccaagaucgccacccgccccaaggucaacggccaguccggccgcauggacuucuucuggaccauccucaagcccaacgacgccaucaacuucgaguccaacggcaacuucaucgcccccgaguacgccuacaagaucgucaaggagggcgacuccgccaucaugaaguccgaggucgaguacggcaacugcaacaccaagugccagacccccaucggcgccaucaacuccuccaugcccuuccacaacauccacccccucaccaucggcgagugccccaaguacgucaaguccaacaagcucguccucgccaccggccuccgcaacuccccccuccgcgagcgccgccgcaagcgcggccucuucggcgccaucgccggcuucaucgagggcggcuggcagggcauggucgacggcugguacggcuaccaccacuccaacgagcagggcuccggcuacgccgccgacaaggaguccacccagaaggccaucgacggcgucaccaacaaggucaacuccaucaucgacaagaugaacacccaguucgaggccgucggccgcgaguucaacaaccucgagcgccgcaucgagaaccucaacaagaagauggaggacggcuuccucgacgucuggaccuacaacgccgagcuccucguccucauggagaacgagcgcacccucgacuuccacgacuccaacgucaagaaccucuacgacaagguccgccuccagcuccgcgacaacgccaaggagcucggcaacggcugcuucgaguucuaccacaagugcgacaacgagugcauggaguccguccgcaacggcaccuacgacuacccccaguacuccgaggaggcccgccucaagcgcgaggagaucuccggcgucaagcucgaguccaucggcaccuaccagauccucuccaucuacuccaccgucgccuccucccucgcccucgccaucauggucgccggccucucccucuggaugugcuccaacggcucccuccagugccgcaucugcaucuga

SEQ ID NO: 103749 - RNA, 1704 nt, Artificial Sequence
  derived and/or modified CDS sequence (opt2) from hemagglutinin__InfluenzaA__AEO89127
auggagaagaucguccuccuccucgccaucaucucccucgucaaguccgaccagaucugcaucggcuaccacgccaacaacuccaccgagcaggucgacaccaucauggagaagaacgucaccgucacccacgcccaggacauccucgagaagacccacaacggcaagcucugcgaccucgacggcgucaagccccucauccuccgcgacugcuccgucgccggcuggcuccucggcaaccccaugugcgacgaguucaucaacguccccgagugguccuacaucgucgagaaggccaaccccgccaacgaccucugcuaccccggcaacuucaacgacuacgaggagcucaagcaccuccucucccgcaucaaccacuucgagaagauccagaucauccccaaguccuccugguccgaccacgaggccuccuccggcgucuccuccgccugccccuaccagggcacccccuccuucuuccgcaacgucgucuggcucaucaagaagaacaacaccuaccccaccaucaagcgcuccuacaacaacaccaaccaggagaaccuccucauccucuggggcauccaccacuccaacgacgccgccgagcagaucaagcucuaccagaaccccaccaccuacaucuccgucggcaccuccacccucaaccagcgccucguccccaagaucgccacccgcuccaaggucaacggccaguccggccgcauggacuucuucuggaccauccucaagcccaacgacgccaucaacuucgaguccaacggcaacuucaucgcccccgaguacgccuacaagaucgucaaggagggcgacuccgccaucaugaaguccgaggucgaguacggcaacugcaacaccaagugccagacccccaucggcgccaucaacuccuccaugcccuuccacaacauccacccccucaccaucggcgagugccccaaguacgucaaguccaacaagcucguccucgccaccggccuccgcaacuccccccuccgcgagcgccgccgccgccgcggccucuucggcgccaucgccggcuucaucgagggcggcuggcagggcauggucgacggcugguacggcuaccaccacuccaacgagcagggcuccggcuacgccgccgacaaggaguccacccagaaggccaucgacggcgucaccaacaaggucaacuccaucaucgacaagaugaacacccaguucgaggccgucggccgcgaguucaacaaccucgagcgccgcaucgagaaccucaacaagaagauggaggacggcuuccucgacgucuggaccuacaacgccgagcuccucguccucauggagaacgagcgcacccucgacuuccacgacuccaacgucaagaaccucuacgacaagguccgccuccagcuccgcgacaacgccaaggagcucggcaacggcugcuucgaguucuaccacaagugcgacaacgagugcauggaguccguccgcaacggcaccuacgacuacccccaguacuccgaggaggcccgccucaagcgcgaggagaucuccggcaucaagcucgaguccaugggcaccuaccagauccucuccaucuacuccaccgucgccuccucccucgcccucgccaucauggucgccggccucucccucuggaugugcuccaacggcucccuccagugccgcaucugcaucuga

SEQ ID NO: 103750 - RNA, 1704 nt, Artificial Sequence
  derived and/or modified CDS sequence (opt2) from hemagglutinin__InfluenzaA__AEO89145
auggagaagaucguccuccuccucgccaucgucucccucgucaaguccgaccagaucugcaucggcuaccacgccaacaacuccaccgagcaggucgacaccaucauggagaagaacgucaccgucacccacgcccaggacauccucgagaagacccacaacggcaagcucugcgaccucgacggcgucaagccccucauccucggcgacugcuccgucgccggcuggcuccucggcaaccccaugugcgacaaguucaucaacguccccgagugguccuacaucgucgagaaggccaaccccgccaacgaccucugcuaccccggcaacuucaacgacuacgaggagcucaagcaccuccucucccgcaucaaccacuucgagaagauccagaucauccccaaguccuccugguccgaccacgaggccuccuccggcgucuccuccgccugccccuaccagggcacccccuccuucuuccgcaacgucgucuggcucaccaagaagaacaacaccuaccccaccaucaagcgcuccuacaacaacaccaaccaggaggaccuccucauccucuggggcauccaccacuccaacaacgccgccgagcaggagaagcucuaccagaaccccaccaccuacaucuccgucggcaccuccacccucaaccagcgccucguccccaagaucgccacccgcuccaaggucaacggccaguccggccgcauggacuucuucuggaccauccucaagcccaacgacgccaucaacuucgaguccaacggcaacuucaucgcccccgaguacgccuacaagaucgucaagaagggcgacuccgccaucaugaaguccggcgucgaguacggcaacugcaacaccaagugccagacccccaucggcgccaucaacuccuccaugcccuuccacaacauccacccccucaccaucggcgagugccccaaguacgucaaguccaacaagcucguccucgccaccggccuccgcaacuccccccuccgcgagcgccgccgcaagcgcggccucuucggcgccaucgccggcuucaucgagggcggcuggcagggcauggucgacggcugguacggcuaccaccacuccaacgagcagggcuccggcuacgccgccgacaaggaguccacccagaaggccaucgacggcgucaccaacaaggucaacuccaucaucgacaagaugaacacccaguucgaggccgucggccgcgaguucaacaaccucgagcgccgcaucgagaaccucaacaagaagauggaggacggcuuccucgacgucuggaccuacaacgccgagcuccucguccucauggagaacgagcgcacccucgacuuccacgacuccaacgucaagaaccucuacgacaagguccgccuccagcuccgcgacaacgccaaggagcucggcaacggcugcuucgaguucuaccacaagugcgacaacgagugcauggaguccguccgcaacggcaccuacgacuacccccaguacuccgaggaggcccgccucaagcgcgaggagaucuccggcgucaagcucgaguccaucggcaccuaccagauccucuccaucuacuccaccgccgccuccucccucgcccucgccaucauggucgccggccucucccucuggaugugcuccaacggcucccuccagugccgcaucugcaucuga

SEQ ID NO: 103751 - RNA, 1707 nt, Artificial Sequence
  derived and/or modified CDS sequence (opt2) from hemagglutinin__InfluenzaA__AEO89163
auggagaagaucguccuccucuucgccaucgucucccucgucaaguccgaccacaucugcaucggcuaccacgccaacaacuccaccgagcaggucgacaccaucauggagaagaacgucaccgucacccacgcccaggacauccucgagaagacccacaacggcaagcucugcgaccucaacggcgucaagccccucauccucaaggacugcuccgucgccggcuggcuccucggcaaccccaugugcgacgaguucaucgacguccccgagugguccuacaucgucgagaaggccaaccccgccaacgaccucugcuaccccggcaacuucaacgacuacgaggagcucaagcaccuccucucccgcaucaaccacuucgagaagauccagaucauccccaaggacuccuggcccgaccacgaggccucccucggcgucuccuccgccugccccuaccagggcaacuccuccuucuuccgcaacgucgucuggcucaucaagaagggcaacgccuaccccaccaucaagaaguccuacaacaacaccaacaaggaggaccuccucauccucuggggcauccaccaccccaacgacgaggccgagcagacccgccucuaccagaaccccaccaccuacaucuccaucggcaccuccacccucaaccagcgccucgucccccgcaucgccacccgcuccaaggucaacggccaguccggccgcaucgacuucuucuggaccauccucaagcccaacgacgccaucaacuucgaguccaacggcaacuucaucgcccccgaguacgccuacaagaucgucaagaagggcgacuccaccaucaugaaguccgaggucgaguacggcaacugcaacacccgcugccagacccccaugggcgccaucaacuccuccaugcccuuccacaacauccacccccucaccaucggcgagugccccaaguacgucaaguccaacaagcucguccucgccaccggccuccgcaacuccccccagcgcgagcgccgccgccgcaagcgcggccucuucggcgccaucgccggcuucaucgagggcggcuggcagggcauggucgacggcugguacggcuaccaccacuccaacgagcagggcuccggcuacgccgccgacaaggaguccacccagaaggccaucgacggcgucaccaacaaggucaacuccaucaucgacaagaugaacacccaguucgaggccgucggccgcgaguucaacaaccucgagcgccgcaucgagaaccucaacaagaagauggaggacggcuuccucgacgucuggaccuacaacgccgagcuccucguccucauggagaacgagcgcacccucgacuuccacgacuccaacgucaagaaccucuacgacaagguccgccuccagcuccgcgacaacgccaaggagcucggcaacggcugcuucgaguucuaccacaagugcgacaacgagugcauggaguccguccgcaacggcaccuacgacuacccccaguacuccgaggaggcccgccucaagcgcgaggagaucuccggcgucaagcucgaguccaucggcaccuaccagauccucuccaucuacuccaccgucgccuccucccucguccucgccaucauggucgccggccucucccucuggaugugcuccaacggcucccuccagugccgcaucugcaucuga

SEQ ID NO: 103752 - RNA, 1704 nt, Artificial Sequence
  derived and/or modified CDS sequence (opt2) from hemagglutinin__InfluenzaA__AEO89172
auggagaagaucguccuccuccucgccaucgucucccucguccgcuccgaccagaucugcaucggcuaccacgccaacaacuccaccgagcaggucgacaccaucauggagaagaacgucaccgucacccacgcccagaacauccucgagaagacccacaacggcaagcucugcgaccucgacggcgucaagccccucauccuccgcgacugcuccgucgccggcuggcuccucggcaaccccaugugcgacgaguucaucaacguccccgagugguccuacaucgucgagaaggccaaccccgccaacgaccucugcuaccccggcaacuucaacgacuacgaggagcucaagcaccuccucucccgcaucaaccacuucgagaagauccagaucauccccaaguccuccugguccgaccacgaggccuccuccggcgucuccuccgccugccccuaccagggcacccccuccuucuuccgcaacgucgucuggcucaucaagaagaacaacaccuaccccaccaucaagcgcuccuacaacaacaccaaccaggaggaccuccucguccucuggggcauccaccacuccaacgacgccaccgagcagaucaagcucuaccagaaccccaccaccuacgucuccgucggcaccuccacccucaaccagcgccucguccccaagaucgccacccgcuccaaggucaacggccaguccggccgcauggacuucuucuggaccauccucaaguccaacgacgccaucaacuucgaguccaacggcaacuucaucgcccccgaguacgccuacaagaucgucaagaagggcgacuccgccaucaugaaguccgaggucgaguacggcaacugcuccaccaagugccagacccccaucggcgccaucaacuccuccaugcccuuccacaacauccacccccucaccaucggcgagugccccaaguacgucaaguccaacaagcucguccucgccaccggccuccgcaacuccccccuccgcgagcgccgccgcaagcgcggccucuucggcgccaucgccggcuucaucgagggcggcuggcagggcauggucgacggcugguacggcuaccaccacuccaacgagcagggcuccggcuacgccgccgacaaggaguccacccagaaggccaucgacggcgucaccaacaaggucaacuccaucaucgacaagaugaacacccaguucgaggccgucggccgcgaguucaacaaccucgagcgccgcaucgagaaccucaacaagaagauggaggacggcuuccucgacgucuggaccuacaacgccgagcuccucguccucauggagaacgagcgcacccucgacuuccacgacuccaacgucaagaaccucuacgacaagguccgccuccagcuccgcgacaacgccaaggagcucggcaacggcugcuucgaguucuaccacaagugcgacaacgagugcauggaguccguccgcaacggcaccuacgacuacccccaguacuccgaggaggcccgccucaagcgcgaggagaucuccggcgucaagcucgaguccaucggcaccuaccagauccucuccaucuacuccaccgucgccuccucccucgcccucgccaucauggucgccggccucucccucuggaugugcuccaacggcucccuccagugccgcaucugcaucuga

SEQ ID NO: 103753 - RNA, 1704 nt, Artificial Sequence
  derived and/or modified CDS sequence (opt2) from hemagglutinin__InfluenzaA__AEO89181
auggagaagaucguccuccucuucgccaccaucucccucgucaaguccgaccacaucugcaucggcuaccacgccaacaacuccaccgagcaggucgacaccaucauggagaagaacgucaccgucacccacgcccaggacauccucgagaagacccacaacggcaagcucugcgaccucaacggcgucaagccccucauccucaaggacugcuccgucgccggcuggcuccucggcaaccccaugugcgacgaguucaucaacguccccgagugguccuacaucgucgagaaggccaaccccgccaacgaccucugcuaccccggcaacuucaacgacuacgaggagcucaagcaccuccucucccgcaucaaccacuucgagaagauccagaucauccccaagaacuccugguccgaccacgaggccucccucggcgucuccgccgccugccccuaccagggcaaguccuccuucuuccgcaacgucgucuggcucaucaagaaggacaacgccuaccccaccaucaagaagggcuacaacaacaccaaccaggaggaccuccucguccucuggggcauccaccaccccaacgacgaggccgagcagacccgccucuaccagaaccccaccaccuacaucuccaucggcaccuccacccucaaccagcgccucguccccaagaucgccacccgcuccaagaucaacggccaguccggccgcaucgacuucuucuggaccauccucaagcccaacgacgccauccacuucgaguccaacggcaacuucaucgcccccgaguacgccuacaagaucgucaagaagggcgacuccaccaucaugaaguccgaggucgaguacggcaacugcaacacccgcugccagacccccaucggcgccaucaacuccuccaugcccuuccacaacauccacccccucaccaucggcgagugccccaaguacgucaaguccaacaagcucguccucgccaccggccuccgcaacuccccccagcgcgagcgccgccgcaagcgcggccucuucggcgccaucgccggcuucaucgagggcggcuggcagggcauggucgacggcugguacggcuaccaccacuccaacgagcagggcuccggcuacgccgccgacaaggaguccacccagaaggccaucgacggcgucaccaacaaggucaacuccaucaucgacaagaugaacacccaguucgaggccgucggccgcgaguucaacaaccucgagcgccgcaucgagaaccucaacaagaagauggaggacggcuuccucgacgucuggaccuacaacgccgagcuccucguccucauggagaacgagcgcacccucgacuuccacgacuccaacguccgcaaccucuacgacaagguccgccuccagcucaaggacaacgccaaggagcucggcaacggcugcuucgaguucuaccacaagugcgacaacgagugcauggaguccguccgcaacggcaccuacgacuacccccaguacuccgaggaggcccgccucaagcgcgaggagaucuccggcgucaagcucgaguccaucggcaucuaccagauccucuccaucuacuccaccgucgccuccucccucguccucgccaucaugauggccggccucucccucuggaugugcuccaacggcucccuccagugccgcaucugcaucuga

SEQ ID NO: 103754 - RNA, 1704 nt, Artificial Sequence
  derived and/or modified CDS sequence (opt2) from hemagglutinin__InfluenzaA__AEO89192
auggagaagaucguccuccuccucgccaucgucucccucgucaaguccgaccagaucugcaucggcuaccacgccaacaacuccaccgagcaggucgacaccaucauggagaagaacgucaccgucacccacgcccaggacauccucgagaagacccacaacggcaagcucugcgaccucgacggcgucaagccccucauccuccgcgacugcuccgucgccggcuggcuccucggcaaccccaugugcgacgaguucaucaacguccccgagugguccuacaucgucgagaaggccaaccccgccaacgaccucugcuaccccggcaacuucaacgacuacgaggagcucaagcaccuccucucccgcaucaaccacuucgagaagauccagaucauccccaaguccuccugguccgaccacgaggccuccuccggcgucuccuccgccugccccuaccagggcacccccuccuucuuccgcaacgucgucuggcucaucaagaagaacaacaccuaccccaccaucaagcgcuccuacaacaacaccaaccaggagaaccuccucauccucuggggcauccaccacuccaacgacgccgccgagcagaucaagcucuaccagaaccccaccaccuacgucuccaucggcaccuccacccucaaccagcgccucguccccaagaucgccacccgcuccaaggucaacggccaguccggccgcauggacuucuucuggaccauccucaagcccaacgacgccaucaacuucgaguccaacggcaacuucaucgcccccgaguacgccuacaagaucgucaaggagggcgacuccgccaucaugaaguccgaggucgaguacggcaacugcaacaccaagugccagacccccaucggcgccaucaacuccuccaugcccuuccacaacauccacccccucaccaucggcgagugccccaaguacgucaaguccaacaagcucguccucgccaccggccuccgcaacuccccccuccgcgagcgccgccgcaagcgcggccucuucggcgccaucgccggcuucaucgagggcggcuggcagggcauggucgacggcugguacggcuacccccacuccaacgagcagggcuccggcuacgccgccgacaaggaguccacccagaaggccaucgacggcgucaccaacaaggucaacuccaucaucgacaagaugaacacccaguucgaggccgucggccgcgaguucaacaaccucgagcgccgcaucgagaaccucaacaagaagauggaggacggcuuccucgacgucuggaccuacaacgccgagcuccucguccucauggagaacgagcgcacccucgacuuccacgacuccaacgucaagaaccucuacgacaagguccgccuccagcuccgcgacaacgccaaggagcucggcaacggcugcuucgaguucuaccacaagugcgacaacgagugcauggaguccguccgcaacggcaccuacgacuacccccaguacuccgaggaggcccgccucaagcgcgaggagaucaacggcgucaagcucgaguccaucggcaccuaccagauccucuccaucuacuccaccgucgccuccucccucgcccucgccaucauggucgccggccucucccucuggaugugcuccaacggcucccuccagugccgcaucugcaucuga

SEQ ID NO: 103755 - RNA, 1704 nt, Artificial Sequence
  derived and/or modified CDS sequence (opt2) from hemagglutinin__InfluenzaA__AEO89203
auggagaagaucguccuccuccucgccaucgucucccucgucaaguccgaccagaucugcaucggcuaccacgccaacaacuccaccgagcaggucgacaccaucauggagaagaacgucaccgucacccacgcccaggacauccucgagaagacccacaacggcaagcucugcgaccucgacggcgucaagccccucauccuccgcgacugcuccgucgccggcuggcuccucggcaaccccaugugcgacgaguucaucaacguccccgagugguccuacaucgucgagaaggccaaccccgccaacgaccucugcuaccccggcaacuucaacgacuacgaggagcucaagcaccuccucucccgcaucaaccacuucgagaagauccagaucauccccaaguccuccugguccgaccacgaggccuccuccggcgucuccuccgccugccccuaccagggcacccccuccuucuuccgcaacgucgucuggcucaucaagaagaacaacaccuaccccaccaucaagcgcuccuacaacaacaccaaccaggagaaccuccucauccucuggggcauccaccacuccaacgacgccgccgagcagaucaagcucuaccagaaccccaccaccuacgucuccaucggcaccuccacccucaaccagcgccucguccccaagaucgccacccgcuccaaggucaacggccaguccggccgcauggacuucuucuggaccauccucaagcccaacgacgccaucaacuucgaguccaacggcaacuucaucgcccccgaguacgccuacaagaucgucaaggagggcgacuccgccaucaugaaguccgaggucgaguacggcaacugcaacaccaagugccagacccccaucggcgccaucaacuccuccaugcccuuccacaacauccacccccucaccaucggcgagugccccaaguacgucaaguccaacaagcucguccucgccaccggccuccgcaacuccccccuccgcgagcgccgccgcaagcgcggccucuucggcgccaucgccggcuucaucgagggcggcuggcagggcauggucgacggcugguacggcuaccaccacuccaacgagcagggcuccggcuacgccgccgacaaggaguccacccagaaggccaucgacggcgucaccaacaaggucaacuccaucaucgacaagaugaacacccaguucgaggccgucggccgcgaguucaacaaccucgagcgccgcaucgagaaccucaacaagaagauggaggacggcuuccucgacgucuggaccuacaacgccgagcuccucguccucauggagaacgagcgcacccucgacuuccacgacuccaacgucaagaaccucuacgacaagguccgccuccagcuccgcgacaacgccaaggagcucggcaacggcugcuucgaguucuaccacaagugcgacaacgagugcauggaguccguccgcaacggcaccuacgacuacccccaguacuccgaggaggcccgccucaagcgcgaggagaucaacggcgucaagcucgaguccaucggcaccuaccagauccucuccaucuacuccaccgucgccuccucccucgcccucgccaucauggucgccggccucucccucuggaugugcuccaacggcucccuccagugccgcaucugcaucuga

SEQ ID NO: 103756 - RNA, 1704 nt, Artificial Sequence; identical to SEQ ID NO: 103755
  derived and/or modified CDS sequence (opt2) from hemagglutinin__InfluenzaA__AEO89213

SEQ ID NO: 103757 - RNA, 1704 nt, Artificial Sequence; identical to SEQ ID NO: 103755
  derived and/or modified CDS sequence (opt2) from hemagglutinin__InfluenzaA__AEO89224

SEQ ID NO: 103758 - RNA, 1704 nt, Artificial Sequence
  derived and/or modified CDS sequence (opt2) from hemagglutinin__InfluenzaA__AEO89235
auggagaagaucguccuccuccucgccauggucucccucguccgcuccgaccagaucugcaucggcuaccacgccaacaacuccaccgagcaggucgacaccaucauggagaagaacgucaccgucacccacgcccaggacauccucgagaagacccacaacggcaagcucugcgaccucgacggcgucaagccccucauccuccgcgacugcuccgucgccggcuggcuccucggcaaccccaugugcgacgaguucaucaacguccccgagugguccuacaucgucgagaaggccaaccccgccaacgaccucugcuaccccggcaaccucaacgacuacgaggagcucaagcaccuccucucccgcaucaaccacuucgagaagauccagaucauccccaaguccuccugguccgaccacgaggccucccucggcgucuccuccgccugccccuaccagggcacccccuccuucuuccgcaacgucaucuggcucaucaagaagaacaacaccuaccccaccaucaagcgcuccuacaacaacaccaaccaggaggaccuccucauccucuggggcauccaccacuccaacgacgaggccgagcagaucaagcucuaccagaaccccaccaccuacaucuccgucggcaccuccacccucaaccagcgccucguccccaagaucgccacccgcuccaaggucaacggccaguccggccgcauggacuucuucuggaccauccucaagcccgacgacgccaucaacuucgaguccaacggcaacuucaucgcccccgaguacgccuacaagaucgucaagaagggcgacuccgccaucaugaaguccgaggucgaguacggcaacugcaacaccaagugccagacccccaucggcgccaucaacuccuccaugcccuuccacaacauccacccccucaccaucggcgagugccccaaguacgucaaguccaacaagcucguccucgccaccggccuccgcaacuccccccuccgcgagaagcgccgcaagcgcggccucuucggcgccaucgccggcuucaucgagggcggcuggcagggcauggucgacggcugguacggcuaccaccacuccaacgagcagggcuccggcuacgccgccgacaaggaguccacccagaaggccaucgacggcgucaccaacaaggucaacuccaucaucgacaagaugaacacccaguucgaggccgucggccgcgaguucaacaaccucgagcgccgcaucgagaaccucaacaagaagauggaggacggcuuccucgacgucuggaccuacaacgccgagcuccucguccucauggagaacgagcgcacccucgacuuccacgacuccaacgucaagaaccucuacgacaagguccgccuccagcuccgcgacaacgccaaggagcucggcaacggcugcuucgaguucuaccacaagugcgacaacgagugcauggaguccguccgcaacggcaccuacgacuacccccaguacuccgaggaggcccgccucaagcgcgaggagaucuccggcgucaagcucgaguccaucggcaccuaccagauccucuccaucuacuccaccgucgccuccucccucgcccucgccaucauggucgccggccucucccucuggaugugcuccaacggcucccuccagugccgcaucugcaucuga

SEQ ID NO: 103759 - RNA, 1704 nt, Artificial Sequence
  derived and/or modified CDS sequence (opt2) from hemagglutinin__InfluenzaA__AEO89246
auggagaagaucgucccccuccucgccauggucucccucgucaaguccgaccagaucugcaucggcuaccacgccaacaacuccaccgagcaggucgacaccaucauggagaagaacgucaccgucacccacgcccaggacauccucgagaagacccacaacggcaagcucugcgaccucgacggcgucaagccccucauccuccgcgacugcuccgucgccggcuggcuccucggcaaccccaugugcgacgaguucaucaacguccccgagugguccuacaucgucgagaaggccaaccccgccaacgaccucugcuaccccggcaaccucaacgacuacgaggagcucaagcaccuccucucccgcaucaaccacuucgagaagauccagaucauccccaaguccuccugguccgaccacgaggccucccucggcgucuccuccgccugccccuaccagggcacccccuccuucuuccgcaacgucgucuggcucaucaagaagaacaacaccuaccccaccaucaagcgcuccuacaacaacaccaaccaggaggaccuccucauccucuggggcauccaccacuccaacgacgaggccgagcagaucaagcucuaccagaaccccaccaccuacaucuccgucggcaccuccacccucaaccagcgccucguccccaagaucgccacccgcuccaaggucaacggccaguccggccgcauggacuucuucuggaccauccucaagcccgacgacgccaucaacuucgaguccaacggcaacuucaucgcccccgaguacgccuacaagaucgucaagaagggcgacuccgccaucaugaaguccgaggucgaguacggcaacugcaacaccaagugccagacccccaucggcgccaucaacuccuccaugcccuuccacaacauccacccccucaccaucggcgagugccccaaguacgucaaguccaacaagcucguccucgccaccggccuccgcaacuccccccuccgcgagcgccgccgcaagcgcggccucuucggcgccaucgccggcuucaucgagggcggcuggcagggcauggucgacggcugguacggcuaccaccacuccaacgagcagggcuccggcuacgccgccgacaaggaguccacccagaaggccaucgacggcgucaccaacaaggucaacuccaucaucgacaagaugaacacccaguucgaggccgucggccgcgaguucuccaaccucgagcgccgcaucgagaaccucaacaagaagauggaggacggcuuccucgacgucuggaccuacaacgccgagcuccucguccucauggagaacgagcgcacccucgacuuccacgacuccaacgucaagaaccucuacgacaagguccgccuccagcuccgcgacaacgccaaggagcucggcaacggcugcuucgaguucuaccacaagugcgacaacgagugcauggaguccguccgcaacggcaccuacgacuacccccaguacuccgaggaggcccgccucaagcgcgaggagaucuccggcgucaagcucgaguccaucggcaccuaccagauccucuccaucuacuccaccgucgccuccucccucgcccucgccaucauggucgccggccucucccucuggaugugcuccaacggcucccuccagugccgcaucugcaucuga

SEQ ID NO: 103760 - RNA, 1704 nt, Artificial Sequence
  derived and/or modified CDS sequence (opt2) from hemagglutinin__InfluenzaA__AEO89257
auggagaagaucguccuccuccucgccaucgucucccucguccgcuccgaccagaucugcaucggcuaccacgccaacaacuccaccgagcaggucgacaccaucauggagaagaacgucaccgucacccacgcccaggacauccucgagaagacccacaacggcaagcucugcgaccucgacggcgucaagccccucauccuccgcgacugcuccgucgccggcuggcuccucggcaaccccaugugcgacgaguucaucaacguccccgagugguccuacaucgucgagaaggccaaccccgccaacgaccucugcuaccccggcaacuucaacgacuacgaggagcucaagcaccuccucucccgcaucaaccacuucgagaagauccagaucauccccaaguccuccugguccgaccacgaggccuccuccggcgucuccuccgccugccccuaccagggcacccccuccuucuuccgcaacgucgucuggcucaucaagaagaacaacaccuaccccaccaucaagcgcuccuacaacaacaccaaccaggaggaccuccucguccucuggggcauccaccacuccaacgacgccgccgagcagaucaagcucuaccagaaccccaccaccuacgucuccgucggcaccuccacccucaaccagcgccucguccccaagaucgccacccgcuccaaggucaacggccaguccggccgcauggacuucuucuggaccauccucaaguccaacgacgccaucaacuucgaguccaacggcaacuucaucgcccccgaguacgccuacaagaucgucaagaagggcgacuccgccaucaugaaguccgaggucgaguacggcaacugcuccaccaagugccagacccccaucggcgccaucaacuccuccaugcccuuccacaacauccacccccucaccaucggcgagugccccaaguacgucaaguccaacaagcucguccucgccaccggccuccgcaacuccccccuccgcgagcgccgccgcaagcgcggccucuucggcgccaucgccggcuucaucgagggcggcuggcagggcauggucgacggcugguacggcuaccaccacuccaacgagcagggcuccggcuacgccgccgacaaggaguccacccagaaggccaucgacggcgucaccaacaaggucaacuccaucaucgacaagaugaacacccaguucgaggccgucggccgcgaguucaacaaccucgagcgccgcaucgagaaccucaacaagaagauggaggacggcuuccucgacgucuggaccuacaacgccgagcuccucguccucauggagaacgagcgcacccucgacuuccacgacuccaacgucaagaaccucuacgacaagguccgccuccagcuccgcgacaacgccaaggagcucggcaacggcugcuucgaguucuaccacaagugcgacaacgagugcauggaguccguccgcaacggcaccuacgacuacccccaguacuccgaggaggcccgccucaagcgcgaggagaucuccggcgucaagcucgaguccaucggcaccuaccagauccucuccaucuacuccaccgucgccuccucccucguccucgccaucauggucgccggccucucccucuggaugugcuccaacggcucccuccagugccgcaucugcaucuga

SEQ ID NO: 103761 - RNA, 1704 nt, Artificial Sequence; identical to SEQ ID NO: 103760
  derived and/or modified CDS sequence (opt2) from hemagglutinin__InfluenzaA__AEO89268

SEQ ID NO: 103762 - RNA, 1704 nt, Artificial Sequence
  derived and/or modified CDS sequence (opt2) from hemagglutinin__InfluenzaA__AEO89279
auggagaagaucguccuccuccucgccaucgucucccucgucaaguccgaccagaucugcaucggcuaccacgccaacaacuccaccgagcaggucgacaccaucauggagaagaacgucaccgucacccacgcccaggacauccucgagaagacccacaacggcaagcucugcgaccucgacggcgucaagccccucauccucggcgacugcuccgucgccggcuggcuccucggcaaccccaugugcgacaaguucaucaacguccccgagugguccuacaucgucgagaaggccaaccccgccaacgaccucugcuaccccggcaacuucaacgacuacgaggagcucaagcaccuccucucccgcaucaaccacuucgagaagauccagaucauccccaaguccuccugguccgaccacgaggccuccuccggcgucuccuccgccugccccuaccagggcacccccuccuucuuccgcaacgucgucuggcucaucaagaagaacaacaccuaccccaccaucaagcgcuccuacaacaacaccaaccaggaggaccuccucauccucuggggcauccaccacuccaacaacgccgccgagcaggagaagcucuaccagaaccccaccaccuacaucuccgucggcaccuccacccucaaccagcgccucguccccaagaucgccacccgcuccaaggucaacggccaguccggccgcauggacuucuucuggaccauccucaagcccaacgacgccaucaacuucgaguccaacggcaacuucaucgcccccgaguacgccuacaagaucgucaagaagggcgacuccgccaucaugaaguccggcgucaaguacggcaacugcaacaccaagugccagacccccaucggcgccaucaacuccuccaugcccuuccacaacauccacccccucaccaucggcgagugccccaaguacgucaaguccaacaagcucguccucgccaccggccuccgcaacuccccccuccgcgagcgccgccgcaagcgcggccucuucggcgccaucgccggcuucaucgagggcggcuggcagggcauggucgacggcugguacggcuaccaccacuccaacgagcagggcuccggcuacgccgccgacaaggaguccacccagaaggccaucgacggcgucaccaacaaggucaacuccaucaucgacaagaugaacacccaguucgaggccgucggccgcgaguucaacaaccucgagcgccgcaucgagaaccucaacaagaagauggaggacggcuuccucgacgucuggaccuacaacgccgagcuccucguccucauggagaacgagcgcacccucgacuuccacgacuccaacgucaagaaccucuacgacaagguccgccuccagcuccgcgacaacgccaaggagcucggcaacggcugcuucgaguucuaccacaagugcgacaacgagugcauggaguccguccgcaacggcaccuacgacuacccccaguacuccgaggaggcccgccucaagcgcgaggagaucuccggcgucaagcucgaguccaucggcaccuaccagauccucuccaucuacuccaccgccgccuccucccucgcccucgccaucauggucgccggccucucccucuggaugugcuccaacggcucccuccagugccgcaucugcaucuga

SEQ ID NO: 103763 - RNA, 1704 nt, Artificial Sequence
  derived and/or modified CDS sequence (opt2) from hemagglutinin__InfluenzaA__AEO89289
auggagaagaucguccuccuccucgccaucgucucccucgccaaguccgaccagaucugcaucggcuaccacgccaacaacuccaccgagcaggucgacaccaucauggagaagaacgucaccgucacccacgcccaggacauccucgagaagacccacaacggcaagcucugcgaccucgacggcgucaagccccucauccucggcgacugcuccgucgccggcuggcuccucggcaaccccaugugcgacaaguucaucaacguccccgagugguccuacaucgucgagaaggucaaccccgccaacgaccucugcuaccccggcaacuucaacgacuacgaggagcucaagcaccuccucucccgcaucaaccacuucgagaagaucaagaucauccccaaguccuccugguccgaccacgaggccuccuccggcgucuccuccgccugccccuaccagggcacccccuccuucuuccgcaacgucgucuggcucaucaagaagaacaacaccuaccccaccaucaagcgcuccuacaacaacaccaaccaggaggaccuccucauccucuggggcauccaccacuccaacaacgucgccgagcaggagaagcucuaccagaaccccaccaccuacaucuccgucggcaccuccacccucaaccagcgccucguccccaagaucgccacccgcuccaaggucaacggccaguccggccgcauggacuucuucuggaccauccucaagcccaacgacaccaucaacuucgaguccaacggcaacuucaucgcccccgaguacgccuacaagaucgucaagaagggcgacuccgccaucaugaaguccggcgucgaguacggcaacugcaacaccaagugccagacccccaucggcgccaucaacuccuccaugcccuuccacaacauccacccccucaccaucggcgagugccccaaguacgucaaguccaacaagcucguccucgccaccggccuccgcaacuccccccuccgcgagcgccgccgcaagcgcggccucuucggcgccaucgccggcuucaucgagggcggcuggcagggcauggucgacggcugguacggcuaccaccacuccaacgagcagggcuccggcuacgccgccgacaaggaguccacccagaaggccaucgacggcgucaccaacaaggucaacuccaucaucgacaagaugaacacccaguucgaggccgucggccgcgaguucaacaaccucgagcgccgcaucgagaaccucaacaagaagauggaggacggcuuccucgacgucuggaccuacaacgccgagcuccucguccucauggagaacgagcgcacccucgacuuccacgacuccaacgucaagaaccucuacgacaagguccgccuccagcuccgcgacaacgccaaggagcucggcaacggcugcuucgaguucuaccacaagugcgacaacgagugcauggaguccguccgcaacggcaccuacgacuacccccgcuacuccgaggaggcccgccucaagcgcgaggagaucuccggcgucaagcucgaguccaucggcaccuaccagauccucuccaucuacuccaccgccgccuccucccucgcccucgccaucauggucgccggccucucccucuggaugugcuccaacggcucccuccagugccgcaucugcaucuga

SEQ ID NO: 103764 - RNA, 1704 nt, Artificial Sequence
  derived and/or modified CDS sequence (opt2) from hemagglutinin__InfluenzaA__AEO89300
auggagaagaucguccuccuccucgccaucgucucccucgucaaguccgaccagaucugcaucggcuaccacgccaacaacuccaccgagcaggucgacaccaucauggagaagaacgucaccgucacccacgcccaggacauccucgagaagacccacaacggcaagcucugcgaccucgacggcgucaagccccucauccuccgcgacugcuccgucgccggcuggcuccucggcaaccccaugugcgacgaguucaucaacguccccgagugguccuacaucgucgagaaggccaaccccgccaacgaccucugcuaccccggcaacuucaacgacuacgaggagcucaagcaccuccucucccgcaucaaccacuucgagaagauccagaucauccccaaguccuccugguccgaccacgaggccuccuccggcgucuccuccgccugccccuaccagggcacccccuccuucuuccgcaacgucgucuggcucaucaagaagaacaacaccuaccccaccaucaagcgcuccuacaacaacaccaaccaggagaaccuccucauccucuggggcauccaccacuccaacgacgccgccgagcagaucaagcucuaccagcaccccaccaccuacaucuccgucggcaccuccacccucaaccagcgccucguccccaagaucgccacccgcuccaaggucaacggccaguccggccgcauggacuucuucuggaccauccucaagcccaacgacgccaucaacuucgaguccaacggcaacuucaucgcccccgaguacgccuacaagaucgucaaggagggcgacuccgccaucaugaaguccgaggucgaguacggcaacugcaacaccaagugccagacccccaucggcgccaucaacuccuccaugcccuuccacaacauccacccccucaccaucggcgagugccccaaguacgucaaguccaacaagcucguccucgccaccggccuccgcaacuccccccuccgcgagcgccgccgcaagcgcggccucuucggcgccaucgccggcuucaucgagggcggcuggcagggcauggucgacggcugguacggcuaccaccacuccaacgagcagggcuccggcuacgccgccgacaaggaguccacccagaaggccaucgacggcgucaccaacaaggucaacuccaucaucgacaagaugaacacccaguucgaggccgucggccgcgaguucaacaaccucgagcgccgcaucgagaaccucaacaagaagauggaggacggcuuccucgacgucuggaccuacaacgccgagcuccucguccucauggagaacgagcgcacccucgacuuccacgacuccaacgucaagaaccucuacgacaagguccgccuccagcuccgcgacaacgccaaggagcucggcaacggcugcuucgaguucuaccacaagugcgacaacgagugcauggaguccguccgcaacggcaccuacgacuacccccaguacuccgaggaggcccgccucaagcgcgaggagaucaacggcgucaagcucgaguccaugggcaccuaccagauccucuccaucuacuccaccgucgccuccucccucgcccucgccaucauggucgccggccucuccuucuggaugugcuccaacggcucccuccagugccgcaucugcaucuga

SEQ ID NO: 103765 - RNA, 1704 nt, Artificial Sequence
  derived and/or modified CDS sequence (opt2) from hemagglutinin__InfluenzaA__AEO89311
auggagaagaucguccuccucuucgccaucgucucccucgucaaguccgaccacaucugcaucggcuaccacgccaacaacuccaccgagcaggucgacaccaucauggagaagaacgucaccgucacccacgcccaggacauccucgagaagacccacaacggcaagcucugcgaccucaacggcgucaagccccucauccucaaggacugcuccgucgccggcuggcuccucggcaaccccaugugcgacgaguucaucaacguccccgagugguccuacaucgucgagaaggccaaccccgccaacgaccucugcuaccccggcaacuucaacgacuacgaggagcucaagcaccuccucucccgcaucaaccacuucgagaagauccagaucauccccaaggacuccugguccgaccacgaggccucccucggcgucuccgccgccugccccuaccagggcaacuccuccuucuuccgcaacgucgucuggcucaucaagaaggacaacgccuaccccaccaucaagaaguccuacaacaacaccaaccaggaggaccuccucauccucuggggcauccaccaccccaacgacgaggccgagcagacccgccucuaccagaaccccaccaccuacaucuccaucggcaccuccacccucaaccagcgccucguccccaagaucgccacccgcuccaaggucaacggccaguccggccgcaucgacuucuucuggaccauccucaagcccaacgacgccauccacuucgaguccaacggcaacuucaucgcccccgaguacgccuacaagaucgucaagaagggcgacuccaccaucaugaaguccgaggucgaguacggcaacugcaacacccgcugccagacccccaugggcgccaucaacuccuccaugcccuuccacaacauccacccccucaccaucggcgagugccccaaguacgucaaguccaccaagcucguccucgccaccggccuccgcaacuccccccagcgcgagcgccgccgcaagcgcggccucuucggcgccaucgccggcuucaucgagggcggcuggcagggcauggucgacggcugguacggcuaccaccacuccaacgagcagggcuccggcuacgccgccgacaaggaguccacccagaaggccaucgacggcgucaccaacaaggucaacuccaucaucgacaagaugaacacccaguucgaggccgucggccgcgaguucaacaagcucgagcgccgcaucgagaaccucaacaagaagauggaggacggcuuccucgacgucuggaccuacaacgccgagcuccucguccucauggagaacgagcgcacccucgacuuccacgacuccaacgucaagaaccucuacgacaagguccgccuccagcuccgcgacaacgccaaggagcucggcaacggcugcuucgaguucuaccacaagugcaacaacgagugcauggaguccguccgcaacggcaccuacgacuacccccaguacuccgaggaggcccgccucaagcgcgaggagaucuccggcgucaagcucgaguccaucggcaucuaccagauccucuccaucuacuccaccgucgccuccucccucguccucgccaucaugauggccggccucucccucuggaugugcuccaacggcucccuccagugccgcaucugcaucuga

SEQ ID NO: 103766 - RNA, 1701 nt, Artificial Sequence; identical to SEQ ID NO: 97964
  derived and/or modified CDS sequence (opt2) from hemagglutinin__InfluenzaA__AEO99215

SEQ ID NO: 103767 - RNA, 1698 nt, Artificial Sequence
  derived and/or modified CDS sequence (opt2) from hemagglutinin__InfluenzaA__AEQ38187
augaaggucaagcuccucguccuccucugcaccuucaccgccaccuacgccgacaccaucugcaucggcuaccacgccaacaacuccaccgacaccgucgacaccguccucgagaagaacgucaccgucacccacuccgucaaccuccucgagaacucccacaacggcaagcucugccuccucaagggcaucgccccccuccagcucggcaacugcuccgucgccggcuggauccucggcaaccccgagugcgagcuccucaucuccaaggaguccugguccuacaucgucgagaagcccaaccccgagaacggcaccugcuaccccggccacuucgccgacuacgaggagcuccgcgagcagcucuccuccgucuccuccuucgagcgcuucgagaucuuccccaaggaguccuccuggcccaaccacaccgucaccggcgccuccgccuccugcucccacaacggcgagaacuccuucuaccgcaaccuccucuggcucaccggcaagaacggccucuaccccaaccucuccaaguccuacgccaacaacaaggagaaggagguccucguccucuggggcguccaccacccccccaacaucgccgaccagaagacccucuaccacaccgagaacgccuacgucuccgucgucuccucccacuacucccgcaaguucacccccgagaucgccaagcgccccaagguccgcgaccaggagggccgcaucaacuacuacuggacccuccucgagcccggcgacaccaucaucuucgaggccaacggcaaccucaucgccccccgcuacgccuucgcccucucccgcggcuucggcuccggcaucaucaacuccaacgcccccauggacaagugcgacgccaagugccagaccccccagggcgccaucaacuccucccuccccuuccagaacguccaccccgucaccaucggcgagugccccaaguacguccgcuccgccaagcuccgcauggucaccggccuccgcaacauccccuccauccagucccgcggccucuucggcgccaucgccggcuucaucgagggcggcuggaccggcauggucgacggcugguacggcuaccaccaccagaacgagcagggcuccggcuacgccgccgaccagaaguccacccagaacgccaucaacggcaucaccaacaaggucaacuccgucaucgagaagaugaacacccaguucaccgccgucggcaaggaguucaacaagcucgagcgccgcauggagaaccucaacaagaaggucgacgacggcuucaucgacaucuggaccuacaacgccgagcuccucguccuccucgagaacgagcgcacccucgacuuccacgacuccaacgucaagaaccucuacgagaaggucaagucccagcucaagaacaacgccaaggagaucggcaacggcugcuucgaguucuaccacaagugcaacgacgagugcauggaguccgucaagaacggcaccuacgacuaccccaaguacuccgaggaguccaagcucaaccgcgagaagaucgacggcgucaagcucgaguccaugggcgucuaccagauccucgccaucuacuccaccgucgccuccucccucguccuccucgucucccucggcgccaucuccuucuggaugugcuccaacggcucccuccagugccgcaucugcaucuga

SEQ ID NO: 103768 - RNA, 1698 nt, Artificial Sequence; identical to SEQ ID NO: 103767
  derived and/or modified CDS sequence (opt2) from hemagglutinin__InfluenzaA__AEQ38188

SEQ ID NO: 103769 - RNA, 1698 nt, Artificial Sequence
  derived and/or modified CDS sequence (opt2) from hemagglutinin__InfluenzaA__AEQ38189
augaaggucaagcuccucguccuccucugcaccuucaccgccaccuacgccgacaccaucugcaucggcuaccacgccaacaacuccaccgacaccgucgacaccguccucgagaagaacgucaccgucacccacuccgucaaccuccucgagaacucccacaacggcaagcucugccuccucaagggcaucgccccccuccagcucggcaacugcuccgucgccggcuggauccucggcaaccccgagugcgagcuccucaucuccaaggaguccugguccuacaucgucgagaagcccaaccccgagaacggcaccugcuaccccggccacuucgccgacuacgaggagcuccgcgagcagcucuccuccgucuccuccuucgagcgcuucgagaucuuccccaaggaguccuccuggcccaaccacaccgucaccggcgucuccgccuccugcucccacaacggcgagaacuccuucuaccgcaaccuccucuggcucaccggcaagaacggccucuaccccaaccucuccaaguccuacgccaacaacaaggagaaggagguccucguccucuggggcguccaccacccccccaacaucgccaaccagaagacccucuaccacaccgagaacgccuacgucuccgucgucuccucccacuacucccgcaaguucacccccgagaucgccaagcgccccaagguccgcgaccaggagggccgcaucaacuacuacuggacccuccucgagcccggcgacaccaucaucuucgaggccaacggcaaccucaucgccccccgcuacgccuucgcccucucccgcggcuucggcuccggcaucaucaacuccaacgcccccauggacaagugcgacgccaagugccagaccccccagggcgccaucaacuccucccuccccuuccagaacguccaccccgucaccaucggcgagugccccaaguacguccgcuccgccaagcuccgcauggucaccggccuccgcaacauccccuccauccagucccgcggccucuucggcgccaucgccggcuucaucgagggcggcuggaccggcauggucgacggcugguacggcuaccaccaccagaacgagcagggcuccggcuacgccgccgaccagaaguccacccagaacgccaucaacggcaucaccaacaaggucaacuccgucaucgagaagaugaacacccaguucaccgccgucggcaaggaguucaacaagcucgagcgccgcauggagaaccucaacaagaaggucgacgacggcuucaucgacaucuggaccuacaacgccgagcuccucguccuccucgagaacgagcgcacccucgacuuccacgacuccaacgucaagaaccucuacgagaaggucaagucccagcucaagaacaacgccaaggagaucggcaacggcugcuucgaguucuaccacaagugcaacgacgagugcauggaguccgucaagaacggcaccuacgacuaccccaaguacuccgaggaguccaagcucaaccgcgagaagaucgacggcgucaagcucgaguccaugggcgucuaccagauccucgccaucuacuccaccgucgccuccucccucguccuccucgucucccucggcgccaucuccuucuggaugugcuccaacggcucccuccagugccgcaucugcaucuga

SEQ ID NO: 103770 - RNA, 1698 nt, Artificial Sequence
  derived and/or modified CDS sequence (opt2) from hemagglutinin__InfluenzaA__AEQ38190
augaaggucaagcuccucguccuccucugcaccuucaccgccaccuacgccgacaccaucugcaucggcuaccacgccaacaacuccaccgacaccgucgacaccguccucgagaagaacgucaccgucacccacuccgucaaccuccucgagaacucccacaacggcaagcucugccuccucaagggcaucgccccccuccagcucggcaacugcuccgucgccggcuggauccucggcaaccccgagugcgagcuccucaucuccaaggaguccugguccuacaucgucgagaagcccaaccccgagaacggcaccugcuaccccggccacuucgccgacuacgaggagcuccgcgagcagcucuccuccgucuccuccuucgagcgcuucgagaucuuccccaaggaguccuccuggcccaaccacaccgucaccggcgucuccgccuccugcucccacaacggcgagaacuccuucuaccgcaaccuccucuggcucaccggcaagaacggccucuaccccaaccucuccaagcccuacgccaacaacaaggagaaggagguccucguccucuggggcguccaccacccccccaacaucgccguccagaagacccucuaccacaccgagaacgccuacgucuccgucgucuccucccacuacucccgcaaguucacccccgagaucgccaagcgccccaagguccgcgaccaggagggccgcaucaacuacuacuggacccuccucgagcccggcgacaccaucaucuucgaggccaacggcaaccucaucgccccccgcuacgccuucgcccucucccgcggcuucggcuccggcaucaucaacuccaacgcccccauggacaagugcgacgccaagugccagaccccccagggcgccaucaacuccucccuccccuuccagaacguccaccccgucaccaucggcgagugccccaaguacguccgcuccgccaagcuccgcauggucaccggccuccgcaacauccccuccauccagucccgcggccucuucggcgccaucgccggcuucaucgagggcggcuggaccggcauggucgacggcugguacggcuaccaccaccagaacgagcagggcuccggcuacgccgccgaccagaaguccacccagaacgccaucaacggcaucaccaacaaggucaacuccgucaucgagaagaugaacacccaguucaccgccgucggcaaggaguucaacaagcucgagcgccgcauggagaaccucaacaagaaggucgacgacggcuucaucgacaucuggaccuacaacgccgagcuccucguccuccucgagaacgagcgcacccucgacuuccacgacuccaacgucaagaaccucuacgagaaggucaagucccagcucaagaacaacgccaaggagaucggcaacggcugcuucgaguucuaccacaagugcaacgacgagugcauggaguccgucaagaacggcaccuacgacuaccccaaguacuccgaggaguccaagcucaaccgcgagaagaucgacggcgucaagcucgaguccaugggcgucuaccagauccucgccaucuacuccaccgucgccuccucccucguccuccucgucucccucggcgccaucuccuucuggaugugcuccaacggcucccuccagugccgcaucugcaucuga

SEQ ID NO: 103771 - RNA, 1698 nt, Artificial Sequence; identical to SEQ ID NO: 99662
  derived and/or modified CDS sequence (opt2) from hemagglutinin__InfluenzaA__AEQ38191

SEQ ID NO: 103772 - RNA, 1698 nt, Artificial Sequence
  derived and/or modified CDS sequence (opt2) from hemagglutinin__InfluenzaA__AEQ38192
augaaggucaagcuccucguccuccucugcaccuucaccgccaccuacgccgacaccaucugcaucggcuaccacgccaacaacuccaccgacaccgucgacaccguccucgagaagaacgucaccgucacccacuccgucaaccuccucgagaacucccacaacggcaagcucugccuccucaagggcaucgccccccuccagcucggcaacugcuccgucgccggcuggauccucggcaaccccgagugcgagcuccucaucuccaaggaguccugguccuacaucgucgagaagcccaaccccgagaacggcaccugcuaccccggccacuucgccgacuacgaggagcuccgcgagcagcucuccuccgucuccuccuucgagcgcuucgagaucuuccccaaggaguccuccuggcccaaccacaccgucaccggcgucuccgccuccugcucccacaacggcgaguccuccuucuaccgcaaccuccucuggcucaccggcaagaacggccucuaccccaaccucuccaaguccuacgccaacaacaaggagaaggagguccucguccucuggggcguccaccacccccccuccaucuccgaccagaagacccucuaccacaccgagaacgccuacgucuccgucgucuccucccacuacucccgcaaguucacccccgagaucaccaagcgccccaagguccgcgaccaggagggccgcaucaacuacuacuggacccuccucgagcccggcgacaccaucaucuucgaggccaacggcaaccucaucgccccccgcuacgccuucgcccucucccgcggcuucggcuccggcaucaucaacuccaacacccccauggacaagugcgacaccaagugccagaccccccagggcgccaucaacuccucccuccccuuccagaacguccaccccgucaccaucggcgagugccccaaguacguccgcuccgccaagcuccgcauggucaccggccuccgcaacauccccuccauccagucccgcggccucuucggcgccaucgccggcuucaucgagggcggcuggaccggcauggucgacggcugguacggcuaccaccaccagaacgagcagggcuccggcuacgccgccgaccagaaguccacccagaacgccaucaacggcaucaccaacaaggucaacuccgucaucgagaagaugaacacccaguucaccgccgucggcaaggaguucaacaagcucgagcgccgcauggagaaccucaacaagaaggucgacgacggcuucaucgacaucuggaccuacaacgccgagcuccucguccuccucgagaacgagcgcacccucgacuuccacgacuccaacgucaagaaccucuacgagaaggucaagucccagcucaagaacaacgccaaggagaucggcaacggcugcuucgaguucuaccacaagugcaacgacgagugcauggaguccgucaagaacggcaccuacgacuaccccaaguacuccgaggaguccaagcucaaccgcgagaagaucgacggcgucaagcucgaguccaugggcgucuaccagauccucgccaucuacuccaccgucgccuccucccucguccuccucgucucccucggcgccaucuccuucuggaugugcuccaacggcucccuccagugccgcaucugcaucuga

SEQ ID NO: 103773 - RNA, 1698 nt, Artificial Sequence
  derived and/or modified CDS sequence (opt2) from hemagglutinin__InfluenzaA__AEQ38193
augaaggucaagcuccucauccuccucugcaccuucaccgccaccuacgccgacaccaucugcaucggcuaccacgccaacaacuccaccgacaccgucgacaccguccucgagaagaacgucaccgucacccacuccgucaaccuccucgagaacucccacaacggcaagcucugccuccucaagggcaucgccccccuccagcucggcaacugcuccgucgccggcuggauccucggcaaccccgagugcgagcuccucaucuccaaggaguccugguccuacaucgucgagaagcccaaccccgagaacggcaccugcuaccccggccacuucgccgacuacgaggagcuccgcgagcagcucuccuccgucuccuccuucgagcgcuucgagaucuuccccaaggaguccuccuggcccaaccacaccgucaccggcgucuccgccuccugcucccacaacggcgaguccuccuucuaccgcaaccuccucuggcucaccggcaagaacggccucuaccccaaccucuccaaguccuacgccaacaacaaggagaaggagguccucguccucuggggcguccaccacccccccaacaucgucgaccagaagacccucuaccgcaccgagaacgccuacgucuccgucgucuccucccacuacucccgcaaguucacccccgagaucgccaagcgccccaagguccgcgaccaggagggccgcaucaacuacuacuggacccuccucgagcccggcgacaccaucaucuucgaggccaacggcaaccucaucgccccccgcuacgccuucgcccucucccgcggcuucggcuccggcaucaucaacuccaacgcccccauggacaagugcgacgccaagugccagaccccccagggcgccaucaacuccucccuccccuuccagaacguccaccccgucaccaucggcgagugccccaaguacguccgcuccgccaagcuccgcauggucaccggccuccgcaacauccccuccauccagucccgcggccucuucggcgccaucgccggcuucaucgagggcggcuggaccggcauggucgacggcugguacggcuaccaccaccagaacgagcagggcuccggcuacgccgccgaccagaaguccacccagaacgccaucaacggcaucaccaacaaggucaacuccgucaucgagaagaugaacacccaguucaccgccgucggcaaggaguucaacaagcucgagcgccgcauggagaaccucaacaagaaggucgacgacggcuucaucgacaucuggaccuacaacgccgagcuccucguccuccucgagaacgagcgcacccucgacuuccacgacuccaacgucaagaaccucuacgagaaggucaagucccagcucaagaacaacgccaaggagaucggcaacggcugcuucgaguucuaccacaagugcaacgacgagugcauggaguccgucaagaacggcaccuacgacuaccccaaguacuccgaggaguccaagcucaaccgcgagaagaucgacggcgucaagcucgaguccaugggcgucuaccagauccucgccaucuacuccaccgucgccuccucccucguccuccucgucucccucggcgccaucuccuucuggaugugcuccaacggcucccuccagugccgcaucugcaucuga

SEQ ID NO: 103774 - RNA, 1698 nt, Artificial Sequence
  derived and/or modified CDS sequence (opt2) from hemagglutinin__InfluenzaA__AEQ38194
augaaggucaagcuccucguccuccucugcaccuucaccgccaccuacgccgacaccaucugcaucggcuaccacgccaacaacuccaccgacaccgucgacaccguccucgagaagaacgucaccgucacccacuccgucaaccuccucgagaacucccacaacggcaagcucugccuccucaagggcaucgccccccuccagcucggcaacugcuccgucgccggcuggauccucggcaaccccgagugcgagcuccucaucuccaaggaguccugguccuacaucgucgagaagcccaaccccgagaacggcaccugcuaccccggccacuucgccgacuacgaggagcuccgcgagcagcucuccuccgucuccuccuucgagcgcuucgagaucuuccccaaggaguccuccuggcccaaccacaccgucaccggcgucuccgccuccugcucccacaacggcgaguccuccuucuaccgcaaccuccucuggcucaccggcaagaacggccucuaccccaaccucuccaaguccuacgccaacaacaaggagaaggagguccucguccucuggggcguccaccacccccccuccaucuccgaccagaagacccucuaccacaccgagaacgccuacgucuccgucgucuccucccacuacucccgcaaguucacccccgagaucgccaagcgccccaagguccgcgaccaggagggccgcaucaacuacuacuggacccuccucgagcccggcgacaccaucaucuucgaggccuccggcaaccucaucgccccccgcuacgccuucgcccucucccgcggcuucggcuccggcaucaucaacuccaacgcccccauggacaagugcgacgccaagugccagaccccccagggcgccaucaacuccucccuccccuuccagaacguccaccccgucaccaucggcgagugccccaaguacguccgcuccgccaagcuccgcauggucaccggccuccgcaacauccccuccauccagucccgcggccucuucggcgccaucgccggcuucaucgagggcggcuggaccggcauggucgacggcugguacggcuaccaccaccgcaacgagcagggcuccggcuacgccgccgaccagaaguccacccagaacgccaucaacggcaucaccaacaaggucaacuccgucaucgagaagaugaacacccaguucaccgccgucggcaaggaguucaacaagcucgagcgccgcauggagaaccucaacaagcgcgucgacgacggcuucaucgacaucuggaccuacaacgccgagcuccucguccuccucgagaacgagcgcacccucgacuuccacgacuccaacgucaagaaccucuacgagaaggucaagucccagcucaagaacaacgccaaggagaucggcaacggcugcuucgaguucuaccacaagugcaacgacgagugcauggaguccgucaagaacggcaccuacgacuaccccaaguacuccgaggaguccaagcucaaccgcgagaagaucgacggcgucaagcucgaguccaugggcgucuaccagauccucgccaucuacuccaccgucgccuccucccucguccuccucgucucccucggcgccaucuccuucuggaugugcuccaacggcucccuccagugccgcaucugcaucuga

SEQ ID NO: 103775 - RNA, 1698 nt, Artificial Sequence
  derived and/or modified CDS sequence (opt2) from hemagglutinin__InfluenzaA__AEQ38195
augaaggucaagcuccucguccuccucugcaccuucaccgccaccuacgccgacaccaucugcaucggcuaccacgccaacaacuccaccgacaccgucgacaccguccucgagaagaacgucaccgucacccacuccgucaaccuccucgagaacucccacaacggcaagcucugccuccucaagggcaucgccccccuccagcucggcaacugcuccgucgccggcuggauccucggcaaccccgagugcgagcuccucaucuccaaggaguccugguccuacaucgucgagaagcccaaccccgagaacggcaccugcuaccccggccacuucgccgacuacgaggagcuccgcgagcagcucuccuccgucuccuccuucgagcgcuucgagaucuuccccaaggaguccuccuggcccaaccacaccgucaccggcgccuccgccuccugcucccacaacggcgagaacuccuucuaccgcaaccuccucuggcucaccggcaagaacggccucuaccccaaccucuccaaguccuacgccaacaacaaggagaaggagguccucguccucuggggcguccaccacccccccaacaucgccaaccagaagacccucuaccacaccgagaacgccuacgucuccgucgucuccucccacuacucccgcaaguucacccccgagaucgccaagcgccccaagguccgcgaccaggagggccgcaucaacuacuacuggacccuccucgagcccggcgacaccaucaucuucgaggccaacggcaaccucaucgccccccgcuacgccuucgcccucucccgcggcuucggcuccggcaucaucaacuccaacgcccccauggacaagugcgacgccaagugccagaccccccagggcgccaucaacuccucccuccccuuccagaacguccaccccgucaccaucggcgagugccccaaguacguccgcuccgccaagcuccgcauggucaccggccuccgcaacauccccuccauccagucccgcggccucuucggcgccaucgccggcuucaucgagggcggcuggaccggcauggucgacggcugguacggcuaccaccaccagaacgagcagggcuccggcuacgccgccgaccagaaguccacccagaacgccaucaacggcaucaccaacaaggucaacuccgucaucgagaagaugaacacccaguucaccgccaugggcaaggaguucaacaagcucgagcgccgcauggagaaccucaacaagaaggucgacgacggcuucaucgacaucuggaccuacaacgccgagcuccucguccuccucgagaacgagcgcacccucgacuuccacgacuccaacgucaagaaccucuacgagaaggucaagucccagcucaagaacaacgccaaggagaucggcaacggcugcuucgaguucuaccacaagugcaacgacgagugcauggaguccgucaagaacggcaccuacgacuaccccaaguacuccgaggaguccaagcucaaccgcgagaagaucgacggcgucaagcucgaguccaugggcgucuaccagauccucgccaucuacuccaccgucgccuccucccucguccuccucgucucccucggcgccaucuccuucuggaugugcuccaacggcucccuccagugccgcaucugcaucuga

SEQ ID NO: 103776 - RNA, 1698 nt, Artificial Sequence
  derived and/or modified CDS sequence (opt2) from hemagglutinin__InfluenzaA__AEQ38196
augaaggucaagcuccucguccuccucugcaccuucaccgccaccuacgccgacaccaucugcaucggcuaccacgccaacaacuccaccgacaccgucgacaccguccucgagaagaacgucaccgucacccacuccgucaaccuccucgagaacucccacaacggcaagcucugccuccucaagggcaucgccccccuccagcucggcaacugcuccgucgccggcuggauccucggcaaccccgagugcgagcuccucaucuccaaggaguccugguccuacaucgucgagaagcccaaccccgagaacggcaccugcuaccccggccacuucgccgacuacgaggagcuccgcgagcagcucuccuccgucuccuccuucgagcgcuucgagaucuuccccaaggaguccuccuggcccaaccacaccgucaccggcgccuccgccuccugcucccacaacggcgagaacuccuucuaccgcaaccuccucuggcucaccggcaagaacggccucuaccccaaccucuccaaguccuacgccaacaacaaggagaaggagguccucguccucuggggcguccaccacccccccaacaucgccgaccagaagacccucuaccacaccgagaacgccuacgucuccgucgucuccucccacuacucccgcaaguucacccccgagaucgccaagcgccccaagguccgcgaccaggagggccgcaucaacuacuacuggacccuccucgagcccggcgacaccaucaucuucgaggccaacggcaaccucaucgccccccgcuacgccuucgcccucucccgcggcuucggcuccggcaucaucaacuccaacgcccccauggacaagugcgacgccaagugccagaccccccagggcgccaucaacuccucccuccccuuccagaacguccaccccgucaccaucggcgagugccccaaguacguccgcuccgccaagcuccgcauggucaccggccuccgcaacauccccuccauccagucccgcggccucuucggcgccaucgccggcuucaucgagggcggcuggaccggcauggucgacggcugguacggcuaccaccaccagaacgagcagggcuccggcuacgccgccgaccagaaguccacccagaacgccaucaacggcaucaccaacaaggucaacuccgucaucgagaagaugaacacccaguucaccgccgucggcaaggaguucaacaagcucgagcgccgcauggagaaccucaacaagaaggucgacgacggcuucaucgacaucuggaccuacaacgccgagcuccucguccuccucgagaacgagcgcacccucgacuuccacgacuccaacgucaagaaccucuacgagaaggucaagucccagcucaagaacaacgccaaggagaucggcaacggcugcuucgaguucuaccacaagugcaacgacgagugcauggaguccgucaagaacggcaccuacgaguaccccaaguacuccgaggaguccaagcucaaccgcgagaagaucgacggcgucaagcucgaguccaugggcgucuaccagauccucgccaucuacuccaccgucgccuccucccucguccuccucgucucccucggcgccaucuccuucuggaugugcuccaacggcucccuccagugccgcaucugcaucuga

SEQ ID NO: 103777 - RNA, 1698 nt, Artificial Sequence; identical to SEQ ID NO: 103767
  derived and/or modified CDS sequence (opt2) from hemagglutinin__InfluenzaA__AEQ38197

SEQ ID NO: 103778 - RNA, 1698 nt, Artificial Sequence; identical to SEQ ID NO: 103767
  derived and/or modified CDS sequence (opt2) from hemagglutinin__InfluenzaA__AEQ38198

SEQ ID NO: 103779 - RNA, 1701 nt, Artificial Sequence; identical to SEQ ID NO: 103086
  derived and/or modified CDS sequence (opt2) from hemagglutinin__InfluenzaA__AEQ62909

SEQ ID NO: 103780 - RNA, 1701 nt, Artificial Sequence
  derived and/or modified CDS sequence (opt2) from hemagglutinin__InfluenzaA__AEQ62910
augaaggccauccucgucgucaugcucuacaccuucgccaccgccaacgccgacacccucugcaucggcuaccacgccaacaacuccaccgacaccgucgacaccguccucgagaagaacgucaccgucacccacuccgucaaccuccucgaggacaagcacaacggcaagcucugcaagcuccgcggcgucgccccccuccaccucggcaagugcaacaucgccggcuggauccucggcaaccccgagugcgagucccucuccaccgccuccuccugguccuacaucgucgagaccgccucccccgacaacggcaccugcuaccccggcgacuucaucgacuacgaggagcuccgcgagcagcucuccuccgucuccuccuucgagcgcuucgagaucuuccccaagaccuccuccuggcccaaccacgacuccaacaagggcgucaccgccgccugcccccacgccggcgccaaguccuucuacaagaaccucauguggcucgucaagaagggcaacuccuaccccaagcucuccaaguccuacaucaacgacaagggcaaggagguccucguccucuggggcauccaccacccccccaccuccgccgaccagcagucccucuaccagaacgccgacgccuacgucuucgucggcaccucccgcuacuccaagaaguucaagcccgagaucgccauccgccccaagguccgcggccaggagggccgcaugaacuacuacuggacccucgucgagcccggcgacaagaucaccuucgaggccaccggcaaccucgucgucccccgcuacgccuucgccauggagcgcaacgccggcuccggcaucaucaucuccgacacccccguccacgacugcaacaccaccugccagucccccaagggcgccaucaacaccucccuccccuuccagaacauccaccccaucaccaucggcgagugccccaaguacgucaaguccaccaagcuccgccucgccaccggccuccgcaacguccccuccguccagucccgcggccucuucggcgccaucgccggcuucaucgagggcggcuggaccggcauggucgacggcugguacggcuaccaccaccagaacgagcagggcuccggcuacgccgccgaccucaaguccacccagaacgccaucgacgagaucaccaacaaggucaacuccgucaucgagaagaugaacacccaguucaccgccgucggcaaggaguucaaccagcucgagaagcgcaucgagaaccucaacaagaaggucgacgacggcuuccucgacaucuggaccuacaacgccgagcuccucguccuccucgagaacgagcgcacccucgacuaccacgacuccaacgucaagaaccucuacgagaagguccgcucccagcucaagaacaacgccaaggagaucggcaacggcugcuucgaguucuaccacaagugcgacaacaccugcauggaguccgucaagaacggcaccuacgacuaccccaaguacuccgaggaggccaagcucaaccgcgaggagaucgacggcgucaagcucgaguccacccgcaucuaccagauccucgccaucuacuccaccgucgccuccucccucguccucgucgucucccucggcgccaucuccuucuggaugugcuccaacggcucccuccagugccgcaucugcaucuga

SEQ ID NO: 103781 - RNA, 1701 nt, Artificial Sequence; identical to SEQ ID NO: 102903
  derived and/or modified CDS sequence (opt2) from hemagglutinin__InfluenzaA__AEQ62911

SEQ ID NO: 103782 - RNA, 1701 nt, Artificial Sequence; identical to SEQ ID NO: 103086
  derived and/or modified CDS sequence (opt2) from hemagglutinin__InfluenzaA__AEQ62912

SEQ ID NO: 103783 - RNA, 1701 nt, Artificial Sequence
  derived and/or modified CDS sequence (opt2) from hemagglutinin__InfluenzaA__AEQ62915
augaaggccauccucgucguccuccucuacaccuucgccaccgccaacgccgacacccucugcaucggcuaccacgccaacaacuccaccgacaccgucgacaccguccucgagaagaacgucaccgucacccacuccgucaaccuccucgaggacaagcacaacggcaagcucugcaagcuccgcggcgucgccccccuccaccucggcaagugcaacaucgccggcuggauccucggcaaccccgagugcgagucccucuccaccgccuccuccugguccuacaucgucgagaccuccuccuccgacaacggcaccugcuaccccggcgacuucaucaacuacgaggagcuccgcgagcagcucuccuccgucuccuccuucgagcgcuucgagaucuuccccaagaccuccuccuggcccaaccacgacuccaacaagggcgucaccgccgccugcccccacgccggcgccaaguccuucuacaagaaccucaucuggcucgucaagaagggcaacuccuaccccaagcucuccaaguccuacaucaacgacaagggcaaggagguccucguccucuggggcauccaccaccccuccaccaccgccgaccagcagucccucuaccagaacgccgacgccuacgucuucgucggcaccucccgcuacuccaagaaguucaagcccgagaucgccauccgccccaagguccgcgaccaggagggccgcaugaacuacuacuggacccucgucgagcccggcgacaagaucaccuucgaggccaccggcaaccucgucgucccccgcuacgccuucgccauggagcgcaacgccggcuccggcaucaucaucuccgacacccccguccacgacugcaacaccaccugccagacccccaagggcgccaucaacaccucccuccccuuccagaacauccaccccaucaccaucggcaagugccccaaguacgucaaguccaccaagcuccgccucgccaccggccuccgcaacguccccuccauccagucccgcggccucuucggcgccaucgccggcuucaucgagggcggcuggaccggcauggucgacggcugguacggcuaccaccaccagaacgagcagggcuccggcuacgccgccgaccucaaguccacccagaacgccaucgacaagaucaccaacaaggucaacuccgucaucgagaagaugaacacccaguucaccgccgucggcaaggaguucaaccaccucgagaagcgcaucgagaaccucaacaagaaggucgacgacggcuuccucgacaucuggaccuacaacgccgagcuccucguccuccucgagaacgagcgcacccucgacuaccacgacuccaacgucaagaaccucuacgagaagguccgcaaccagcucaagaccaacgccaaggagaucggcaacggcugcuucgaguucuaccacaagugcgacaacaccugcauggaguccgucaagaacggcaccuacgacuaccccaaguacuccgaggaggccaagcucaaccgcgaggagaucgacggcgucaagcucgaguccacccgcaucuaccagauccucgccaucuacuccaccgucgccuccucccucguccucgucgucucccucggcgccaucuccuucuggaugugcuccaacggcucccuccagugccgcaucugcaucuga

SEQ ID NO: 103784 - RNA, 1701 nt, Artificial Sequence; identical to SEQ ID NO: 99447
  derived and/or modified CDS sequence (opt2) from hemagglutinin__InfluenzaA__AER08646

SEQ ID NO: 103785 - RNA, 1701 nt, Artificial Sequence; identical to SEQ ID NO: 101455
  derived and/or modified CDS sequence (opt2) from hemagglutinin__InfluenzaA__AER08648

SEQ ID NO: 103786 - RNA, 1701 nt, Artificial Sequence
  derived and/or modified CDS sequence (opt2) from hemagglutinin__InfluenzaA__AER08652
augaagaccaucaucgcccucuccuacauccucugccucgucuucgcccagaagcuccccggcaacgacaacuccaccgccacccucugccucggccaccacgccguccccaacggcaccaucgucaagaccaucaccaacgaccagaucgaggucaccaacgccaccgagcucguccaguccuccuccaccggcgagaucugcgacuccccccaccagauccucgacggcaagaacugcacccucaucgacgcccuccucggcgacccccagugcgacggcuuccagaacaagaagugggaccucuucgucgagcgcuccaaggccuacuccaacugcuaccccuacgacguccccgacuacgccucccuccgcucccucgucgccuccuccggcacccucgaguucaacaacgaguccuucaacuggaccggcgucacccagaacggcaccuccuccgccugcauccgccgcuccaagaacuccuucuucucccgccucaacuggcucacccaccucaacuucaaguaccccgcccucaacgucaccaugcccaacaacgagcaguucgacaagcucuacaucuggggcguccaccaccccggcaccgacaaggaccagaucuuccucuacgcccaggccuccggccgcaucaccgucuccaccaagcgcucccagcagaccgccauccccaacaucggcucccgcccccgcguccgcaacauccccucccgcaucuccaucuacuggaccaucgucaagcccggcgacauccuccucaucaacuccaccggcaaccucaucgccccccgcggcuacuucaagauccgcuccggcaaguccuccaucaugcgcuccgacgcccccaucggcaagugcaacuccgagugcaucacccccaacggcuccauccccuccgacaagcccuuccagaacgucaaccgcaucaccuacggcgccugcccccgcuacgucaagcagaacacccucaagcucgccaccggcaugcgcaacguccccgagaagcagacccgcggcaucuucggcgccaucgccggcuucaucgagaacggcugggagggcauggucgacggcugguacggcuuccgccaccagaacuccgagggccgcggccaggccgccgaccucaaguccacccaggccgccaucgaccagaucaacggcaagcucaaccgccucaucggcaagaccaacgagaaguuccaccagaucgagaaggaguucuccgaggucgagggccgcauccaggaccucgagaaguacgucgaggacaccaagaucgaccucugguccuacaacgccgagcuccucgucgcccucgagaaccagcacaccaucgaccucaccgacuccgagaugaacaagcucuucgagaagaccaagaagcagcuccgcgagaacgccgaggacaugggcaacggcugcuucaagaucuaccacaagugcgacaacgccugcaucggcuccauccgcaacggcaccuacgaccacgacgucuaccgcgacgaggcccucaacaaccgcuuccagaucaagggcgucgagcucaaguccggcuacaaggacuggauccucuggaucuccuucgccaucuccugcuuccuccucugcgucgcccuccucggcuucaucaugugggccugccagaagggcaacauccgcugcaacaucugcaucuga

SEQ ID NO: 103787 - RNA, 1701 nt, Artificial Sequence; identical to SEQ ID NO: 103786
  derived and/or modified CDS sequence (opt2) from hemagglutinin__InfluenzaA__AER08654

SEQ ID NO: 103788 - RNA, 1701 nt, Artificial Sequence
  derived and/or modified CDS sequence (opt2) from hemagglutinin__InfluenzaA__AER08656
augaagaccaucaucgcccucuccuacauccucugccucgucuucgcccagaagcuccccggcaacgacaacuccaccgccacccucugccucggccaccacgccguccccaacggcaccaucgucaagaccaucaccaacgaccagaucgaggucaccaacgccaccgagcucguccaguccuccuccaccggcgagaucugcgacuccccccaccagauccucgacggcaagaacugcacccucaucgacgcccuccucggcgacccccagugcgacggcuuccagaacaagaagugggaccucuucgucgagcgcuccaaggccuacuccaacugcuaccccuacgacguccccgacuacgccucccuccgcucccucgucgccuccuccggcacccucgaguucaacaacgaguccuucaacuggaccggcgucacccagaacggcaccuccuccgccugcauccgccgcuccaagaacuccuucuucucccgccucaacuggcucacccaccucaacuucaaguaccccgcccucaacgucaccaugcccaacaacgagcaguucgacaagcucuacaucuggggcguccaccaccccggcaccgacaaggaccagaucuuccucuacgcccaggccuccggccgcaucaccgucuccaccaagcgcucccagcagaccgucauccccaacaucggcucccgcccccgcguccgcaacauccccucccgcaucuccaucuacuggaccaucgucaagcccggcgacauccuccucaucaacuccaccggcaaccucaucgccccccgcggcuacuucaagaugcaguccggcaaguccuccaucaugcgcuccgacgcccccaucggcaagugcaacuccgagugcaucacccccaacggcuccauccccaacgacaagcccuuccagaacgucaaccgcaucaccuacggcgccugcccccgcuacgucaagcagaacacccucaagcucgccaccggcaugcgcaacguccccgagaagcagacccgcggcaucuucggcgccaucgccggcuucaucgagaacggcugggagggcauggucgacggcugguacggcuuccgccaccagaacuccgagggccgcggccaggccgccgaccucaaguccacccaggccgccaucgaccagaucaacggcaagcucaaccgccucaucggcaagaccaacgagaaguuccaccagaucgagaaggaguucuccgaggucgagggccgcauccaggaccucgagaaguacgucgaggacaccaagaucgaccucugguccuacaacgccgagcuccucgucgcccucgagaaccagcacaccaucgaccucaccgacuccgagaugaacaagcucuucgagaagaccaagaagcagcuccgcgagaacgccgaggacaugggcaacggcugcuucaagaucuaccacaagugcgacaacgccugcaucggcuccauccgcaacggcaccuacgaccacgacgucuaccgcgacgaggcccucaacaaccgcuuccagaucaagggcgucgagcucaaguccggcuacaaggacuggauccucuggaucuccuucgccaucuccugcuuccuccucugcgucgcccuccucggcuucaucaugugggccugccagaagggcaacauccgcugcaacaucugcaucuga

SEQ ID NO: 103789 - RNA, 1701 nt, Artificial Sequence
  derived and/or modified CDS sequence (opt2) from hemagglutinin__InfluenzaA__AER08660
augaagaccaucaucgcccucuccuacauccucugccucgucuucgcccagaagcuccccggcaacgacaacuccaccgccacccucugccucggccaccacgccguccccaacggcaccaucgucaagaccaucaccaacgaccagaucgaggucaccaacgccaccgagcucguccaguccuccuccaccggcgagaucugcaacuccccccaccagauccucgacggcgagaacugcacccucaucgacgcccuccucggcgacccccagugcgacggcuuccagaacaagaagugggaccucuucgucgagcgcuccaaggccuacuccaacugcuaccccuacgacguccccgacuacgccucccuccgcucccucgucgccuccuccggcacccucgaguucaacaacgaguccuucaacuggaccggcgucacccagaacggcaccuccuccgccugcauccgccgcuccaacaacuccuucuucucccgccucaacuggcucacccaccucaacuucaaguaccccgcccucaacgucaccaugcccaacaacgagcaguucgacaagcucuacaucuggggcguccaccaccccggcaccgacaaggaccagaucuuccucuacgcccaggccuccggccgcaucaccgucuccaccaagcgcucccagcaggccgucauccccaacaucggcucccgcccccgcguccgcaacauccccucccgcaucuccaucuacuggaccaucgucaagcccggcgacauccuccucaucaacuccaccggcaaccucaucgccccccgcggcuacuucaagauccgcuccggcaaguccuccaucaugcgcuccgacgcccccaucggcaagugcaacuccgccugcaucacccccaacggcuccauccccaacgacaagcccuuccagaacgucaaccgcaucaccuacggcgccugcccccgcuacgucaagcagaacacccucaagcucgccaccggcaugcgcaacguccccgagaagcagacccgcggcaucuucggcgccaucgccggcuucaucgagaacggcugggagggcauggucgacggcugguacggcuuccgccaccagaacuccgagggccgcggccaggccgccgaccucaaguccacccaggccgccaucgaccagaucaacggcaagcucaaccgccucaucggcaagaccaacgagaaguuccaccagaucgagaaggaguucuccgaggucgagggccgcauccaggaccucgagaaguacgucgaggacaccaagaucgaccucugguccuacaacgccgagcuccucgucgcccucgagaaccagcacaccaucgaccucaccgacuccgagaugaacaagcucuucgagaagaccaagaagcagcuccgcgagaacgccgaggacaugggcaacggcugcuucaagaucuaccacaagugcgacaacgccugcaucggcuccauccgcaacggcaccuacgaccacgacgucuaccgcgacgaggcccucaacaaccgcuuccagaucaagggcgucgagcucaaguccggcuacaaggacuggauccucuggaucuccuucgccaucuccugcuuccuccucugcgucgcccuccucggcuucaucaugugggccugccagaagggcaacauccgcugcaacaucugcaucuga

SEQ ID NO: 103790 - RNA, 1701 nt, Artificial Sequence
  derived and/or modified CDS sequence (opt2) from hemagglutinin__InfluenzaA__AER08664
augaagaccaucaucgcccucuccuacauccucugccucgucuucgcccagaagcuccccggcaacgacaacuccaccgccacccucugccucggccaccacgccguccccaacggcaccaucgucaagaccaucaccaacgaccagaucgaggucaccaacgccaccgagcucguccaguccuccuccaccggcgagaucugcgacuccccccaccagauccucgacggcgagaacugcacccucaucgacgcccuccucggcgacccccagugcgacggcuuccagaacaagaagugggaccucuucgucgagcgcuccaaggccuacuccaacugcuaccccuacgacguccccgacuacgccucccuccgcucccucgucgccuccuccggcacccucgaguucaacuccgaguccuucaacuggaccggcgucacccagaacggcaccuccuccgccugcauccgccgcuccaacaacuccuucuucucccgccucaacuggcucacccaccucaacuucaaguaccccgcccucaacgucaccaugcccaacaacgagcaguucgacaagcucuacaucuggggcguccaccaccccggcaccgacaaggaccagaucuuccucuacgcccaggccuccggccgcaucaccgucuccaccaagcgcucccagcaggccgucauccccaacaucggcucccgcccccgcguccgcaacauccccucccgcaucuccaucuacuggaccaucgucaagcccggcgacauccuccucaucaacuccaccggcaaccucaucgccccccgcggcuacuucaagauccgcuccggcaaguccuccaucaugcgcuccgacgcccccaucggcaagugcaacuccgagugcaucacccccaacggcuccauccccaacgacaagcccuuccagaacgucaaccgcaucaccuacggcgccugcccccgcuacgucaagcaguccacccucaagcucgccaccggcaugcgcaacguccccgagaagcagacccgcggcaucuucggcgccaucgccggcuucaucgagaacggcugggagggcauggucgacggcugguacggcuuccgccaccagaacuccgagggccgcggccaggccgccgaccucaaguccacccaggccgccaucgaccagaucaacggcaagcucaaccgccucaucggcaagaccaacgagaaguuccaccagaucgagaaggaguucuccgaggucgagggccgcauccaggaccucgagaaguacgucgaggacaccaagaucgaccucugguccuacaacgccgagcuccucgucgcccucgagaaccagcacaccaucgaccucaccgacuccgagaugaacaagcucuucgagaagaccaagaagcagcuccgcgagaacgccgaggacaugggcaacggcugcuucaagaucuaccacaagugcgacaacgccugcaucggcuccauccgcaacggcaccuacgaccacgacgucuaccgcgacgaggcccucaacaaccgcuuccagaucaagggcgucgagcucaaguccggcuacaaggacuggauccucuggaucuccuucgccaucuccugcuuccuccucugcgucgcccuccucggcuucaucaugugggccugccagaagggcaacauccgcugcaacaucugcaucuga

SEQ ID NO: 103791 - RNA, 1701 nt, Artificial Sequence; identical to SEQ ID NO: 103018
  derived and/or modified CDS sequence (opt2) from hemagglutinin__InfluenzaA__AER08668

SEQ ID NO: 103792 - RNA, 1701 nt, Artificial Sequence
  derived and/or modified CDS sequence (opt2) from hemagglutinin__InfluenzaA__AER08670
augaagaccaucaucgcccucuccuacauccucugccucgucuucgcccagaagcuccccggcaacgacaacuccaccgccacccucugccucggccaccacgccguccccaacggcaccaucgucaagaccaucaccaacgaccagaucgaggucaccaacgccaccgagcucguccaguccuccuccaccggcgagaucugcaacuccccccaccagauccucgacggcgagaacugcacccucaucgacgcccuccucggcgacccccagugcgacggcuuccagaacaagaagugggaccucuucgucgagcgcuccaaggcccacuccaacugcuaccccuacgacguccccgacuacgccucccuccgcucccucgucgccuccuccggcacccucgaguucaacaacgaguccuucaacuggaccggcgucacccagaacggcaccuccuccgccugcauccgccgcuccaacaacuccuucuucucccgccucaacuggcucacccaccucaacuucaaguaccccgcccucaacgucaccaugcccaacaacgagcaguucgacaagcucuacaucuggggcguccaccaccccggcaccgacaaggaccagaucuuccucuacgcccaggccuccggccgcaucaccgucuccaccaagcgcucccagcaggccgucauccccaacaucggcucccgcccccgcguccgcaacauccccucccgcgucuccaucuacuggaccaucgucaagcccggcgacauccuccucaucaacuccaccggcaaccucaucgccccccgcggcuacuucaagauccgcuccggcaaguccuccaucaugaaguccgacgcccccaucggcaagugcaacuccgccugcaucacccccaacggcuccauccccaacgacaagcccuuccagaacgucaaccgcaucaccuacggcgccugcccccgcuacgucaagcagaacacccucaagcucgccaccggcaugcgcaacguccccgagaagcagacccgcggcaucuucggcgccaucgccggcuucaucgagaacggcugggagggcauggucgacggcugguacggcuuccgccaccagaacuccgagggccgcggccaggccgccgaccucaaguccacccaggccgccaucgaccagaucaacggcaagcucaaccgccucaucggcaagaccaacgagaaguuccaccagaucgagaaggaguucuccgaggucgagggccgcauccaggaccucgagaaguacgucgaggacaccaagaucgaccucugguccuacaacgccgagcuccucgucgcccucgagaaccagcacaccaucgaccucaccgacuccgagaugaacaagcucuucgagaagaccaagaagcagcuccgcgagaacgccgaggacaugggcaacggcugcuucaagaucuaccacaagugcgacaacgccugcaucggcuccauccgcaacggcaccuacgaccacgacgucuaccgcgacgaggcccucaacaaccgcuuccagaucaagggcgucgagcucaaguccggcuacaaggacuggauccucuggaucuccuucgccaucuccugcuuccuccucugcgucgcccuccucggcuucaucaugugggccugccagaagggcaacauccgcugcaacaucugcaucuga

SEQ ID NO: 103793 - RNA, 1701 nt, Artificial Sequence
  derived and/or modified CDS sequence (opt2) from hemagglutinin__InfluenzaA__AER08672
augaagaccaucaucgcccucuccuacauccucugccucgucuucgcccagaagcuccccggcaacgacaacuccaccgccacccucugccucggccaccacgccguccccaacggcaccaucgucaagaccaucaccaacgaccagaucgaggucaccaacgccaccgagcucguccaguccuccuccaccggcggcaucugcgacuccccccaccagauccucgacggcggcaacugcacccucaucgacgcccuccucggcgacccccagugcgacggcuuccagaacaagaagugggaccucuucgucgagcgcuccaaggccuacuccaacugcuaccccuacgacguccccgacuacgccucccuccgcucccucgucgccuccuccggcacccucgaguucaacuccgaguccuucaacuggaccggcgucacccagaacggcaccuccuccgccugcauccgccgcuccaacaacuccuucuucucccgccucaacuggcucacccaccucaacuucaaguaccccgcccucaacgucaccaugcccaacaacgagcaguucgacaagcucuacaucuggggcguccaccaccccggcaccgacaaggaccagaucuuccucuacgcccaggccuccggccgcaucaccgucuccaccaagcgcucccagcaggccgucauccccaacaucggcucccgcccccgcguccgcaacauccccucccgcaucuccaucuacuggaccaucgucaagcccggcgacauccuccucaucaacuccaccggcaaccucaucgccccccgcggcuacuucaagauccgcuccggcaaguccuccaucaugcgcuccgacgcccccaucggcaagugcaacuccgagugcaucacccccaacggcuccauccccaacgacaagcccuuccagaacgucaaccgcaucaccuacggcgccugcccccgcuacgucaagcaguccacccucaagcucgccaccggcaugcgcaacguccccgagaagcagacccgcggcaucuucggcgccaucgccggcuucaucgagaacggcugggagggcauggucgacggcugguacggcuuccgccaccagaacuccgagggccgcggccaggccgccgaccucaaguccacccaggccgccaucgaccagaucaacggcaagcucaaccgccucaucggcaagaccaacgagaaguuccaccagaucgagaaggaguucuccgaggucgagggccgcauccaggaccucgagaaguacgucgaggacaccaagaucgaccucugguccuacaacgccgagcuccucgucgcccucgagaaccagcacaccaucgaccucaccgacuccgagaugaacaagcucuucgagaagaccaagaagcagcuccgcgagaacgccgaggacaugggcaacggcugcuucaagaucuaccacaagugcgacaacgccugcaucggcuccauccgcaacggcaccuacgaccacgacgucuaccgcgacgaggcccucaacaaccgcuuccagaucaagggcgucgagcucaaguccggcuacaaggacuggauccucuggaucuccuucgccaucuccugcuuccuccucugcgucgcccuccucggcuucaucaugugggccugccagaagggcaacauccgcugcaacaucugcaucuga

SEQ ID NO: 103794 - RNA, 1701 nt, Artificial Sequence
  derived and/or modified CDS sequence (opt2) from hemagglutinin__InfluenzaA__AER08674
augaagaccaucaucgcccucuccuacauccucugccucgucuucgcccagaagcuccccggcaacgacaacuccaccgccacccucugccucggccaccacgccguccccaacggcaccauggucaagaccaucaccaacgaccagaucgaggucaccaacgccaccgagcucguccaguccuccuccaccggcgagaucugcaacuccccccaccagauccucgacggcgagaacugcacccucaucgacgcccuccucggcgacccccagugcgacggcuuccagaacaagaagugggaccucuucgucgagcgcuccaaggcccacuccaacugcuaccccuacgacguccccgacuacgccucccuccgcucccucgucgccuccuccggcacccucgaguucaacaacgaguccuucaacuggaccggcgucacccagaacggcaccuccuccgccugcauccgccgcuccaacaacuccuucuucucccgccucaacuggcucacccaccucaacuucaaguaccccgcccucaacgucaccaugcccaacaacgagcaguucgacaagcucuacaucuggggcguccaccaccccggcaccgacaaggaccagaucuuccucuacgcccaggccuccggccgcaucaccgucuccaccaagcgcucccagcaggccgucauccccaacaucggcucccgcccccgcguccgcaacauccccucccgcgucuccaucuacuggaccaucgucaagcccggcgacauccuccucaucaacuccaccggcaaccucaucgccccccgcggcuacuucaagauccgcuccggcaaguccuccaucaugcgcuccgacgcccccaucggcaagugcaacuccgccugcaucacccccaacggcuccauccccaacgacaagcccuuccagaacgucaaccgcaucaccuacggcgccugcccccgcuacgucaagcagaacacccucaagcucgccaccggcaugcgcaacguccccgagaagcagacccgcggcaucuucggcgccaucgccggcuucaucgagaacggcugggagggcauggucgacggcugguacggcuuccgccaccagaacuccgagggccgcggccaggccgccgaccucaaguccacccaggccgccaucgaccagaucaacggcaagcucaaccgccucaucggcaagaccaacgagaaguuccaccagaucgagaaggaguucuccgaggucgagggccgcauccaggaccucgagaaguacgucgaggacaccaagaucgaccucugguccuacaacgccgagcuccucgucgcccucgagaaccagcacaccaucgaccucaccgacuccgagaugaacaagcucuucgagaagaccaagaagcagcuccgcgagaacgccgaggacaugggcaacggcugcuucaagaucuaccacaagugcgacaacgccugcaucggcuccauccgcaacggcaccuacgaccacgacgucuaccgcgacgaggcccucaacaaccgcuuccagaucaagggcgucgagcucaaguccggcuacaaggacuggauccucuggaucuccuucgccaucuccugcuuccuccucugcgucgcccuccucggcuucaucaugugggccugccagaagggcaacauccgcugcaacaucugcaucuga

SEQ ID NO: 103795 - RNA, 1701 nt, Artificial Sequence; identical to SEQ ID NO: 103018
  derived and/or modified CDS sequence (opt2) from hemagglutinin__InfluenzaA__AER08676

SEQ ID NO: 103796 - RNA, 1701 nt, Artificial Sequence; identical to SEQ ID NO: 103018
  derived and/or modified CDS sequence (opt2) from hemagglutinin__InfluenzaA__AER08678

SEQ ID NO: 103797 - RNA, 1701 nt, Artificial Sequence
  derived and/or modified CDS sequence (opt2) from hemagglutinin__InfluenzaA__AER08680
augaagaccaucaucgcccucuccuacauccucugccucgucuucgcccagaagcuccccggcaacgacaacuccaccgccacccucugccucggccaccacgccguccccaacggcaccaucgucaagaccaucaccaacgaccagaucgaggucaccaacgccaccgagcucguccaguccuccuccgccggcgagaucugcgacuccccccaccagauccucgacggcgagaacugcacccucaucgacgcccuccucggcgacccccagugcgacggcuuccagaacaagaagugggaccucuucgucgagcgcucccgcgcccacuccaacugcuaccccuacgacguccccgacuacgccucccuccgcucccucgucgccuccuccggcacccucgaguucaacaacgaguccuucaacuggaccggcgucacccagaacggcaccuccuccgccugcauccgccgcuccaacaacuccuucuucucccgccucaacuggcucacccaccucaacuucaaguaccccgcccucaacgucaccaugcccaacaacgagcaguucgacaagcucuacaucuggggcguccaccaccccggcaccgacaaggaccagaucuuccucuacgcccaggccuccggccgcaucaccgucuccaccaagcgcucccagcaggccgucauccccaacaucggcucccgcccccgcguccgcaacauccccucccgcaucuccaucuacuggaccaucgucaagcccggcgacauccuccucaucaacuccaccggcaaccucaucgccccccgcggcuacuucaagauccgcuccggcaaguccuccaucaugcgcuccgacgcccccaucggcaagugcaacuccgagugcaucacccccaacggcuccauccccaacgacaagcccuuccagaacgucaaccgcaucaccuacggcgccugcccccgcuacgucaagcaguccacccucaagcucgccaccggcaugcgcaacguccccgagaagcagacccgcggcaucuucggcgccaucgccggcuucaucgagaacggcugggagggcaugauggacggcugguacggcuuccgccaccagaacuccgagggccgcggccaggccgccgaccucaaguccacccaggccgccaucgaccagaucaacggcaagcucaaccgccucaucggcaagaccaacgagaaguuccaccagaucgagaaggaguucuccgaggucgagggccgcauccaggaccucgagaaguacgucgaggacaccaagaucgaccucugguccuacaacgccgagcuccucgucgcccucgagaaccagcacaccaucgaccucaccgacuccgagaugaacaagcucuucgagaagaccaagaagcagcuccgcgagaacgccgaggacaugggcaacggcugcuucaagaucuaccacaagugcgacaacgccugcaucggcuccauccgcaacggcaccuacgaccacgacgucuaccgcgacgaggcccucaacaaccgcuuccagaucaagggcgucgagcucaaguccggcuacaaggacuggauccucuggaucuccuucgccaucuccugcuuccuccucugcgucgcccuccucggcuucaucaugugggccugccagaagggcaacauccgcugcaacaucugcaucuga

SEQ ID NO: 103798 - RNA, 1701 nt, Artificial Sequence
  derived and/or modified CDS sequence (opt2) from hemagglutinin__InfluenzaA__AER08682
augaagaccgucaucgcccucuccuacauccucugccucgucuucgcccagaagcuccccggcaacgacaacuccaccgccacccucugccucggccaccacgccguccccaacggcaccaucgucaagaccaucaccaacgaccagaucgaggucaccaacgccaccgagcucguccaguccuccuccaccggcgagaucugcaacuccccccaccagauccucgacggcgagaacugcacccucaucgacgcccuccucggcgacccccagugcgacggcuuccagaacaagaagugggaccucuucgucgagcgcuccaaggcccacuccaacugcuaccccuacgacguccccgacuacgccucccuccgcucccucgucgccuccuccggcacccucgaguucaacaacgaguccuucaacuggaccggcgucacccagaacggcaccuccuccgccugcauccgccgcuccaacaacuccuucuucucccgccucaacuggcucacccaccucaacuucaaguaccccgcccucaacgucaccaugcccaacaacgagcaguucgacaagcucuacaucuggggcguccaccaccccggcaccgacaaggaccagaucuuccucuacgcccaggccuccggccgcaucaccgucuccaccaagcgcucccagcaggccgucauccccaacaucggcucccgcccccgcguccgcaacauccccucccgcgucuccaucuacuggaccaucgucaagcccggcgacauccuccucaucaacuccaccggcaaccucaucgccccccgcggcuacuucaagauccgcuccggcaaguccuccaucaugcgcuccgacgcccccaucggcaagugcaacuccgccugcaucacccccaacggcuccauccccaacgacaagcccuuccagaacgucaaccgcaucaccuacggcgccugcccccgcuacgucaagcagaacacccucaagcucgccaccggcaugcgcaacguccccgagaagcagacccgcggcaucuucggcgccaucgccggcuucaucgagaacggcugggagggcauggucgacggcugguacggcuuccgccaccagaacuccgagggccgcggccaggccgccgaccucaaguccacccaggccgccaucgaccagaucaacggcaagcucaaccgccucaucggcaagaccaacgagaaguuccaccagaucgagaaggaguucuccgaggucgagggccgcauccaggaccucgagaaguacgucgaggacaccaagaucgaccucugguccuacaacgccgagcuccucgucgcccucgagaaccagcacaccaucgaccucaccgacuccgagaugaacaagcucuucgagaagaccaagaagcagcuccgcgagaacgccgaggacaugggcaacggcugcuucaagaucuaccacaagugcgacaacgccugcaucggcuccauccgcaacggcaccuacgaccacgacgucuaccgcgacgaggcccucaacaaccgcuuccagaucaagggcgucgagcucaaguccggcuacaaggacuggauccucuggaucuccuucgccaucuccugcuuccuccucugcgucgcccuccucggcuucaucaugugggccugccagaagggcaacauccgcugcaacaucugcaucuga

SEQ ID NO: 103799 - RNA, 1701 nt, Artificial Sequence
  derived and/or modified CDS sequence (opt2) from hemagglutinin__InfluenzaA__AER08684
augaagaccaucaucgcccucuccuacauccucugccucgucuucgcccagaagcuccccggcaacgacaacuccaccgccacccucugccucggccaccacgccguccccaacggcaccaucgucaagaccaucaccaacgaccagaucgaggucaccaacgccaccgagcucguccaguccuccuccaccggcgagaucugcaacuccccccaccagauccucgacggcgagaacugcacccucaucgacgcccuccucggcgacccccagugcgacggcuuccagaacaagaagugggaccucuucgucgagcgcuccaaggcccacuccaacugcuaccccuacgacguccccgacuacgccucccuccgcucccucgucgccuccuccggcacccucgaguucaacaacgaguccuucaacuggaccggcgucacccagaacggcaccuccuccgccugcauccgccgcuccaacaacuccuucuucucccgccucaacuggcucacccaccucaacuucaaguaccccgcccucaacgucaccaugcccaacaacgagcaguucgacaagcucuacaucuggggcguccaccaccccggcaccgacaaggaccagaucuuccucuacgcccaggccuccggccgcaucaccgucuccaccaagcgcucccagcaggccgucauccccaacaucggcucccgcccccgcguccgcaacauccccucccgcgucuccaucuacuggaccaucgucaagcccggcgacauccuccucaucaacuccaccggcaaccucaucgccccccgcggcuacuucaagauccgcuccggcaaguccuccaucaugcgcuccgacgcccccaucggcaagugcaacuccaccugcaucacccccaacggcuccauccccaacgacaagcccuuccagaacgucaaccgcaucaccuacggcgccugcccccgcuacgucaagcagaacacccucaagcucgccaccggcaugcgcaacguccccgagaagcagacccgcggcaucuucggcgccaucgccggcuucaucgagaacggcugggagggcauggucgacggcugguacggcuuccgccaccagaacuccgagggccgcggccaggccgccgaccucaaguccacccaggccgccaucgaccagaucaacggcaagcucaaccgccucaucggcaagaccaacgagaaguuccaccagaucgagaaggaguucuccgaggucgagggccgcauccaggaccucgagaaguacgucgaggacaccaagaucgaccucugguccuacaacgccgagcuccucgucgcccucgagaaccagcacaccaucgaccucaccgacuccgagaugaacaagcucuucgagaagaccaagaagcagcuccgcgagaacgccgaggacaugggcaacggcugcuucaagaucuaccacaagugcgacaacgccugcaucggcuccauccgcaacggcaccuacgaccacgacgucuaccgcgacgaggcccucaacaaccgcuuccagaucaagggcgucgagcucaaguccggcuacaaggacuggauccucuggaucuccuucgccaucuccugcuuccuccucugcgucgcccuccucggcuucaucaugugggccugccagaagggcaacauccgcugcaacaucugcaucuga

SEQ ID NO: 103800 - RNA, 1701 nt, Artificial Sequence
  derived and/or modified CDS sequence (opt2) from hemagglutinin__InfluenzaA__AER08686
augaagaccaucaucgcccucuccuacauccucugccucgucuucgcccagaagcuccccggcaacgacaacuccaccgccacccucugccucggccaccacgccguccccaacggcaccaucgucaagaccaucaccaacgaccagaucgaggucaccaacgccaccgagcucguccaguccuccuccaccggcgagaucugcaacuccccccaccagauccucgacggcgagaacugcacccucaucgacgcccuccucggcgacccccagugcgacggcuuccagaacaagaagugggaccucuucgucgagcgcuccaaggcccacuccaacugcuaccccuacgacguccccgacuacgccucccuccgcucccucgucgccuccuccggcacccucgaguucaacaacgaguccuucaacuggaccggcgucacccagaacggcaccuccuccgccugcauccgccgcuccaacaacuccuucuucucccgccucaacuggcucacccaccucaacuucaaguaccccgcccucaacgucaccaugcccaacaacgagcaguucgacaagcucuacaucuggggcguccaccaccccggcaccgacaaggaccagaucuuccucuacgcccaggccuccggccgcaucaccgucuccaccaagcgcucccagcaggccgucauccccaacaucggcucccgcccccgcguccgcaacauccccucccgcgucuccaucuacuggaccaucgucaagcccggcgacauccuccucaucaacuccaccggcaaccucaucgccccccgcggcuacuucaagauccgcuccggcaaguccuccaucaugcgcuccgacgcccccaucggcaagugcaacuccaccugcaucacccccaacggcuccauccccaacgacaagcccuuccagaacgucaaccgcaucaccuacggcgccugcccccgcuacgucaagcagaacacccucaagcucgccaccggcaugcgcaacguccccgagaagcagacccgcggcaucuucggcgccaucgccggcuucaucgagaacggcugggagggcauggucgacggcugguacggcuuccgccaccagaacuccgagggccgcggccaggccgccgaccucaaguccacccaggccgccaucgaccagaucaacggcaagcucaaccgccucaucggcaagaccaacgagaaguuccaccagaucgagaaggaguucuccgaggucgagggccgcauccaggaccucgagaaguacaucgaggacaccaagaucgaccucugguccuacaacgccgagcuccucgucgcccucgagaaccagcacaccaucgaccucaccgacuccgagaugaacaagcucuucgagaagaccaagaagcagcuccgcgagaacgccgaggacaugggcaacggcugcuucaagaucuaccacaagugcgacaacgccugcaucggcuccauccgcaacggcaccuacgaccacgacgucuaccgcgacgaggcccucaacaaccgcuuccagaucaagggcgucgagcucaaguccggcuacaaggacuggauccucuggaucuccuucgccaucuccugcuuccuccucugcgucgcccuccucggcuucaucaugugggccugccagaagggcaacauccgcugcaacaucugcaucuga

SEQ ID NO: 103801 - RNA, 1701 nt, Artificial Sequence; identical to SEQ ID NO: 103018
  derived and/or modified CDS sequence (opt2) from hemagglutinin__InfluenzaA__AER08688

SEQ ID NO: 103802 - RNA, 1701 nt, Artificial Sequence
  derived and/or modified CDS sequence (opt2) from hemagglutinin__InfluenzaA__AER08690
augaagaccaucaucgcccucuccuacauccucugccucgucuucgcccagaagcuccccgagaacgacaacuccaccgccacccucugccucggccaccacgccguccccaacggcaccaucgucaagaccaucaccaacgaccagaucgaggucaccaacgccaccgagcucguccaguccuccuccaccggcgagaucugcaacuccccccaccagauccucgacggcgagaacugcacccucaucgacgcccuccucggcgacccccagugcgacggcuuccagaacaagaagugggaccucuucgucgagcgcuccaaggcccacuccaacugcuaccccuacgacguccccgacuacgccucccuccgcucccucgucgccuccuccggcacccucgaguucaacaacgaguccuucaacuggaccggcgucacccagaacggcaccuccuccgccugcauccgccgcuccaacaacuccuucuucucccgccucaacuggcucacccaccucaacuucaaguaccccgcccucaacgucaccaugcccaacaacgagcaguucgacaagcucuacaucuggggcguccaccaccccggcaccgacaaggaccagaucuuccucuacgcccaggccuccggccgcaucaccgucuccaccaagcgcucccagcaggccgucauccccaacaucggcucccgcccccgcguccgcaacauccccucccgcgucuccaucuacuggaccaucgucaagcccggcgacauccuccucaucaacuccaccggcaaccucaucgccccccgcggcuacuucaagauccgcuccggcaaguccuccaucaugcgcuccgacgcccccaucggcaagugcaacuccaccugcaucacccccaacggcuccauccccaacgacaagcccuuccagaacgucaaccgcaucaccuacggcgccugcccccgcuacgucaagcagaacacccucaagcucgccaccggcaugcgcaacguccccgagaagcagacccgcggcaucuucggcgccaucgccggcuucaucgagaacggcugggagggcauggucgacggcugguacggcuuccgccaccagaacuccgagggccgcggccaggccgccgaccucaaguccacccaggccgccaucgaccagaucaacggcaagcucaaccgccucaucggcaagaccaacgagaaguuccaccagaucgagaaggaguucuccgaggucgagggccgcauccaggaccucgagaaguacgucgaggacaccaagaucgaccucugguccuacaacgccgagcuccucgucgcccucgagaaccagcacaccaucgaccucaccgacuccgagaugaacaagcucuucgagaagaccaagaagcagcuccgcgagaacgccgaggacaugggcaacggcugcuucaagaucuaccacaagugcgacaacgccugcaucggcuccauccgcaacggcaccuacgaccacgacgucuaccgcgacgaggcccucaacaaccgcuuccagaucaagggcgucgagcucaaguccggcuacaaggacuggauccucuggaucuccuucgccaucuccugcuuccuccucugcgucguccuccucggcuucaucaugugggccugccagaagggcaacauccgcugcaacaucugcaucuga

SEQ ID NO: 103803 - RNA, 1701 nt, Artificial Sequence; identical to SEQ ID NO: 103018
  derived and/or modified CDS sequence (opt2) from hemagglutinin__InfluenzaA__AER08692

SEQ ID NO: 103804 - RNA, 1701 nt, Artificial Sequence
  derived and/or modified CDS sequence (opt2) from hemagglutinin__InfluenzaA__AER08698
augaagaccaccaucgcccucucccacauccucugccucgucuucgcccagaagcuccccggcaacgacaacuccaccgccacccucugccucggccaccacgccguccccaacggcaccaucgucaagaccaucaccaacgaccagaucgaggucaccaacgccaccgagcucguccaguccuccuccgccggcgagaucugcgacuccccccaccagauccucgacggcgagaacugcacccucaucgacgcccuccucggcgacccccagugcgacggcuuccagaacaagaagugggaccucuucgucgagcgcucccgcgccuacuccaacugcuaccccuacgacguccccgacuacgccucccuccgcucccucgucgccuccuccggcacccucgaguucaacaacgaguccuucaacuggaccggcgucacccagaacggcaccuccuccgccugcauccgccgcuccaacaacuccuucuucucccgccucaacuggcucacccaccucaacuucaaguaccccgcccucaacgucaccaugcccaacaacgagcaguucgacaagcucuacaucuggggcguccaccaccccggcaccgacaaggaccagaucuuccucuacgcccaggccuccggccgcaucaccgucuccaccaagcgcucccagcaggccgucauccccaacaucggcucccgcccccgcguccgcaacauccccucccgcaucuccaucuacuggaccaucgucaagcccggcgacauccuccucaucaacuccaccggcaaccucaucgccccccgcggcuacuucaagauccgcuccggcaaguccuccaucaugcgcuccgacgcccccaucggcaagugcaacuccgagugcaucacccccaacggcuccauccccaacgacaagcccuuccagaacgucaaccgcaucaccuacggcgccugcccccgcuacgucaagcaguccacccucaagcucgccaccggcaugcgcaacguccccgagaagcagacccgcggcaucuucggcgccaucgccggcuucaucgagaacggcugggagggcauggucgacggcugguacggcuuccgccaccagaacuccgagggccgcggccaggccgccgaccucaaguccacccaggccgccaucgaccagaucaacggcaagcucaaccgccucaucggcaagaccaacgagaaguuccaccagaucgagaaggaguucuccgaggucgagggccgcauccaggaccucgagaaguacgucgaggacaccaagaucgaccucugguccuacaacgccgagcuccucgucgcccucgagaaccagcacaccaucgaccucaccgacuccgagaugaacaagcucuucgagaagaccaagaagcagcuccgcgagaacgccgaggacaugggcaacggcugcuucaagaucuaccacaagugcgacaacgccugcaucggcuccauccgcaacggcaccuacgaccacgacgucuaccgcgacgaggcccucaacaaccgcuuccagaucaagggcgucgagcucaaguccggcuacaaggacuggauccucuggaucuccuucgccaucuccugcuuccuccucugcgucgcccuccucggcuucaucaugugggccugccagaagggcaacauccgcugcaacaucugcaucuga

SEQ ID NO: 103805 - RNA, 1701 nt, Artificial Sequence; identical to SEQ ID NO: 103018
  derived and/or modified CDS sequence (opt2) from hemagglutinin__InfluenzaA__AER08700

SEQ ID NO: 103806 - RNA, 1701 nt, Artificial Sequence
  derived and/or modified CDS sequence (opt2) from hemagglutinin__InfluenzaA__AER92712
augaaggccauccucgucguccuccucuacaccuucgccaccgccaacgccgacacccucugcaucggcuaccacgccaacaacuccaccgacaccgucgacaccguccucgagaagaacgucaccgucacccacuccgucgaccuccucgaggacaagcacaacggcaagcucugcaagcuccgcggcgucgccccccuccaccucggcaagugcaacaucgccggcuggauccucggcaaccccgagugcgagucccucuccaccgccuccuccugguccuacaucgucgagaccuccaacuccgacaacggcaccugcuaccccggcgacuucaucgacuacgaggagcuccgcgagcagcucuccuccgucuccuccuucgagcgcuucgagaucuuccccaagaccuccuccuggcccaaccacgacuccaacaagggcgucaccgccgccugcccccacgccggcgccaaguccuucuacaagaaccucaucuggcucgucaagaagggcaacuccuaccccaagcucaacaaguccuacaucaacgacaagggcaaggagguccucguccucuggggcauccaccaccccuccaccuccaccgaccagcagucccucuaccagaacgccgacgccuacgucuucgucggcaccucccgcuacuccaagaaguucaagcccgagaucgccauccgccccaagguccgcaaccaggagggccgcaugaacuacuacuggacccucgucgagcccggcgacaagaucaccuucgaggccaccggcaaccucgucgucccccgcuacgccuucaccaucgagcgcaacgccggcuccggcaucaucaucuccgacacccccauccacgacugcaacaccaccugccagacccccaagggcgccaucaacaccucccuccccuuccagaacauccaccccaucaccaucggcaagugccccaaguacgucaaguccaccaagcuccgccucgccaccggccuccgcaacguccccuccauccagucccgcggccucuucggcgccaucgccggcuucaucgagggcggcuggaccggcauggucgacggcugguacggcuaccaccaccagaacgagcagggcuccggcuacgccgccgaccucaaguccacccagaacgccaucgacgagaucaccaacaaggucaacuccgucaucgagaagaugaacacccaguucaccgccgucggcaaggaguucaaccaccucgagaagcgcaucgagaaccucaacaagaaggucgacgacggcuuccucgacaucuggaccuacaacgccgagcuccucguccuccucgagaacgagcgcacccucgacuaccacgacuccaacgucaagaaccucuacgagaagguccgcucccagcucaagaacaacgccaaggagaucggcaacggcugcuucgaguucuaccacaagugcgacaacaccugcauggaguccgucaagaacggcaccuacgacuaccccaaguacuccgaggaggccaagcucaaccgcgaggagaucgacggcgucaagcucgaguccacccgcaucuaccagauccucgccaucuacuccaccgucgccuccucccucguccucgucgucucccucggcgccaucuccuucuggaugugcuccaacggcucccuccagugccgcaucugcaucuga

SEQ ID NO: 103807 - RNA, 1701 nt, Artificial Sequence; identical to SEQ ID NO: 101569
  derived and/or modified CDS sequence (opt2) from hemagglutinin__InfluenzaA__AET10090

SEQ ID NO: 103808 - RNA, 1701 nt, Artificial Sequence; identical to SEQ ID NO: 101569
  derived and/or modified CDS sequence (opt2) from hemagglutinin__InfluenzaA__AET10091

SEQ ID NO: 103809 - RNA, 1701 nt, Artificial Sequence; identical to SEQ ID NO: 101569
  derived and/or modified CDS sequence (opt2) from hemagglutinin__InfluenzaA__AET10092

SEQ ID NO: 103810 - RNA, 1701 nt, Artificial Sequence
  derived and/or modified CDS sequence (opt2) from hemagglutinin__InfluenzaA__AET10094
augaagaccaucaucgcccucuccugcauccucugccucgucuucgcccagaagcuccccggcaacgacaacuccaccgccacccucugccucggccaccacgccguccccaacggcaccaucgucaagaccaucaccaacgaccagaucgaggucaccaacgccaccgagcucguccaguccuccuccaccggcgagaucugcgacuccccccaccagauccucgacggcgagaacugcacccucaucgacgcccuccucggcgacccccagugcgacggcuuccagaacaagaagugggaccucuucgucgagcgcuccaaggccuacuccuccugcuaccccuacgacguccccgacuacgccucccuccgcucccucgucgccuccuccggcacccucgaguucaacaacgaguccuucaacuggaccggcgucacccagaacggcaccuccuccgccugcauccgccgcuccaacaacuccuucuucucccgccucaacuggcucacccaccucaacuucaaguaccccgcccucaacgucaccaugcccaacaacgagcaguucgacaagcucuacaucuggggcguccaccaccccggcaccgacaaggaccagaucuuccucuacgcccaggccuccggccgcaucaccgucuccaccaagcgcucccagcaggccgucauccccaacaucggcucccgcccccgcguccgcaacauccccucccgcaucuccaucuacuggaccaucgucaagcccggcgacauccuccucaucaacuccaccggcaaccucaucgccccccgcggcuacuucaagauccgcuccggcaaguccuccaucaugcgcuccgacgcccccaucggcaagugcaacuccgagugcaucacccccaacggcuccauccccaacgacaagcccuuccagaacgucaaccgcaucaccuacggcgccugcccccgcuacgucaagcaguccacccucaagcucgccaccggcaugcgcaacguccccgagaagcagacccgcggcaucuucggcgccaucgccggcuucaucgagaacggcugggagggcauggucgacggcugguacggcuuccgccaccagaacuccgagggccgcggccaggccgccgaccucaaguccacccaggccgccaucgaccagaucaacggcaagcucaaccgccucaucggcaagaccaacgagaaguuccaccagaucgagaaggaguucuccgaggucgagggccgcauccaggaccucgagaaguacgucgaggacaccaagaucgaccucugguccuacaacgccgagcuccucgucgcccucgagaaccagcacaccaucgaccucaccgacuccgagaugaacaagcucuucgagaagaccaagaagcagcuccgcgagaacgccgaggacaugggcaacggcugcuucaccaucuaccacaagugcgacaacgccugcaucggcuccauccgcaacggcaccuacgaccacaacgucuaccgcgacgaggcccucaacaaccgcuuccagaucaagggcgucgagcucaaguccggcuacaaggacuggauccucuggaucuccuucgccaucuccugcuuccuccucugcgucgcccuccucggcuucaucaugugggccugccagaagggcaacauccgcugcaacaucugcaucuga

SEQ ID NO: 103811 - RNA, 1701 nt, Artificial Sequence
  derived and/or modified CDS sequence (opt2) from hemagglutinin__InfluenzaA__AET10095
augaagaccaucaucgcccucuccuacauccucugccucgucuucgcccagaagcuccccggcaacgacaacuccaccgccacccucugccucggccaccacgccguccccaacggcaccaucgucaagaccaucaccaacgaccagaucgaggucaccaacgccaccgagcucguccaguccuccuccaccggcgagaucugcgacuccccccaccagauccucgacggcgagaacugcacccucaucgacgcccuccucggcgacccccagugcgacggcuuccagaacaagaagugggaccucuucgucgagcgcuccaaggccuacuccaacugcuaccccuacgacguccccgacuacgccucccuccgcucccucgucgccuccuccggcacccucgaguucaacaacgaguccuucaacuggaccggcgucacccagaacggcaccuccuccgccugcauccgccgcuccaacaacuccuucuucucccgccucaacuggcucacccaccucaacuucaaguaccccgcccucaacgucaccaugcccaacaacgagcaguucgacaagcucuacaucuggggcguccaccaccccggcaccgacaaggaccagaucuuccucuacgcccaggccuccggccgcaucaccgucuccaccaagcgcucccagcaggccgucauccccaacaucggcucccgcccccgcguccgcaacauccccucccgcaucuccaucuacuggaccaucgucaagcccggcgacauccuccucaucaacuccaccggcaaccucaucgccccccgcggcuacuucaagauccgcuccggcaaguccuccaucaugcgcuccgacacccccaucggcaagugcaacuccgagugcaucacccccaacggcuccauccccaacgacaagcccuuccagaacgucaaccgcaucaccuacggcgccugcccccgcuacgucaagcagaacacccucaagcucgccaccggcaugcgcaacguccccgagaagcagacccgcggcaucuucggcgccaucgccggcuucaucgagaacggcugggagggcauggucgacggcugguacggcuuccgccaccagaacuccgagggccgcggccaggccgccgaccucaaguccacccaggccgccaucgaccagaucaacggcaagcucaaccgccucaucggcaagaccaacgagaaguuccaccagaucgagaaggaguucuccgaggucgagggccgcauccaggaccucgagaaguacgucgaggacaccaagaucgaccucugguccuacaacgccgagcuccucgucgcccucgagaaccagcacaccaucgaccucaccgacuccgagaugaacaagcucuucgagaagaccaagaagcagcuccgcgagaacgccgaggacaugggcaacggcugcuucaagaucuaccacaagugcgacaacgccugcaucgaguccauccgcaacggcaccuacgaccacgacgucuaccgcgacgaggcccucaacaaccgcuuccagaucaagggcgucgagcucaaguccggcuacaaggacuggauccucuggaucuccuucgccaucuccugcuuccuccucugcgucgcccuccucggcuucaucaugugggccugccagaagggcaacauccgcugcaacaucugcaucuga

SEQ ID NO: 103812 - RNA, 1701 nt, Artificial Sequence
  derived and/or modified CDS sequence (opt2) from hemagglutinin__InfluenzaA__AET10096
augaagaccaucaucgcccucuccuacauccucugccucgucuucgcccagaaguuccccggcaacgacaacuccaccgccacccucugccucggccaccacgccguccccaacggcaccaucgucaagaccaucaccaacgaccagaucgaggucaccaacgccaccgagcucguccagaacuccuccaccggcgagaucugcgacuccccccaccagaucaucgacggcgagaacugcacccucaucgacgcccuccucggcgacccccagugcgacggcuuccagaacaagaaguggaaccucuucgucgagcgcuccaaggccuacuccaacugcuaccccuacgacguccccgacuacgccucccuccgcucccucgucgccuccuccggcacccucgaguucaacaacgaguccuucaacuggaccggcgucacccagaacggcaccuccuccgccugcauccgccgcuccaacaacuccuucuucucccgccucaacuggcucacccaccucaacuucaaguaccccgcccucaacgucaccaugcccaacaacgagcaguucgacaagcucuacaucuggggcguccaccaccccggcaccgacaaggaccagaucuuccucuacgcccaggccuccggccgcaucaccgucuccaccaagcgcucccagcaggccgucauccccaacaucggcucccgcccccgcguccgcaacauccccucccgcaucuccaucuacuggaccaucgucaagcccggcgacauccuccucaucaacuccaccggcaaccucaucgccccccgcggcuacuucaagauccgcuccggcaaguccuccaucaugcgcuccgacgcccccaucggcaagugcaacuccgagugcaucacccccaacggcuccauccccaacgacaagcccuuccagaacgucaaccgcaucaccuacggcgccugcccccgcuacgucaagcagaacacccucaagcucgccaccggcaugcgcaacguccccgagaagcagacccgcggcaucuucggcgccaucgccggcuucaucgagaacggcugggagggcauggucgacggcugguacggcuuccgccaccagaacuccgagggccgcggccaggccgccgaccucaaguccacccaggccgccaucgaccagaucaacggcaagcucaaccgccucaucggcaagaccaacgagaaguuccaccagaucgagaaggaguucuccgaggucgagggccgcauccaggaccucgagaaguacgucgaggacaccaagaucgaccucugguccuacaacgccgagcuccucgucgcccucgagaaccagcacaccaucgaccucaccgacuccgagaugaacaagcucuucgagaagaccaagaagcagcuccgcgagaacgccgaggacaugggcaacggcugcuucaagaucuaccacaagugcgacaacgccugcaucggcuccauccgcaacggcaccuacgaccacgacgucuaccgcgacgaggcccucaacaaccgcuuccagaucaagggcgucgagcucaaguccggcuacaaggacuggauccucuggaucuccuucgccaucuccugcuuccuccucugcgucgcccuccucggcuucaucaugugggccugccagaagggcaacauccgcugcaacaucugcaucuga

SEQ ID NO: 103813 - RNA, 1701 nt, Artificial Sequence
  derived and/or modified CDS sequence (opt2) from hemagglutinin__InfluenzaA__AET10098
augaagaccaucaucgcccucuccuacauccucugccucgucuucgcccagaaguuccccggcaacgacaacuccaccgccacccucugccucggccaccacgccguccccaacggcaccaucgucaagaccaucaccaacgaccagaucgaggucaccaacgccaccgagcucguccagaacuccuccaccggcgagaucugcgacuccccccaccagaucaucgacggcgagaacugcacccucaucgacgcccuccucggcgacccccagugcgacggcuuccagaacaagaagugggaccucuucgucgagcgcuccaaggccuacuccaacugcuaccccuacgacguccccgacuacgccucccuccgcucccucgucgccuccuccggcacccucgaguucaacaacgaguccuucaacuggaccggcgucacccagaacggcaccuccuccgccugcauccgccgcuccaacaacuccuucuucucccgccucaacuggcucacccaccucaacuucaaguaccccgcccucaacgucaccaugcccaacaacgagcaguucgacaagcucuacaucuggggcguccaccaccccggcaccgacaaggaccagaucuuccucuacgcccaggccuccggccgcaucaccgucuccaccaagcgcucccagcaggccgucauccccaacaucggcucccgcccccgcguccgcaacauccccucccgcaucuccaucuacuggaccaucgucaagcccggcgacauccuccucaucaacuccaccggcaaccucaucgccccccgcggcuacuucaagauccgcuccggcaaguccuccaucaugcgcuccgacgcccccaucggcaagugcaacuccgagugcaucacccccaacggcuccauccccaacgacaagcccuuccagaacgucaaccgcaucaccuacggcgccugcccccgcuacgucaagcagaacacccucaagcucgccaccggcaugcgcaacguccccgagaagcagacccgcggcaucuucggcgccaucgccggcuucaucgagaacggcugggagggcauggucgacggcugguacggcuuccgccaccagaacuccgagggccgcggccaggccgccgaccucaaguccacccaggccgccaucgaccagaucaacggcaagcucaaccgccucaucggcaagaccaacgagaaguuccaccagaucgagaaggaguucuccgaggucgagggccgcauccaggaccucgagaaguacgucgaggacaccaagaucgaccucugguccuacaacgccgagcuccucgucgcccucgagaaccagcacaccaucgaccucaccgacuccgagaugaacaagcucuucgagaagaccaagaagcagcuccgcgagaacgccgaggacaugggcaacggcugcuucaagaucuaccacaagugcgacaacgccugcaucggcuccauccgcaacggcaccuacgaccacgacgucuaccgcgacgaggcccucaacaaccgcuuccagaucaagggcgucgagcucaaguccggcuacaaggacuggauccucuggaucuccuucgccaucuccugcuuccuccucugcgucgcccuccucggcuucaucaugugggccugccagaagggcaacauccgcugcaacaucugcaucuga

SEQ ID NO: 103814 - RNA, 1701 nt, Artificial Sequence; identical to SEQ ID NO: 102891
  derived and/or modified CDS sequence (opt2) from hemagglutinin__InfluenzaA__AET10099

SEQ ID NO: 103815 - RNA, 1701 nt, Artificial Sequence; identical to SEQ ID NO: 103018
  derived and/or modified CDS sequence (opt2) from hemagglutinin__InfluenzaA__AET10100

SEQ ID NO: 103816 - RNA, 1701 nt, Artificial Sequence
  derived and/or modified CDS sequence (opt2) from hemagglutinin__InfluenzaA__AET10101
augaagaccaucaucgcccucuccugcauccucugccucgucuucgcccagaagcuccccggcaacgacaacuccaccgccacccucugccucggccaccacgccguccccaacggcaccaucgucaagaccaucaccaacgaccagaucgaggucaccaacgccaccgagcucguccaguccuccuccaccggcgagaucugcgacuccccccaccagauccucgacggcgagaacugcacccucaucgacgcccuccucggcgacccccagugcgacggcuuccagaacaagaagugggaccucuucgucgagcgcuccaaggccuacuccaacugcuaccccuacgacguccccgacuacgccucccuccgcucccucgucgccuccuccggcacccucgaguucaacaacgaguccuucaacuggaccggcgucacccagaacggcaccuccuccgccugcauccgccgcuccaacaacuccuucuucucccgccucaacuggcucacccaccucaacuucaaguaccccgcccucaacgucaccaugcccaacaacgagcaguucgacaagcucuacaucuggggcguccaccaccccggcgccgacaaggaccagaucuuccucuacgcccaggccuccggccgcaucaccgucuccaccaagcgcucccagcaggccgucauccccaacaucggcucccgcccccgcguccgcaacauccccucccgcaucuccaucuacuggaccaucgucaagcccggcgacauccuccucaucaacuccaccggcaaccucaucgccccccgcggcuacuucaagauccgcuccggcaaguccuccaucaugcgcuccgacgcccccaucggcaagugcaacuccgagugcaucacccccaacggcuccauccccaacgacaagcccuuccagaacgucaaccgcaucaccuacggcgccugcccccgcuacgucaagcaguccacccucaagcucgccaccggcaugcgcaacguccccgagaagcagacccgcggcaucuucggcgccaucgccggcuucaucgagaacggcugggagggcauggucgacggcugguacggcuuccgccaccagaacuccgagggccgcggccaggccgccgaccucaaguccacccaggccgccaucgaccagaucaacggcaagcucaaccgccucaucggcaagaccaacgagaaguuccaccagaucgagaaggaguucuccgaggucgagggccgcauccaggaccucgagaaguacgucgaggacaccaagaucgaccucugguccuacaacgccgagcuccucgucgcccucgagaaccagcacaccaucgaccucaccgacuccgagaugaacaagcucuucgagaagaccaagaagcagcuccgcgagaacgccgaggacaugggcaacggcugcuucaccaucuaccacaagugcgacaacgccugcaucggcuccauccgcaacggcaccuacgaccacaacgucuaccgcgacgaggcccucaacaaccgcuuccagaucaagggcgucgagcucaaguccggcuacaaggacuggauccucuggaucuccuucgccaucuccugcuuccuccucugcgucgcccuccucggcuucaucaugugggccugccagaagggcaacauccgcugcaacaucugcaucuga

SEQ ID NO: 103817 - RNA, 1701 nt, Artificial Sequence
  derived and/or modified CDS sequence (opt2) from hemagglutinin__InfluenzaA__AET10102
augaagaccaucaucgcccucuccuacauccucugccucgucuucacccagaagcuccccggcaacgacaacuccaccgccacccucugccucggccaccacgccguccccaacggcaccaucgucaagaccaucaccaacgaccagaucgaggucaccaacgccaccgagcucguccaguccuccuccaccggcgagaucugcgacuccccccaccagauccucgacggcaagaacugcacccucaucgacgcccuccucggcgacccccagugcgacggcuuccagaacaagaagugggaccucuucgucgagcgcuccaaggccuacuccaacugcuaccccuucgacguccccgacuacgccucccuccgcucccucgucgccuccuccggcacccucgaguucaacaacgaguccuucaacuggaccggcgucacccagaacggcaccuccuccgccugcaugcgccgcuccaaguccuccuucuucucccgccucaacuggcucacccaccucaacuucaaguaccccgcccucaacgucaccaugcccaacgacgagcaguucgacaagcucuacaucuggggcguccaccaccccggcaccgacaaggaccagaucuuccucuacgcccaggccuccggccgcaucaccgucuccaccaagcgcucccagcagaccgucauccccaacaucggcucccgcccccgcauccgcaacauccccucccgcaucuccaucuacuggaccaucgucaagcccggcgacauccuccucaucaacuccaccggcaaccucaucgccccccgcggcuacuucaagauccgcuccggcaaguccuccaucaugcgcuccgacgcccccaucggcaagugcaacuccgagugcaucacccccaacggcuccauccccaacgacaagcccuuccagaacgucaaccgcaucaccuacggcgccugcccccgcuacgucaagcagaacacccucaagcucgccaccggcaugcgcaacguccccgagaagcagacccgcggcaucuucggcgccaucgccggcuucaucgagaacggcugggagggcauggucgacggcugguacggcuuccgccaccagaacuccgagggccgcggccaggccgccgaccucaaguccacccaggccgccaucgaccagaucaacggcaagcucaaccgccucaucggccgcaccaacgagaaguuccaccagaucgagaaggaguucuccgaggucgagggccgcauccaggaccucgagaaguacgucgaggacaccaagaucgaccucugguccuacaacgccgagcuccucgucgcccucgagaaccagcacaccaucgaccucaccgacuccgagaugaacaagcucuucgagaagacccgcaagcagcuccgcgagaacgccgaggacaugggcaacggcugcuucaagaucuaccacaagugcgacaacgccugcaucggcuccauccgcaacggcaccuacgaccacgacgucuaccgcgacgaggcccucaacaaccgcuuccagaucaagggcgucgagcucaaguccggcuacaaggacuggauccucuggaucuccuucgccaucuccugcuuccuccucugcgucgccucccucggcuucaucaugugggccugccagaagggcaacauccgcugcaacaucugcaucuga

SEQ ID NO: 103818 - RNA, 1701 nt, Artificial Sequence
  derived and/or modified CDS sequence (opt2) from hemagglutinin__InfluenzaA__AET10103
augaagaccaucaucgcccucuccuacauccucugccucgucuucgcccagaagcuccccggcaacgacaacuccaccgccacccucugccucggccaccacgccguccccaacggcaccaucgucaagaccaucaccaacgaccagaucgaggucaccaacgccaccgagcucguccagaacuccuccaccggcgagaucugcgacuccccccaccagauccucgacggcgagaacugcacccucaucgacgcccuccucggcgacccccagugcgacggcuuccagaacaagaagugggaccucuucgucgagcgcuccaaggccuacuccaacugcuaccccuacgacguccccgacuacgccucccuccgcucccucgucgccuccuccggcacccucgaguucaacaacgaguccuucaacuggaccggcgucacccagaacggcaccuccuccgccugcauccgccgcuccaacaacuccuucuucucccgccucaacuggcucacccaccucaacuucaaguaccccgcccucaacgucaccaugcccaacaacgagcaguucgacaagcucuacaucuggggcguccaccaccccggcaccgacaaggaccagaucuuccucuacgcccaggccuccggccgcaucaccgucuccaccaagcgcucccagcaggccgucauccccaacaucggcucccgcccccgcguccgcaacauccccucccgcaucuccaucuacuggaccaucgucaagcccggcgacauccuccucaucaacuccaccggcaaccucaucgccccccgcggcuacuucaagauccgcuccggcaaguccuccaucaugcgcuccgacgcccccaucggcaagugcaacuccgagugcaucacccccaacggcuccauccccaacgacaagcccuuccagaacgucaaccgcaucaccuacggcgccugcccccgcuacgucaagcagaacacccucaagcucgccaccggcaugcgcaacguccccgagaagcagacccgcggcaucuucggcgccaucgccggcuucaucgagaacggcugggagggcauggucgacggcugguacggcuuccgccaccagaacuccgagggccgcggccaggccgccgaccucaaguccacccaggccgccaucgaccagaucaacggcaagcucaaccgccucaucggcaagaccaacgagaaguuccaccagaucgagaaggaguucuccgaggucgagggccgcauccaggaccucgagaaguacgucgaggacaccaagaucgaccucugguccuacaacgccgagcuccucgucgcccucgagaaccagcacaccaucgaccucaccgacuccgagaugaacaagcucuucgagaagaccaagaagcagcuccgcgagaacgccgaggacaugggcaacggcugcuucaagaucuaccacaagugcgacaacgccugcaucggcuccauccgcaacggcaccuacgaccacgacgucuaccgcgacgaggcccucaacaaccgcuuccagaucaagggcgucgagcucaaguccggcuacaaggacuggauccucuggaucuccuucgccaucuccugcuuccuccucugcgucgcccuccucggcuucaucaugugggccugccagaagggcaacauccgcugcaacaucugcaucuga

SEQ ID NO: 103819 - RNA, 1701 nt, Artificial Sequence
  derived and/or modified CDS sequence (opt2) from hemagglutinin__InfluenzaA__AET10104
augaagaccaucaucgcccucuccuacauccucugccucgucuucgcccagaaguuccccggcaacgacaacuccaccgccacccucugccucggccaccacgccguccccaacggcaccaucgucaagaccaucaccaacgaccagaucgaggucaccaacgccaccgagcucguccagaacuccuccaccggcgagaucugcgacuccccccaccagaucaucgacggcgagaacugcacccucaucgacgcccuccucggcgacccccagugcgacggcuuccagaacaagaagugggaccucuucgucgagcgcuccaaggccuacuccaacugcuaccccuacgacguccccgacuacgccucccuccgcucccucgucgccuccuccggcacccucgaguucaacaacgaguccuucaacuggaccggcgucacccagaacggcaccuccuccgccugcauccgccgcuccaacaacuccuucuucucccgccucaacuggcucacccaccucaacuucaaguaccccgcccucaacgucaccaugcccaacaacgagcaguucgacaagcucuacaucuggggcguccaccaccccggcaccgacaaggaccagaucuuccucuacgcccaggccuccggccgcaucaccgucuccaccaagcgcucccagcaggccgucauccccaacaucggcucccgcccccgcguccgcaacauccccucccgcaucuccaucuacuggaccaucgucaagcccggcgacauccuccucaucaacuccaccggcaaccucaucgccccccgcggcuacuucaagauccgcuccggcaaguccuccaucaugcgcuccgacgcccccaucggcaagugcaacuccgagugcaucacccccaacggcuccauccccaacgacaagcccuuccagaacgucaaccgcaucaccuacggcgccugcccccgcuacgucaagcagaacacccucaagcucgccaccggcaugcgcaacguccccgagaagcagacccgcggcaucuucggcgccaucgccggcuucaucgagaacggcugggagggcauggucgacggcugguacggcuuccgccaccagaacuccgagggccgcggccaggccgccgaccucaaguccacccaggccgccaucgaccagaucaacggcaagcucaaccgccucaucggcaagaccaacgagaaguuccaccagaucgagaaggaguucuccgaggucgagggccgcauccaggaccucggcaaguacgucgaggacaccaagaucgaccucugguccuacaacgccgagcuccucgucgcccucgagaaccagcacaccaucgaccucaccgacuccgagaugaacaagcucuucgagaagaccaagaagcagcuccgcgagaacgccgaggacaugggcaacggcugcuucaagaucuaccacaagugcgacaacgccugcaucggcuccauccgcaacggcaccuacgaccacgacgucuaccgcgacgaggcccucaacaaccgcuuccagaucaagggcgucgagcucaaguccggcuacaaggacuggauccucuggaucuccuucgccaucuccugcuuccuccucugcgucgcccuccucggcuucaucaugugggccugccagaagggcaacauccgcugcaacaucugcaucuga

SEQ ID NO: 103820 - RNA, 1701 nt, Artificial Sequence
  derived and/or modified CDS sequence (opt2) from hemagglutinin__InfluenzaA__AET10105
augaagaccaucaucgcccucuccuacauccucugccucgucuucgcccaggagcuccccggcaacgacaacuccaccgccacccucugccucggccaccacgccguccccaacggcaccaucgucaagaccaucaccaacgaccagaucgaggucaccaacgccaccgagcucguccaguccuccuccaccggcgagaucugcaacuccccccaccagauccucgacggcgagaacugcacccucaucgacgcccuccucggcgacccccagugcgacggcuuccagaacaagaagugggaccucuucgucgagcgcuccaaggcccacuccaacugcuaccccuacgacguccccgacuacgccucccuccgcucccucgucgccuccuccggcacccucgaguucaacaacgaguccuucaacuggaccggcgucacccagaacggcaccuccuccgccugcauccgccgcuccaacaacuccuucuucucccgccucaacuggcucacccaccucaacuucaaguaccccgcccucaacgucaccaugcccaacaacgagcaguucgacaagcucuacaucuggggcguccaccaccccggcaccgacaaggaccagaucuuccucuacgcccaggccgccggccgcaucaccgucuccaccaagcgcucccagcaggccgucauccccaacaucggcucccgcccccgcguccgcaacauccccucccgcgucuccaucuacuggaccaucgucaagcccggcgacauccuccucaucaacuccaccggcaaccucaucgccccccgcggcuacuucaagauccgcuccggcaaguccuccaucaugcgcuccgacgcccccaucggcaagugcaacuccgccugcaucacccccaacggcuccauccccaacgacaagcccuuccagaacgucaaccgcaucaccuacggcgccugcccccgcuacgucaagcagaacacccucaagcucgccaccggcaugcgcaacguccccgagaagcagacccgcggcaucuucggcgccaucgccggcuucaucgagaacggcugggagggcauggucgacggcugguacggcuuccgccaccagaacuccgagggccgcggccaggccgccgaccucaaguccacccaggccgccaucgaccagaucaacggcaagcucaaccgccucaucggcaagaccaacgagaaguuccaccagaucgagaaggaguucuccgaggucgagggccgcauccaggaccucgagaaguacgucgaggacaccaagaucgaccucugguccuacaacgccgagcuccucgucgcccucgagaaccagcacaccaucgaccucaccgacuccgagaugaacaagcucuucgagaagaccaagaagcagcuccgcgagaacgccgaggacaugggcaacggcugcuucaagaucuaccacaagugcgacaacgccugcaucggcuccauccgcaacggcaccuacgaccacgacgucuaccgcgacgaggcccucaacaaccgcuuccagaucaagggcgucgagcucaaguccggcuacaaggacuggauccucuggaucuccuucgccaucuccugcuuccuccucugcgucgcccuccucggcuucaucaugugggccugccagaagggcaacauccgcugcaacaucugcaucuga

SEQ ID NO: 103821 - RNA, 1701 nt, Artificial Sequence
  derived and/or modified CDS sequence (opt2) from hemagglutinin__InfluenzaA__AET10106
augaagaccaucaucgcccucuccuacauccucugccucgucuucgcccagaagcuccccggcaacuacaacuccaccgccacccucugccucggccaccacgccguccccaacggcaccaucgucaagaccaucaccaacgaccagaucgaggucaccaacgccaccgagcucguccaguccuccuccaccggcgagaucugcaacuccccccaccagauccucgacggcgagaacugcacccucaucgacgcccuccucggcgacccccagugcgacggcuuccagaacaagaagugggaccucuucgucgagcgcuccaaggcccacuccaacugcuaccccuacgacguccccgacuacgccucccuccgcucccucgucgccuccuccggcacccucgaguucaacaacgaguccuucaacuggaccggcgucacccagaacggcaccuccuccgccugcauccgccgcuccaacaacuccuucuucucccgccucaacuggcucacccaccucaacuucaaguaccccgcccucaacgucaccaugcccaacaacgagcaguucgacaagcucuacaucuggggcguccaccaccccggcaccgacaaggaccagaucuuccucuacgcccaggccuccggccgcaucaccgucuccaccaagcgcucccagcaggccgucauccccaacaucggcucccgcccccgcguccgcaacauccccucccgcgucuccaucuacuggaccaucgucaagcccggcgacauccuccucaucaacuccaccggcaaccucaucgccccccgcggcuacuucaagauccgcuccggcaaguccuccaucaugcgcuccgacgcccccaucggcaagugcaacuccgccugcaucacccccaacggcuccauccccaacgacaagcccuuccagaacgucaaccgcaucaccuacggcgccugcccccgcuacgucaagcagaacacccucaagcucgccaccggcaugcgcaacguccccgagaagcagacccgcggcaucuucggcgccaucgccggcuucaucgagaacggcugggagggcauggucgacggcugguacggcuuccgccaccagaacuccgagggccgcggccaggccgccgaccucaaguccacccaggccgccaucgaccagaucaacggcaagcucaaccgccucaucggcaagaccaacgagaaguuccaccagaucgagaaggaguucuccgaggucgagggccgcauccaggaccucgagaaguacgucgaggacaccaagaucgaccucugguccuacaacgccgagcuccucgucgcccucgagaaccagcacaccaucgaccucaccgacuccgagaugaacaagcucuucgagaagaccaagaagcagcuccgcgagaacgccgaggacaugggcaacggcugcuucaagaucuaccacaagugcgacaacgccugcaucggcuccauccgcaacggcaccuacgaccacgacgucuaccgcgacgaggcccucaacaaccgcuuccagaucaagggcgucgagcucaaguccggcuacaaggacuggauccucuggaucuccuucgccaucuccugcuuccuccucugcgucgcccuccucggcuucaucaugugggccugccagaagggcaacauccgcugcaacaucugcaucuga

SEQ ID NO: 103822 - RNA, 1701 nt, Artificial Sequence
  derived and/or modified CDS sequence (opt2) from hemagglutinin__InfluenzaA__AET10107
augaagaccaucaucgcccucuccuacauccucugccucgucuucgcccaggagauccccggcaacgacaacuccaccgccacccucugccucggccaccacgccguccccaacggcaccaucgucaagaccaucaccaacgaccagaucgaggucaccaacgccaccgagcucguccaguccuccuccaccggcgagaucugcaacuccccccaccagauccucgacggcgagaacugcacccucaucgacgcccuccucggcgacccccagugcgacggcuuccagaacaagaagugggaccucuucgucgagcgcuccaaggcccacuccaacugcuaccccuacgacguccccgacuacgccucccuccgcucccucgucgccuccuccggcacccucgaguucaacaacgaguccuucaacuggaccggcgucacccagaacggcaccuccuccgccugcauccgccgcuccaacaacuccuucuucucccgccucaacuggcucacccaccucaacuucaaguaccccgcccucaacgucaccaugcccaacaacgagcaguucgacaagcucuacaucuggggcguccaccaccccggcaccgacaaggaccagaucuuccucuacgcccaggccuccggccgcaucaccgucuccaccaagcgcucccagcaggccgucauccccaacaucggcucccgcccccgcguccgcaacauccccucccgcgucuccaucuacuggaccaucgucaagcccggcgacauccuccucaucaacuccaccggcaaccucaucgccccccgcggcuacuucaagauccgcuccggcaaguccuccaucaugcgcuccgacgcccccaucggcaagugcaacuccgccugcaucacccccaacggcuccauccccaacgacaagcccuuccagaacgucaaccgcaucaccuacggcgccugcccccgcuacgucaagcagaacacccucaagcucgccaccggcaugcgcaacguccccgagaagcagacccgcggcaucuucggcgccaucgccggcuucaucgagaacggcugggagggcauggucgacggcugguacggcuuccgccaccagaacuccgagggccgcggccaggccgccgaccucaaguccacccaggccgccaucgaccagaucaacggcaagcucaaccgccucaucggcaagaccaacgagaaguuccaccagaucgagaaggaguucuccgaggucgagggccgcauccaggaccucgagaaguacgucgaggacaccaagaucgaccucugguccuacaacgccgagcuccucgucgcccucgagaaccagcacaccaucgaccucaccgacuccgagaugaacaagcucuucgagaagaccaagaagcagcuccgcgagaacgccgaggacaugggcaacggcugcuucaagaucuaccacaagugcgacaacgccugcaucggcuccauccgcaacggcaccuacgaccacgacgucuaccgcgacgaggcccucaacaaccgcuuccagaucaagggcgucgagcucaaguccggcuacaaggacuggauccucuggaucuccuucgccaucuccugcuuccuccucugcgucgcccuccucggcuucaucaugugggccugccagaagggcaacaucaagugcaacaucugcaucuga

SEQ ID NO: 103823 - RNA, 1701 nt, Artificial Sequence; identical to SEQ ID NO: 99447
  derived and/or modified CDS sequence (opt2) from hemagglutinin__InfluenzaA__AET10108

SEQ ID NO: 103824 - RNA, 1701 nt, Artificial Sequence; identical to SEQ ID NO: 103018
  derived and/or modified CDS sequence (opt2) from hemagglutinin__InfluenzaA__AET10109

SEQ ID NO: 103825 - RNA, 1701 nt, Artificial Sequence
  derived and/or modified CDS sequence (opt2) from hemagglutinin__InfluenzaA__AET10110
augaagaccaucaucgcccucuccuacauccucugccucgucuucgcccagaagcuccccggcaacgacaacuccaccgccacccucugccucggccaccacgccguccccaacggcaccaucgucaagaccaucaccaacgaccagaucgaggucaccaacgccaccgagcucguccaguccuccuccaccggcgagaucugcaacuccccccaccagauccucgacggcgagaacugcacccucaucgacgcccuccucggcgacccccagugcgacggcuuccagaacaagaagugggaccucuucgucgagcgcuccaaggccuacuccaacugcuaccccuacgacguccccgacuacgccucccuccgcucccucgucgccuccuccggcacccucgaguucaacaacgaguccuucaacuggaccggcgucacccagaacggcaccuccuccgccugcauccgccgcuccaacaacuccuucuucucccgccucaacuggcucacccaccucaacuucaaguaccccgcccucaacgucaccaugcccaacaacgagcaguucgacaagcucuacaucuggggcguccaccaccccggcaccgacaaggaccagaucuuccucuacgcccaggccuccggccgcaucaccgucuccaccaagcgcucccagcaggccgucauccccaacaucggcucccgcccccgcguccgcaacauccccucccgcgucuccaucuacuggaccaucgucaagcccggcgacauccuccucaucaacuccaccggcaaccucaucgccccccgcggcuacuucaagauccgcuccggcaaguccuccaucaugcgcuccgacgcccccaucggcaagugcaacuccgccugcaucacccccaacggcuccauccccaacgacaagcccuuccagaacgucaaccgcaucaccuacggcgccugcccccgcuacgucaagcagaacacccucaagcucgccaccggcaugcgcaacguccccgagaagcagacccgcggcaucuucggcgccaucgccggcuucaucgagaacggcugggagggcauggucgacggcugguacggcuuccgccaccagaacuccgagggccgcggccaggccgccgaccucaaguccacccaggccgccaucgaccagaucaacggcaagcucaaccgccucaucggcaagaccaacgagaaguuccaccagaucgagaaggaguucuccgaggucgagggccgcauccaggaccucgagaaguacgucgaggacaccaagaucgaccucugguccuacaacgccgagcuccucgucgcccucgagaaccagcacaccaucgaccucaccgacuccgagaugaacaagcucuucgagaagaccaagaagcagcuccgcgagaacgccgaggacaugggcaacggcugcuucaagaucuaccacaagugcgacaacgccugcaucggcuccauccgcaacggcaccuacgaccacgacgucuaccgcgacgaggcccucaacaaccgcuuccagaucaagggcgucgagcucaaguccggcuacaaggacuggauccucuggaucuccuucgccaucuccugcuuccuccucugcgucgcccuccucggcuucaucaugugggccugccagaagggcaacaucaagugcaacaucugcaucuga

SEQ ID NO: 103826 - RNA, 1701 nt, Artificial Sequence
  derived and/or modified CDS sequence (opt2) from hemagglutinin__InfluenzaA__AET10111
augaagaccaucaucgcccucuccuacauccucugccucgucuucgcccaggagauccccggcaacgacaacuccaccgccacccucugccucggccaccacgccguccccaacggcaccaucgucaagaccaucaccaacgaccagaucgaggucaccaacgccaccgagcucguccaguccuccuccaccggcgagaucugcaacuccccccaccagauccucgacggcgagaacugcacccucaucgacgcccuccucggcgacccccagugcgacggcuuccagaacaagaagugggaccucuucgucgagcgcuccaaggcccacuccaacugcuaccccuacgacguccccgacuacgccucccuccgcucccucgucgccuccuccggcacccucgaguucaacaacgaguccuucaacuggaccggcgucacccagaacggcaccuccuccgccugcauccgccgcuccaacaacuccuucuucucccgccucaacuggcucacccaccucaacuucaaguaccccgcccucaacgucaccaugcccaacaacgagcaguucgacaagcucuacaucuggggcguccaccaccccggcaccgacaaggaccagaucuuccucuacgcccaggccuccggccgcaucaccgucuccaccaagcgcucccagcaggccgucauccccaacaucggcucccgcccccgcguccgcaacauccccucccgcgucuccaucuacuggaccaucgucaagcccggcgacauccuccucuccaacuccaccggcaaccucaucggcccccgcggcuacuucaagauccgcuccggcaaguccuccaucaugcgcuccgacgcccccaucggcaagugcaacuccgccugcaucacccccaacggcuccauccccaacgacaagcccuuccagaacgucaaccgcaucaccuacggcgccugcccccgcuacgucaagcagaacacccucaagcucgccaccggcaugcgcaacguccccgagaagcagacccgcggcaucuucggcgccaucgccggcuucaucgagaacggcugggagggcauggucgacggcugguacggcuuccgccaccagaacuccgagggccgcggccaggccgccgaccucaaguccacccaggccgccaucgaccagaucaacggcaagcucaaccgccucaucggcaagaccaacgagaaguuccaccagaucgagaaggaguucuccgaggucgagggccgcauccaggaccucgagaaguacgucgaggacaccaagaucgaccucugguccuacaacgccgagcuccucgucgcccucgagaaccagcacaccaucgaccucaccgacuccgagaugaacaagcucuucgagaagaccaagaagcagcuccgcgagaacgccgaggacaugggcaacggcugcuucaagaucuaccacaagugcgacaacgccugcaucggcuccauccgcaacggcaccuacgaccacgacgucuaccgcgacgaggcccucaacaaccgcuuccagaucaagggcgucgagcucaaguccggcuacaaggacuggauccucuggaucuccuucgccaucuccugcuuccuccucugcgucgcccuccucggcuucaucaugugggccugccagaagggcaacauccgcugcaacaucugcaucuga

SEQ ID NO: 103827 - RNA, 1701 nt, Artificial Sequence
  derived and/or modified CDS sequence (opt2) from hemagglutinin__InfluenzaA__AET10113
augaagaccaucaucgcccucuccuacauccucugccucgucuucgcccaggagcuccccggcaacgacaacuccaccgccacccucugccucggccaccacgccguccagaacggcaccaucgucaagaccaucaccaacgaccagaucgaggucaccaacgccaccgagcucguccaguccuccuccaccggcgagaucugcaacuccccccaccagauccucgacggcgagaacugcacccucaucgacgcccuccucggcgacccccagugcgacggcuuccagaacaagaagugggaccucuucgucgagcgcuccaaggcccacuccaacugcuaccccuacgacguccccgacuacgccucccuccgcucccucgucgccuccuccggcacccucgaguucaacaacgaguccuucaacuggaccggcgucacccagaacggcaccuccuccgccugcauccgccgcuccaacaacuccuucuucucccgccucaacuggcucacccaccucaacuucaaguaccccgcccucaacgucaccaugcccaacaacgagcaguucgacaagcucuacaucuggggcguccaccaccccggcaccgacaaggaccagaucuuccucuacgcccaggccuccggccgcaucaccgucuccaccaagcgcucccagcaggccgucauccccaacaucggcucccgcccccgcguccgcaacauccccucccgcgucuccaucuacuggaccaucgucaagcccggcgacauccuccucaucaacuccaccggcaaccucaucgccccccgcggcuacuucaagauccgcuccggcaaguccuccaucaugcgcuccgacgcccccaucggcaagugcaacuccgccugcaucacccccaacggcuccauccccaacgacaagcccuuccagaacgucaaccgcaucaccuacggcgccugcccccgcuacgucaagcagaacacccucaagcucgccaccggcaugcgcaacguccccgagaagcagacccgcggcaucuucggcgccaucgccggcuucaucgagaacggcugggagggcauggucgacggcugguacggcuuccgccaccagaacuccgagggccgcggccaggccgccgaccucaaguccacccaggccgccaucgaccagaucaacggcaagcucaaccgccucaucggcaagaccaacgagaaguuccaccagaucgagaaggaguucuccgaggucgagggccgcauccaggaccucgagaaguacgucgaggacaccaagaucgaccucugguccuacaacgccgagcuccucgucgcccucgagaaccagcacaccaucgaccucaccgacuccgagaugaacaagcucuucgagaagaccaagaagcagcuccgcgagaacgccgaggacaugggcaacggcugcuucaagaucuaccacaagugcgacaacgccugcaucggcuccauccgcaacggcaccuacgaccacgacgucuaccgcgacgaggcccucaacaaccgcuuccagaucaagggcgucgagcucaaguccggcuacaaggacuggauccucuggaucuccuucgccaucuccugcuuccuccucugcgucgcccuccucggcuucaucaugugggccugccagaagggcaacauccgcugcaacaucugcaucuga

SEQ ID NO: 103828 - RNA, 1701 nt, Artificial Sequence
  derived and/or modified CDS sequence (opt2) from hemagglutinin__InfluenzaA__AET10114
augaagaccaucaucgcccucuccuacauccucugccucgucuucgcccaggagcuccccggcaacgacgacuccaccgccacccucugccucggccaccacgccguccccaacggcaccaucgucaagaccaucaccaacgaccagaucgaggucaccaacgccaccgagcucguccaguccuccuccaccggcgagaucugcaacuccccccaccagauccucgacggcgagaacugcacccucaucgacgcccuccucggcgacccccagugcgacggcuuccagaacaagaagugggaccucuucgucgagcgcuccaaggcccacuccaacugcuaccccuacgacguccccgacuacgccucccuccgcucccucgucgccuccuccggcacccucgaguucaacaacgaguccuucaacuggaccggcgucacccagaacggcaccuccuccgccugcauccgccgcuccaacaacuccuucuucucccgccucaacuggcucacccaccucaacuucaaguaccccgcccucaacgucaccaugcccaacaacgagcaguucgacaagcucuacaucuggggcguccaccaccccggcaccgacaaggaccagaucuuccucuacgcccaggccuccggccgcaucaccgucuccaccaagcgcucccagcaggccgucauccccaacaucggcucccgcccccgcguccgcaacauccccucccgcgucuccaucuacuggaccaucgucaagcccggcgacauccuccucaucaacuccaccggcaaccucaucgccccccgcggcuacuucaagauccgcuccggcaaguccuccaucaugcgcuccgacgcccccaucggcaagugcaacuccgccugcaucacccccaacggcuccaucuccaacgacaagcccuuccagaacgucaaccgcaucaccuacggcgccugcccccgcuacgucaagcagaacacccucaagcucgccaccggcaugcgcaacguccccgagaagcagacccgcggcaucuucggcgccaucgccggcuucaucgagaacggcugggagggcauggucgacggcugguacggcuuccgccaccagaacuccgagggccgcggccaggccgccgaccucaaguccacccaggccgccaucgaccagaucaacggcaagcucaaccgccucaucggcaagaccaacgagaaguuccaccagaucgagaaggaguucuccgaggucgagggccgcauccaggaccucgagaaguacgucgaggacaccaagaucgaccucugguccuacaacgccgagcuccucgucgcccucgagaaccagcacaccaucgaccucaccgacuccgagaugaacaagcucuucgagaagaccaagaagcagcuccgcgagaacgccgaggacaugggcaacggcugcuucaagaucuaccacaagugcgacaacgccugcaucggcuccauccgcaacggcaccuacgaccacgacgucuaccgcgacgaggcccucaacaaccgcuuccagaucaagggcgucgagcucaaguccggcuacaaggacuggauccucuggaucuccuucgccaucuccugcuuccuccucugcgucgcccuccucggcuucaucaugugggccugccagaagggcaacaucaugugcaacaucugcaucuga

SEQ ID NO: 103829 - RNA, 1698 nt, Artificial Sequence
  derived and/or modified CDS sequence (opt2) from hemagglutinin__InfluenzaA__AET50439
augaaggucaagcuccucguccuccucugcaccuucaccgccaccuacgccgacaccaucugcaucggcuaccacgccaacaacuccaccgacaccgucgacaccguccucgagaagaacgucaccgucacccacuccgucaaccuccucgagaacucccacaacggcaagcucugccuccucaagggcaucgccccccuccagcucggcaacugcuccgucgccggcuggauccucggcaaccccgagugcgagcuccucaucuccaaggaguccugguccuacaucgucgagaagcccaaccccgagaacggcaccugcuaccccggccacuucgccgacuacgaggagcuccgcgagcagcucuccuccgucuccuccuucgagcgcuucgagaucuuccccaaggaguccuccuggcccaaccacaccgucaccggcgucuccgccuccugcucccacaacggcgaguccuccuucuaccgcaaccuccucuggcucaccggcaagaacggccucuaccccaaccucuccaaguccuacgccaacaacaaggagaaggagguccucguccucuggggcguccaccacccccccaacaucggcaaccagaaggcccucuaccacaccgagaacgccuacgucuccgucgucuccucccacuacucccgcaaguucacccccgagaucgccaagcgccccaagguccgcgaccaggagggccgcaucaacuacuacuggacccuccucgagcccggcgacaccaucaucuucgaggccaacggcaaccucaucgccccccgcuacgccuucgcccucucccgcggcuucggcuccggcaucaucaacuccaacgcccccauggacaagugcgacgccaagugccagaccccccagggcgccaucaacuccucccuccccuuccagaacguccaccccgucaccaucggcgagugccccaaguacguccgcuccgccaagcuccgcauggucaccggccuccgcaacauccccuccauccagucccgcggccucuucggcgccaucgccggcuucaucgagggcggcuggaccggcauggucgacggcugguacggcuaccaccaccagaacgagcagggcuccggcuacgccgccgaccagaaguccacccagaacgccaucaacggcaucaccaacaaggucaacuccgucaucgagaagaugaacacccaguucaccgccgucggcaaggaguucaacaagcucgagcgccgcauggagaaccucaacaagaaggucgacgacggcuucaucgacaucuggaccuacaacgccgagcuccucguccuccucgagaacgagcgcacccucgacuuccacgacuccaacgucaagaaccucuacgagaaggucaagucccagcucaagaacaacgccaaggagaucggcaacggcugcuucgaguucuaccacaagugcaacgacgagugcauggaguccgucaagaacggcaccuacgacuaccccaaguacuccgaggaguccaagcucaaccgcgagaagaucgacggcgucaagcucgaguccaugggcgucuaccagauccucgccaucuacuccaccgucgccuccucccucguccuccucgucucccucggcgccaucuccuucuggaugugcuccaacggcucccuccagugccgcaucugcaucuga

SEQ ID NO: 103830 - RNA, 1698 nt, Artificial Sequence
  derived and/or modified CDS sequence (opt2) from hemagglutinin__InfluenzaA__AET50440
augaaggucaagcuccucguccuccucugcaccuucaccgccaccuacgccgacaccaucugcaucggcuaccacgccaacaacuccaccgacaccgucgacaccguccucgagaagaacgucaccgucacccacuccgucaaccuccucgagaacucccacaacggcaagcucugccuccucaagggcaucgccccccuccagcucggcaacugcuccgucgccggcuggauccucggcaaccccgagugcgagcuccucaucuccaaggaguccugguccuacaucgucgagaagcccaaccccgagaacggcaccugcuaccccggccacuucgccgacuacgaggagcuccgcgagcagcucuccuccgucuccuccuucgagcgcuucgagaucuuccccaaggaguccuccuggcccacccacaccgucaccggcgucuccgccuccugcucccacaacggcgaguccuccuucuaccgcaaccuccucuggcucaccggcaagaacggccucuaccccaaccucuccaaguccuacgccaacaacaaggagaaggagguccucguccucuggggcguccaccacccccccaacaucggcaaccagaaggcccucuaccacaccgagaacgccuacgucuccgucgucuccucccacuacucccgcaaguucacccccgagaucgccaagcgccccaagguccgcgaccaggagggccgcaucaacuacuacuggacccuccucgagcccggcgacaccaucaucuucgaggccaacggcaaccucaucgccccccgcuacgccuucgcccucucccgcggcuucggcuccggcaucaucaacuccaacgcccccauggacaagugcgacgccaagugccagaccccccagggcgccaucaacuccucccuccccuuccagaacguccaccccgucaccaucggcgagugccccaaguacguccgcuccgccaagcuccgcauggucaccggccuccgcaacauccccuccauccagucccgcggccucuucggcgccaucgccggcuucaucgagggcggcuggaccggcauggucgacggcugguacggcuaccaccaccagaacgagcagggcuccggcuacgccgccgaccagaaguccacccagaacgccaucaacggcaucaccaacaaggucaacuccgucaucgagaagaugaacacccaguucaccgccgucggcaaggaguucaacaagcucgagcgccgcauggagaaccucaacaagaaggucgacgacggcuucaucgacaucuggaccuacaacgccgagcuccucguccuccucgagaacgagcgcacccucgacuuccacgacuccaacgucaagaaccucuacgagaaggucaagucccagcucaagaacaacgccaaggagaucggcaacggcugcuucgaguucuaccacaagugcaacgacgagugcauggaguccgucaagaacggcaccuacgacuaccccaaguacuccgaggaguccaagcucaaccgcgagaagaucgacggcgucaagcucgaguccaugggcgucuaccagauccucgccaucuacuccaccgucgccuccucccucguccuccucgucucccucggcgccaucuccuucuggaugugcuccaacggcucccuccagugccgcaucugcaucuga

SEQ ID NO: 103831 - RNA, 1698 nt, Artificial Sequence
  derived and/or modified CDS sequence (opt2) from hemagglutinin__InfluenzaA__AET50441
augaaggucaagcuccucguccuccucugcaccuucaccgccaccuacgccgacaccaucugcaucggcuaccacgccaacaacuccaccgacaccgucgacaccguccucgagaagaacgucaccgucacccacuccgucaaccuccucgagaacucccacaacggcaagcucugccuccucaagggcaucgccccccuccagcucggcaacugcuccgucgccggcuggauccucggcaaccccgagugcgagcuccucaucuccaaggaguccugguccuacaucgucgagaagcccaaccccgagaacggcaccugcuaccccggccacuucgccgacuacgaggagcuccgcgagcagcucuccuccgucuccuccuucgagcgcuucgagaucuuccccaaggaguccuccuggcccacccacaccgucaccggcgucuccgccuccugcucccacaacggcgaguccuccuucuaccgcaaccuccucuggcucaccggcaagaacggccucuaccccaaccucuccaaguccuacgccaacaacaaggagaaggagguccucguccucuggggcguccaccacccccccaacaucggcaaccagaaggcccucuaccacaccgagaacgccuacgucuccgucgucuccucccacuacucccgcaaguucacccccgagaucgccaagcgccccaagguccgcggccaggagggccgcaucaacuacuacuggacccuccucgagcccggcgacaccaucaucuucgaggccaacggcaaccucaucgccccccgcuacgccuucgcccucucccgcggcuucggcuccggcaucaucaacuccaacgcccccauggacaagugcgacgccaagugccagaccccccagggcgccaucaacuccucccuccccuuccagaacguccaccccgucaccaucggcgagugccccaaguacguccgcuccgccaagcuccgcauggucaccggccuccgcaacauccccuccauccagucccgcggccucuucggcgccaucgccggcuucaucgagggcggcuggaccggcauggucgacggcugguacggcuaccaccaccagaacgagcagggcuccggcuacgccgccgaccagaaguccacccagaacgccaucaacggcaucaccaacaaggucaacuccgucaucgagaagaugaacacccaguucaccgccgucggcaaggaguucaacaagcucgagcgccgcauggagaaccucaacaagaaggucgacgacggcuucaucgacaucuggaccuacaacgccgagcuccucguccuccucgagaacgagcgcacccucgacuuccacgacuccaacgucaagaaccucuacgagaaggucaagucccagcucaagaacaacgccaaggagaucggcaacggcugcuucgaguucuaccacaagugcaacgacgagugcauggaguccgucaagaacggcaccuacgacuaccccaaguacuccgaggaguccaagcucaaccgcgagaagaucgacggcgucaagcucgaguccaugggcgucuaccagauccucgccaucuacuccaccgucgccuccucccucguccuccucgucucccucggcgccaucuccuucuggaugugcuccaacggcucccuccagugccgcaucugcaucuga

SEQ ID NO: 103832 - RNA, 1698 nt, Artificial Sequence
  derived and/or modified CDS sequence (opt2) from hemagglutinin__InfluenzaA__AET50442
augaaggucaagcuccucguccuccucugcaccuucaccgccaccuacgccgacaccaucugcaucggcuaccacgccaacaacuccaccgacaccgucgacaccguccucgagaagaacgucaccgucacccacuccgucaaccuccucgagaacucccacaacggcaagcucugccuccucaagggcaucgccccccuccagcucggcaacugcuccgucgccggcuggauccucggcaaccccgagugcgagcuccucaucuccaaggaguccugguccuacaucgucgagaagcccaaccccgagaacggcaucugcuaccccggccacuucgccgacuacgaggagcuccgcgagcagcucuccuccgucuccuccuucgagcgcuucgagaucuuccccaaggaguccuccuggcccacccacaccgucaccggcgucuccgccuccugcucccacaacggcgaguccuccuucuaccgcaaccuccucuggcucaccggcaagaacggccucuaccccaaccucuccaaguccuacgccaacaacaaggagaaggagguccucguccucuggggcguccaccacccccccaacaucggcaaccagaaggcccucuaccacaccgagaacgccuacgucuccgucgucuccucccacuacucccgcaaguucacccccgagaucgccaagcgccccaagguccgcggccaggagggccgcaucaacuacuacuggacccuccucgagcccggcgacaccaucaucuucgaggccaacggcaaccucaucgccccccgcuacgccuucgcccucucccgcggcuucggcuccggcaucaucaacuccaacgcccccauggacaagugcgacgccaagugccagaccccccagggcgccaucaacuccucccuccccuuccagaacguccaccccgucaccaucggcgagugccccaaguacguccgcuccgccaagcuccgcauggucaccggccuccgcaacauccccuccauccagucccgcggccucuucggcgccaucgccggcuucaucgagggcggcuggaccggcauggucgacggcugguacggcuaccaccaccagaacgagcagggcuccggcuacgccgccgaccagaaguccacccagaacgccaucaacggcaucaccaacaaggucaacuccgucaucgagaagaugaacacccaguucaccgccgucggcaaggaguucaacaagcucgagcgccgcauggagaaccucaacaagaaggucgacgacggcuucaucgacaucuggaccuacaacgccgagcuccucguccuccucgagaacgagcgcacccucgacuuccacgacuccaacgucaagaaccucuacgagaaggucaagucccagcucaagaacaacgccaaggagaucggcaacggcugcuucgaguucuaccacaagugcaacgacgagugcauggaguccgucaagaacggcaccuacgacuaccccaaguacuccgaggaguccaagcucaaccgcgagaagaucgacggcgucaagcucgaguccaugggcgucuaccagauccucgccaucuacuccaccgucgccuccucccucguccuccucgucucccucggcgccaucuccuucuggaugugcuccaacggcucccuccagugccgcaucugcaucuga

SEQ ID NO: 103833 - RNA, 1698 nt, Artificial Sequence
  derived and/or modified CDS sequence (opt2) from hemagglutinin__InfluenzaA__AET84163
augaaggucaagcuccucguccuccucugcaccuucaccgccaccuacgccgacaccaucugcaucggcuaccacgccaacaacuccaccgacaccgucgacaccguccucgagaagaacgucaccgucacccacuccgucaaccuccucgagaacucccacaacggcaagcucugccuccucaagggcaucgccccccuccagcucggcaacugcuccgucgccggcuggauccucggcaaccccgagugcgagucccucaucuccaaggaguccugguccuacaucgucgagaagcccaaccccgagaacggcaccugcuaccccggccacuucgccgacuacgaggagcuccgcgagcagcucuccuccgucuccuccuucgagcgcuucgagaucuuccccaaggaguccuccuggcccaaccacaccgucaccggcgucuccgccuccugcucccacaacggcgaguccuccuucuaccgcaaccuccucuggcucaccggcaagaacggccucuaccccaaccucuccaaguccuacgccaacaacaaggagaaggagguccucguccucuggggcguccaccacccccccuccaucuccaaccagaagacccucuaccacaccgagaacgccuacgucuccgucgucuccucccacuacucccgcaaguucacccccgaggucgccaagcgccccaagguccgcgaccaggagggccgcaucaacuacuacuggacccuccucgagcccggcgacaccaucaucuucgaggccaacggcaaccucaucgccccccgcuacgccuucgcccucucccgcggcuucggcuccggcaucaucaacuccaacgcccccauggacaagugcgacgccaagugccagaccccccagggcgccaucaacuccucccuccccuuccagaacguccaccccgucaccaucggcgagugccccaaguacguccgcuccgccaagcuccgcauggucaccggccuccgcaacauccccuccauccagucccgcggccucuucggcgccaucgccggcuucaucgagggcggcuggaccggcauggucgacggcugguacggcuaccaccaccagaacgagcagggcuccggcuacgccgccgaccagaaguccacccagaacgccaucaacggcaucaccaacaaggucaacuccgucaucgagaagaugaacacccaguucaccgccgucggcaaggaguucaacaagcucgagcgccgcauggagaaccucaacaagaaggucgacgacggcuucaucgacaucuggaccuacaacgccgagcuccucguccuccucgagaacgagcgcacccucgacuuccacgacuccaacgucaagaaccucuacgagaaggucaagucccagcucaagaacaacgccaaggagaucggcaacggcugcuucgaguucuaccacaagugcaacgacgagugcauggaguccgucaagaacggcaccuacgacuaccccaaguacuccgaggaguccaagcucaaccgcgagaagaucgacggcgucaagcucgaguccaugggcgucuaccagauccucgccaucuacuccaccgucgccuccucccucguccuccucgucucccucggcgccaucuccuucuggaugugcuccaacggcucccuccagugccgcaucugcaucuga

SEQ ID NO: 103834 - RNA, 1698 nt, Artificial Sequence
  derived and/or modified CDS sequence (opt2) from hemagglutinin__InfluenzaA__AET84174
augaaggucaagcuccucguccuccucugcaccuucaccgccaccuacgccgacaccaucugcaucggcuaccacgccaacaacuccaccgacaccgucgacaccguccucgagaagaacgucaccgucacccacuccgucaaccuccucgagaacucccacaacggcaagcucugccuccucaagggcaucgccccccuccagcucggcaacugcuccgucgccggcuggauccucggcaaccccgagugcgagcuccucaucuccaaggaguccugguccuacaucgucgagaagcccaaccccgagaacggcaccugcuaccccggccacuucgccgacuacgaggagcuccgcgagcagcucuccuccgucuccuccuucgagcgcuucgagaucuuccccaaggaguccuccuggcccaaccacaccgucaccggcgucuccgccuccugcucccacaacggcgaguccuccuucuaccgcaaccuccucuggcucaccggcaagaacggccucuaccccaaccucuccaaguccuacgccaacaacaaggagaaggagguccucguccucuggggcguccaccacccccccaacaucgucgaccagaagacccucuaccgcaccgagaacgccuacgucuccgucgucuccucccacuacucccgcaaguucacccccgagaucgccaagcgccccaagguccgcgaccaggagggccgcaucaacuacuacuggacccuccucgagcccggcgacaccaucaucuucgaggccaacggcaaccucaucgccccccgcuacgccuucgcccucauccgcggcuucggcuccggcaucaucaacuccaacgcccccaugggcaagugcgacgccaagugccagaccccccagggcgccaucaacuccucccuccccuuccagaacguccaccccgucaccaucggcgagugccccaaguacguccgcuccgccaagcuccgcauggucaccggccuccgcaacauccccuccauccagucccgcggccucuucggcgccaucgccggcuucaucgagggcggcuggaccggcauggucgacggcugguacggcuaccaccaccagaacgagcagggcuccggcuacgccgccgaccagaaguccacccagaacgccaucaacggcaucaccaacaaggucaacuccgucaucgagaagaugaacacccaguucaccgccgucggcaaggaguucaacaagcucgagcgccgcauggagaaccucaacaagaaggucgacgacggcuucaucgacaucuggaccuacaacgccgagcuccucguccuccucgagaacgagcgcacccucgacuuccacgacuccaacgucaagaaccucuacgagaaggucaagucccagcucaagaacaacgccaaggagaucggcaacggcugcuucgaguucuaccacaagugcaacgacgagugcauggaguccgucaagaacggcaccuacgacuaccccaaguacuccgaggaguccaagcucaaccgcgagaagaucgacggcgucaagcucgaguccaugggcgucuaccagauccucgccaucuacuccaccgucgccuccucccucguccuccucgucucccucggcgccaucuccuucuggaugugcuccaacggcucccuccagugccgcaucugcaucuga

SEQ ID NO: 103835 - RNA, 1698 nt, Artificial Sequence
  derived and/or modified CDS sequence (opt2) from hemagglutinin__InfluenzaA__AET84196
augaaggucaagcuccucguccuccucugcaccuucaccgccaccuacgccgacaccaucugcaucggcuaccacgccaacaacuccaccgacaccgucgacaccguccucgagaagaacgucaccgucacccacuccgucaaccuccucgagaacucccacaacggcaagcucugccuccucaagggcaucgccccccuccagcucggcaacugcuccgucgccggcuggauccucggcaaccccgagugcgagucccucaucuccaaggaguccugguccuacaucgucgagaagcccaaccccgagaacggcaccugcuaccccggccacuucgccgacuacgaggagcuccgcgagcagcucuccuccgucuccuccuucgagcgcuucgagaucuuccccaaggaguccuccuggcccaaccacaccgucaccggcgucuccgccuccugcucccacaacggcgaguccuccuucuaccgcaaccuccucuggcucacccgcaagaacggccucuaccccacccucuccaaguccuacgccaacaacaaggagaaggagguccucguccucuggggcguccaccacccccccuccaucaacgaccagaagacccucuaccacaccgagaacgccuacgucuccgucgucuccucccacuacucccgcaaguucacccccgagaucgccaagcgccccaagguccgcgaccaggagggccgcaucaacuacuacuggacccuccucgagcccggcgacaccaucaucuucgaggccaacggcaaccucaucgccccccgcuacgccuucgcccucucccgcggcuucggcuccggcaucaucaacuccuccgcccccauggacaagugcgacgccaagugccagaccccccagggcgccaucaacuccucccuccccuuccagaacguccaccccgucaccaucggcgagugccccaaguacguccgcuccgccaagcuccgcauggucaccggccuccgcaacauccccuccauccagucccgcggccucuucggcgccaucgccggcuucaucgagggcggcuggaccggcauggucgacggcugguacggcuaccaccaccagaacgagcagggcuccggcuacgccgccgaccagaaguccacccagaacgccaucaacggcaucaccaacaaggucaacuccgucaucgagaagaugaacacccaguucaccgccgucggcaaggaguucaacaagcucgagcgccgcauggagaaccucaacaagaaggucgacgacggcuucaucgacaucuggaccuacaacgccgagcuccucguccuccucgagaacgagcgcacccucgacuuccacaacuccaacgucaagaaccucuacgagaaggucaagucccagcucaagaacaacgccaaggagaucggcaacggcugcuucgaguucuaccacaagugcaacgacgagugcauggaguccgucaagaacggcaccuacgacuaccccaaguacuccgaggaguccaagcucaaccgcgagaagaucgacggcgucaagcucgaguccaugggcgucuaccagauccucgccaucuacuccaccgucgccuccucccucguccuccucgucucccucggcgccaucuccuucuggaugugcuccaacggcucccuccagugccgcaucugcaucuga

SEQ ID NO: 103836 - RNA, 1698 nt, Artificial Sequence
  derived and/or modified CDS sequence (opt2) from hemagglutinin__InfluenzaA__AET84207
augaaggucaagcuccucguccuccucugcaccuucaccgccaccuacgccgacaccaucugcaucggcuaccacgccaacaacuccaccgacaccgucgacaccguccucgagaagaacgucaccgucacccacuccgucaaccuccucgagaacucccacaacggcaagcucugccuccucaagggcaucgccccccuccagcucggcaacugcuccgucgccggcuggauccucggcaaccccgagugcgagcuccucaucuccaaggaguccugguccuacaucgucgagaagcccaaccccgagaacggcaccugcuaccccggccacuucgccgacuacgaggagcuccgcgagcagcucuccuccguccccuccuucgagcgcuucgagaucuuccccaaggaguccuccuggcccaaccacaccgucaccggcgucuccgccuccugcucccacaacggcgaguccuccuucuaccgcaaccuccucuggcucaccggcaagaacggccucuaccccaaccucuccaaguccuacgccaacaacaaggagaaggagguccucguccucuggggcguccaccacccccccuccaucaacgaccagaagacccucuaccacaccgagaacgccuacgucuccgucgucuccucccacuacucccgcaaguucacccccgagaucgccaagcgccccaagguccgcgaccaggagggccgcaucaacuacuacuggacccuccucgagccccgcgacaccaucaucuucgaggccaacggcaaccucaucgccccccgcuacgccuucgcccucucccgcggcuucggcuccggcaucaucaacuccaacgcccccauggacaagugcgacgccaagugccagaccccccagggcgccaucaacuccucccuccccuuccagaacguccaccccgucaccaucggcgagugccccaaguacguccgcuccgccaagcuccgcauggucaccggccuccgcaacauccccuccauccagucccgcggccucuucggcgccaucgccggcuucaucgagggcggcuggaccggcauggucgacggcugguacggcuaccaccaccagaacgagcagggcuccggcuacgccgccgaccagaaguccacccagaacgccaucaacggcaucaccaacaaggucaacuccgucaucgagaagaugaacacccaguucaccgccgucggcaaggaguucaacaagcucgagcgccgcauggagaaccucaacaagaaggucgacgacggcuucaucgacaucuggaccuacaacgccgagcuccucguccuccucgagaacgagcgcacccucgacuuccacgacuccaacgucaagaaccucuacgagaaggucaagucccagcucaagaacaacgccaaggagaucggcaacggcugcuucgaguucuaccacaagugcaacgacgagugcauggaguccgucaagaacggcaccuacgacuaccccaaguacuccgaggaguccaagcucaaccgcgagaagaucgacggcgucaagcucgaguccaugggcgucuaccagauccucgccaucuacuccaccgucgccuccucccucguccuccucgucucccucggcgccaucuccuucuggaugugcuccaacggcucccuccagugccgcaucugcaucuga

SEQ ID NO: 103837 - RNA, 1698 nt, Artificial Sequence
  derived and/or modified CDS sequence (opt2) from hemagglutinin__InfluenzaA__AET84218
augaaggucaagcuccucguccuccucugcaccuucaccgccaccuacgccgacaccaucugcaucggcuaccacgccaacaacuccaccgacaccgucgacaccguccucgagaagaacgucaccgucacccacuccgucaaccuccucgagaacucccacaacggcaagcucugccuccucaagggcaucgccccccuccagcucggcaacugcuccgucgccggcuggauccucggcaaccccgagugcgagcuccucaucuccaaggaguccugguccuacaucgucgagaagcccaaccccgagaacggcaccugcuaccccggccacuucgccgacuacgaggagcuccgcgagcagcucuccuccgucuccuccuucgagcgcuucgagaucuuccccaaggaguccuccuggcccaaccacaccgucaccggcgucuccgccuccugcucccacaacggcgaguccuccuucuaccgcaaccuccucuggcucaccggcaagaacggccucuaccccaaccucuccaaguccuacgccaacaacaaggagaaggagguccucguccucuggggcguccaccacccccccaacaucuccaaccagaagacccucuaccacaccgagaacgccuacgucuccgucgucuccucccacuacucccgcaaguucacccccgagaucgccaagcgccccaagguccgcgaccaggagggccgcaucaacuacuacuggacccuccucgagcccggcgacaccaucaucuucgaggccuccggcaaccucaucgccccccgcuacgccuucgcccucucccgcggcuucggcuccggcaucaucaacuccaacgcccccauggacaagugcgacgccaagugccagaccccccagggcgccaucaacuccucccuccccuuccagaacguccaccccgucaccaucggcgagugccccaaguacguccgcuccgccaagcuccgcauggucaccggccuccgcaacauccccuccauccagucccgcggccucuucggcgccaucgccggcuucaucgagggcggcuggaccggcauggucgacggcugguacggcuaccaccaccagaacgagcagggcuccggcuacgccgccgaccagaaguccacccagaacgccaucaacggcaucaccaacaaggucaacuccgucaucgagaagaugaacacccaguucaccgccgucggcaaggaguucaacaagcucgagcgccgcauggagaaccucaacaagaaggucgacgacggcuucaucgacaucuggaccuacaacgccgagcuccucguccuccucgagaacgagcgcacccucgacuuccacgacuccaacgucaagaaccucuacgagaaggucaagucccagcucaagaacaacgccaaggagaucggcaacggcugcuucgaguucuaccacaagugcaacgacgagugcauggaguccgucaagaacggcaccuacgacuaccccaaguacuccgaggaguccaagcucaaccgcgagaagaucgacggcgucaagcucgaguccaugggcgucuaccagauccucgccaucuacuccaccgucgccuccucccucguccuccucgucucccucggcgccaucuccuucuggaugugcuccaacggcucccuccagugccgcaucugcaucuga

SEQ ID NO: 103838 - RNA, 1698 nt, Artificial Sequence
  derived and/or modified CDS sequence (opt2) from hemagglutinin__InfluenzaA__AET84229
augaaggucaagcuccucguccuccucugcaccuucaccgccaccuacgccgacaccaucugcaucggcuaccacgccaacaacuccaccgacaccgucgacaccguccucgagaagaacgucaccgucacccacuccgucaaccuccucgagaacucccacaacggcaagcucugccuccucaagggcaucgccccccuccagcucggcaacugcuccgucgccggcuggauccucggcaaccccgagugcgagcuccucaucuccaaggaguccugguccuacaucgucgagaagcccaaccccgagaacggcaccugcuaccccggccacuucgccgacuacgaggagcuccgcgagcagcucuccuccgucuccuccuucgagcgcuucgagaucuuccccaaggaguccuccuggcccaaccacaccgucaccggcgucuccgccuccugcucccacaacggcgaguccuccuucuaccgcaaccuccucuggcucaccggcaagaacggccucuaccccacccucuccaaguccuacgccaacaacaaggagaaggagguccucguccucuggggcguccaccacccccccaacaucgucgaccagaagacccucuaccgcaccgagaacgccuacgucuccgucgucuccucccacuacucccgcaaguucacccccgagaucgccaagcgccccaagguccgcgaccaggagggccgcaucaacuacuacuggacccuccucgagcccggcgacaccaucaucuucgaggccaacggcaaccucaucgccccccgcuacgccuucgcccucucccgcggcuucggcuccggcaucaucaacuccaacgcccccaugggcaagugcgacgccaagugccagaccccccagggcgccaucaacuccucccuccccuuccagaacguccaccccgucaccaucggcgagugccccaaguacguccgcuccgccaagcuccgcauggucaccggccuccgcaacaucccccccauccagucccgcggccucuucggcgccaucgccggcuucaucgagggcggcuggaccggcauggucgacggcugguacggcuaccaccaccagaacgagcagggcuccggcuacgccgccgaccagaaguccacccagaacgccaucaacggcaucaccaacaaggucaacuccgucaucgagaagaugaacacccaguucaccgccgucggcaaggaguucaacaagcucgagcgccgcauggagaaccucaacaagaaggucgacgacggcuucaucgacaucuggaccuacaacgccgagcuccucguccuccucgagaacgagcgcacccucgacuuccacgacuccaacgucaagaaccucuacgagaaggucaagucccagcucaagaacaacgccaaggagaucggcaacggcugcuucgaguucuaccacaagugcaacgacgagugcauggaguccgucaagaacggcaccuacgacuaccccaaguacuccgaggaguccaagcucaaccgcgagaagaucgacggcgucaagcucgaguccaugggcgucuaccagauccucgccaucuacuccaccgucgccuccucccucguccuccucgucucccucggcgccaucuccuucuggaugugcuccaacggcucccuccagugccgcaucugcaucuga

SEQ ID NO: 103839 - RNA, 1698 nt, Artificial Sequence
  derived and/or modified CDS sequence (opt2) from hemagglutinin__InfluenzaA__AET84240
augaaggucaagcuccucguccuccucugcaccuucaccgccaccuacgccgacaccaucugcaucggcuaccacgccaacaacuccaccgacaccgucgacaccguccucgagaagaacgucaccgucacccacuccgucaaccuccucgagaacucccacaacggcaagcucugccuccucaagggcaucgccccccuccagcucggcaacugcuccgucgccggcuggauccucggcaaccccgagugcgagcuccucaucuccaaggaguccugguccuacaucgucgagaagcccaaccccgagaacggcaccugcuaccccggcuacuucgccgacuacgaggagcuccgcgagcagcucuccuccgucuccuccuucgagcgcuucgagaucuuccccaaggaguccuccuggcccaaccacaccgucaccggcgucuccgccuccugcucccacaacggcgaguccuccuucuaccgcaaccuccucuggcucaccggcaagaacggccucuaccccaaccucuccaaguccuacgccaacaacaaggagaaggagguccucguccucuggggcguccaccacccccccaacaucgucgaccagaagacccucuaccgcaccgagaacgccuacgucuccgucgucuccucccacuacucccgcaaguucacccccgagaucgccaagcgccccaagguccgcgaccaggagggccgcaucaacuacuacuggacccuccucgagcccggcgacaccaucaucuucgaggccaacggcaaccucaucgccccccgcuacgccuucgcccucucccgcggcuucggcuccggcaucaucaacuccaacgcccccaugggcaagugcgacgccaagugccagaccccccagggcgccaucaacuccucccuccccuuccagaacguccaccccgucaccaucggcgagugccccaaguacguccgcuccgccaagcuccgcauggucaccggccuccgcaacauccccuccauccagucccgcggccucuucggcgccaucgccggcuucaucgagggcggcuggaccggcauggucgacggcugguacggcuaccaccaccagaacgagcagggcuccggcuacgccgccgaccagaaguccacccagaacgccaucaacggcaucaccaacaaggucaacuccgucaucgagaagaugaacacccaguucaccgccgucggcaaggaguucaacaagcucgagcgccgcauggagaaccucaacaagaaggucgacgacggcuucaucgacaucuggaccuacaacgccgagcuccucguccuccucgagaacgagcgcacccucgacuuccacgacuccaacgucaagaaccucuacgagaaggucaagucccagcucaagaacaacgccaaggagaucggcaacggcugcuucgaguucuaccacaagugcaacaacgagugcauggaguccgucaagaacggcaccuacgacuaccccaaguacuccgaggaguccaagcucaaccgcgagaagaucgacggcgucaagcucgaguccaugggcgucuaccagauccucgccaucuacuccaccgucgccuccucccucguccuccucgucucccucggcgccaucuccuucuggaugugcuccaacggcucccuccagugccgcaucugcaucuga

SEQ ID NO: 103840 - RNA, 1698 nt, Artificial Sequence
  derived and/or modified CDS sequence (opt2) from hemagglutinin__InfluenzaA__AET84251
augaaggucaagcuccucguccuccucugcaccuucaccgccaccuacgccgacaccaucugcaucggcuaccacgccaacaacuccaccgacaccgucgacaccguccucgagaagaacgucaccgucacccacuccgucaaccuccucgagaacucccacaacggcaagcucugccuccucaagggcaucgccccccuccagcucggcaacugcuccgucgccggcuggauccucggcaaccccgagugcgagcuccucaucuccaaggaguccugguccuacaucgucgagaagcccaaccccgagaacggcaccugcuaccccggccacuucgccgacuacgaggagcuccgcgagcagcucuccuccgucuccuccuucgagcgcuucgagaucuuccccaaggaguccuccuggcccaaccacaccgucaccggcgucuccgccuccugcucccacaacggcgaguccuccuucuaccgcaaccuccucuggcucaccggcaagaacggccucuaccccaaccucuccaaguccuacgccaacaacaaggagaaggagguccucguccucuggggcguccaccacccccccaacaucgucaaccagaagacccucuaccgcaccgagaacgccuacgucuccgucgucuccucccacuacucccgcaaguucacccccgagaucgccaagcgccccaagguccgcgaccaggagggccgcaucaacuacuacuggacccuccucgagcccggcgacaccaucaucuucgaggccaacggcaaccucaucgccccccgcuacgccuucgcccucucccgcggcuucggcuccggcaucaucaacuccaacgcccccaugggcaagugcgacgccaagugccagaccccccacggcgccaucaacuccugccuccccuuccagaacguccaccccgucaccaucggcgagugccccaaguacguccgcuccgccaagcuccgcauggucaccggccuccgcaacauccccuccauccagucccgcggccucuucggcgccaucgccggcuucaucgagggcggcuggaccggcauggucgacggcugguacggcuaccaccaccagaacgagcagggcuccggcuacgccgccgaccagaaguccacccagaacgccaucaacggcaucaccaacaaggucaacuccgucaucgagaagaugaacacccaguucaccgccgucggcaaggaguucaacaagcucgagcgccgcauggagaaccucaacaagaaggucgacgacggcuucaucgacaucuggaccuacaacgccgagcuccucguccuccucgagaacgagcgcacccucgacuuccacgacuccaacgucaagaaccucuacgagaaggucaagucccagcucaagaacaacgccaaggagaucggcaacggcugcuucgaguucuaccacaagugcaacgacgagugcauggaguccgucaagaacggcaccuacgacuaccccaaguacuccgaggaguccaagcucaacaaggagaagaucgacggcgucaagcucgaguccaugggcgucuaccagauccucgccaucuacuccaccgucgccuccucccucguccuccucgucucccucggcgccaucuccuucuggaugugcuccaacggcucccuccagugccgcaucugcaucuga

SEQ ID NO: 103841 - RNA, 1698 nt, Artificial Sequence
  derived and/or modified CDS sequence (opt2) from hemagglutinin__InfluenzaA__AET84262
augaaggucaagcuccucguccuccucugcaccuucaccgccaccuacgccgacaccaucugcaucggcuaccacgccaacaacuccaccgacaccgucgacaccguccucgagaagaacgucaccgucacccacuccgucaaccuccucgagaacucccacaacggcaagcucugccuccucaagggcaucgccccccuccagcucggcaacugcuccgucgccggcuggauccucggcaaccccgagugcgagcuccucaucuccaaggaguccugguccuacaucgucgagaagcccaaccccgagaacggcaccugcuaccccggccacuucgccgacuacgaggagcuccgcgagcagcucuccuccgucuccuccuucgagcgcuucgagaucuuccccaaggaguccuccuggcccaaccacaccgucaccggcgucuccgccuccugcucccacaacggcgaguccuccuucuaccgcaaccuccucuggcucaccggcaagaacggccucuaccccaaccucuccaaguccuacgccaacaacaaggagaaggagguccucguccucuggggcguccaccacccccccaacaucgucgaccagaagacccucuaccgcaccgagaacgccuacgucuccgucgucuccucccacuacucccgcaaguucacccccgagaucgccaagcgccccaagguccgcgaccaggagggccgcaucaacuacuacuggacccuccucgagcccggcgacaccaucaucuucgaggccaacggcaaccucaucgccccccgcuacgccuucgcccucucccgcggcuucggcuccggcaucaucaacuccaacgcccccauggacaagugcgacgccaagugccagaccccccacggcgccaucaacuccugccuccccuuccagaacguccaccccgucaccaucggcgagugccccaaguacguccgcuccgccaagcuccgcauggucaccggccuccgcaacauccccuccauccagucccgcggccucuucggcgccaucgccggcuucaucgagggcggcuggaccggcauggucgacggcugguacggcuaccaccaccagaacgagcagggcuccggcuacgccgccgaccagaaguccacccagaacgccaucaacggcaucaccaacaaggucaacuccgucaucgagaagaugaacacccaguucaccgccgucggcaaggaguucaacaagcucgagcgccgcauggagaaccucaacaagaaggucgacgacggcuucaucgacaucuggaccuacaacgccgagcuccucguccuccucgagaacgagcgcacccucgacuuccacgacuccaacgucaagaaccucuacgagaaggucaagucccagcucaagaacaacgccaaggagaucggcaacggcugcuucgaguucuaccacaagugcaacgacgagugcauggaguccgucaagaacggcaccuacgacuaccccaaguacuccgaggaguccaagcucaaccgcgagaagaucgacggcgucaagcucgaguccaugggcgucuaccagauccucgccaucuacuccaccgucgccuccucccucguccuccucgucucccucggcgccaucuccuucuggaugugcuccaacggcucccuccagugccgcaucugcaucuga

SEQ ID NO: 103842 - RNA, 1698 nt, Artificial Sequence; identical to SEQ ID NO: 103769
  derived and/or modified CDS sequence (opt2) from hemagglutinin__InfluenzaA__AET84284

SEQ ID NO: 103843 - RNA, 1698 nt, Artificial Sequence
  derived and/or modified CDS sequence (opt2) from hemagglutinin__InfluenzaA__AET84306
augaaggucaagcuccucguccuccucugcaccuucaccgccaccuacgccgacaccaucugcaucggcuaccacgccaacaacuccaccgacaccgucgacaccguccucgagaagaacgucaccgucacccacuccgucaaccuccucgagaacucccacaacggcaagcucugccuccucaagggcaucgccccccuccagcucggcaacugcuccgucgccggcuggauccucggcaaccccgagugcgagcuccucaucuccaaggaguccugguccuacaucgucgagaagcccaaccccgagaacggcaccugcuaccccggccacuucgccgacuacgaggagcuccgcgagcagcucuccuccgucuccuccuucgagcgcuucgagaucuuccccaaggaguccuccuggcccaaccacaccgucaccggcgucuccgccuccugcucccacaacggcgaguccuccuucuaccgcaaccuccucuggcucaccggcaagaacggccucuaccccaaccucuccaaguccuacgccaacaacaaggagaaggagguccucguccucuggggcguccaccacccccccaacaucggcaaccagaaggcccucuaccacaccgagaacgccuacgucuccgucgucuccucccacuacuccaucaaguucacccccgagaucgccaagcgccccaagguccgcgaccaggagggccgcaucaacuacuacuggacccuccucgagcccggcgacaccaucaucuucgaggccaacggcaaccucaucgccccccgcuacgccuucgcccucucccgcggcuucggcuccggcaucaucaacuccaacgcccccauggacaagugcgacgccaagugccagaccccccagggcgccaucaacuccucccuccccuuccagaacguccaccccgucaccaucggcgagugccccaaguacguccgcuccgccaagcuccgcauggucaccggccuccgcaacauccccuccauccagucccgcggccucuucggcgccaucgccggcuucaucgagggcggcuggaccggcauggucgacggcugguacggcuaccaccaccagaacgagcagggcuccggcuacgccgccgaccagaaguccacccagaacgccaucaacggcaucaccaacaaggucaacuccgucaucgagaagaugaacacccaguucaccgccgucggcaaggaguucaacaagcucgagcgccgcauggagaaccucaacaagaaggucgacgacggcuucaucgacaucuggaccuacaacgccgagcuccucguccuccucgagaacgagcgcacccucgacuuccacgacuccaacgucaagaaccucuacgagaaggucaagucccagcucaagaacaacgccaaggagaucggcaacggcugcuucgaguucuaccacaagugcaacgacgagugcauggaguccgucaagaacggcaccuacgacuaccccaaguacuccgaggaguccaagcucaaccgcgagaagaucgacggcgucaagcucgaguccaugggcgucuaccagauccucgccaucuacuccaccgucgccuccucccucguccuccucgucucccucggcgccaucuccuucuggaugugcuccaacggcucccuccagugccgcaucugcaucuga

SEQ ID NO: 103844 - RNA, 1698 nt, Artificial Sequence
  derived and/or modified CDS sequence (opt2) from hemagglutinin__InfluenzaA__AET84339
augaaggucaagcuccucguccuccucugcaccuucaccgccaccuacgccgacaccaucugcaucggcuaccacgccaacaacuccaccgacaccgucgacaccguccucgagaagaacgucaccgucacccacuccgucaaccuccucgagaacucccacaacggcaagcucugccuccucaagggcaucgccccccuccagcucggcaacugcuccgucgccggcuggauccucggcaaccccgagugcgagcuccucaucuccaaggaguccugguccuacaucgucgagaagcccaaccccgagaacggcaccugcuaccccggccacuucgccgacuacgaggagcuccgcgagcagcucuccuccgucuccuccuucgagcgcuucgagaucuuccccaaggaguccuccuggcccaaccacaccgucaccggcgucuccgccuccugcucccacaacggcgagcgcuccuucuaccgcaaccuccucuggcucaccggcaagaacggccucuaccccaaccucuccaaguccuacgccaacaacaaggagaaggagguccucguccucuggggcguccaccacccccccaacaucggcaaccagaagacccucuaccacaccgagaacgccuacgucuccgucgucuccucccacuacucccgcaaguucacccccgagaucgccaagcgccccaagguccgcgaccaggagggccgcaucaacuacuacuggacccuccucgagcccggcgacaccaucaucuucgaggccaacggcaaccucaucgccccccgcuacgccuucgcccucucccgcggcuucggcuccggcaucaucaacuccaacgcccccauggacaagugcgacgccaagugccagaccccccagggcgccaucaacuccucccuccccuuccagaacguccaccccgucaccaucggcgagugccccaaguacguccgcuccgccaagcuccgcauggucaccggccuccgcaacauccccuccauccagucccgcggccucuucggcgccaucgccggcuucaucgagggcggcuggaccggcauggucgacggcugguacggcuaccaccaccagaacgagcagggcuccggcuacgccgccgaccagaaguccacccagaacgccaucaacggcaucaccaacaaggucaacuccgucaucgagaagaugaacacccaguucaccgccgucggcaaggaguucaacaagcucgagcgccgcauggagaaccucaacaagaaggucgacgacggcuucaucgacaucuggaccuacaacgccgagcuccucguccuccucgagaacgagcgcacccucgacuuccacgacuccaacgucaagaaccucuacgagaaggucaagucccagcucaagaacaacgccaaggagaucggcaacggcugcuucgaguucuaccacaagugcaacgacgagugcauggaguccgucaagaacggcaccuacgacuaccccaaguacuccgaggaguccaagcucaaccgcgagaagaucgacggcgucaagcucgaguccaugggcgucuaccagauccucgccaucuacuccaccgucgccuccucccucguccuccucgucucccucggcgccaucuccuucuggaugugcuccaacggcucccuccagugccgcaucugcaucuga

SEQ ID NO: 103845 - RNA, 1698 nt, Artificial Sequence; identical to SEQ ID NO: 103844
  derived and/or modified CDS sequence (opt2) from hemagglutinin__InfluenzaA__AET84361

SEQ ID NO: 103846 - RNA, 1698 nt, Artificial Sequence
  derived and/or modified CDS sequence (opt2) from hemagglutinin__InfluenzaA__AET84372
augaaggucaagcuccucguccuccucugcaccuucaccgccaccuacgccgacaccaucugcaucggcuaccacgccaacaacuccaccgacaccgucgacaccguccucgagaagaacgucaccgucacccacuccgucaaccuccucgagaacucccacaacggcaagcucugccuccucaagggcaucgccccccuccagcucggcaacugcuccgucgccggcuggauccucggcaaccccgagugcgagcuccucaucuccaaggaguccugguccuacaucgucgagaagcccaaccccgagaacggcaccugcuaccccggccacuucgccgacuacgaggagcuccgcgagcagcucuccuccgucuccuccuucgagcgcuucgagaucuuccccaaggaguccuccuggcccaaccacaccgucaccggcgucuccgccuccugcucccacaacggcgagcgcuccuucuaccgcaaccuccucuggcucaccggcaagaacggccucuaccccaaccucuccaaguccuacgccaacaacaaggagaaggagguccucguccucuggggcguccaccacccccccaacaucggcgaccagaagacccucuaccacaccgagaacgccuacgucuccgucgucuccucccacuacucccgcaaguucacccccgagaucgccaagcgccccaagguccgcgaccaggagggccgcaucaacuacuacuggacccuccucgagcccggcgacaccaucaucuucgaggccaacggcaaccucaucgccccccgcuacgccuucgcccucucccgcggcuucggcuccggcaucaucaacuccaacgcccccauggacaagugcgacgccaagugccagaccccccagggcgccaucaacuccucccuccccuuccagaacguccaccccgucaccaucggcgagugccccaaguacguccgcuccgccaagcuccgcauggucaccggccuccgcaacauccccuccauccagucccgcggccucuucggcgccaucgccggcuucaucgagggcggcuggaccggcauggucgacggcugguacggcuaccaccaccagaacgagcagggcuccggcuacgccgccgaccagaaguccacccagaacgccaucaacggcaucaccaacaaggucaacuccgucaucgagaagaugaacacccaguucaccgccgucggcaaggaguucaacaagcucgagcgccgcauggagaaccucaacaagaaggucgacgacggcuucaucgacaucuggaccuacaacgccgagcuccucguccuccucgagaacgagcgcacccucgacuuccacgacuccaacgucaagaaccucuacgagaaggucaagucccagcucaagaacaacgccaaggagaucggcaacggcugcuucgaguucuaccacaagugcaacgacgagugcauggaguccgucaagaacggcaccuacgacuaccccaaguacuccgaggaguccaagcucaaccgcgagaagaucgacggcgucaagcucgaguccaugggcgucuaccagauccucgccaucuacuccaccgucgccuccucccucguccuccucgucucccucggcgccaucuccuucuggaugugcuccaacggcucccuccagugccgcaucugcaucuga

SEQ ID NO: 103847 - RNA, 1698 nt, Artificial Sequence
  derived and/or modified CDS sequence (opt2) from hemagglutinin__InfluenzaA__AET84394
augaaggucaagcuccucguccuccucugcaccuucaccgccaccuacgccgacaccaucugcaucggcuaccacgccaacaacuccaccgacaccgucgacaccguccucgagaagaacgucaccgucacccacuccgucaaccuccucgagaacucccacaacggcaagcucugccuccucaagggcaucgccccccuccagcucggcaacugcuccgucgccggcuggauccucggcaaccccgagugcgagcuccucaucuccaaggaguccugguccuacaucgucgagaagcccaaccccgagaacggcaccugcuaccccggccacuucgccgacuacgaggagcuccgcgagcagcucuccuccgucuccuccuucgagcgcuucgagaucuuccccaaggaguccuccuggcccaaccacaccgucaccggcgucuccgccuccugcucccacaacggcgagcgcuccuucuaccgcaaccuccucuggcucaccggcaagaacggccucuaccccaaccucuccaaguccuacgccaacaacaaggagaaggagguccucguccucuggggcguccaccacccccccgacaucggcaaccagaagacccucuaccacaccgagaacgccuacgucuccgucgucuccucccacuacucccgcaaguucacccccgagaucgccaagcgccccaagguccgcgaccaggagggccgcaucaacuacuacuggacccuccucgagcccggcgacaccaucaucuucgaggccaacggcaaccucaucgccccccgcuacgccuucgcccucucccgcggcuucggcuccggcaucaucaacuccaacgcccccauggacaagugcgacgccaagugccagaccccccagggcgccaucaacuccucccuccccuuccagaacguccaccccgucaccaucggcgagugccccaaguacguccgcuccgagaagcuccgcauggucaccggccuccgcaacauccccuccauccagucccgcggccucuucggcgccaucgccggcuucaucgagggcggcuggaccggcauggucgacggcugguacggcuaccaccaccagaacgagcagggcuccggcuacgccgccgaccagaaguccacccagaacgccaucaacggcaucaccaacaaggucaacuccgucaucgagaagaugaacacccaguucaccgccgucggcaaggaguucaacaagcucgagcgccgcauggagaaccucaacaagaaggucgacgacggcuucaucgacaucuggaccuacaacgccgagcuccucguccuccucgagaacgagcgcacccucgacuuccacgacuccaacgucaagaaccucuacgagaaggucaagucccagcucaagaacaacgccaaggagaucggcaacggcugcuucgaguucuaccacaagugcaacgacgagugcauggaguccgucaagaacggcaccuacgacuaccccaaguacuccgaggaguccaagcucaaccgcgagaagaucgacggcgucaagcucgaguccaugggcgucuaccagauccucgccaucuacuccaccgucgccuccucccucguccuccucgucucccucggcgccaucuccuucuggaugugcuccaacggcucccuccagugccgcaucugcaucuga

SEQ ID NO: 103848 - RNA, 1698 nt, Artificial Sequence; identical to SEQ ID NO: 101552
  derived and/or modified CDS sequence (opt2) from hemagglutinin__InfluenzaA__AET84405

SEQ ID NO: 103849 - RNA, 1698 nt, Artificial Sequence
  derived and/or modified CDS sequence (opt2) from hemagglutinin__InfluenzaA__AET84416
augaaggucaagcuccucguccuccucugcaccuucaccgccaccuacgccgacaccaucugcaucggcuaccacgccaacaacuccaccgacaccgucgacaccguccucgagaagaacgucaccgucacccacuccgucaaccuccucgagaacucccacaacggcaagcucugccuccucaagggcaucgccccccuccagcucggcaacugcuccgucgccggcuggauccucggcaaccccgagugcgagcuccucaucuccaaggaguccugguccuacaucgucgagaagcccaaccccgagaacggcaccugcuaccccggccacuucgccgacuacgaggagcuccgcgagcagcucuccuccgucuccuccuucgagcgcuucgagaucuuccccaaggaguccuccuggcccaaccacaccgucaccggcgucuccgccuccugcucccacaacggcgagcgcuccuucuaccgcaaccuccucuggcucaccggcaagaacggccucuaccccacccucuccaaguccuacgccaacaacaaggagaaggagguccucguccucuggggcguccaccacccccccgacaucggcgaccagaagacccucuaccacaccgagaacgccuacgucuccgucgucuccucccacuacucccgcaaguucacccccgagaucgccaagcgccccaagguccgcgaccaggagggccgcaucaacuacuacuggacccuccucgagcccggcgacaccaucaucuucgaggccaacggcaaccucaucgccccccgcuacgccuucgcccucucccgcggcuucggcuccggcaucaucaacuccaacgcccccauggacaagugcgacgccaagugccagaccccccagggcgccaucaacuccucccuccccuuccagaacguccaccccgucaccaucggcgagugccccaaguacguccgcuccgccaagcuccgcauggucaccggccuccgcaacauccccuccauccagucccgcggccucuucggcgccaucgccggcuucaucgagggcggcuggaccggcauggucgacggcugguacggcuaccaccaccagaacgagcagggcuccggcuacgccgccgaccagaaguccacccagaacgccaucaacggcaucaccaacaaggucaacuccgucaucgagaagaugaacacccaguucaccgccgucggcaaggaguucaacaagcucgagcgccgcauggagaaccucaacaagaaggucgacgacggcuucaucgacaucuggaccuacaacgccgagcuccucguccuccucgagaacgagcgcacccucgacuuccacgacuccaacgucaagaaccucuacgagaaggucaagucccagcucaagaacaacgccaaggagaucggcaacggcugcuucgaguucuaccacaagugcaacgacgagugcauggaguccgucaagaacggcaccuacgacuaccccaaguacuccgaggaguccaagcucaaccgcgagaagaucgacggcgucaagcucgaguccaugggcgucuaccagauccucgccaucuacuccaccgucgccuccucccucguccuccucgucucccucggcgccaucuccuucuggaugugcuccaacggcucccuccagugccgcaucugcaucuga

SEQ ID NO: 103850 - RNA, 1698 nt, Artificial Sequence
  derived and/or modified CDS sequence (opt2) from hemagglutinin__InfluenzaA__AET84427
augaaggucaagcuccucguccuccucugcaccuucaccgccaccuacgccgacaccaucugcaucggcuaccacgccaacaacuccaccgacaccgucgacaccguccucgagaagaacgucaccgucacccacuccgucaaccuccucgagaacucccacaacggcaagcucugccuccucaagggcaucgccccccuccagcucggcaacugcuccgucgccggcuggauccucggcaaccccgagugcgagcuccucaucuccaaggaguccugguccuacaucgucgagaagcccaaccccgagaacggcaccugcuaccccggccacuucgccgacuacgaggagcuccgcgagcagcucuccuccgucuccuccuucgagcgcuucgagaucuuccccaaggaguccuccuggcccaaccacaccgucaccggcgucuccgccuccugcucccacaacggcgaguccuccuucuaccgcaaccuccucuggcucaccggcaagaacggccucuaccccaaccucuccaaguccuacgccaacaacaaggagaaggagguccucguccucuggggcguccaccacccccccaacaucggcaaccagaagacccucuaccacaccgagaacgccuacgucuccgucgucuccucccacuacucccgcaaguucacccccgagaucgccaagcgccccaagguccgcgaccaggagggccgcaucaacuacuacuggacccuccucgagcccggcgacaccaucaucuucgaggccaacggcaaccucaucgccccccgcuacgccuucgcccucucccgcggcuucggcuccggcaucaucaacuccaacgcccccauggacaagugcgacgccaagugccagaccccccagggcgccaucaacuccucccuccccuuccagaacguccaccccgucaccaucggcgagugccccaaguacguccgcuccgccaagcuccgcauggucaccggccuccgcaacauccccuccauccagucccgcggccucuucggcgccaucgccggcuucaucgagggcggcuggaccggcauggucgacggcugguacggcuaccaccaccagaacgagcagggcuccggcuacgccgccgaccagaaguccacccagaacgccaucaacggcaucaccaacaaggucaacuccgucaucgagaagaugaacacccaguucaccgccgucggcaaggaguucaacaagcucgagcgccgcauggagaaccucaacaagaaggucgacgacggcuucaucgacaucuggaccuacaacgccgagcuccucguccuccucgagaacgagcgcacccucgacuuccacgacuccaacgucaagaaccucuacgagaaggucaagucccagcucaagaacaacgccaaggagaucggcaacggcugcuucgaguucuaccacaagugcaacgacgagugcauggaguccgucaagaacggcaccuacgacuaccccaaguacuccgaggaguccaagcucaaccgcgagaagaucgacggcgucaagcucgaguccaugggcgucuaccagauccucgccaucuacuccaccgucgccuccucccucguccuccucgucucccucggcgccaucuccuucuggaugugcuccaacggcucccuccagugccgcaucugcaucuga

SEQ ID NO: 103851 - RNA, 1698 nt, Artificial Sequence
  derived and/or modified CDS sequence (opt2) from hemagglutinin__InfluenzaA__AET84438
augaaggucaagcuccucguccuccucugcaccuucaccgccaccuacgccgacaccaucugcaucggcuaccacgccaacaacuccaccgacaccgucgacaccguccucgagaagaacgucaccgucacccacuccgucaaccuccucgagaacucccacaacggcaagcucugccuccucaagggcaucgccccccuccagcucggcaacugcuccgucgccggcuggauccucggcaaccccgagugcgagcuccucaucuccaaggaguccugguccuacaucgucgagaagcccaaccccgagaacggcaccugcuaccccggccacuucgccgacuacgaggagcuccgcgagcagcucuccuccgucuccuccuucgagcgcuucgagaucuuccccaaggaguccuccuggcccaaccacaccgucaccggcgucuccgccuccugcucccacaacggcgaguccuccuucuaccgcaaccuccucuggcucaccggcaagaacggccucuaccccaaccucuccaaguccuacgccaacaacaaggagaaggagguccucguccucuggggcguccaccacccccccaacaucggcguccagaagacccucuacaacaccgagaacgccuacgucuccgucgucuccucccacuacucccgcaaguucacccccgagaucgccaagcgccccaagguccgcgaccaggagggccgcaucaacuacuacuggacccuccucgagcccggcgacaccaucauguucgaggccaacggcaaccucaucgccccccgcuacgccuucgcccucucccgcggcuucggcuccggcaucaucaacuccaacgcccccauggacaagugcgacgccaagugccagaccccccagggcgccaucaacuccucccuccccuuccagaacguccaccccgucaccaucggcgagugccccaaguacguccgcuccgccaagcuccgcauggucaccggccuccgcaacauccccuccauccagucccgcggccucuucggcgccaucgccggcuucaucgagggcggcuggaccggcauggucgacggcugguacggcuaccaccaccagaacgagcagggcuccggcuacgccgccgaccagaaguccacccagaacgccaucaacggcaucaccaacaaggucaacuccgucaucgagaagaugaacacccaguucaccgccgucggcaaggaguucaacaagcucgagcgccgcauggagaaccucaacaagaaggucgacgacggcuucaucgacaucuggaccuacaacgccgagcuccucguccuccucgagaacgagcgcacccucgacuuccacgacuccaacgucaagaaccucuacgagaaggucaagucccagcucaagaacaacgccaaggagaucggcaacggcugcuucgaguucuaccacaagugcaacgacgagugcauggaguccgucaagaacggcaccuacgacuaccccaaguacuccgaggaguccaagcucaaccgcgagaagaucgacggcgucaagcucgaguccaugggcgucuaccagauccucgccaucuacuccaccgucgccuccucccucguccuccucgucucccucggcgccaucuccuucuggaugugcuccaacggcucccuccagugccgcaucugcaucuga

SEQ ID NO: 103852 - RNA, 1698 nt, Artificial Sequence
  derived and/or modified CDS sequence (opt2) from hemagglutinin__InfluenzaA__AET84449
augaaggucaagcuccucguccuccucugcaccuucaccgccaccuacgccgacaccaucugcaucggcuaccacgccaacaacuccaccgacaccgucgacaccguccucgagaagaacgucaccgucacccacuccgucaaccuccucgaggacucccacaacggcaagcucugccuccucaagggcaucgccccccuccagcucggcaacugcuccgucgccggcuggauccucggcaaccccgagugcgagcuccucaucucccgcgaguccugguccuacaucgucgagaagcccaaccccgagaacggcaccugcuaccccggccacuucgccgacuacgaggagcuccgcgagcagcucuccuccgucuccuccuucgagcgcuucgagaucuuccccaaggaguccuccuggcccaaccacaccaccaccggcgucuccgccuccugcucccacaacggcgaguccuccuucuacaagaaccuccucuggcucaccggcaagaacggccucuaccccaaccucuccaaguccuacgccaacaacaaggagaaggagguccucguccucuggggcguccaccacccccccaacaucggcgaccagcgcgcccucuaccacaccgagaacgccuacgucuccgucgucuccucccacuacucccgcaaguucacccccgagaucgccaagcgccccaagguccgcgaccaggagggccgcaucaacuacuacuggacccuccucgagcccggcgacaccaucaucuucgaggccaacggcaaccucaucgccccccgcuacgccuucgcccucucccgcggcuucggcuccggcaucaucaacuccaacgcccccauggacggcugcgacgccaagugccagaccccccagggcgccaucaacuccucccuccccuuccagaacguccaccccgucaccaucggcgagugccccaaguacguccgcuccgccaagcuccgcauggucaccggccuccgcaacauccccuccauccagucccgcggccucuucggcgccaucgccggcuucaucgagggcggcuggaccggcauggucgacggcugguacggcuaccaccaccagaacgagcagggcuccggcuacgccgccgaccagaaguccacccagaacgccaucaacggcaucaccaacaaggucaacuccgucaucgagaagaugaacacccaguucaccgccgucggcaaggaguucaacaagcucgagcgccgcauggagaaccucaacaagaaggucgacgacggcuucaucgacaucuggaccuacaacgccgagcuccucguccuccucgagaacgagcgcacccucgacuuccacgacuccaacgucaagaaccucuacgagaaggucaagucccagcucaagaacaacgccaaggagaucggcaacggcugcuucgaguucuaccacaagugcaacgacgagugcauggaguccgucaagaacggcaccuacgacuaccccaaguacuccgaggaguccaagcucaaccgcgagaagaucgacggcgucaagcucgaguccaugggcgucuaccagauccucgccaucuacuccaccgucgccuccucccucguccuccucgucucccucggcgccaucuccuucuggaugugcuccaacggcucccuccagugccgcaucugcaucuga

SEQ ID NO: 103853 - RNA, 1701 nt, Artificial Sequence
  derived and/or modified CDS sequence (opt2) from hemagglutinin__InfluenzaA__AET98600
augaagaccaucaucgcccucuccuacauccucugccucgucuucgcccagaagcuccccggcaacgacaacuccaccgccacccucugccucggccaccacgccguccccaacggcaccaucgucaagaccaucaccaacgaccagaucgaggucaccaacgccaccgagcucguccaguccuccuccaccggcgagaucugcgacuccccccaccagauccucgacggcgagaacugcacccucaucgacgcccuccucggcgacccccagugcgacggcuuccagaacaagaagugggaccucuucgucgagcgcuccaaggccuacuccaacugcuaccccuacgacguccccgacuacgccucccuccgcucccucgucgccuccuccggcacccucgaguucaacaacgaguccuucaacuggaccggcgucacccagaacggcaccuccuccgccugcauccgccgcuccaacaacuccuucuucucccgccucaacuggcucacccaccucaacuucaaguaccccgcccucaacgucaccguccccaacaacgagcaguucgacaagcucuacaucuggggcguccaccaccccggcaccgacaaggaccagaucuuccucuacgcccaggccuccggccgcaucaccgucuccaccaagcgcucccagcaggccgucauccccaacaucggcucccgcccccgcguccgcaacauccccucccgcaucuccaucuacuggaccaucgucaagcccggcgacauccuccucaucaacuccaccggcaaccucaucgccccccgcggcuacuucaagauccgcuccggcaaguccuccaucaugcgcuccgacgcccccaucggcaagugcaacuccgagugcaucacccccaacggcuccauccccaacgacaagcccuuccagaacgucaaccgcaucaccuacggcgccugcccccgcuacgucaagcaguccacccucaagcucgccaccggcaugcgcaacguccccgagaagcagacccgcggcaucuucggcgccaucgccggcuucaucgagaacggcugggagggcauggucgacggcugguacggcuuccgccaccagaacuccgagggccgcggccaggccgccgaccucaaguccacccaggccgccaucgaccagaucaacggcaagcucaaccgccucaucggcaagaccaacgagaaguuccaccagaucgagaaggaguucuccgaggucgagggccgcauccaggaccucgagaaguacgucgaggacaccaagaucgaccucugguccuacaacgccgagcuccucgucgcccucgagaaccagcacaccaucgaccucaccgacuccgagaugaacaagcucuucgagaagaccaagaagcagcuccgcgagaacgccgaggacaugggcaacggcugcuucaccaucuaccacaagugcgacaacgccugcaucggcuccauccgcaacggcaccuacgaccacaacgucuaccgcgacgaggcccucaacaaccgcuuccagaucaagggcgucgagcucaaguccggcuacaaggacuggauccucuggaucuccuucgccaucuccugcuuccuccucugcgucgcccuccucggcuucaucaugugggccugccagaagggcaacauccgcugcaacaucugcaucuga

SEQ ID NO: 103854 - RNA, 1701 nt, Artificial Sequence
  derived and/or modified CDS sequence (opt2) from hemagglutinin__InfluenzaA__AEV76874
augaaggccauccucgucguccuccucuacaccuucgccaccgccaacgccgacacccucugcaucggcuaccacgccaacaacuccaccgacaccgucgacaccguccucgagaagaacgucaccgucacccacuccgucaaccuccucgaggacaagcacaacggcaagcucugcaagcuccgcggcgucgccccccuccaccucggcaagugcaacaucgccggcuggauccucggcaaccccgagugcgaguccuucuccaccgccuccuccugguccuacaucgucgagaccuccuccuccgacaacggcaccugcuaccccggcgacuucaucgacuacgaggagcuccgcgagcagcucuccuccgucuccuccuucgagcgcuucgagaucuuccccaagaccuccuccuggcccaaccacgacuccaacaagggcgucaccgccgccugcccccacgccggcgccaagggcuucuacaagaaccucaucuggcucgucaagaagggcaacuccuaccccaagcucuccaaguccuacaucaacgacaagggcaaggagguccucguccucuggggcauccaccaccccuccaccaccgccgaccagcagucccucuaccagaacgccgacaccuacgucuucgucggcaccucccgcuacuccaagaaguucaaccccgagaucgagauccgccccaagguccgcgaccaggagggccgcaugaacuacuacuggacccucgucgagcccggcgacaagaucaccuucgaggccaccggcaaccucgucgucccccgcuacgccuucgccauggagcgcaacgccggcuccggcaucaucaucuccgacacccccguccacgacugcaacaccaccugccagacccccaagggcgccaucaacaccucccuccccuuccagaacauccaccccaucaccaucggcaagugccccaaguacgucaaguccaccaagcuccgccucgccaccggccuccgcaacguccccuccauccagucccgcggccucuucggcgccaucgccggcuucaucgagggcggcuggaccggcauggucgacggcugguacggcuaccaccaccagaacgagcagggcuccggcuacgccgccgaccucaaguccacccagaacgccaucgacaagaucaccaacaaggucaacuccgucaucgagaagaugaacacccaguucaccgccgucggcaaggaguucaaccaccucgagaagcgcaucgagaaccucaacaagaaggucgacgacggcuuccucgacaucuggaccuacaacgccgagcuccucguccuccucgagaacgagcgcacccucgacuaccacgacuccaacgucaagaaccucuacgagaagguccgcaaccagcucaagaacaacgccaaggagaucggcaacggcugcuucgaguucuaccacaagugcgacaacaccugcauggaguccgucaagaacggcaccuacgacuaccccaaguacuccgaggaggccaagcucaaccgcgaggagaucgacggcgucaagcucgaguccacccgcaucuaccagauccucgccaucuacuccaccgucgccuccucccucguccucgucgucucccucggcgccaucuccuucuggaugugcuccaacggcucccuccagugccgcaucugcaucuga

SEQ ID NO: 103855 - RNA, 1701 nt, Artificial Sequence; identical to SEQ ID NO: 98705
  derived and/or modified CDS sequence (opt2) from hemagglutinin__InfluenzaA__AEW10574

SEQ ID NO: 103856 - RNA, 1701 nt, Artificial Sequence; identical to SEQ ID NO: 98705
  derived and/or modified CDS sequence (opt2) from hemagglutinin__InfluenzaA__AEW10584

SEQ ID NO: 103857 - RNA, 1701 nt, Artificial Sequence; identical to SEQ ID NO: 99058
  derived and/or modified CDS sequence (opt2) from hemagglutinin__InfluenzaA__AEW10594

SEQ ID NO: 103858 - RNA, 1701 nt, Artificial Sequence; identical to SEQ ID NO: 99058
  derived and/or modified CDS sequence (opt2) from hemagglutinin__InfluenzaA__AEW10604

SEQ ID NO: 103859 - RNA, 1701 nt, Artificial Sequence; identical to SEQ ID NO: 99058
  derived and/or modified CDS sequence (opt2) from hemagglutinin__InfluenzaA__AEW10614

SEQ ID NO: 103860 - RNA, 1701 nt, Artificial Sequence; identical to SEQ ID NO: 99058
  derived and/or modified CDS sequence (opt2) from hemagglutinin__InfluenzaA__AEW10624

SEQ ID NO: 103861 - RNA, 1701 nt, Artificial Sequence; identical to SEQ ID NO: 98705
  derived and/or modified CDS sequence (opt2) from hemagglutinin__InfluenzaA__AEW10634

SEQ ID NO: 103862 - RNA, 1701 nt, Artificial Sequence; identical to SEQ ID NO: 98692
  derived and/or modified CDS sequence (opt2) from hemagglutinin__InfluenzaA__AEW10644

SEQ ID NO: 103863 - RNA, 1701 nt, Artificial Sequence
  derived and/or modified CDS sequence (opt2) from hemagglutinin__InfluenzaA__AEW10654
augaaggccauccucgucguccuccucuacaccuucgccaccgccaacgccgacacccucugcaucggcuaccacgccaacaacuccaccgacaccgucgacaccguccucgagaagaacgucaccgucacccacuccgucaaccuccucgaggacaagcacaacggcaagcucugcaagcuccgcggcgucgccccccuccaccucggcaagugcaacaucgccggcuggauccucggcaaccccgagugcgagucccucuccaccgccuccuccugguccuacaucgucgagaccuccuccuccgacaacggcaccugcuaccccggcgacuucaucgacuacgaggagcuccgcgagcagcucuccuccgucuccuccuucgagcgcuucgagaucuuccccaagaccuccuccuggcccaaccacgacuccaacaagggcgucaccgccgccugcccccacgccggcgccaaguccuucuacaagaaccucaucuggcucgucaagaagggcaacuccuaccccaagcucaacaaguccuacaucaacgacaagggcaaggagguccucguccucuggggcauccaccaccccuccaccuccgccgaccagcagucccucuaccagaacgccgacgccuacgucuucgucggcuccucccgcuacuccaagaaguucaagcccgagaucgccauccgccccaagguccgcgaccaggagggccgcaugaacuacuacuggacccucgucgagcccggcgacaagaucaccuucgaggccaccggcaaccucgucgucccccgcuacgccuucgccauggagcgcaacgccggcuccggcaucaucaucuccgacacccccguccacgacugcaacaccaccugccagacccccaagggcgccaucaacaccucccuccccuuccagaacauccaccccaucaccaucggcaagugccccaaguacgucaaguccaccaagcuccgccucgccaccggccuccgcaacguccccuccauccagucccgcggccucuucggcgccaucgccggcuucaucgagggcggcuggaccggcauggucgacggcugguacggcuaccaccaccagaacgagcagggcuccggcuacgccgccgaccucaaguccacccagaacgccaucgacgagaucaccaacaaggucaacuccgucaucgagaagaugaacacccaguucaccgccgucggcaaggaguucaaccaccucgagaagcgcaucgagaaccucaacaagaaggucgacgacggcuuccucgacaucuggaccuacaacgccgagcuccucguccuccucgagaacgagcgcacccucgacuaccacgacuccaacgucaagaaccucuacgagaagguccgcucccagcucaagaacaacgccaaggagaucggcaacggcugcuucgaguucuaccacaagugcgacaacaccugcauggaguccgucaagaacggcaccuacgacuaccccaaguacuccgaggaggccaagcucaaccgcgaggagaucgacggcgucaagcucgaguccacccgcaucuaccagauccucgccaucuacuccaccgucgccuccucccucguccucgucgucucccucggcgccaucuccuucuggaugugcuccaacggcucccuccagugccgcaucugcaucuga

SEQ ID NO: 103864 - RNA, 1701 nt, Artificial Sequence; identical to SEQ ID NO: 98692
  derived and/or modified CDS sequence (opt2) from hemagglutinin__InfluenzaA__AEW10664

SEQ ID NO: 103865 - RNA, 1701 nt, Artificial Sequence
  derived and/or modified CDS sequence (opt2) from hemagglutinin__InfluenzaA__AEW10674
augaaggccauccucgucguccuccucuacaccuucgccaccgccaacgccgacacccucugcaucggcuaccacgccaacaacuccaccgacaccgucgacaccguccucgagaagaacgucaccgucacccacuccgucaaccuccucgaggacaagcacaacggcaagcucugcaagcuccgcggcgucgccccccuccaccucggcaagugcaacaucgccggcuggauccucggcaaccccgagugcgagucccucuccaccgccuccuccugguccuacaucgucgagaccuccuccuccgacaacggcaccugcuaccccggcgacuucaucgacuacgaggagcuccgcgagcagcucuccuccgucuccuccuucgagcgcuucgagaucuuccccaagaccuccuccuggcccaaccacgacuccaacaagggcgucaccgccgccugcccccacgccgaggccaaguccuucuacaagaaccucaucuggcucgucaagaagggcaacuccuaccccaagcucuccaaguccuacaucaacgacaagggcaaggagguccucguccucuggggcauccaccaccccuccaccuccgccgaccagcagucccucuaccagaacgccgacgccuacgucuucgucggcaccucccgcuacuccaagaaguucaagcccgagaucgccauccgccccaagguccgcgaccaggagggccgcaugaacuacuacuggacccucgucgagcccggcgacaagaucaccuucgaggccaccggcaaccucgucgucccccgcuacgccuucgccauggagcgcaacgccggcuccggcaucaucaucuccgacacccccguccacgacugcaacaccaccugccagacccccaagggcgccaucaacaccucccuccccuuccagaacauccaccccaucaccaucggcaagugccccaaguacgucaaguccaccaagcuccgccucgccaccggccuccgcaacguccccuccauccagucccgcggccucuucggcgccaucgccggcuucaucgagggcggcuggaccggcauggucgacggcugguacggcuaccaccaccagaacgagcagggcuccggcuacgccgccgaccucaaguccacccagaacgccaucgacgagaucaccaacaaggucaacuccgucaucgagaagaugaacacccaguucaccgccgucggcaaggaguucaaccaccucgagaagcgcaucgagaaccucaacaagaaggucgacgacggcuuccucgacaucuggaccuacaacgccgagcuccucguccuccucgagaacgagcgcacccucgacuaccacgacuccaacgucaagaaccucuacgagaagguccgcucccagcucaagaacaacgccaaggagaucggcaacggcugcuucgaguucuaccacaagugcgacaacaccugcauggaguccgucaagaacggcaccuacgacuaccccaaguacuccgaggaggccaagcucaaccgcgaggagaucgacggcgucaagcucgaguccacccgcaucuaccagauccucgccaucuacuccaccgucgccuccucccucguccucgucgucucccucggcgccaucuccuucuggaugugcuccaacggcucccuccagugccgcaucugcaucuga

SEQ ID NO: 103866 - RNA, 1701 nt, Artificial Sequence; identical to SEQ ID NO: 98705
  derived and/or modified CDS sequence (opt2) from hemagglutinin__InfluenzaA__AEW10684

SEQ ID NO: 103867 - RNA, 1701 nt, Artificial Sequence; identical to SEQ ID NO: 98692
  derived and/or modified CDS sequence (opt2) from hemagglutinin__InfluenzaA__AEW10694

SEQ ID NO: 103868 - RNA, 1701 nt, Artificial Sequence; identical to SEQ ID NO: 98692
  derived and/or modified CDS sequence (opt2) from hemagglutinin__InfluenzaA__AEW10704

SEQ ID NO: 103869 - RNA, 1701 nt, Artificial Sequence; identical to SEQ ID NO: 103863
  derived and/or modified CDS sequence (opt2) from hemagglutinin__InfluenzaA__AEW10724

SEQ ID NO: 103870 - RNA, 1701 nt, Artificial Sequence; identical to SEQ ID NO: 98705
  derived and/or modified CDS sequence (opt2) from hemagglutinin__InfluenzaA__AEW10734

SEQ ID NO: 103871 - RNA, 1701 nt, Artificial Sequence
  derived and/or modified CDS sequence (opt2) from hemagglutinin__InfluenzaA__AEW10744
augaaggccauccucgucguccuccucuacaccuucgccaccgccaacgccgacacccucugcaucggcuaccacgccaacaacuccaccgacaccgucgacaccguccucgagaagaacgucaccgucacccacuccgucaacauccucgaggacaagcacaacggcaagcucugcaagcuccgcggcgucgccccccuccaccucggcaagugcaacaucgccggcuggauccucggcaaccccgagugcgagucccucuccaccgccuccuccugguccuacaucgucgagaccuccuccuccgacaacggcaccugcuaccccggcgacuucaucgacuacgaggagcuccgcgagcagcucuccuccgucuccuccuucgagcgcuucgagaucuuccccaagaccuccuccuggcccaaccacgacuccaacaagggcgucaccgccgccugcccccacgccggcgccaaguccuucuacaagaaccucaucuggcucgucaagaagggcaacuccuaccccaagcucuccaaguccuacaucaacgacaagggcaaggagguccucguccucuggggcauccaccaccccuccaccuccgccgaccagcagucccucuaccagaacgccgacgccuacgucuucgucggcuccucccgcuacuccaagaaguucaagcccgagaucgccauccgccccaagguccgcgaccaggagggccgcaugaacuacuacuggacccucgucgagcccggcgacaagaucaccuucgaggccaccggcaaccucgucgucccccgcuacgccuucgccauggagcgcaacgccggcuccggcaucaucaucuccgacacccccguccacgacugcaacaccaccugccagacccccaagggcgccaucaacaccucccuccccuuccagaacauccaccccaucaccaucggcaagugccccaaguacgucaaguccaccaagcuccgccucgccaccggccuccgcaacguccccuccauccucucccgcggccucuucggcgccaucgccggcuucaucgagggcggcuggaccggcauggucgacggcugguacggcuaccaccaccagaacgagcagggcuccggcuacgccgccgaccucaaguccacccagaacgccaucgacgagaucaccaacaaggucaacuccgucaucgagaagaugaacacccaguucaccgccgucggcaaggaguucaaccaccucgagaagcgcaucgagaaccucaacaagaaggucgacgacggcuuccucgacaucuggaccuacaacgccgagcuccucguccuccucgagaacgagcgcacccucgacuaccacgacuccaacgucaagaaccucuacgagaagguccgcucccagcucaagaacaacgccaaggagaucggcaacggcugcuucgaguucuaccacaagugcgacaacaccugcauggaguccgucaagaacggcaccuacgacuaccccaaguacuccgaggaggccaagcucaaccgcgaggagaucgacggcgucaagcucgaguccacccgcaucuaccagauccucgccaucuacuccaccgucgccuccucccucguccucgucgucucccucggcgccaucuccuucuggaugugcuccaacggcucccuccagugccgcaucugcaucuga

SEQ ID NO: 103872 - RNA, 1701 nt, Artificial Sequence; identical to SEQ ID NO: 103871
  derived and/or modified CDS sequence (opt2) from hemagglutinin__InfluenzaA__AEW10754

SEQ ID NO: 103873 - RNA, 1701 nt, Artificial Sequence
  derived and/or modified CDS sequence (opt2) from hemagglutinin__InfluenzaA__AEW10764
augaaggccauccucgucguccuccucuacaccuucgccaccgccaacgccgacacccucugcaucggcuaccacgccaacaacuccaccgacaccgucgacaccguccucgagaagaacgucaccgucacccacuccgucaacauccucgaggacaagcacaacggcaagcucugcaagcuccgcggcgucgccccccuccaccucggcaagugcaacaucgccggcuggauccucggcaaccccgagugcgagucccucuccaccgccuccuccugguccuacaucgucgagaccuccuccuccgacaacggcaccugcuaccccggcgacuucaucgacuacgaggagcuccgcgagcagcucuccuccgucuccuccuucgagcgcuucgagaucuuccccaagaccuccuccuggcccaaccacgacuccaacaagggcgucaccgccgccugcccccacgccggcgccaaguccuucuacaagaaccucaucuggcucgucaagaagggcaacuccuaccccaagcucuccaaguccuacaucaacgacaagggcaaggagguccucguccucuggggcauccaccaccccuccaccuccgccgaccagcagucccucuaccagaacgccaacgccuacgucuucgucggcuccucccgcuacuccaagaaguucaagcccgagaucgccauccgccccaagguccgcgaccaggagggccgcaugaacuacuacuggacccucgucgagcccggcgacaagaucaccuucgaggccaccggcaaccucgucgucccccgcuacgccuucgccauggagcgcaacgccggcuccggcaucaucaucuccgacacccccguccacgacugcaacaccaccugccagacccccaagggcgccaucaacaccucccuccccuuccagaacauccaccccaucaccaucggcaagugccccaaguacgucaaguccaccaagcuccgccucgccaccggccuccgcaacguccccuccauccagucccgcggccucuucggcgccaucgccggcuucaucgagggcggcuggaccggcauggucgacggcugguacggcuaccaccaccagaacgagcagggcuccggcuacgccgccgaccucaaguccacccagaacgccaucgacgagaucaccaacaaggucaacuccgucaucgagaagaugaacacccaguucaccgccgucggcaaggaguucaaccaccucgagaagcgcaucgagaaccucaacaagaaggucgacgacggcuuccucgacaucuggaccuacaacgccgagcuccucguccuccucgagaacgagcgcacccucgacuaccacgacuccaacgucaagaaccucuacgagaagguccgcucccagcucaagaacaacgccaaggagaucggcaacggcugcuucgaguucuaccacaagugcgacaacaccugcauggaguccgucaagaacggcaccuacgacuaccccaaguacuccgaggaggccaagcucaaccgcgaggagaucgacggcgucaagcucgaguccacccgcaucuaccagauccucgccaucuacuccaccgucgccuccucccucguccucgucgucucccucggcgccaucuccuucuggaugugcuccaacggcucccuccagugccgcaucugcaucuga

SEQ ID NO: 103874 - RNA, 1701 nt, Artificial Sequence; identical to SEQ ID NO: 98949
  derived and/or modified CDS sequence (opt2) from hemagglutinin__InfluenzaA__AEW10774

SEQ ID NO: 103875 - RNA, 1701 nt, Artificial Sequence; identical to SEQ ID NO: 98692
  derived and/or modified CDS sequence (opt2) from hemagglutinin__InfluenzaA__AEW10784

SEQ ID NO: 103876 - RNA, 1701 nt, Artificial Sequence; identical to SEQ ID NO: 98692
  derived and/or modified CDS sequence (opt2) from hemagglutinin__InfluenzaA__AEW10794

SEQ ID NO: 103877 - RNA, 1701 nt, Artificial Sequence; identical to SEQ ID NO: 98885
  derived and/or modified CDS sequence (opt2) from hemagglutinin__InfluenzaA__AEW10804

SEQ ID NO: 103878 - RNA, 1701 nt, Artificial Sequence; identical to SEQ ID NO: 98703
  derived and/or modified CDS sequence (opt2) from hemagglutinin__InfluenzaA__AEW10814

SEQ ID NO: 103879 - RNA, 1701 nt, Artificial Sequence; identical to SEQ ID NO: 98796
  derived and/or modified CDS sequence (opt2) from hemagglutinin__InfluenzaA__AEW10824

SEQ ID NO: 103880 - RNA, 1701 nt, Artificial Sequence; identical to SEQ ID NO: 98692
  derived and/or modified CDS sequence (opt2) from hemagglutinin__InfluenzaA__AEW10834

SEQ ID NO: 103881 - RNA, 1701 nt, Artificial Sequence; identical to SEQ ID NO: 98885
  derived and/or modified CDS sequence (opt2) from hemagglutinin__InfluenzaA__AEW10844

SEQ ID NO: 103882 - RNA, 1701 nt, Artificial Sequence
  derived and/or modified CDS sequence (opt2) from hemagglutinin__InfluenzaA__AEW10854
augaaggccauccucgucguccuccucuacaccuucgccaccgccaacgccgacacccucugcaucggcuaccacgccaacaacuccaccgacaccgucgacaccguccucgagaagaacgucaccgucacccacuccgucaacauccucgaggacaagcacaacggcaagcucugcaagcuccgcggcgucgccccccuccaccucggcaagugcaacaucgccggcuggauccucggcaaccccgagugcgagucccucuccaccgccuccuccugguccuacaucgucgagaccuccuccuccgacaacggcaccugcuaccccggcgacuucaucgacuacgaggagcuccgcgagcagcucuccuccgucuccuccuucgagcgcuucgagaucuuccccaagaccuccuccuggcccaaccacgacuccaacaagggcgucaccgccgccugcccccacgccggcgccaaguccuucuacaagaaccucaucuggcucgucaagaagggcaacuccuaccccaagcucuccaaguccuacaucaacgacaagggcaaggagguccucguccucuggggcauccaccaccccuccaccuccgccgaccagcagucccucuaccagaacgccgacgccuacgucuucgucggcuccucccgcuacuccaagaaguucaagcccgagaucaccauccgccccaagguccgcgaccaggagggccgcaugaacuacuacuggacccucgucgagcccggcgacaagaucaccuucgaggccaccggcaaccucgucgucccccgcuacgccuucgccauggagcgcaacgccggcuccggcaucaucaucuccgacacccccguccacgacugcaacaccaccugccagacccccaagggcgccaucaacaccucccuccccuuccagaacauccaccccaucaccaucggcaagugccccaaguacgucaaguccaccaagcuccgccucgccaccggccuccgcaacguccccuccauccagucccgcggccucuucggcgccaucgccggcuucaucgagggcggcuggaccggcauggucgacggcugguacggcuaccaccaccagaacgagcagggcuccggcuacgccgccgaccucaaguccacccagaacgccaucgacgagaucaccaacaaggucaacuccgucaucgagaagaugaacacccaguucaccgccgucggcaaggaguucaaccaccucgagaagcgcaucgagaaccucaacaagaaggucgacgacggcuuccucgacaucuggaccuacaacgccgagcuccucguccuccucgagaacgagcgcacccucgacuaccacgacuccaacgucaagaaccucuacgagaagguccgcucccagcucaagaacaacgccaaggagaucggcaacggcugcuucgaguucuaccacaagugcgacaacaccugcauggaguccgucaagaacggcaccuacgacuaccccaaguacuccgaggaggccaagcucaaccgcgaggagaucgacggcgucaagcucgaguccacccgcaucuaccagauccucgccaucuacuccaccgucgccuccucccucguccucgucgucucccucggcgccaucuccuucuggaugugcuccaacggcucccuccagugccgcaucugcaucuga

SEQ ID NO: 103883 - RNA, 1701 nt, Artificial Sequence; identical to SEQ ID NO: 98885
  derived and/or modified CDS sequence (opt2) from hemagglutinin__InfluenzaA__AEW10864

SEQ ID NO: 103884 - RNA, 1701 nt, Artificial Sequence; identical to SEQ ID NO: 98885
  derived and/or modified CDS sequence (opt2) from hemagglutinin__InfluenzaA__AEW10874

SEQ ID NO: 103885 - RNA, 1701 nt, Artificial Sequence; identical to SEQ ID NO: 98885
  derived and/or modified CDS sequence (opt2) from hemagglutinin__InfluenzaA__AEW10884

SEQ ID NO: 103886 - RNA, 1701 nt, Artificial Sequence; identical to SEQ ID NO: 98692
  derived and/or modified CDS sequence (opt2) from hemagglutinin__InfluenzaA__AEW10894

SEQ ID NO: 103887 - RNA, 1701 nt, Artificial Sequence; identical to SEQ ID NO: 98885
  derived and/or modified CDS sequence (opt2) from hemagglutinin__InfluenzaA__AEW10904

SEQ ID NO: 103888 - RNA, 1701 nt, Artificial Sequence; identical to SEQ ID NO: 98885
  derived and/or modified CDS sequence (opt2) from hemagglutinin__InfluenzaA__AEW10914

SEQ ID NO: 103889 - RNA, 1701 nt, Artificial Sequence; identical to SEQ ID NO: 98692
  derived and/or modified CDS sequence (opt2) from hemagglutinin__InfluenzaA__AEW10924

SEQ ID NO: 103890 - RNA, 1701 nt, Artificial Sequence; identical to SEQ ID NO: 98692
  derived and/or modified CDS sequence (opt2) from hemagglutinin__InfluenzaA__AEW10934

SEQ ID NO: 103891 - RNA, 1701 nt, Artificial Sequence; identical to SEQ ID NO: 98885
  derived and/or modified CDS sequence (opt2) from hemagglutinin__InfluenzaA__AEW10944

SEQ ID NO: 103892 - RNA, 1701 nt, Artificial Sequence; identical to SEQ ID NO: 98705
  derived and/or modified CDS sequence (opt2) from hemagglutinin__InfluenzaA__AEW10954

SEQ ID NO: 103893 - RNA, 1701 nt, Artificial Sequence; identical to SEQ ID NO: 98705
  derived and/or modified CDS sequence (opt2) from hemagglutinin__InfluenzaA__AEW10964

SEQ ID NO: 103894 - RNA, 1701 nt, Artificial Sequence; identical to SEQ ID NO: 98885
  derived and/or modified CDS sequence (opt2) from hemagglutinin__InfluenzaA__AEW10974

SEQ ID NO: 103895 - RNA, 1701 nt, Artificial Sequence; identical to SEQ ID NO: 98705
  derived and/or modified CDS sequence (opt2) from hemagglutinin__InfluenzaA__AEW10984

SEQ ID NO: 103896 - RNA, 1701 nt, Artificial Sequence; identical to SEQ ID NO: 98705
  derived and/or modified CDS sequence (opt2) from hemagglutinin__InfluenzaA__AEW10994

SEQ ID NO: 103897 - RNA, 1701 nt, Artificial Sequence; identical to SEQ ID NO: 98705
  derived and/or modified CDS sequence (opt2) from hemagglutinin__InfluenzaA__AEW11004

SEQ ID NO: 103898 - RNA, 1701 nt, Artificial Sequence; identical to SEQ ID NO: 98705
  derived and/or modified CDS sequence (opt2) from hemagglutinin__InfluenzaA__AEW11014

SEQ ID NO: 103899 - RNA, 1701 nt, Artificial Sequence; identical to SEQ ID NO: 98705
  derived and/or modified CDS sequence (opt2) from hemagglutinin__InfluenzaA__AEW11024

SEQ ID NO: 103900 - RNA, 1701 nt, Artificial Sequence; identical to SEQ ID NO: 98705
  derived and/or modified CDS sequence (opt2) from hemagglutinin__InfluenzaA__AEW11034

SEQ ID NO: 103901 - RNA, 1701 nt, Artificial Sequence; identical to SEQ ID NO: 98885
  derived and/or modified CDS sequence (opt2) from hemagglutinin__InfluenzaA__AEW11044

SEQ ID NO: 103902 - RNA, 1701 nt, Artificial Sequence; identical to SEQ ID NO: 98705
  derived and/or modified CDS sequence (opt2) from hemagglutinin__InfluenzaA__AEW11054

SEQ ID NO: 103903 - RNA, 1701 nt, Artificial Sequence; identical to SEQ ID NO: 98692
  derived and/or modified CDS sequence (opt2) from hemagglutinin__InfluenzaA__AEW11064

SEQ ID NO: 103904 - RNA, 1701 nt, Artificial Sequence; identical to SEQ ID NO: 98692
  derived and/or modified CDS sequence (opt2) from hemagglutinin__InfluenzaA__AEW11074

SEQ ID NO: 103905 - RNA, 1701 nt, Artificial Sequence
  derived and/or modified CDS sequence (opt2) from hemagglutinin__InfluenzaA__AEW11084
augaaggccauccucgucguccuccucuacaccuucgccaccgccaacgccgacacccucugcaucggcuaccacgccaacaacuccaccgacaccgucgacaccguccucgagaagaacgucaccgucacccacuccgucaaccuccucgaggacaagcacaacggcaagcucugcaagcuccgcggcgucgccccccuccaccucggcaagugcaacaucgccggcuggauccucggcaaccccgagugcgagucccucuccaccgccuccuccugguccuacaucgucgagaccuccuccuccgacaacggcaccugcuaccccggcgacuucaucgacuacgaggagcuccgcgagcagcucuccuccgucuccuccuucgagcgcuucgagaucuuccccaagaccuccuccuggcccaaccacgacuccaacaagggcgucaccgccgccugccuccacgccggcgccaaguccuucuacaagaaccucaucuggcucgucaagaagggcaacuccuaccccaagcucuccaaguccuacaucaacgacaagggcaaggagguccucguccucuggggcauccaccaccccuccaccuccgccgaccagcagucccucuaccagaacgccgacgccuacgucuucgucggcuccucccgcuacuccaagaaguucaagcccgagaucgccauccgccccaagguccgcgaccaggagggccgcaugaacuacuacuggacccucgucgagcccggcgacaagaucaccuucgaggccaccggcaaccucgucgucccccgcuacgccuucgccauggagcgcaacgccggcuccggcaucaucaucuccgacacccccguccacgacugcaacaccaccugccagacccccaagggcgccaucaacaccucccuccccuuccagaacauccaccccaucaccaucggcaagugccccaaguacgucaaguccaccaagcuccgccucgccaccggccuccgcaacguccccuccauccagucccgcggccucuucggcgccaucgccggcuucaucgagggcggcuggaccggcauggucgacggcugguacggcuaccaccaccagaacgagcagggcuccggcuacgccgccgaccucaaguccacccagaacgccaucgacgagaucaccaacaaggucaacuccgucaucgagaagaugaacacccaguucaccgccgucggcaaggaguucaaccaccucgagaagcgcaucgagaaccucaacaagaaggucgacgacggcuuccucgacaucuggaccuacaacgccgagcuccucguccuccucgagaacgagcgcacccucgacuaccacgacuccaacgucaagaaccucuacgagaagguccgcucccagcucaagaacaacgccaaggagaucggcaacggcugcuucgaguucuaccacaagugcgacaacaccugcauggaguccgucaagaacggcaccuacgacuaccccaaguacuccgaggaggccaagcucaaccgcgaggagaucgacggcgucaagcucgaguccacccgcaucuaccagauccucgccaucuacuccaccgucgccuccucccucguccucgucgucucccucggcgccaucuccuucuggaugugcuccaacggcucccuccagugccgcaucugcaucuga

SEQ ID NO: 103906 - RNA, 1701 nt, Artificial Sequence; identical to SEQ ID NO: 98692
  derived and/or modified CDS sequence (opt2) from hemagglutinin__InfluenzaA__AEW11094

SEQ ID NO: 103907 - RNA, 1701 nt, Artificial Sequence; identical to SEQ ID NO: 98692
  derived and/or modified CDS sequence (opt2) from hemagglutinin__InfluenzaA__AEW11104

SEQ ID NO: 103908 - RNA, 1701 nt, Artificial Sequence; identical to SEQ ID NO: 98705
  derived and/or modified CDS sequence (opt2) from hemagglutinin__InfluenzaA__AEW11114

SEQ ID NO: 103909 - RNA, 1701 nt, Artificial Sequence
  derived and/or modified CDS sequence (opt2) from hemagglutinin__InfluenzaA__AEW11124
augaaggccauccucgucguccuccucuacaccuucgccaccgccaacgccgacacccucugcaucggcuaccacgccaacaacuccaccgacaccgucgacaccguccucgagaagaacgucaccgucacccacuccgucaaccuccucgaggacaagcacaacggcaagcucugcaagcuccgcggcgucgccccccuccaccucggcaagugcaacaucgccggcuggauccucggcaaccccgagugcgagucccucuccaccgccuccuccugguccuacaucgucgagaccuccuccuccgacaacggcaccugcuaccccggcgacuucaucgacuacgaggagcuccgcgagcagcucuccuccgucuccuccuucgagcgcuucgagaucuuccccaagaccuccuccuggcccaaccacgacuccaacaagggcgucaccgccgccugcccccacgccggcgccaaguccuucuacaagaaccucaucuggcucgucaagaagggcaacuccuaccccaagcucuccaaguccuacaucaacgacaagggcaaggagguccucguccucuggggcauccaccaccccuccaccuccgccgaccagcagucccucuaccagaacgccgacgccuacgucuucgucggcuccucccgcuacuccaagaaguucaagcccgagaucgccauccgccccaagguccgcgaccaggagggccgcaugaacuacuacuggacccucgucgagcccggcgacaagaucaccuucgaggccaccggcaaccucgucgucccccgcuacgccuucgccauggagcgcaacgccggcuccggcaucaucaucuccgacacccccguccacgacugcaacaccaccugccagacccccaagggcgccaucaacaccucccuccccuuccagaacauccaccccaucaccaucggcaagugccccaaguucgucaaguccaccaagcuccgccucgccaccggccuccgcaacguccccuccauccagucccgcggccucuucggcgccaucgccggcuucaucgagggcggcuggaccggcauggucgacggcugguacggcuaccaccaccagaacgagcagggcuccggcuacgccgccgaccucaaguccacccagaacgccaucgacgagaucaccaacaaggucaacuccgucaucgagaagaugaacacccaguucaccgccgucggcaaggaguucaaccaccucgagaagcgcaucgagaaccucaacaagaaggucgacgacggcuuccucgacaucuggaccuacaacgccgagcuccucguccuccucgagaacgagcgcacccucgacuaccacgacuccaacgucaagaaccucuacgagaagguccgcucccagcucaagaacaacgccaaggagaucggcaacggcugcuucgaguucuaccacaagugcgacaacaccugcauggaguccgucaagaacggcaccuacgacuaccccaaguacuccgaggaggccaagcucaaccgcgaggagaucgacggcgucaagcucgaguccacccgcaucuaccagauccucgccaucuacuccaccgucgccuccucccucguccucgucgucucccucggcgccaucuccuucuggaugugcuccaacggcucccuccagugccgcaucugcaucuga

SEQ ID NO: 103910 - RNA, 1701 nt, Artificial Sequence
  derived and/or modified CDS sequence (opt2) from hemagglutinin__InfluenzaA__AEW11134
augaaggccauccucgucguccuccucuacaccuucgccaccgccaacgccgacacccucugcaucggcuaccacgccaacaacuccaccgacaccgucgacaccguccucgagaagaacgucaccgucacccacuccgucaacauccucgaggacaagcacaacggcaagcucugcaagcuccgcggcgucgccccccuccaccucggcaagugcaacaucgccggcuggauccucggcaaccccgagugcgagucccucuccaccgccuccuccugguccuacaucgucgagaccuccuccuccgacaacggcaccugcuaccccggcgacuucaucgacuacgaggagcuccgcgagcagcucuccuccgucuccuccuucgagcgcuucgagaucuuccccaagaccuccuccuggcccaaccacgacuccaacaagggcgucaccgccgccugcccccacgccggcgccaaguccuucuacaagaaccucaucuggcucgucaagaagggcaacuccuaccccaagcucuccaaguccuacaucaacgacaagggcaaggagguccucguccucuggggcauccaccaccccuccaccuccgccgaccagcagucccucuaccagaacgccgacgccuacgucuucgucggcuccucccgcuacuccaagaaguucaagcccgagaucgccauccgccccaagguccgcgaccaggagggccgcaugaacuacuacuggacccucgucgagcccggcgacaagaucaccuucgaggccaccggcaaccucgucgucccccgcuacgccuucgccauggagcgcaacgccggcuccggcaucaucaucuccgacacccccguccacgacugcaacaccaccugccagacccccaagggcgccaucaacaccucccuccccuuccagaacauccaccccaucaccaucggcaagugccccaaguacgucaaguccaccaagcuccgccucgccaccggccuccgcaacguccccuccauccagucccgcggccucuucggcgccaucgccggcuucaucgagggcggcuggaccggcauggucgacggcugguacggcuaccaccaccagaacgagcagggcuccggcuacgccgccgaccucaaguccacccagaacgccaucgacgagaucaccaacaaggucaacuccgucaucgagaagaugaacacccaguucaccgccgucggcaaggaguucaaccaccucgagaagcgcaucgagaaccucaacaagaaggucgacgacggcuuccucgacaucuggaccuacaacgccgagcuccucguccuccucgagaacgagcgcacccucgacuaccacgacuccaacgucaagaaccucuacgagaagguccgcucccagcucaagaacaacgccaaggagaucggcaacggcugcuucgaguucuaccacaagugcgacaacaccugcauggaguccgucaagaacggcaccuacgacuaccccaaguacuccgaggaggccaagcucaacaaggaggagaucgacggcgucaagcucgaguccacccgcaucuaccagauccucgccaucuacuccaccgucgccuccucccucguccucgucgucucccucggcgccaucuccuucuggaugugcuccaacggcucccuccagugccgcaucugcaucuga

SEQ ID NO: 103911 - RNA, 1701 nt, Artificial Sequence; identical to SEQ ID NO: 98705
  derived and/or modified CDS sequence (opt2) from hemagglutinin__InfluenzaA__AEW11144

SEQ ID NO: 103912 - RNA, 1701 nt, Artificial Sequence; identical to SEQ ID NO: 98705
  derived and/or modified CDS sequence (opt2) from hemagglutinin__InfluenzaA__AEW11154

SEQ ID NO: 103913 - RNA, 1701 nt, Artificial Sequence; identical to SEQ ID NO: 103905
  derived and/or modified CDS sequence (opt2) from hemagglutinin__InfluenzaA__AEW11164

SEQ ID NO: 103914 - RNA, 1701 nt, Artificial Sequence; identical to SEQ ID NO: 103905
  derived and/or modified CDS sequence (opt2) from hemagglutinin__InfluenzaA__AEW11174

SEQ ID NO: 103915 - RNA, 1701 nt, Artificial Sequence; identical to SEQ ID NO: 98705
  derived and/or modified CDS sequence (opt2) from hemagglutinin__InfluenzaA__AEW11184

SEQ ID NO: 103916 - RNA, 1701 nt, Artificial Sequence; identical to SEQ ID NO: 98692
  derived and/or modified CDS sequence (opt2) from hemagglutinin__InfluenzaA__AEW11194

SEQ ID NO: 103917 - RNA, 1701 nt, Artificial Sequence; identical to SEQ ID NO: 98705
  derived and/or modified CDS sequence (opt2) from hemagglutinin__InfluenzaA__AEW11204

SEQ ID NO: 103918 - RNA, 1701 nt, Artificial Sequence; identical to SEQ ID NO: 98705
  derived and/or modified CDS sequence (opt2) from hemagglutinin__InfluenzaA__AEW11214

SEQ ID NO: 103919 - RNA, 1701 nt, Artificial Sequence; identical to SEQ ID NO: 98885
  derived and/or modified CDS sequence (opt2) from hemagglutinin__InfluenzaA__AEW11224

SEQ ID NO: 103920 - RNA, 1701 nt, Artificial Sequence; identical to SEQ ID NO: 98705
  derived and/or modified CDS sequence (opt2) from hemagglutinin__InfluenzaA__AEW11234

SEQ ID NO: 103921 - RNA, 1701 nt, Artificial Sequence; identical to SEQ ID NO: 98705
  derived and/or modified CDS sequence (opt2) from hemagglutinin__InfluenzaA__AEW11244

SEQ ID NO: 103922 - RNA, 1701 nt, Artificial Sequence
  derived and/or modified CDS sequence (opt2) from hemagglutinin__InfluenzaA__AEW11254
augaaggccauccucgucguccuccucuacaccuucgccaccgccaacgccgacacccucugcaucggcuaccacgccaacaacuccaccgacaccgucgacaccguccucgagaagaacgucaccgucacccacuccgucaaccuccucgaggacaagcacaacggcaagcucugcaagcuccgcggcgucgccccccuccaccucggcaagugcaacaucgccggcuggauccucggcaaccccgagugcgagucccucuccaccgccuccuccugguccuacaucgucgagaccuccuccuccgacaacggcaccugcuaccccggcgacuucaucgacuacgaggagcuccgcgagcagcucuccuccgucuccuccuucgagcgcuucgagaucuuccccaagaccuccuccuggcccaaccacgacuccaacaagggcgucaccgccgccugccuccacgccggcgccaaguccuucuacaagaaccucaucuggcucgucaagaagggcaacuccuaccccaagcucuccaaguccuacaucaacgacaagggcaaggagguccucguccucuggggcauccaccaccccuccgccuccgccgaccagcagucccucuaccagaacgccgacgccuacgucuucgucggcuccucccgcuacuccaagaaggucaagcccgagaucgccauccgccccaagguccgcgaccaggagggccgcaugaacuacuacuggacccucgucgagcccggcgacaagaucaccuucgaggccaccggcaaccucgucgucccccgcuacgccuucgccauggagcgcaacgccggcuccggcaucaucaucuccgacacccccguccacgacugcaacaccaccugccagacccccaagggcgccaucaacaccucccuccccuuccagaacauccaccccaucaccaucggcaagugccccaaguacgucaaguccaccaagcuccgccucgccaccggccuccgcaacguccccuccauccagucccgcggccucuucggcgccaucgccggcuucaucgagggcggcuggaccggcauggucgacggcugguacggcuaccaccaccagaacgagcagggcuccggcuacgccgccgaccucaaguccacccagaacgccaucgacgagaucaccaacaaggucaacuccgucaucgagaagaugaacacccaguucaccgccgucggcaaggaguucaaccaccucgagaagcgcaucgagaaccucaacaagaaggucgacgacggcuuccucgacaucuggaccuacaacgccgagcuccucguccuccucgagaacgagcgcacccucgacuaccacgacuccaacgucaagaaccucuacgagaagguccgcucccagcucaagaacaacgccaaggagaucggcaacggcugcuucgaguucuaccacaagugcgacaacaccugcauggaguccgucaagaacggcaccuacgacuaccccaaguacuccgaggaggccaagcucaaccgcgaggagaucgacggcgucaagcucgaguccacccgcaucuaccagauccucgccaucuacuccaccgucgccuccucccucguccucgucgucucccucggcgccaucuccuucuggaugugcuccaacggcucccuccagugccgcaucugcaucuga

SEQ ID NO: 103923 - RNA, 1701 nt, Artificial Sequence; identical to SEQ ID NO: 98692
  derived and/or modified CDS sequence (opt2) from hemagglutinin__InfluenzaA__AEW11263

SEQ ID NO: 103924 - RNA, 1701 nt, Artificial Sequence; identical to SEQ ID NO: 98692
  derived and/or modified CDS sequence (opt2) from hemagglutinin__InfluenzaA__AEW11273

SEQ ID NO: 103925 - RNA, 1701 nt, Artificial Sequence; identical to SEQ ID NO: 98692
  derived and/or modified CDS sequence (opt2) from hemagglutinin__InfluenzaA__AEW11283

SEQ ID NO: 103926 - RNA, 1701 nt, Artificial Sequence; identical to SEQ ID NO: 98692
  derived and/or modified CDS sequence (opt2) from hemagglutinin__InfluenzaA__AEW11293

SEQ ID NO: 103927 - RNA, 1701 nt, Artificial Sequence
  derived and/or modified CDS sequence (opt2) from hemagglutinin__InfluenzaA__AEW11303
augaaggccauccucgucguccuccucuacaccuucgccaccgccaacgccgacacccucugcaucggcuaccacgccaacaacuccaccgacaccgucgacaccguccucgagaagaacgucaccgucacccacuccgucaaccuccucgaggacaagcacaacggcaagcucugcaagcuccgcggcgucgccccccuccaccucggcaagugcaacaucgccggcuggauccucggcaaccccgagugcgagucccucuccaccgccuccuccugguccuacaucgucgagaccuccuccuccgacaacggcaccugcuaccccggcgacuucaucgacuacgaggagcuccgcgagcagcucuccuccgucuccuccuucgagcgcuucgagaucuuccccaagaccuccuccuggcccaaccacgacuccaacaagggcgucaccaccgccugcccccacgccggcgccaaguccuucuacaagaaccucaucuggcucgucaagaagggcaacuccuaccccaagcucuccaaguccuacaucaacgacaagggcaaggagguccucguccucuggggcauccaccaccccuccaccuccgccgaccagcagucccucuaccagaacgccgacgccuacgucuucgucggcaccucccgcuacuccaagaaguucaagcccgagaucgccauccgccccaagguccgcgaccaggagggccgcaugaacuacuacuggacccucgucgagcccggcgacaagaucaccuucgaggccaccggcaaccucgucgucccccgcuacgccuucgccauggagcgcaacgccggcuccggcaucaucaucuccgacacccccguccacgacugcaacaccaccugccagacccccaagggcgccaucaacaccucccuccccuuccagaacauccaccccaucaccaucggcaagugccccaaguacgucaaguccaccaagcuccgccucgccaccggccuccgcaacguccccuccauccagucccgcggccucuucggcgccaucgccggcuucaucgagggcggcuggaccggcauggucgacggcugguacggcuaccaccaccagaacgagcagggcuccggcuacgccgccgaccucaaguccacccagaacgccaucgacgagaucaccaacaaggucaacuccgucaucgagaagaugaacacccaguucaccgccgucggcaaggaguucaaccaccucgagaagcgcaucgagaaccucaacaagaaggucgacgacggcuuccucgacaucuggaccuacaacgccgagcuccucguccuccucgagaacgagcgcacccucgacuaccacgacuccaacgucaagaaccucuacgagaagguccgcucccagcucaagaacaacgccaaggagaucggcaacggcugcuucgaguucuaccacaagugcgacaacaccugcauggaguccgucaagaacggcaccuacgacuaccccaaguacuccgaggaggccaagcucaaccgcgaggagaucgacggcgucaagcucgaguccacccgcaucuaccagauccucgccaucuacuccaccgucgccuccucccucguccucgucgucucccucggcgccaucuccuucuggaugugcuccaacggcucccuccagugccgcgucugcaucuga

SEQ ID NO: 103928 - RNA, 1701 nt, Artificial Sequence; identical to SEQ ID NO: 98692
  derived and/or modified CDS sequence (opt2) from hemagglutinin__InfluenzaA__AEW11313

SEQ ID NO: 103929 - RNA, 1701 nt, Artificial Sequence
  derived and/or modified CDS sequence (opt2) from hemagglutinin__InfluenzaA__AEW11323
augaaggccauccucgucguccuccucuacaccuucgccaccgccaacgccgacacccucugcaucggcuaccacgccaacaacuccaccgacaccgucgacaccguccucgagaagaacgucaccgucacccacuccgucaaccuccucgaggacaagcacaacggcaagcucugcaagcuccgcggcgucgccccccuccaccucggcaagugcaacaucgccggcuggauccucggcaaccccgagugcgagucccucuccaccgccuccuccugguccuacaucgucgagaccuccuccuccgacaacggcaccugcuaccccggcgacuucaucgacuacgaggagcuccgcgagcagcucuccuccgucuccuccuucgagcgcuucgagaucuuccccaagaccuccuccuggcccaaccacgacuccaacaagggcgucaccgccgccugcccccacgccggcgccaaguccuucuacaagaaccucaucuggcucgucaagaagggcaacuccuaccccaagcucuccaaguccuacaucaacgacaagggcaaggagguccucguccucuggggcauccaccaccccuccaccuccgccgaccagcagucccucuaccagaacgccgacgccuacgucuucgucggcaccucccgcuacuccaagaaguucaagcccgagaucgccauccgccccaagguccgcggccaggagggccgcaugaacuacuacuggacccucgucgagcccggcgacaagaucaccuucgaggccaccggcaaccucgucgucccccgcuacgccuucgccauggagcgcaacgccggcuccggcaucaucaucuccgacacccccguccacgacugcaacaccaccugccagacccccaagggcgccgucaacaccucccuccccuuccagaacauccaccccaucaccaucggcaagugccccaaguacgucaaguccaccaagcuccgccucgccaccggccuccgcaacguccccuccauccagucccgcggccucuucggcgccaucgccggcuucaucgagggcggcuggaccggcauggucgacggcugguacggcuaccaccaccagaacgagcagggcuccggcuacgccgccgaccucaaguccacccagaacgccaucgacgagaucaccaacaaggucaacuccgucaucgagaagaugaacacccaguucaccgccgucggcaaggaguucaaccaccucgagaagcgcaucgagaaccucaacaagaaggucgacgacggcuuccucgacaucuggaccuacaacgccgagcuccucguccuccucgagaacgagcgcacccucgacuaccacgacuccaacgucaagaaccucuacgagaagguccgcucccagcucaagaacaacgccaaggagaucggcaacggcugcuucgaguucuaccacaagugcgacaacaccugcauggaguccgucaagaacggcaccuacgacuaccccaaguacuccgaggaggccaagcucaaccgcgaggagaucgacggcgucaagcucgaguccacccgcaucuaccagauccucgccaucuacuccaccgucgccuccucccucguccucgucgucucccucggcgccaucuccuucuggaugugcuccaacggcucccuccagugccgcaucugcaucuga

SEQ ID NO: 103930 - RNA, 1701 nt, Artificial Sequence
  derived and/or modified CDS sequence (opt2) from hemagglutinin__InfluenzaA__AEW22712
augaaggccauccucgucguccuccucuacaccuucgccaccgccaacgccgacacccucugcaucggcuaccacgccaacaacuccaccgacaccaucgacaccguccucgagaagaacgucaccgucacccacuccgucaaccuccucgaggacaagcacaacggcaagcucugcaagcuccgcggcgucgccccccuccaccucggcaagugcaacaucgccggcuggauccucggcaaccccgagugcgagucccucuccaccgccuccuccugguccuacaucgucgagaccuccuccuccgacaacggcaccugcuaccccggcgacuucaucgacuacgaggagcuccgcgagcagcucuccuccgucuccuccuucgagcgcuucgagaucuuccccaagaccuccuccuggcccaaccacgacuccaacaagggcgucaccgccgccugcccccacgccggcgccaagggcuucuacaagaaccucaucuggcucgucaagaagggcaacuccuaccccaagcucuccaaguccuacaucaacgacaagggcaaggagguccucguccucuggggcauccaccaccccuccaccaccgccgaccagcagucccucuaccagaacgccgacaccuacgucuucgucggcaccucccgcuacuccaagaaguucaagcccgagaucgccauccgccccaagguccgcgaccaggagggccgcaugaacuacuacuggacccucgucaagcccggcgacaagaucaccuucgaggccaccggcaaccucgucgucccccgcuacgccuucgccauggagcgcaacgccggcuccggcaucaucaucuccgacacccccguccacgacugcaacaccaccugccagacccccaagggcgccaucaacaccucccuccccuuccagaacauccaccccaucaccaucggcaagugccccaaguacgucaaguccaccaagcuccgccucgccaccggccuccgcaacguccccuccauccagucccgcggccucuucggcgccaucgccggcuucaucgagggcggcuggaccggcauggucgacggcugguacggcuaccaccaccagaacgagcagggcuccggcuacgccgccgaccucaaguccacccagaacgccaucgacaagaucaccaacaaggucaacuccgucaucgagaagaugaacacccaguucaccgccgucggcaaggaguucaaccaccucgagaagcgcaucgagaaccucaacaagaaggucgacgacggcuuccucgacaucuggaccuacaacgccgagcuccucguccuccucgagaacgagcgcacccucgacuaccacgacuccaacgucaagaaccucuacgagaagguccgcaaccagcucaagaacaacgccaaggagaucggcaacggcugcuucgaguucuaccacaagugcgacaacaccugcauggaguccgucaagaacggcaccuacgacuaccccaaguacuccgaggaggccaagcucaaccgcgaggagaucgacggcgucaagcucgaguccacccgcaucuaccagauccucgccaucuacuccaccgucgccuccucccucguccucgucgucucccucggcgccaucuccuucuggaugugcuccaacggcucccuccagugccgcaucugcaucuga

SEQ ID NO: 103931 - RNA, 1701 nt, Artificial Sequence
  derived and/or modified CDS sequence (opt2) from hemagglutinin__InfluenzaA__AEW22718
augaaggccauccucgucguccuccucuacaccuucgccaccgccaacgccgacacccucugcaucggcuaccacgccaacaacuccaccgacaccgucgacaccguccucgagaagaacgucaccgucacccacuccgucaaccuccucgaggacaagcacaacggcaagcucugcaagcuccgcggcgucgccccccuccaccucggcaagugcaacaucgccggcuggauccucggcaaccccgagugcgagucccucuccaccgccuccuccugguccuacaucgucgagaccuccuccuccgacaacggcaccugcuaccccggcgacuucaucgacuacgaggagcuccgcgagcagcucuccuccgucuccuccuucgagcgcuucgagaucuuccccaagaccuccuccuggcccaaccacgacuccaacaagggcgucaccgccgccugcccccacgccggcgccaagggcuucuacaagaaccucaucuggcucgucaagaagggcaacuccuaccccaagcucuccaaguccuacaucaacgacaagggcaaggagguccucguccucuggggcauccaccaccccuccaccaccgccgaccagcagucccucuaccagaacgccgacaccuacgucuucgucggcaccucccgcuacuccaagaaguucaagcccgagaucgccauccgccccaagguccgcgaccaggagggccgcaugaacuacuacuggacccucgucaagcccggcgacaagaucaccuucgaggccaccggcaaccucgucgucccccgcuacgccuucgccauggagcgcaacgccggcuccggcaucaucaucuccgacacccccguccacgacugcaacaccaccugccagacccccaagggcgccaucaacaccucccuccccuuccagaacauccaccccaucaccaucggcaagugccccaaguacgucaaguccaccaagcuccgccucgccaccggccuccgcaacguccccuccauccagucccgcggccucuucggcgccaucgccggcuucaucgagggcggcuggaccggcauggucgacggcugguacggcuaccaccaccagaacgagcagggcuccggcuacgccgccgaccucaaguccacccagaacgccaucgacaagaucaccaacaaggucaacuccgucaucgagaagaugaacacccaguucaccgccgucggcaaggaguucaaccaccucgagaagcgcaucgagaaccucaacaagaaggucgacgacggcuuccucgacaucuggaccuacaacgccgagcuccucguccuccucgagaacgagcgcacccucgacuaccacgacuccaacgucaagaaccucuacgagaagguccgcaaccagcucaagaacaacgccaaggagaucggcaacggcugcuucgaguucuaccacaagugcgacaacaccugcauggaguccgucaagaacggcaccuacgacuaccccaaguacuccgaggaggccaagcucaaccgcgaggagaucgacggcgucaagcucgaguccacccgcaucuaccagauccucgccaucuacuccaccgucgccuccucccucguccucgucgucucccucggcgccaucuccuucuggaugugcuccaacggcucccuccagugccgcaucugcaucuga

SEQ ID NO: 103932 - RNA, 1701 nt, Artificial Sequence; identical to SEQ ID NO: 102490
  derived and/or modified CDS sequence (opt2) from hemagglutinin__InfluenzaA__AEW22720

SEQ ID NO: 103933 - RNA, 1701 nt, Artificial Sequence; identical to SEQ ID NO: 102490
  derived and/or modified CDS sequence (opt2) from hemagglutinin__InfluenzaA__AEW22722

SEQ ID NO: 103934 - RNA, 1701 nt, Artificial Sequence
  derived and/or modified CDS sequence (opt2) from hemagglutinin__InfluenzaA__AEW22724
augaaggccauccucgucguccuccucuacaccuucgccaccgccaacgccgacacccucugcaucggcuaccacgccaacaacuccaccgacaccgucgacaccguccucgagaagaacgucaccgucacccacuccgucaaccuccucgaggacaagcacaacggcaagcucugcaagcuccgcggcgucgccccccuccaccucggcaagugcaacaucgccggcuggauccucggcaaccccgagugcgagucccucuccaccgccuccuccugguccuacaucgucgagaccuccuccuccgacaacggcaccugcuaccccggcgacuucaucgacuacgaggagcuccgcgagcagcucuccuccgucuccuccuucgagcgcuucgagaucuuccccaagaccuccuccuggcccaaccacgacuccaacaagggcgucaccgccgccugcccccacgccggcgccaagggcuucuacaagaaccucaucuggcucgucaagaagggcaacuccuaccccaagcucuccaaguccuacaucaacgacaagggcaaggagguccucguccucuggggcauccaccaccccuccaccaccgccgaccagcagucccucuaccagaacgccgacaccuacgucuucgucggcaccucccgcuacuccaagaaguucaagcccgagaucgccauccgccccaagguccgcgaccaggagggccgcaugaacuacuacuggacccucgucgagcccggcgacaagaucaccuucgaggccaccggcaaccucgucgucccccgcuacgccuucgccauggagcgcaacgccggcuccggcaucaucaucuccgacacccccguccacgacugcaacaccaccugccagacccccaagggcgccaucaacaccucccuccccuuccagaacauccaccccaucaccaucggcaagugccccaaguacgucaaguccaccaagcuccgccucgccaccggccuccgcaacguccccuccauccagucccgcggccucuucggcgccaucgccggcuucaucgagggcggcuggaccggcauggucgacggcugguacggcuaccaccaccagaacgagcagggcuccggcuacgccgccgaccucaaguccacccagaacgccaucgacaagaucaccaacaaggucaacuccgucaucgagaagaugaacacccaguucaccgccgucggcaaggaguucaaccaccucgagaagcgcaucgagaaccucaacaagaaggucgacgacggcuuccucgacaucuggaccuacaacgccgagcuccucguccuccucgagaacgagcgcacccucgacuaccacgacuccaacgucaagaaccucuacgagaagguccgcaaccagcucaagaacaacgcccgcgagaucggcaacggcugcuucgaguucuaccacaagugcgacaacaccugcauggaguccgucaagaacggcaccuacgacuaccccaaguacuccgaggaggccaagcucaaccgcgaggagaucgacggcgucaagcucgaguccacccgcaucuaccagauccucgccaucuacuccaccgucgccuccucccucguccucgucgucucccucggcgccaucuccuucuggaugugcuccaacggcucccuccagugccgcaucugcaucuga

SEQ ID NO: 103935 - RNA, 1701 nt, Artificial Sequence
  derived and/or modified CDS sequence (opt2) from hemagglutinin__InfluenzaA__AEW25297
augaaggccauccucgucguccuccucuacaccuucgccaccgccaacgccgacacccucugcaucggcuaccacgccaacaacuccaccgacaccgucgacaccguccucgagaagaacgucaccgucacccacuccgucaaccuccucgaggacaagcacaacggcaagcucugcaagcuccgcggcgucgccccccuccaccucggcaagugcaacaucgccggcuggauccccggcaaccccgagugcgagucccucuccaccgccuccuccugguccuacaucgucgagaccuccuccuccgacaacggcaccugcuaccccggcgacuucaucgacuacgaggagcuccgcgagcagcucuccuccgucuccuccuucgagcgcuucgagaucuuccccaagaccuccuccuggcccaaccacgaccccaacaagggcgucaccgccgccugcccccacgccggcgccaaguccuucuacaagaaccucaucuggcucgucaagaagggcaacuccuaccccaagcucuccaaguccuacaucaacgacaagggcaaggagguccucguccucuggggcauccaccaccccuccaccuccgccgaccagcagucccucuaccagaacgccgacgccuacgucuucgucggcaccucccgcuacuccaagaaguucaagcccgagaucgccauccgccccaagguccgcgaccaggagggccgcaugaacuacuacuggacccucgucgagcccggcgacaagaucaccuucgaggccaccggcaaccucgucgucccccgcuacgccuucgccauggagcgcaacgccggcuccggcaucaucaucuccgacacccccguccacgacugcaacaccaccugccagaccccccgcggcgccaucaacaccucccuccccuuccagaacauccaccccaucaccaucggcaagugccccaaguacgucaaguccaccaagcuccgccucgccaccggccuccgcaacguccccuccauccagucccgcggccucuucggcgccaucgccggcuucaucgagggcggcuggaccggcauggucgacggcugguacggcuaccaccaccagaacgagcagggcuccggcuacgccgccgaccucaaguccacccagaacgccaucgacgagaucaccaacaaggucaacuccgucaucgagaagaugaacacccaguucaccgccgucggcaaggaguucaaccaccucgagaagcgcaucgagaaccucaacaagaaggucgacgacggcuuccucgacaucuggaccuacaacgccgagcuccucguccuccucgagaacgagcgcacccucgacuaccacgacuccaacgucaagaaccucuacgagaagguccgcucccagcucaagaacaacgccaaggagaucggcaacggcugcuucgaguucuaccacaagugcgacaacaccugcauggaguccgucaagaacggcaccuacgacuaccccaaguacuccgaggaggccaagcucaaccgcgaggagaucgacggcgucaagcucgaguccacccgcaucuaccagauccucgccaucuacuccaccgucgccuccucccucguccucgucgucucccucggcgccaucuccuucuggaugugcuccaacggcucccuccagugccgcaucugcaucuga

SEQ ID NO: 103936 - RNA, 1701 nt, Artificial Sequence; identical to SEQ ID NO: 99503
  derived and/or modified CDS sequence (opt2) from hemagglutinin__InfluenzaA__AEW25306

SEQ ID NO: 103937 - RNA, 1701 nt, Artificial Sequence
  derived and/or modified CDS sequence (opt2) from hemagglutinin__InfluenzaA__AEW25315
augaaggccauccucgucguccuccucuacaccuucgccaccgccaacgccgacacccucugcaucggcuaccacgccaacaacuccaccgacaccgucgacaccguccucgagaagaacgucaccgucacccacuccgucaaccuccucgaggacaagcacaacggcaagcucugcaagcuccgcggcgucgccccccuccaccucggcaagugcaacaucgccggcuggauccucggcaaccccgagugcgagucccucuccaccgccuccuccugguccuacaucgucgagaccuccuccuccgacaacggcaccugcuaccccggcgacuucaucgacuacgaggagcuccgcgagcagcucuccuccgucuccuccuucgagcgcuucgagaucuuccccaagaccuccuccuggcccaaccacgaccccaacaagggcgucaccgccgccugcccccacgccggcgccaaguccuucuacaagaaccucaucuggcucgucaagaagggcaacuccuaccccaagcucuccaaguccuacaucaacgacaagggcaaggagguccucguccucuggggcauccaccaccccuccaccuccgccgaccagcagucccucuaccagaacgccgacgccuacgucuucgucggcaccucccgcuacuccaagaaguucaagcccgagaucgccauccgccccaagguccgcgaccaggagggccgcaugaacuacuacuggacccucgucgagcccggcgacaagaucaccuucgaggccaccggcaaccucgucgucccccgcuacgccuucgccauggagcgcaacgccggcuccggcaucaucaucuccgacacccccguccacgacugcaacaccaccugccagacccccaagggcgccaucaacaccucccuccccuuccagaacauccaccccaucaccaucggcaagugccccaaguacgucaaguccaccaagcuccgccucgccaccggccuccgcaacguccccuccauccagucccgcggccucuucggcgccaucgccggcuucaucgagggcggcuggaccggcauggucgacggcugguacggcuaccaccaccagaacgagcagggcuccggcuacgccgccgaccucaaguccacccagaacgccaucgacgagaucaccaacaaggucaacuccgucaucgagaagaugaacacccaguucaccgccgucggcaaggaguucaaccaccucgagaagcgcaucgagaaccucaacaagaaggucgacgacggcuuccucgacaucuggaccuacaacgccgagcuccucguccuccucgagaacgagcgcacccucgacuaccacgacuccaacgucaagaaccucuacgagaagguccgcucccagcucaagaacaacgccaaggagaucggcaacggcugcuucgaguucuaccacaagugcgacaacaccugcauggaguccgucaagaacggcaccuacgacuaccccaaguacuccgaggaggccaagcucaaccgcgaggagaucgacggcgucaagcucgaguccacccgcaucuaccagauccucgccaucuacuccaccgucgccuccucccucguccucgucgucucccucggcgccaucuccuucugggucugcuccaacggcucccuccagugccgcaucugcaucuga

SEQ ID NO: 103938 - RNA, 1701 nt, Artificial Sequence
  derived and/or modified CDS sequence (opt2) from hemagglutinin__InfluenzaA__AEW25331
augaaggccauccucgucguccuccucuacaccuucgccaccgccaacgccgacacccucugcaucggcuaccacgccaacaacuccaccgacaccgucgacaccguccucgagaagaacgucaccgucacccacuccgucaaccuccucgaggacaagcacaacggcaagcucugcaagcuccgcggcgucgccccccuccaccucggcaagugcaacaucgccggcuggauccucggcaaccccgagugcgaguccuucuccaccuccuccuccugguccuacaucgucgagaccuccuccuccgacaacggcaccugcuaccccggcgacuucaucgacuacgaggagcuccgcgagcagcucuccuccgucuccuccuucgagcgcuucgagaucuuccccaagaccuccuccuggcccaaccacgacuccaacaagggcgucaccgccgccugcccccacgccggcgccaaguccuucuacaagaaccucaucuggcucgucaagaagggcaacuccuaccccaagcucuccaaguccuacaucaacgacaagggcaaggagguccucguccucuggggcauccaccaccccuccaccuccgccgaccagcagucccucuaccagaacgccgacgccuacgucuucgucggcaccucccgcuacuccaagaaguucaagcccgagaucgccauccgccccaagguccgcgaccaggagggccgcaugaacuacuacuggacccucgucgagcccggcgacaagaucaccuucgaggccaccggcaaccucgucgucccccgcuacgccuucgccauggagcgcaacgccggcuccggcaucaucaucuccgacacccccguccacgacugcaacaccaccugccagacccccaagggcgccaucaacaccucccuccccuuccagaacaucccccccaucaccaucggcaagugccccaaguacgucaaguccaccaagcuccgccucgccaccggccuccgcaacguccccuccauccagucccgcggccucuucggcgccaucgccggcuucaucgagggcggcuggaccggcauggucgacggcugguacggcuaccaccaccagaacgagcagggcuccggcuacgccgccgaccucaaguccacccagaacgccaucgacgagaucaccaacaaggucaacuccgucaucgagaagaugaacacccaguucaccgccgucggcaaggaguucaaccaccucgagaagcgcaucgagaaccucaacaagaaggucgacgacggcuuccucgacaucuggaccuacaacgccgagcuccucguccuccucgagaacgagcgcacccucgacuaccacgacuccaacgucaagaaccucuacgagaagguccgcucccagcucaagaacaacgccaaggagaucggcaacggcugcuucgaguucuaccacaagugcgacaacaccugcauggaguccgucaagaacggcaccuacgacuaccccaaguacuccgaggaggccaagcucaaccgcgaggagaucgacggcgucaagcucgaguccacccgcaucuaccagauccucgccaucuacuccaccgucgccuccucccucguccucgucgucucccucggcgccaucuccuucuggaugugcuccaacggcucccuccagugccgcaucugcaucuga

SEQ ID NO: 103939 - RNA, 1701 nt, Artificial Sequence
  derived and/or modified CDS sequence (opt2) from hemagglutinin__InfluenzaA__AEW25349
augaaggccauccucgucguccuccucuacaccuucgccaccgccaacgccgacacccucugcaucggcuaccacgccaacaacuccaccgacaccgucgacaccguccucgagaagaacgucaccgucacccacuccgucaaccuccucgaggacaagcacaacggcaagcucugcaagcuccgcggcgucgccccccuccaccucggcaagugcaacaucgccggcuggauccucggcaaccccgagugcgaguccuucuccaccuccuccuccugguccuacaucgucgagaccuccuccuccgacaacggcaccugcuaccccggcgacuucaucgacuacgaggagcuccgcgagcagcucuccuccgucuccuccuucgagcgcuucgagaucuuccccaagaccuccuccuggcccaaccacgacuccaacaagggcgucaccgccgccugcccccacgccggcgccaaguccuucuacaagaaccucaucuggcucgucaagaagggcaacuccuaccccaagcucuccaaguccuacaucaacgacaagggcaaggagguccucguccucuggggcauccaccaccccuccaccuccgccgaccagcagucccucuaccagaacgccgacgccuacgucuucgucggcaccucccgcuacuccaagaaguucaagcccgagaucgccauccgccccaagguccgcgaccaggagggccgcaugaacuacuacuggacccucgucgagcccggcgacaagaucaccuucgaggccaccggcaaccucgucgucccccgcuacgccuucgccauggagcgcaacgccggcuccggcaucaucaucuccgacacccccguccacgacugcaacaccaccugccagacccccaagggcgccaucaacaccucccuccccuuccagaacauccaccccaucaccaucggcaagugccccaaguacgucaaguccaccaagcuccgccucgccaccggccuccgcaacguccccuccauccagucccgcggccucuucggcgccaucgccggcuucaucgagggcggcuggaccggcauggucgacggcugguacggcuaccaccaccagaacgagcagggcuccggcuacgccgccgaccucaaguccacccagaacgccaucgacgagaucaccaacaaggucaacuccgucaucgagaagaugaacacccaguucaccgccgucggcaaggaguucaaccaccucgagaagcgcaucgagaaccucaacaagaaggucgacgacggcuuccucgacaucuggaccuacaacgccgagcuccucguccuccucgagaacgagcgcacccucgacuaccacgacuccaacgucaagaaccucuacgagaagguccgcucccagcucaagaacaacgccaaggagaucggcaacggcugcuucgaguucuaccacaagugcgacaacaccugcauggaguccgucaagaacggcaccuacgacuaccccaaguacuccgaggaggccaagcucaaccgcgaggagaucgacggcgucaagcucgaguccacccgcaucuaccagauccucgccaucuacuccaccgucgccuccucccucguccucgucgucucccucggcgccaucuccuucuggaugugcuccaacggcucccuccagugccgcaucugcaucuga

SEQ ID NO: 103940 - RNA, 1701 nt, Artificial Sequence
  derived and/or modified CDS sequence (opt2) from hemagglutinin__InfluenzaA__AEW25367
augaaggccauccucgucguccuccucuacaccuucgccaccgccaacgccgacacccucugcaucggcuaccacgccaacaacuccaccgacaccgucgacaccguccucgagaagaacgucaccgucacccacuccgucaaccuccucgaggacaagcacaacggcaagcucugcaagcuccgcggcgucgccccccuccaccucggcaagugcaacaucgccggcuggauccucggcaaccccgagugcgaguccuucuccaccuccuccuccugguccuacaucgucgagaccuccuccuccgacaacggcaccugcuaccccggcgacuucaucgacuacgaggagcuccgcgagcagcucuccuccgucuccuccuucgagcgcuucgagaucuuccccaagaccuccuccuggcccaaccacgacuccaacaagggcgucaccgccgccugcccccacgccggcgccaaguccuucuacaagaaccucaucuggcucgucaagaagggcaacuccuaccccaagcucuccaaguccuacaucaacgacaagggcaaggagguccucguccucuggggcauccaccaccccuccaccuccgccgaccagcagcgccucuaccagaacgccgacgccuacgucuucgucggcaccucccgcuacuccaagaaguucaagcccgagaucgccauccgccccaagguccgcgaccaggagggccgcaugaacuacuacuggacccucgucgagcccggcgacaagaucaccuucgaggccaccggcaaccucgucgucccccgcuacgccuucgccauggagcgcaacgccggcuccggcaucaucaucuccgacacccccguccacgacugcaacaccaccugccagacccccaagggcgccaucaacaccucccuccccuuccagaacauccaccccaucaccaucggcaagugccccaaguacgucaaguccaccaagcuccgccucgccaccggccuccgcaacguccccuccauccagucccgcggccucuucggcgccaucgccggcuucaucgagggcggcuggaccggcauggucgacggcugguacggcuaccaccaccagaacgagcagggcuccggcuacaccgccgaccucaaguccacccagaacgccaucgacgagaucaccaacaaggucaacuccgucaucgagaagaugaacacccaguucaccgccgucggcaaggaguucaaccaccucgagaagcgcaucgagaaccucaacaagaaggucgacgacggcuuccucgacaucuggaccuacaacgccgagcuccucguccuccucgagaacgagcgcacccucgacuaccacgacuccaacgucaagaaccucuacgagaagguccgcucccagcucaagaacaacgccaaggagaucggcaacggcugcuucgaguucuaccacaagugcgacaacaccugcauggaguccgucaagaacggcaccuacgacuaccccaaguacuccgaggaggccaagcucaaccgcgaggagaucgacggcgucaagcucgaguccacccgcaucuaccagauccucgccaucuacuccaccgucgccuccucccucguccucgucgucucccucggcgccaucuccuucuggaugugcuccaacggcucccuccagugccgcaucugcaucuga

SEQ ID NO: 103941 - RNA, 1701 nt, Artificial Sequence
  derived and/or modified CDS sequence (opt2) from hemagglutinin__InfluenzaA__AEW25377
augaaggccauccucgucguccuccucuacaccuucgccaccgccaacgccgacacccucugcaucggcuaccacgccaacaacuccaccgacaccgucgacaccguccucgagaagaacgucaccgucacccacuccgucaaccuccucgaggacaagcacaacggcaagcucugcaagcuccgcggcgucgccccccuccaccucggcaagugcaacaucgccggcuggauccucggcaaccccgagugcgagucccucuccaccgccuccuccugguccuacaucgucgagaccuccuccuccgacaacggcaccugcuaccccggcgacuucaucgacuacgaggagcuccgcgagcagcucuccuccgucuccuccuucgagcgcuucgagaucuuccccaagaccuccuccuggcccaaccacgacuccaacaagggcgucaccaccgccugcccccacgccggcgccaaguccuucuacaagaaccucaucuggcucgucaagaagggcaacuccuaccccaagcucuccaaguccuacaucaacgacaagggcaaggagguccucguccucuggggcauccaccaccccuccaccuccgccgaccagcagucccucuaccagaacgccgacgccuacgucuucgucggcaccucccgcuacuccaagaaguucaagcccgagaucgccauccgccccaagguccgcgaccaggagggccgcaugaacuacuacuggacccucgucgagcccggcgacaagaucaccuucgaggccaccggcaaccucgucgucccccgcuacgccuucgccauggagcgcaacgccggcuccggcaucaucaucuccgacacccccguccacgacugcaacaccaccugccagacccccaagggcgccaucaacaccucccuccccuuccagaacauccaccccaucaccaucggcaagugccccaaguacgucaaguccaccaagcuccgccucgccaccggccuccgcaacguccccuccauccagucccgcggccucuucggcgccaucgccggcuucaucgagggcggcuggaccggcauggucgacggcugguacggcuaccaccaccagaacgagcagggcuccggcuacgccgccgaccucaaguccacccagaacgccaucgacgagaucaccaacaaggucaacuccgucaucgagaagaugaacacccaguucaccgccgucggcaaggaguucaaccaccucgagaagcgcaucgagaaccucaacaagaaggucgacgacggcuuccucgacaucuggaccuacaacgccgagcuccucguccuccucgagaacgagcgcacccucgacuaccacgacuccaacgucaagaaccucuacgagaaggucaagucccagcucaagaacaacgccaaggagaucggcaacggcugcuucgaguucuaccacaagugcgacaacgccugcauggaguccgucaagaacggcaccuacgacuaccccaaguacuccgaggaggccaagcucaaccgcgaggagaucgacggcgucaagcucgaguccacccgcaucuaccagauccucgccaucuacuccaccgucgccuccucccucguccucgucgucucccucggcgccaucuccuucuggaugugcuccaacggcucccuccagugccgcaucugcaucuga

SEQ ID NO: 103942 - RNA, 1701 nt, Artificial Sequence
  derived and/or modified CDS sequence (opt2) from hemagglutinin__InfluenzaA__AEW25385
augaaggccauccucgucguccuccucuacaccuucgccaccgccaacgccgacacccucugcaucggcuaccacgccaacaacuccaccgacaccgucgacaccguccucgagaagaacgucaccgucacccacuccgucaaccuccucgaggacaagcacaacggcaagcucugcaagcuccgcggcgucgccccccuccaccucggcaagugcaacaucgccggcuggauccucggcaaccccgagugcgagucccucuccaccgccuccuccugguccuacaucgucgagaccuccuccuccgacaacggcaccugcuaccccggcgacuucaucgacuacgaggagcuccgcgagcagcucuccuccguccccuccuucgagcgcuucgagaucuuccccaagaccuccuccuggcccaaccacgacuccaacaagggcgucaccgccgccugcccccacgccggcgccaaguccuucuacaagaaccucaucuggcucgucaagaagggcaacuccuaccccaagcucuccaaguccuacaucaacgacaagggcaaggagguccucguccucuggggcauccaccaccccuccaccuccgccgaccagcagucccucuaccagaacgccgacgccuacgucuucgucggcaccucccgcuacuccaagaaguucaagcccgagaucgccauccgccccaagguccgcgaccaggagggccgcaugaacuacuacuggacccucgucgagcccggcgacaagaucaccuucgaggccaccggcaaccucgucgucccccgcuacgccuucgccauggagcgcaacgccggcuccggcaucaucaucuccgacacccccguccacgacugcaacaccaccugccagacccccaagggcgccaucaacaccucccuccccuuccagaacauccaccccaucaccaucggcaagugccccaaguacgucaaguccaccaagcuccgccucgccaccggccuccgcaacguccccuccauccagucccgcggccucuucggcgccaucgccggcuucaucgagggcggcuggaccggcauggucgacggcugguacggcuaccaccaccagaacgagcagggcuccggcuacgccgccgaccucaaguccacccagaacgccaucgacaagaucaccaacaaggucaacuccgucaucgagaagaugaacacccaguucaccgccgucggcaaggaguucaaccaccucgagaagcgcaucgagaaccucaacaagaaggucgacgacggcuuccucgacaucuggaccuacaacgccgagcuccucguccuccucgagaacgagcgcacccucgacuaccacgacuccaacgucaagaaccucuacgagaagguccgcucccagcucaagaacaacgccaaggagaucggcaacggcugcuucgaguucuaccacaagugcgacaacaccugcauggaguccgucaagaacggcaccuacgacuaccccaaguacuccgaggaggccaagcucaaccgcgaggagaucgacggcgucaagcucgaguccacccgcaucuaccagauccucgccaucuacuccaccgucgccuccucccucguccucgucgucucccucggcgccaucuccuucuggaugugcuccaacggcucccuccagugccgcaucugcaucuga

SEQ ID NO: 103943 - RNA, 1701 nt, Artificial Sequence; identical to SEQ ID NO: 103939
  derived and/or modified CDS sequence (opt2) from hemagglutinin__InfluenzaA__AEW25416

SEQ ID NO: 103944 - RNA, 1701 nt, Artificial Sequence
  derived and/or modified CDS sequence (opt2) from hemagglutinin__InfluenzaA__AEW25446
augaaggccauccucgucguccuccucuacaccuucgccaccgccaacgccgacacccucugcaucggcuaccacgccaacaacuccaccgacaccgucgacaccguccucgagaagaacgucaccgucacccacuccgucaaccuccucgaggacaagcacaacggcaagcucugcaagcuccgcggcgucgccccccuccaccucggcaagugcaacaucgccggcuggauccucggcaaccccgagugcgagucccucuccaccgccuccuccugguccuacaucgucgagaccuccuccuccgacaacggcaccugcuaccccggcgacuucaucgacuacgaggagcuccgcgagcagcucuccuccgucuccuccuucgagcgcuucgagaucuuccccaagaccuccuccuggcccaaccacgaccccaacaagggcgucaccgccgccugcccccacgccggcgccaaguccuucuacaagaaccucaucuggcucgucaagaagggcaacuccuaccccaagcucuccaaguccuacaucaacgacaagggcaaggagguccucguccucuggggcauccaccaccccuccaccuccgccgaccagcagucccucuaccagaacgccgacgccuacgucuucgucggcaccucccgcuacuccaagaaguucaagcccgagaucgccauccgccccaagguccgcgaccaggagggccgcaugaacuacuacuggacccucgucgagcccggcgacaagaucaccuucgaggccaccggcaaccucgucgucccccgcuacgccuucgccauggagcgcaacgccggcuccggcaucaucaucuccgacacccccguccacgacugcaacaccaccugccagacccccaagggcgccaucaacaccucccuccccuuccagaacauccaccccaucaccaucggcaagugccccaaguacgucaaguccaccaagcuccgccucgccaccggccuccgcaacguccccuccauccagucccgcggccucuucggcgccaucgccggcuucaucgagggcggcuggaccggcauggucgacggcugguacggcuaccaccaccagaacgagcagggcuccggcuacgccgccgaccucaaguccacccagaacgccaucgacgagaucaccaacaaggucaacuccgucaucgagaagaugaacaagcaguucaccgccgucggcaaggaguucaaccaccucgagaagcgcaucgagaaccucaacaagaaggucgacgacggcuuccucgacaucuggaccuacaacgccgagcuccucguccuccucgagaacgagcgcacccucgacuaccacgacuccaacgucaagaaccucuacgagaagguccgcucccagcucaagaacaacgccaaggagaucggcaacggcugcuucgaguucuaccacaagugcgacaacaccugcauggaguccgucaagaacggcaccuacgacuaccccaaguacuccgaggaggccaagcucaaccgcgaggagaucgacggcgucaagcucgaguccacccgcaucuaccagauccucgccaucuacuccaccgucgccuccucccucguccucgucgucucccucggcgccaucuccuucuggaugugcuccaacggcucccuccagugccgcaucugcaucuga

SEQ ID NO: 103945 - RNA, 1701 nt, Artificial Sequence; identical to SEQ ID NO: 103939
  derived and/or modified CDS sequence (opt2) from hemagglutinin__InfluenzaA__AEW25454

SEQ ID NO: 103946 - RNA, 1701 nt, Artificial Sequence
  derived and/or modified CDS sequence (opt2) from hemagglutinin__InfluenzaA__AEW25462
augaaggccauccucgucguccuccucuacaccuucgccaccgccaacgccgacacccucugcaucggcuaccacgccaacaacuccaccgacaccgucgacaccguccucgagaagaacgucaccgucacccacuccgucaaccuccucgaggacaagcacaacggcaagcucugcaagcuccgcggcgucgccccccuccaccucggcaagugcaacaucgccggcuggauccucggcaaccccgagugcgagucccucuccaccgccuccuccugguccuacaucgucgagaccuccuccuccgacaacggcaccugcuaccccggcgacuucaucgacuacgaggagcuccgcgagcagcucuccuccgucuccuccuucgagcgcuucgagaucuuccccaagaccuccuccuggcccaaccacgaccccaacaagggcgucaccgccgccugcccccacgccggcgccaaguccuucuacaagaaccucaucuggcucgucaagaagggcaacuccuaccccaagcucuccaagcccuacaccaacgacaagggcaaggagguccucguccucuggggcauccaccaccccuccaccuccgccgaccagcagucccucuaccagaacgccgacgccuacgucuucgucggcaccucccgcuacuccaagaaguucaagcccgagaucgccauccgccccaagguccgcgaccaggagggccgcaugaacuacuacuggacccucgucgagcccggcgacaagaucaccuucgaggccaccggcaaccucgucgucccccgcuacgccuucgccauggagcgcaacgccggcuccggcaucaucaucuccgacacccccguccacgacugcaacaccaccugccagacccccaagggcgccaucaacaccucccuccccuuccagaacauccaccccaucaccaucggcaagugccccaaguacgucaaguccaccaagcuccgccucgccaccggccuccgcaacguccccuccauccagucccgcggccucuucggcgccaucgccggcuucaucgagggcggcuggaccggcauggucgacggcugguacggcuaccaccaccagaacgagcagggcuccggcuacgccgccgaccucaaguccacccagaacgccaucgacgagaucaccaacaaggucaacuccgucaucgagaagaugaacacccaguucaccgccgucggcaaggaguucaaccaccucgagaagcgcaucgagaaccucaacaagaaggucgacgacggcuuccucgacaucuggaccuacaacgccgagcuccucguccuccucgagaacgagcgcacccucgacuaccacgacuccaacgucaagaaccucuacgagaagguccgcucccagcucaagaacaacgccaaggagaucggcaacggcugcuucgaguucuaccacaagugcgacaacaccugcauggaguccgucaagaacggcaccuacgacuaccccaaguacuccgaggaggccaagcucaaccgcgaggagaucgacggcgucaagcucgaguccacccgcaucuaccagauccucgccaucuacuccaccgucgccuccucccucguccucgucgucucccucggcgccaucuccuucuggaugugcuccaacggcucccuccagugccgcaucugcaucuga

SEQ ID NO: 103947 - RNA, 1701 nt, Artificial Sequence; identical to SEQ ID NO: 99503
  derived and/or modified CDS sequence (opt2) from hemagglutinin__InfluenzaA__AEW25472

SEQ ID NO: 103948 - RNA, 1701 nt, Artificial Sequence
  derived and/or modified CDS sequence (opt2) from hemagglutinin__InfluenzaA__AEW25482
augaaggccauccucgucguccuccucuacaccuucgccaccgccaacgccgacacccucugcaucggcuaccacgccaacaacuccaccgacaccgucgacaccguccucgagaagaaggucaccgucacccacuccgucaaccuccucgaggacaagcacaacggcaagcucugcaagcuccgcggcgucgccccccuccaccucggcaagugcaacaucgccggcuggauccucggcaaccccgagugcgagucccucuccaccgccuccuccugguccuacaucgucgagaccuccaacuccgacaacggcaccugcuaccccggcgacuucaucgacuacgaggagcuccgcgagcagcucuccuccgucuccuccuucgagcgcuucgagaucuuccccaagaccuccuccuggcccaaccacgaccccaacaagggcgucaccgccgccugcccccacgccggcgccaaguccuucuacaagaaccucaucuggcucgucaagaagggcaacuccuaccccaagcucuccaaguccuacaucaacgacaagggcaaggagguccucguccucuggggcauccaccaccccuccaccuccgccgaccagcagucccucuaccagaacgccgacgccuacgucuucgucggcaccucccgcuacuccaagaaguucaagcccgagaucgccauccgccccaagguccgcgaccagggcggccgcaugaacuacuacuggacccucgucgagcccggcgacaagaucaccuucgaggccaccggcaaccucgucgucccccgcuacgccuucgccauggagcgcaacgccggcuccggcaucaucaucuccgacacccccguccacgacugcaacaccaccugccagacccccaagggcgccaucaacaccucccuccccuuccagaacauccaccccaucaccaucggcaagugccccaaguacgucaaguccaccaagcuccgccucgccaccggccuccgcaacguccccuccauccagucccgcggccucuucggcgccaucgccggcuucaucgagggcggcuggaccggcauggucgacggcugguacggcuaccaccaccagaacgagcagggcuccggcuacgccgccgaccucaaguccacccagaacgccaucgacgagaucaccaacaaggucaacuccgucaucgagaagaugaacacccaguucaccgccgucggcaaggaguucaaccaccucgagaagcgcaucgagaaccucaacaagaaggucgacgacggcuuccucgacaucuggaccuacaacgccgagcuccucguccuccucgagaacgagcgcacccucgacuaccacgacuccaacgucaagaaccucuacgagaagguccgcucccagcucaagaacaacgccaaggagaucggcaacggcugcuucgagcucuaccacaagugcgacaacaccugcauggaguccgucaagaacggcaccuacgacuaccccaaguacuccgaggaggccaagcucaaccgcgaggagaucgacggcgucaagcucgaguccacccgcaucuaccagauccucgccaucuacuccaccgucgccuccucccucguccucgucgucucccucggcgccaucuccuucuggaugugcuccaacggcucccuccagugccgcaucugcaucuga

SEQ ID NO: 103949 - RNA, 1701 nt, Artificial Sequence
  derived and/or modified CDS sequence (opt2) from hemagglutinin__InfluenzaA__AEW25492
augaaggccauccucgucguccuccucuacaccuucgccaccgccaacgccgacacccucugcaucggcuaccacgccaacaacuccaccgacaccgucgacaccguccucgagaagaacgucaccgucacccacuccgucaaccuccucgaggacaagcacaacggcaagcucugcaagcuccgcggcgucgccccccuccaccucggcaagugcaacaucgccggcuggauccucggcaaccccgagugcgagucccucuccaccgccuccuccugguccuacaucgucgagaccuccuccuccgacaacggcaccugcuaccccggcgacuucaucgacuacgaggagcuccgcgagcagcucuccuccgucuccuccuucgagcgcuucgagaucuuccccaagaccuccuccuggcccaaccacgaccccaacaagggcgucaccgccgccugcccccacgccggcgccaaguccuucuacaagaaccucaucuggcucgucaagaagggcaacuccuaccccaagcucuccaaguccuacaucaacgacaagggcaaggagguccucguccucuggggcauccaccaccccuccaccuccgccgaccagcagucccucuaccagaacgccgacgccuacaucuucgucggcaccucccgcuacuccaagaaguucaagcccgagaucgccauccgccccaagguccgcgaccaggagggccgcaugaacuacuacuggacccucgucgagcccggcgacaagaucaccuucgaggccaccggcaaccucgucgucccccgcuacgccuucgccauggagcgcaacgccggcuccggcaucaucaucuccgacacccccguccacgacugcaacaccaccugccagacccccaagggcgccaucaacaccucccuccccuuccagaacauccaccccaucaccaucggcaagugccccaaguacgucaaguccaccaagcuccgccucgccaccggccuccgcaacguccccuccauccagucccgcggccucuucggcgccaucgccggcuucaucgagggcggcuggaccggcauggucgacggcugguacggcuaccaccaccagaacgagcagggcuccggcuacgccgccgaccucaaguccacccagaacgccaucgacgagaucaccaacaaggucaacuccgucaucgagaagaugaacacccaguucaccgccgucggcaaggaguucaaccaccucgagaagcgcaucgagaaccucaacaagaaggucgacgacggcuuccucgacaucuggaccuacaacgccgagcuccucguccuccucgagaacgagcgcacccucgacuaccacgacuccaacgucaagaaccucuacgagaagguccgcucccagcucaagaacaacgccaaggagaucggcaacggcugcuucgaguucuaccacaagugcgacaacaccugcauggaguccgucaagaacggcaccuacgacuaccccaaguacuccgaggaggccaagcucaaccgcgaggagaucgacggcgucaagcucgaguccacccgcaucuaccagauccucgccaucuacuccaccgucgccuccucccucguccucgucgucucccucggcgccaucuccuucuggaugugcuccaacggcucccuccagugccgcaucugcaucuga

SEQ ID NO: 103950 - RNA, 1701 nt, Artificial Sequence
  derived and/or modified CDS sequence (opt2) from hemagglutinin__InfluenzaA__AEW25501
augaaggccauccucgucguccuccucuacaccuucgccaccgccaacgccgacacccucugcaucggcuaccacgccaacaacuccaccgacaccgucgacaccguccucgagaagaacgucaccgucacccacuccgucaaccuccucgaggacaagcacaacggcaagcucugcaagcuccgcggcgucgccccccuccaccucggcaagugcaacaucgccggcuggauccucggcaaccccgagugcgagucccucuccaccgccuccuccugguccuacaucgucgagaccuccuccuccgacaacggcaccugcuaccccggcgacuucaucgacuacgaggagcuccgcgagcagcucuccuccgucuccuccuucgagaaguucgagaucuuccccaagaccuccuccuggcccaaccacgacuccaacaagggcgucaccgccgccugcccccacgccggcgccaaguccuucuacaagaaccucaucugccucgucaagaagggcaacuccuaccccaagcucuccaaguccuacaucaacgacaagggcaaggagguccucguccucuggggcauccaccaccccuccaccuccgccgaccagcagucccucuaccagaacgccgacgccuacgucuucgucggcaccucccgcuacuccaagaaguucaagcccgagaucgccauccgccccaagguccgcgaccaggagggccgcaugaacuacuacuggacccucgucgagcccggcgacaagaucaccuucgaggccaccggcaaccucgucgucccccgcuacgccuucgccauggagcgcaacgccggcuccggcaucaucaucuccgacacccccguccacgacugcaacaccaccugccagacccccaagggcgccaucaacaccucccuccccuuccagaacauccaccccaucaccaucggcaagugccccaaguacgucaaguccaccaagcuccgccucgccaccggccuccgcaacguccccuccauccagucccgcggccucuucggcgccaucgccggcuucaucgagggcggcuggaccggcauggucgacggcugguacggcuaccaccaccagaacgagcagggcuccggcuacgccgccgaccucaaguccacccagaacgccaucgacaagaucaccaacaaggucaacuccgucaucgagaagaugaacacccaguucaccgccgucggcaaggaguucaaccaccucgagaagcgcaucgagaaccucaacaagaaggucgacgacggcuuccucgacaucuggaccuacaacgccgagcuccucguccuccucgagaacgagcgcacccucgacuaccacgacuccaacgucaagaaccucuacgagaagguccgcucccagcucaagaacaacgccaaggagaucggcaacggcugcuucgaguucuaccacaagugcgacaacaccugcauggaguccgucaagaacggcaccuacgacuaccccaaguacuccgaggaggccaagcucaaccgcgaggagaucgacggcgucaagcucgaguccacccgcaucuaccagauccucgccaucuacuccaccgucgccuccucccucguccucgucgucucccucggcgccaucuccuucuggaugugcuccaacggcucccuccagugccgcaucugcaucuga

SEQ ID NO: 103951 - RNA, 1701 nt, Artificial Sequence; identical to SEQ ID NO: 103939
  derived and/or modified CDS sequence (opt2) from hemagglutinin__InfluenzaA__AEW25509

SEQ ID NO: 103952 - RNA, 1701 nt, Artificial Sequence
  derived and/or modified CDS sequence (opt2) from hemagglutinin__InfluenzaA__AEW25519
augaaggccauccucgucguccuccucuacaccuucgccaccgccaacgccgacacccucugcaucggcuaccacgccaacaacuccaccgacaccgucgacaccguccucgagaagaacgucaccgucacccacuccgucaaccuccucgaggacaagcacaacggcaagcucugcaagcuccgcggcgucgccccccuccaccucggcaagugcaacaucgccggcuggauccucggcaaccccgagugcgagucccucuccaccgccuccuccugguccuacaucgucgagaccuccuccuccgacaacggcaccugcuaccccggcgacuucaucgacuacgaggagcuccgcgagcagcucuccuccgucuccuccuucgagcgcuucgagaucuuccccaagaccuccuccuggcccaaccacgaccccaacaagggcgucaccgccgccugcccccacaccggcgccaaguccuucuacaagaaccucaucuggcucgucaagaagggcaacuccuaccccaagcucuccaaguccuacaucaacgacaagggcaaggagguccucguccucuggggcauccaccaccccuccaccuccgccgaccagcagucccucuaccagaacgccgacgccuacgucuucgucggcaccucccgcuacuccaagaaguucaagcccgagaucgccauccgccccaagguccgcgaccaggagggccgcaugaacuacuacuggacccucgucgagcccggcgacaagaucaccuucgaggccaccggcaaccucgucgucccccgcuacgccuucgccauggagcgcaacgccggcuccggcaucaucaucuccgacacccccguccacgacugcaacaccaccugccagacccccaagggcgccaucaacaccucccuccccuuccagaacauccaccccaucaccaucggcaagugccccaaguacgucaaguccaccaagcuccgccucgccaccggccuccgcaacguccccuccauccagucccgcggccucuucggcgccaucgccggcuucaucgagggcggcuggaccggcauggucgacggcugguacggcuaccaccaccagaacgagcagggcuccggcuacgccgccgaccucaaguccacccagaacgccaucgacgagaucaccaacaaggucaacuccgucaucgagaagaugaacacccaguucaccgccgucggcaaggaguucaaccaccucgagaagcgcaucgagaaccucaacaagaaggucgacgacggcuuccucgacaucuggaccuacaacgccgagcuccucguccuccucgagaacgagcgcacccucgacuaccacgacuccaacgucaagaaccucuacgagaagguccgcucccagcucaagaacaacgccaaggagaucggcaacggcugcuucgaguucuaccacaagugcgacaacaccugcauggaguccgucaagaacggcaccuacgacuaccccaaguacuccgaggaggccaagcucaaccgcgagaagaucgacggcgucaagcucgaguccacccgcaucuaccagauccucgccaucuacuccaccgucgccuccucccucguccucgucgucucccucggcgccaucuccuucuggaugugcuccaacggcucccuccagugccgcaucugcaucuga

SEQ ID NO: 103953 - RNA, 1701 nt, Artificial Sequence
  derived and/or modified CDS sequence (opt2) from hemagglutinin__InfluenzaA__AEW25528
augaaggccauccucgucguccuccucuacaccuucgccaccgccaacgccgacacccucugcaucggcuaccacgccaacaacuccaccgacaccgucgacaccguccucgagaagaacgucaccgucacccacuccgucaaccuccucgaggacaagcacaacggcaagcucugcaagcuccgcggcgucgccccccuccaccucggcaagugcaacaucgccggcuggauccucggcaaccccgagugcgaguccuucuccaccuccuccuccugguccuacaucgucgagaccuccuccuccgacaacggcaccugcuaccccggcgacuucaucgacuacgaggagcuccgcgagcagcucuccuccgucuccuccuucgagcgcuucgagaucuuccccaagaccuccuccuggcccaaccacgacuccaacaagggcgucaccgccgccugcccccacgccggcgccaaguccuucuacaagaaccucaucuggcucgucaagaagggcaacuccuaccccaagcucuccaaguccuacaucaacgacaagggcaaggagguccucguccucuggggcauccaccaccccuccaccuccgccgaccagcagucccucuaccagaacgccgacgccuacgucuucgucggcaccucccgcuacuccaagaaguucaagcccgagaucgccauccgccccaagguccgcgaccaggagcgccgcaugaacuacuacuggacccucgucgagcccggcgacaagaucaccuucgaggccaccggcaaccucgucgucccccgcuacgccuucgccauggagcgcaacgccggcuccggcaucaucaucuccgacacccccguccacgacugcaacaccaccugccagacccccaagggcgccaucaacaccucccuccccuuccagaacauccaccccaucaccaucggcaagugccccaaguacgucaaguccaccaagcuccgccucgccaccggccuccgcaacguccccuccauccagucccgcggccucuucggcgccaucgccggcuucaucgagggcggcuggaccggcauggucgacggcugguacggcuaccaccaccagaacgagcagggcuccggcuacgccgccgaccucaaguccacccagaacgccaucgacgagaucaccaacaaggucaacuccgucaucgagaagaugaacacccaguucaccgccgucggcaaggaguucaaccaccucgagaagcgcaucgagaaccucaacaagaaggucgacgacggcuuccucgacaucuggaccuacaacgccgagcuccucguccuccucgagaacgagcgcacccucgacuaccacgacuccaacgucaagaaccucuacgagaagguccgcucccagcucaagaacaacgccaaggagaucggcaacggcugcuucgaguucuaccacaagugcgacaacaccugcauggaguccgucaagaacggcaccuacgacuaccccaaguacuccgaggaggccaagcucaaccgcgaggagaucgacggcgucaagcucgaguccacccgcaucuaccagauccucgccaucuacuccaccgucgccuccucccucguccucgucgucucccucggcgccaucuccuucuggaugugcuccaacggcucccuccagugccgcaucugcaucuga

SEQ ID NO: 103954 - RNA, 1701 nt, Artificial Sequence
  derived and/or modified CDS sequence (opt2) from hemagglutinin__InfluenzaA__AEW25545
augaaggccauccucgucguccuccucuacaccuucgccaccgccaacgccgacacccucugcaucggcuaccacgccaacaacuccaccgacaccgucgacaccguccucgagaagaacgucaccgucacccacuccgucaaccuccucgaggacaagcacaacggcaagcucugcaagcuccgcggcgucgccccccuccaccucggcaagugcaacaucgccggcuggauccucggcaaccccgagugcgagucccucuccaccgccuccuccugguccuacaucgucgagaccuccuccuccgacaacggcaccugcuaccccggcgacuucaucgacuacgaggagcuccgcgagcagcucuccuccgucuccuccuucgagcgcuucgagaucuuccccaagaccuccuccuggcccaaccacgaccccaacaagggcgucaccgccgccugcccccacgccggcgccaaguccuucuacaagaaccucaucuggcucgucaagaagggcaacuccuaccccaagcucuccaaguccuacaucaacgacaagggcaaggagguccucguccucuggggcauccaccaccccuccaccuccgccgaccagcagucccucuaccagaacgccgacgccuacgucuucgucggcaccucccgcuacuccaagaaguucaagcccgagaucgccauccgccccaagguccgcgaccaggagggccgcaugaacuacuacuggacccucgucgagcccggcgacaagaucaccuucgaggccaccggcaaccucgucgucccccgcuacgccuucgccauggagcgcaacgccggcuccggcaucaucaucuccgacacccccguccacgacugcaacaccaccugccagacccccaagggcgccaucaacaccucccuccccuuccagaacauccaccccaucaccaucggcaagugccccaaguacgucaaguccaccaagcuccgccucgccaccggccuccgcaacguccccuccauccagucccgcggccucuucggcgccaucgccggcuucaucgagggcggcuggaccggcauggucgacggcugguacggcuaccaccaccagaacgagcagggcuccggcuacgccgccgaccucaaguccacccagaacgccaucgacaagaucaccaacaaggucaacuccgucaucgagaagaugaacacccaguucaccgccgucggcaaggaguucaaccaccucgagaagcgcaucgagaaccucaacaagaaggucgacgacggcuuccucgacaucuggaccuacaacgccgagcuccucguccuccucgagaacgagcgcacccucgacuaccacgacuccaacgucaagaaccucuacgagaagguccgcucccagcucaagaacaacgccaaggagaucggcaacggcugcuucgaguucuaccacaagugcgacaacaccugcauggaguccgucaagaacggcuccuacgacuaccccaaguacuccgaggaggccaagcucaaccgcgaggagaucgacggcgucaagcucgaguccacccgcaucuaccagauccucgccaucuacuccaccgucgccuccucccucgucauggucgucucccucggcgccaucuccuucuggaugugcuccaacggcucccuccagugccgcaucugcaucuga

SEQ ID NO: 103955 - RNA, 1701 nt, Artificial Sequence
  derived and/or modified CDS sequence (opt2) from hemagglutinin__InfluenzaA__AEW25555
augaaggccauccucgucguccuccucuacaccuucgccaccgccaacgccgacacccucugcaucggcuaccacgccaacaacuccaccgacaccgucgacaccguccucgagaagaacgucaccgucacccacuccgucaaccuccucgaggacaagcacaacggcaagcucugcaagcuccgcggcgucgccccccuccaccucggcaagugcaacaucgccggcuggauccucggcaaccccgagugcgagucccucuccaccgccuccuccugguccuacaucgucgagaccuccuccuccgacaacggcaccugcuaccccggcgacuucaucgacuacgaggagcuccgcgagcagcucuccuccgucuccuccuucgagcgcuucgagaucuuccccaagaccuccuccuggcccaaccacgaccccaacaagggcgucaccgccgccugcccccacgccggcgccaaguccuucuacaagaaccucaucuggcucgucaagaagggcaacuccuaccccaagcucuccaaguccuacaucaacgacaagggcaaggagguccucguccucuggggcauccaccaccccuccaccuccgccgaccagcagucccucuaccagaacgccgacgccuacgucuucgucggcaccucccgcuacuccaagaaguucaagcccgagaucgccauccgccccaagguccgcgaccaggagggccgcaugaacuacuacuggacccucgucgagcccggcgacaagaucaccuucgaggccaccggcaaccucgucgucccccgcuacgccuucgccauggagcgcaacgccggcuccggcaucaucaucuccgacacccccguccacuacugcaacaccaccugccagacccccaagggcgccaucaacaccucccuccccuuccagaacauccaccccaucaccaucggcaagugccccaaguacgucaaguccaccaagcuccgccucgccaccggccuccgcaacguccccuccauccagucccgcggccucuucggcgccaucgccggcuucaucgagggcggcuggaccggcauggucgacggcugguacggcuaccaccaccagaacgagcagggcuccggcuacgccgccgaccucaaguccacccagaacgccaucgacgagaucaccaacaaggucaacuccgucaucgagaagaugaacacccaguucaccgccgucggcaaggaguucaaccaccucgagaagcgcaucgagaaccucaacaagaaggucgacgacggcuuccucgacaucuggaccuacaacgccgagcuccucguccuccucgagaacgagcgcacccucgacuaccacgacuccaacgucaagaaccucuacgagaagguccgcucccagcucaagaacaacgccaaggagaucggcaacggcugcuucgaguucuaccacaagugcgacaacaccugcauggaguccgucaagaacggcaccuacgacuaccccaaguacuccgaggaggccaagcucaaccgcgaggagaucgacggcgucaagcucgaguccacccgcaucuaccagauccucgccaucuacuccaccgucgccuccucccucguccucgucgucucccucggcgccaucuccuucuggaugugcuccaacggcucccuccagugccgcaucugcaucuga

SEQ ID NO: 103956 - RNA, 1701 nt, Artificial Sequence
  derived and/or modified CDS sequence (opt2) from hemagglutinin__InfluenzaA__AEW25564
augaaggccauccucgucguccuccucuacaccuucgccaccgccaacgccgacacccucugcaucggcuaccacgccaacaacuccaccgacaccgucgacaccguccucgagaagaacgucaccgucacccacuccgucaaccuccucgaggacaagcacaacggcaagcucugcaagcuccgcggcgucgccccccuccaccucggcaagugcaacaucgccggcuggauccucggcaaccccgagugcgagucccucuccaccgccuccuccugguccuacaucgucgagaccuccuccuccgacaacggcaccugcuaccccggcgacuucaucgacuacgaggagcuccgcgagcagcucuccuccgucuccuccuucgagcgcuucgagaucuuccccaagaccuccuccuggcccaaccacgacuccaacaagggcgucaccgccgccugcccccacgccggcgccaaguccuucuacaagaaccucaucuggcucgucaagaagggcaacuccuaccccaagcucuccaaguccuacaucaacgacaagggcaaggagguccucguccucuggggcauccaccaccccuccaccuccgccgaccagcagucccucuaccagaacgccgacgccuacgucuucgucggcaccucccgcuacuccaagaaguucaagcccgagaucgccauccgccccaagguccgcgaccaggagggccgcaugaacuacuacuggacccucgucgagcccggcgacaagaucaccuucgaggccaccggcaaccucgucgucccccgcuacgccuucgccauggagcgcaacgccggcuccggcaucaucaucuccgacacccccguccacgacugcaacaccaccugccagacccccaagggcgcccucaacaccucccuccccuuccagaacauccaccccaucaccaucggcaagugccccaaguacgucaaguccaccaagcuccgccucgccaccggccuccgcaacguccccuccauccagucccgcggccucuucggcgccaucgccggcuucaucgagggcggcuggaccggcauggucgacggcugguacggcuaccaccaccagaacgagcagggcuccggcuacgccgccgaccucaaguccacccagaacgccaucgacgagaucaccaacaaggucaacuccgucaucgagaagaugaacacccaguucaccgccgucggcaaggaguucaaccaccucgagaagcgcaucgagaaccucaaccgcaaggucgacgacggcuuccucgacaucuggaccuacaacgccgagcuccucguccuccucgagaacgagcgcacccucgacuaccacgacuccaacgucaagaaccucuacgagaagguccgcucccagcucaagaacaacgccaaggagaucggcaacggcugcuucgaguucuaccacaagugcgacaacaccugcauggaguccgucaagaacggcaccuacgacuaccccaaguacuccgaggaggccaagcucaaccgcgaggagaucgacggcgucaagcucgaguccaccggcaucuaccagauccucgccaucuacuccaccgucgccuccucccucguccucgucgucucccucggcgccaucuccuucuggaugugcuccaacggcucccuccagugccgcaucugcaucuga

SEQ ID NO: 103957 - RNA, 1701 nt, Artificial Sequence; identical to SEQ ID NO: 99503
  derived and/or modified CDS sequence (opt2) from hemagglutinin__InfluenzaA__AEW25573

SEQ ID NO: 103958 - RNA, 1701 nt, Artificial Sequence
  derived and/or modified CDS sequence (opt2) from hemagglutinin__InfluenzaA__AEW25582
augaaggccauccucgucguccuccucuacaccuucgccaccgccaacgccgacacccucugcaucggcuaccacgccaacaacuccaccgacaccgucgacaccguccucgagaagaacgucaccgucacccacuccgucaaccuccucgaggacaagcacaacggcaagcucugcaagcuccgcggcgucgccccccuccaccucggcaagugcaacaucgccggcuggauccucggcaaccccgagugcgagucccucuccaccgccuccuccugguccuacaucgucgagaccuccuccuccgacaacggcaccugcuaccccggcgacuucaucgacuacgaggagcuccgcgagcagcucuccuccgucuccuccuucgagcgcuucgagaucuuccccaagaccuccuccuggcccaaccacgacuccaacaagggcgucaccgccgccugcccccacgccggcgccaaguccuucuacaagaaccucaucuggcucgucaagaagggcaacuccuaccccaagcucuccaaguccuacaucaacgacaagggcaaggagguccucguccucuggggcauccaccaccccuccaccuccgccgaccagcagucccucuaccagaacgccgacgccuacgucuucgucggcaccucccgcuacuccaagaaguucaagcccgagaucgccauccgccccaagguccgcgaccaggagggccgcaugaacuacuacuggacccucgucgagcccggcgacaagaucaccuucgaggccaccggcaaccucgucgucccccgcuacgccuucgccauggagcgcaacgccggcuccggcaucauccucuccgacacccccguccacgacugcaacaccaccugccagacccccaagggcgccaucaacaccucccuccccuuccagaacauccaccccaucaccaucggcaagugccccaaguacgucaaguccaccaagcuccgccucgccaccggccuccgcaacguccccuccauccagucccgcggccucuucggcgccaucgccggcuucaucgagggcggcuggaccggcauggucgacggcugguacggcuaccaccaccagaacggccagggcuccggcuacgccgccgaccucaaguccacccagaacgccaucgacaagaucaccaacaaggucaacuccgucaucgagaagaugaacacccaguucaccgccgucggcaaggaguucaaccaccucgagaagcgcaucgagaaccucaacaagaaggucgacgacggcuuccucgacaucuggaccuacaacgccgagcuccucguccuccucgagaacgagcgcacccucgacuaccacgacuccaacgucaagaaccucuacgagaagguccgcucccagcucaagaacaacgccaaggagaucggcaacggcugcuucgaguucuaccacaagugcgacaacaccugcauggaguccgucaagaacggcaccuacgacuaccccaaguacuccgaggaggccaagcucaaccgcgaggagaucgacggcgucaagcucgaguccacccgcaucuaccagauccucgccaucuacuccaccgucgccuccucccucguccucgucgucucccucggcgccaucuccuucuggaugugcuccaacggcucccuccagugccgcaucugcaucuga

SEQ ID NO: 103959 - RNA, 1701 nt, Artificial Sequence
  derived and/or modified CDS sequence (opt2) from hemagglutinin__InfluenzaA__AEW25590
augaaggccauccucgucguccuccucuacaccuucgccaccgccaacgccgacacccucugcaucggcuaccacgccaacaacuccaccgacaccgucgacaccguccucgagaagaacgucaccgucacccaguccgucaaccuccucgaggacaagcacaacggcaagcucugcaagcuccgcggcgucgccccccuccaccucggcaagugcaacaucgccggcuggauccucggcaaccccgagugcgagucccucuccaccgccuccuccugguccuacaucgucgagaccuccuccuccgacaacggcaccugcuaccccggcgacuucaucgacuacgaggagcuccgcgagcagcucuccuccgucuccuccuucgagcgcuucgagaucuuccccaagaccuccuccuggcccaaccacgacuccaacaagggcgucaccgccgccugcccccacgccggcgccaaguccuucuacaagaaccucaucuggcucgucaagaagggcaacuccuaccccaagcucuccaaguccuacaucaacgacaagggcaaggagguccucguccucuggggcauccaccaccccuccaccuccgccgaccagcagucccucuaccagaacgccgacgccuacgucuucgucggcaccucccgcuacuccaagaaguucaagcccgagaucgccauccgccccaagguccgcgaccaggaggcccgcaugaacuacuacuggacccucgucgagcccggcgacaagaucaccuucgaggccaccggcaaccucgucgucccccgcuacgccuucgccauggagcgcgacgccggcuccggcaucaucaucuccgacacccccguccacgacugcaacaccaccugccagacccccaagggcgccaucaacaccucccuccccuuccagaacauccaccccaucaccaucggcaagugccccaaguacgucaaguccaccaagcuccgccucgccaccggccuccgcaacguccccuccauccagucccgcggccucuucggcgccaucgccggcuucaucgagggcggcuggaccggcauggucgacggcugguacggcuaccaccaccagaacgagcagggcuccggcuacgccgccgaccucaaguccacccagaacgccaucgacgagaucaccaacaaggucaacuccgucaucgagaagaugaacacccaguucaccgccgucggcaaggaguucaaccaccucgagaagcgcaucgagaaccucaacaagaaggucgacgacggcuuccucgacaucuggaccuacaacgccgagcuccucguccuccucgagaacgagcgcacccucgacuaccacgacuccaacgucaagaaccuccacgagaagguccgcucccagcucaagaacaacgccaaggagaucggcaacggcugcuucgaguucuaccacaagugcgacaacaccugcauggaguccgucaagaacggcaccuacgacuaccccaaguacuccgaggaggccaagcucaaccgcgaggagaucgacggcgucaagcucgaguccacccgcaucuaccagauccucgccaucuacuccaccgucgccuccucccucguccucgucgucucccucggcgccaucuccuucuggaugugcuccaacggcucccuccagugccgcaucugcaucuga

SEQ ID NO: 103960 - RNA, 1701 nt, Artificial Sequence; identical to SEQ ID NO: 99503
  derived and/or modified CDS sequence (opt2) from hemagglutinin__InfluenzaA__AEW25600

SEQ ID NO: 103961 - RNA, 1701 nt, Artificial Sequence; identical to SEQ ID NO: 99503
  derived and/or modified CDS sequence (opt2) from hemagglutinin__InfluenzaA__AEW25620

SEQ ID NO: 103962 - RNA, 1701 nt, Artificial Sequence
  derived and/or modified CDS sequence (opt2) from hemagglutinin__InfluenzaA__AEW25629
augaaggccauccucgucguccuccucuacaccuucgccaccgccaacgccgacacccucugcaucggcuaccacgccaacaacuccaccgacaccgucgacaccguccucgagaagaacgucaccgucacccacuccgucaaccuccucgaggacaagcacaacggcaagcucugcaagcuccgcggcgucgccccccuccaccucggcaagugcaacaucgccggcuggauccucggcaaccccgagugcgagucccucuccaccgccuccuccugguccuacaucgucgagaccuccuccuccgacaacggcaccugcuaccccggcgacuucaucgacuacgaggagcuccgcgagcagcucuccuccgucuccuccuucgagcgcuucgagaucuuccccaagaccuccuccuggcccaaccacgaccccaacaagggcgucaccgccgccugcccccacgccgaggccaaguccuucuacaagaaccucaucuggcucgucaagaagggcaacuccuaccccaagcucuccaaguccuacaucaacgacaagggcaaggagguccucguccucuggggcauccaccaccccuccaccuccgccgaccagcagucccucuaccagaacgccgacgccuacgucuucgucggcaccucccgcuacuccaagaaguucaagcccgagaucgccauccgccccaagguccgcgaccaggagggccgcaugaacuacuacuggacccucgucgagcccggcgacaagaucaccuucgaggccaccggcaaccucgucgucccccgcuacgccuucgccauggagcgcaacgccggcuccggcaucaucaucuccgacacccccguccacgacugcaacaccaccugccagacccccaagggcgccaucaacaccucccuccccuuccagaacauccaccccaucaccaucggcaagugccccaaguacgucaaguccaccaagcuccgccucgccaccggccuccgcaacguccccuccauccagucccgcggccucuucggcgccaucgccggcuucaucgagggcggcuggaccggcauggucgacggcugguacggcuaccaccaccagaacgagcagggcuccggcuacgccgccgaccucaaguccacccagaacgccaucgacgagaucaccaacaaggucaacuccgucaucgagaagaugaacacccaguucaccgccgucggcaaggaguucaaccaccucgagaagcgcaucgagaaccucaacaagaaggucgacgacggcuuccucgacaucuggaccuacaacgccgagcuccucguccuccucgagaacgagcgcacccucgacuaccacgacuccaacgucaagaaccucuacgagaagguccgcucccagcucaagaacaacgccaaggagaucggcaacggcugcuucgaguucuaccacaagugcgacaacaugugcauggaguccgucaagaacggcaccuacgacuaccccaaguacuccgaggaggccaagcucaaccgcgaggagaucgacggcgucaagcucgaguccacccgcaucuaccagauccucgccaucuacuccaccgucgccuccucccucguccucgucgucucccucggcgccaucuccuucuggaugugcuccaacggcucccuccagugccgcaucugcaucuga

SEQ ID NO: 103963 - RNA, 1701 nt, Artificial Sequence; identical to SEQ ID NO: 98705
  derived and/or modified CDS sequence (opt2) from hemagglutinin__InfluenzaA__AEW25637

SEQ ID NO: 103964 - RNA, 1701 nt, Artificial Sequence
  derived and/or modified CDS sequence (opt2) from hemagglutinin__InfluenzaA__AEW25646
augaaggccauccucgucguccuccucuacaccuucgccaccgccaacgccgacacccucugcaucggcuaccacgccaacaacuccaccgacaccgucgacaccguccucgagaagaacgucaccgucacccacuccgucaaccuccucgaggacaagcacaacggcaagcucugcaagcuccgcggcgucgccccccuccaccucggcaagugcaacaucgccggcuggauccucggcaaccccgagugcgagucccucuccaccgccuccuccugguccuacaucgucgagaccuccuccuccgacaacggcaccugcuaccccggcgacuucaucgacuacgaggagcuccgcgagcagcucuccuccgucuccuccuucgagcgcuucgagaucuuccccaagaccuccuccuggcccaaccacgaccccaacaagggcgucaccgccgccugcccccacgccggcgccaaguccuucuacaagaaccucaucuggcucgucaagaagggcaacuccuaccccaagcucuccaaguccuacaucaacgacaagggcaaggagguccucguccucuggggcauccaccaccccuccaccuccgccgaccagcagucccucuaccagaacgccgacgccuacgucuucgucggcaccucccgcuacuccaagaaguucaagcccgagaucgccauccgccccaagguccgcgaccaggagggccgcaugaacuacuacuggacccucgucgagcccggcgacaagaucaccuucgaggccaccggcaaccucgucgucccccgcuacgccuucgccauggagcgcaacgccggcuccggcaucaucaucuccgacacccccguccacgacugcaacaccaccugccagacccccaagggcgccaucaacaccucccuccccuuccagaacauccaccccaucaccaucggcaagugccccaaguacgucaaguccaccaagcuccgccucgccaccggccuccgcaacguccccuccauccagucccgcggccucuucggcgccaucgccggcuucaucgagggcggcuggaccggcauggucgacggcugguacggcuaccaccaccagaacgagcagggcuccggcuacgccgccgaccucaaguccacccagaacgccaucgacaagaucaccaacaaggucaacuccgucaucgagaagaugaacacccaguucaccgccgucggcaaggaguucaaccaccucgagaagcgcaucgagaaccucaacaagaaggucgacgacggcuuccucgacaucuggaccuacaacgccgagcuccucguccuccucgagaacgagcgcacccucgacuaccacgacuccaacgucaagaaccucuacgagaagguccgcucccagcucaagaacaacgccaaggagaucggcaacggcugcuucgaguucuaccacaagugcgacaacaccugcauggaguccgucaagaacggcaccuacgacuaccccaaguacuccgaggaggccaagcucaaccgcgaggagaucgacggcgucaagcucgaguccacccgcaucuaccagauccucgccaucuacuccaccgucgccuccucccucguccucgucgucucccucggcgccaucuccuucuggaugugcuccaacggcucccuccagugccgcaucugcaucuga

SEQ ID NO: 103965 - RNA, 1701 nt, Artificial Sequence
  derived and/or modified CDS sequence (opt2) from hemagglutinin__InfluenzaA__AEW25654
augaaggccauccucgucguccuccucuacaccuucgccaccgccaacgccgacacccucugcaucggcuaccacgccaacaacuccaccgacaccgucgacaccguccucgagaagaacgucaccgucacccacuccgucaaccuccucgaggacaagcacaacggcaagcucugcaagcuccgcggcgucgccccccuccaccucggcaagugcaacaucgccggcuggauccucggcaaccccgagugcgagucccucuccaccgccuccuccugguccuacaucgucgagaccuccuccuccgacaacggcaccugcuaccccggcgacuucaucgacuacgaggagcuccgcgagcagcucuccuccgucuccuccuucgagcgcuucgagaucuuccccaagaccuccuccuggcccaaccacgacuccaacaagggcgucaccgccgccugcccccacgccggcgccaaguccuucuacaagaaccucaucuggcucgucaagaagggcaacuccuaccccaagcucuccaaguccuacaucaacgacaagggcaaggagguccucguccucuggggcauccaccaccccuccaccuccgccgaccagcagucccucuaccagaacgccgacgccuacgucuucgucggcaccucccgcuacuccaagaaguucaagcccgagaucgccauccgccccaagguccgcgaccaggagggccgcaugaacuacuacuggacccucgucgagcccggcgacaagaucaccuucgaggccaccggcaaccucgucgucccccgcuacgccuucgccauggagcgcaacgccggcuccggcaucaucaucuccgacacccccguccacgacugcaacaccaccugccagacccccaagggcgccaucaacaccuccccccccuuccagaacauccaccccaucaccaucggcaagugccccaaguacgucaaguccaccaagcuccgccucgccaccggccuccgcaacauccccuccauccagucccgcggccucuucggcgccaucgccggcuucaucgagggcggcuggaccggcauggucgacggcugguacggcuaccaccaccagaacgagcagggcuccggcuacgccgccgaccucaaguccacccagaacgccaucgacgagaucaccaacaaggucaacuccgucaucgagaagaugaacacccaguucaccgccgucggcaaggaguucaaccaccucgagaagcgcaucgagaaccucaacaagaaggucgacgacggcuuccucgacaucuggaccuacaacgccgagcuccucguccuccucgagaacgagcgcacccucgacuaccacgacuccaacgucaagaaccucuacgagaagguccgcucccagcucaagaacaacgccaaggagaucggcaacggcugcuucgaguucuaccacaagugcgacaacaccugcauggaguccgucaagaacggcaccuacgacuaccccaaguacuccgaggaggccaagcucaaccgcgaggagaucgacggcgucaagcucgaguccacccgcaucuaccagauccucgccaucuacuccaccgucgccuccucccucguccucgucgucucccucggcgccaucuccuucuggaugugcuccaacggcucccuccagugccgcaucugcaucuga

SEQ ID NO: 103966 - RNA, 1701 nt, Artificial Sequence
  derived and/or modified CDS sequence (opt2) from hemagglutinin__InfluenzaA__AEW25662
augaaggccauccucgucguccuccucuacaccuucgccaccgccaacgccgacacccucugcaucggcuaccacgccaacaacuccaccgacaccgucgacaccguccucgagaagaacgucaccgucacccacuccgucaaccuccucgaggacaagcacaacggcaagcucugcaagcuccgcggcgucgccccccuccaccucggcaagugcaacaucgccggcuggauccucggcaaccccgagugcgagucccucuccaccgccuccuccugguccuacaucgucgagaccuccuccuccgacaacggcaccugcuaccccggcgacuucaucgacuacgaggagcuccgcgagcagcucuccuccgucuccuccuucgagcgcuucgagaucuuccccaagaccuccuccuggcccaaccacgaccccaacaagggcaucaccgccgccugcccccacgccggcgccaaguccuucuacaagaaccucaucuggcucgucaagaagggcaacuccuaccccaagcucuccaaguccuacaucaacgacaagggcaaggagguccucguccucuggggcauccaccaccccuccaccuccgccgaccagcagucccucuaccagaacgccgacgccuacgucuucgucggcaccucccgcuacuccaagaaguucaagcccgagaucgccauccgccccaagguccgcgaccaggagggccgcaugaacuacuacuggacccucgucgagcccggcgacaagaucaccuucgaggccaccggcaaccucgucgucccccgcuacgccuucgccauggagcgcaacgccggcuccggcaucaucaucuccgacacccccguccacgacugcaacaccaccugccagacccccaagggcgccaucaacaccucccuccccuuccagaacauccaccccaucaccaucggcaagugccccaaguacgucaaguccaccaagcuccgccucgccaccggccuccgcaacguccccuccauccagucccgcggccucuucggcgccaucgccggcuucaucgagggcggcuggaccggcauggucgacggcugguacggcuaccaccaccagaacgagcagggcuccggcuacgccgccgaccucaaguccacccagaacgccaucgacgagaucaccaacaaggucaacuccgucaucgagaagaugaacacccaguucaccgccgucggcaaggaguucaaccaccucgagaagcgcaucgagaaccucaacaagaaggucgacgacggcuuccucgacaucuggaccuacaacgccgagcuccucguccuccucgagaacgagcgcacccucgacuaccacgacuccaacgucaagaaccucuacgagaagguccgcucccagcucaagaacaacgccaaggagaucggcaacggcugcuucgaguucuaccacaagugcgacaacaccugcauggaguccgucaagaacggcaccuacgacuaccccaaguacuccgaggaggccaagcucaaccgcgaggagaucgacggcgucaagcucgaguccacccgcaucuaccagauccucgccaucuacuccaccgucgccuccucccucguccucgucgucucccucggcgccaucuccuucuggaugugcuccaacggcucccuccagugccgcaucugcaucuga

SEQ ID NO: 103967 - RNA, 1701 nt, Artificial Sequence
  derived and/or modified CDS sequence (opt2) from hemagglutinin__InfluenzaA__AEW25669
augaaggccauccucgucguccuccucuacaccuucgccaccgccaacgccgacacccucugcaucggcuaccacgccaacaacuccaccgacaccgucgacaccguccucgagaagaacgucaccgucacccacuccgucaaccuccucgaggacaagcacaacggcaagcucugcaagcuccgcggcgucgccccccuccaccucggcaagugcaacaucgccggcuggauccucggcaaccccgagugcgagucccucuccaccgccuccuccugguccuacaucgucgagaccuccuccuccgacaacggcaccugcuaccccggcgacuucaucgacuacgaggagcuccgcgagcagcucuccuccgucuccuccuucgagcgcuucgagaucuuccccaagaccuccuccuggcccaaccacgaccccaacaagggcgucaccgccgccugcccccacgccggcgccaaguccuucuacaagaaccucaucuggcucgucaagaagggcaacuccuaccccaagcucuccaaguccuacaucaacgacaagggcaaggagguccucguccucuggggcauccaccaccccuccaccuccgccgaccagcagucccucuaccagaacgccgacgccuacgucuucgucggcaccucccgcuacuccaagaaguucaagcccgagaucgccauccgccccaagguccgcgaccaggagggccgcaugaacuacuacuggacccucgucgagcccggcgacaagaucaccuucgaggccaccggcaaccucgucgucccccgcuacgccuucgccauggagcgcaacgccggcuccggcaucaucaucuccgacacccccguccacgacugcaacaccaccugccagacccccaagggcgccaucaacaccucccuccccuuccagaacauccaccccaucaccaucggcaagugccccaaguacgucaaguccaccaagcuccgccucgccaccggccuccgcaacguccccuccauccagucccgcggccucuucggcgccaucgccggcuucaucgagggcggcuggaccggcauggucgagggcugguacggcuaccaccaccagaacgagcagggcuccggcuacgccgccgaccucaaguccacccagaacgccaucgacgagaucaccaacaaggucaacuccgucaucgagaagaugaacacccaguucaccgccgucggcaaggaguucaaccaccucgagaagcgcaucgagaaccucaacaagaaggucgacgacggcuuccucgacaucuggaccuacaacgccgagcuccucguccuccucgagaacgagcgcacccucgacuaccacgacuccaacgucaagaaccucuacgagaagguccgcucccagcucaagaacaacgccaaggagaucggcaacggcugcuucgaguucuaccacaagugcgacaacaccugcauggaguccgucaagaacggcaccuacgacuaccccaaguacuccgaggaggccaagcucaaccgcgaggagaucgacggcgucaagcucgaguccacccgcaucuaccagauccucgccaucuacuccaccgucgccuccucccucguccucgucgucucccucggcgccaucuccuucuggaugugcuccaacggcucccuccagugccgcaucugcaucuga

SEQ ID NO: 103968 - RNA, 1701 nt, Artificial Sequence
  derived and/or modified CDS sequence (opt2) from hemagglutinin__InfluenzaA__AEW25678
augaaggccauccucgucguccuccucuacaccuucgccaccgccaacgccgacacccucugcaucggcuaccacgccaacaacuccaccgacaccgucgacaccguccucgagaagaacgucaccgucacccacuccgucaaccuccucgaggacaagcacaacggcaagcucugcaagcuccgcggcgucgccccccuccaccucggcaagugcaacaucgccggcuggauccucggcaaccccgagugcgagucccucuccaccgccuccuccugguccuacaucgucgagaccuccuccuccgacaacggcaccugcuaccccggcgacuucaucgacuacgaggagcuccgcgagcagcucuccuccgucuccuccuucgagaaguucgagaucuuccccaagaccuccuccuggcccaaccacgacuccaacaagggcgucaccgccgccugcccccacgccggcgccaaguccuucuacaagaaccucaucuggcucgucaagaagggcaacuccuaccccaagcucuccaaguccuacaucaacgacaagggcaaggagguccucguccucuggggcauccaccaccccuccaccuccgccgaccagcagucccucuaccagaacgccgacgccuacgucuucgucggcaccucccgcuacuccaagaaguucaagcccgagaucgccauccgccccaagguccgcgaccaggagggccgcaugaacuacuacuggacccucgucgagcccggcgacaagaucaccuucgaggccaccggcaaccucgucgucccccgcuacgccuucgccauggagcgcaacgccggcuccggcaucaucaucuccgacacccccguccacgacugcaacaccaccugccagacccccaagggcgccaucaacaccucccuccccuuccagaacauccaccccaucaccaucggcaagugccccaaguacgucaaguccaccaagcuccgccucgccaccggccuccgcaacguccccuccauccagucccgcggccucuucggcgccaucgccggcuucaucgagggcggcuggaccggcauggucgacggcugguacggcuaccaccaccagaacgagcagggcuccggcuacgccgccgaccucaaguccacccagaacgccaucgacgagaucaccaacaaggucaacuccgucaucgagaagaugaacacccaguucaccgccgucggcaaggaguucaaccaccucgagaagcgcaucgagaaccucaacaagaaggucgacgacggcuuccucgacaucuggaccuacaacgccgagcuccucguccuccucgagaacgagcgcacccucgacuaccacgacuccaacgucaagaaccucuacgagaagguccgcucccagcucaagaacaacgccaaggagaucggcaacggcugcuucgaguucuaccacaagugcgacaacaccugcauggaguccgucaagaacggcaccuacgacuaccccaaguacuccgaggaggccaagcucaaccgcgaggagaucgacggcgucaagcucgaguccacccgcaucuaccagauccucgccaucuacuccaccgucgccuccucccucguccucgucgucucccuccgcgccaucuccuucuggaugugcuccaacggcucccuccagugccgcaucugcaucuga

SEQ ID NO: 103969 - RNA, 1701 nt, Artificial Sequence
  derived and/or modified CDS sequence (opt2) from hemagglutinin__InfluenzaA__AEW25687
augaaggccauccucgucguccuccucuacaccuucgccaccgccaacgccgacacccucugcaucggcuaccacgccaacaacuccaccgacaccgucgacaccguccucgagaagaacgucaccgucacccacuccgucaaccuccucgaggacaagcacaacggcaagcucugcaagcuccgcggcgucgccccccuccaccucggcaagugcaacaucgccggcuggauccucggcaaccccgagugcgagucccucuccaccgccuccuccugguccuacaucgucgagaccuccuccuccgacaacggcaccugcuaccccggcgacuucaucgacuacgaggagcuccgcgagcagcucuccuccgucuccuccuucgagcgcuucgagaucuuccccaagaccuccuccuggcccaaccacgaccccaacaagggcgucaccgccgccugccccuacgccggcgccaaguccuucuacaagaaccucaucuggcucgucaagaagggcaacuccuaccccaagcucuccaaguccuacaucaacgacaagggcaaggagguccucguccucuggggcauccaccaccccuccaccuccgccgaccagcagucccucuaccagaacgccgacgccuacgucuucgucggcaccucccgcuacuccaagaaguucaagcccgagaucgccauccgccccaagguccgcgaccaggagggccgcaugaacuacuacuggacccucgucgagcccggcgacaagaucaccuucgaggccaccggcaaccucgucgucccccgcuacgccuucgccauggagcgcaacgccggcuccggcaucaucaucuccgacacccccguccacgacugcaacaccaccugccagacccccaagggcgccaucaacaccucccuccccuuccagaacauccaccccaucaccaucggcaagugccccaaguacgucaaguccaccaagcuccgccucgccaccggccuccgcaacguccccuccauccagucccgcggccucuucggcgccaucgccggcuucaucgagggcggcuggaccggcauggucgacggcugguacggcuaccaccaccagaacgagcagggcuccggcuacgccgccgaccucaaguccacccagaacgccaucgacaagaucaccaacaaggucaacuccgucaucgagaagaugaacacccaguucaccgccgucggcaaggaguucaaccaccucgagaagcgcaucgagaaccucaacaagaaggucgacgacggcuuccucgacaucuggaccuacaacgccgagcuccucguccuccucgagaacgagcgcacccucgacuaccacgacuccaacgucaagaaccucuacgagaagguccgcucccagcucaagaacaacgccaaggagaucggcaacggcugcuucgaguucuaccacaagugcgacaacaccugcauggaguccgucaagaacggcaccuacgacuaccccaaguacuccgaggaggccaagcucaaccgcgaggagaucgacggcgucaagcucgaguccacccgcaucuaccagauccucgccaucuacuccaccgucgccuccucccucguccucgucgucucccucggcgccaucuccuucuggaugugcuccaacggcucccuccagugccgcaucugcaucuga

SEQ ID NO: 103970 - RNA, 1701 nt, Artificial Sequence; identical to SEQ ID NO: 103939
  derived and/or modified CDS sequence (opt2) from hemagglutinin__InfluenzaA__AEW25696

SEQ ID NO: 103971 - RNA, 1701 nt, Artificial Sequence; identical to SEQ ID NO: 99503
  derived and/or modified CDS sequence (opt2) from hemagglutinin__InfluenzaA__AEW25706

SEQ ID NO: 103972 - RNA, 1695 nt, Artificial Sequence
  derived and/or modified CDS sequence (opt2) from hemagglutinin__InfluenzaA__AEW91908
auggagaagaucguccuccucuucgccaccaucucccucgucaaguccgaccacaucugcaucggcuaccacgccaacaacuccaccgagcaggucgacaccaucauggagaagaacgucaccgucacccacgcccaggacauccucgagaagacccacaacggcaagcucugcgaccucaacggcgucaagccccucauccucaaggacugcuccgucgccggcuggcuccucggcaaccccaugugcgacgaguucaucaacguccccgagugguccuacaucgucgagaaggccaaccccgccaacgaccucugcuaccccggcaacuucaacgacuacgaggagcucaagcaccuccucucccgcaucaaccacuucgagaagauccagaucauccccaagaacuccugguccgaccacgaggccucccucggcgucuccgccgccugccccuaccagggcaaguccuccuucuuccgcaacgucgucuggcucaucaagaaggacaacgccuaccccaccaucaagaagggcuacaacaacaccaaccaggaggaccuccucguccucuggggcauccaccaccccaacgacgaggccgagcagacccgccucuaccagaaccccaccaccuacaucuccaucggcaccuccacccucaaccagcgccucguccccaagaucgccacccgcuccaagaucaacggccaguccggccgcaucgacuucuucuggaccauccucaagcccaacgacgccauccacuucgaguccaacggcaacuucaucgcccccgaguacgccuacaagaucgucaagaagggcgacuccaccaucaugaaguccgaggucgaguacggcaacugcaacacccgcugccagacccccaucggcgccaucaacuccuccaugcccuuccacaacauccacccccucaccaucggcgagugccccaaguacgucaaguccaacaagcucguccucgccaccggccuccgcaacuccccccagggcgagacccgcggccucuucggcgccaucgccggcuucaucgagggcggcuggcagggcauggucgacggcugguacggcuaccaccacuccaacgagcagggcuccggcuacgccgccgacaaggaguccacccagaaggccaucgacggcgucaccaacaaggucaacuccaucaucgacaagaugaacacccaguucgaggccgucggccgcgaguucaacaaccucgagcgccgcaucgagaaccucaacaagaagauggaggacggcuuccucgacgucuggaccuacaacgccgagcuccucguccucauggagaacgagcgcacccucgacuuccacgacuccaacguccgcaaccucuacgacaagguccgccuccagcucaaggacaacgccaaggagcucggcaacggcugcuucgaguucuaccacaagugcgacaacgagugcauggaguccguccgcaacggcaccuacgacuacccccaguacuccgaggaggcccgccucaagcgcgaggagaucuccggcgucaagcucgaguccaucggcaucuaccagauccucuccaucuacuccaccgucgccuccucccucguccucgccaucaugauggccggccucucccucuggaugugcuccaacggcucccuccagugccgcaucugcaucuga

SEQ ID NO: 103973 - RNA, 1701 nt, Artificial Sequence
  derived and/or modified CDS sequence (opt2) from hemagglutinin__InfluenzaA__AEX09175
augaaggccauccucgucguccuccucuacaccuucgccaccgccaacgccgacacccucugcaucggcuaccacgccaacaacuccaccgacaccgucgacaccguccucgagaagaacgucgccgucacccacuccgucaaccuccucgaggacaagcacaacggcaagcucugcaagcuccgcggcgucgccccccuccaccucggcaagugcaacaucgccggcuggauccucggcaaccccgagugcgagucccucuccaccgccuccuccugguccuacaucgucgagaccuccuccuccgacaacggcaccugcuaccccggcgacuucaucgacuacgaggagcuccgcgagcagcucuccuccgucuccuccuucgagcgcuucgagaucuuccccaagaccuccuccuggcccaaccacgacuccaacaagggcgucaccgccgccugcccccacgccggcgccaaguccuucuacaagaaccucaucuggcucgucaagaagggcaacuccuaccccaagcucuccaaguccuacaucaacgacaagggcaaggagguccucguccucuggggcauccaccaccccuccaccuccgccgaccagcagucccucuaccagaacgccgacgccuacgucuucgucggcaccucccgcuacuccaagaaguucaagcccgagaucgccauccgccccaagguccgcgaccgcgagggccgcaugaacuacuacuggacccucgucgagcccggcgacaagaucaccuucgaggccaccggcaaccucgucgucccccgcuacgccuucgccauggagcgcaacgccggcuccggcaucaucaucuccgacacccccguccacgacugcaacaccaccugccagacccccaagggcgccaucaacaccucccuccccuuccagaacauccaccccaucaccaucggcaagugccccaaguacgucaaguccaccaagcuccgccucgccaccggccuccgcaacguccccuccauccagucccgcggccucuucggcgccaucgccggcuucaucgagggcggcuggaccggcauggucgacggcugguacggcuaccaccaccagaacgagcagggcuccggcuacgccgccgaccucaaguccacccagaacgccaucgacgagaucaccaacaaggucaacuccgucaucgagaagaugaacacccaguucaccgccgucggcaaggaguucaaccaccucgagaagcgcaucgagaaccucaacaagaaggucgacgacggcuuccucgacaucuggaccuacaacgccgagcuccucguccuccucgagaacgagcgcacccucgacuaccacgacuccaacgucaagaaccucuacgagaagguccgcucccagcucaagaacaacgccaaggagaucggcaacggcugcuucgaguucuaccacaagugcgacaacaccugcauggaguccgucaagaacggcaccuacgacuaccccaaguacuccgaggaggccaagcucaaccgcgaggagaucgacggcgucaagcucgaguccacccgcaucuaccagauccucgccaucuacuccaccgucgccuccucccucguccucgucgucucccucggcgccaucuccuucuggaugugcuccaacggcucccuccagugccgcaucugcaucuga

SEQ ID NO: 103974 - RNA, 1701 nt, Artificial Sequence; identical to SEQ ID NO: 98705
  derived and/or modified CDS sequence (opt2) from hemagglutinin__InfluenzaA__AEX25795

SEQ ID NO: 103975 - RNA, 1701 nt, Artificial Sequence
  derived and/or modified CDS sequence (opt2) from hemagglutinin__InfluenzaA__AEX25797
auggaggccauccucgucguccuccucuacaccuucgccaccgccaacgccgacacccucugcaucggcuaccacgccaacaacuccaccgacaccgucgacaccguccucgagaagaacgucaccgucacccacuccgucaaccuccucgaggacaagcacaacggcaagcucugcaagcuccgcggcgucgccccccuccaccucggcaagugcaacaucgccggcuggauccucggcaaccccgagugcgagucccucuccaccgccuccuccugguccuacaucgucgagaccuccaacuccgacaacggcaccugcuaccccggcgacuucaucgacuacgaggagcuccgcgagcagcucuccuccgucuccuccuucgagcgcuucgagaucuuccccaagaccuccuccuggcccaaccacgacuccaacaagggcgucaccgccgccugcccccacgccggcgccaaguccuucuacaagaaccucaucuggcucgucaagaagggcaacuccuaccccaagcucuccaaguccuacaucaacgacaagggcaaggagguccucguccucuggggcauccaccaccccuccaccuccgccgaccagcagucccucuaccagaacgccgacgccuacgucuucgucggcuccucccgcuacuccaagaaguucaagcccgagaucgccauccgccccaagguccgcgaccaggagggccgcaugaacuacuacuggacccucgucgagcccggcgacaagaucaccuucgaggccaccggcaaccucgucgucccccgcuacgccuucgccauggagcgcaacgccggcuccggcaucaucaucuccgacacccccguccacgacugcaacaccaccugccagacccccaagggcgccaucaacaccucccuccccuuccacaacauccaccccaucaccaucggcaagugccccaaguacgucaaguccaccaagcuccgccucgccaccggccuccgcaacguccccuccauccagucccgcggccucuucggcgccaucgccggcuucaucgagggcggcuggaccggcauggucgacggcugguacggcuaccaccaccagaacgagcagggcuccggcuacgccgccgaccucaaguccacccagaacgccaucgacgagaucaccaacaaggucaacuccgucaucgagaagaugaacacccaguucaccgccgucggcaaggaguucaaccaccucgagaagcgcaucgagaaccucaacaagaaggucgacgacggcuuccucgacaucuggaccuacaacgccgagcuccucguccuccucgagaacgagcgcacccucgacuaccacgacuccaacgucaagaaccucuacgagaagguccgcucccagcucaagaacaacgccaaggagaucggcaacggcugcuucgaguucuaccacaagugcgacaacaccugcauggaguccgucaagaacggcaccuacgacuaccccaaguacuccgaggaggccaagcucaaccgcgaggagaucgacggcgucaagcucgaguccacccgcaucuaccagauccucgccaucuacuccaccgucgccuccucccucguccucgucgucucccucggcgccaucuccuucuggaugugcuccaacggcucccuccagugccgcaucugcaucuga

SEQ ID NO: 103976 - RNA, 1701 nt, Artificial Sequence
  derived and/or modified CDS sequence (opt2) from hemagglutinin__InfluenzaA__AEX25798
augaaggccauccucgucguccuccucuacaccuucgccaccgccaacgccgacacccucugcaucggcuaccacgccaacaacuccaccgacaccgucgacaccguccucgagaagaacgucaccgucacccacuccgucaaccuccucgaggacaagcacaacggcaagcucugcaagcuccgcggcgucgccccccuccaccucggcaagugcaacaucgccggcuggauccucggcaaccccgagugcgagucccucuccaccgccuccuccugguccuacaucgucgagaccuccuccuccgacaacggcaccugcuaccccggcgacuucaucaacuacgaggagcuccgcgagcagcucuccuccgucuccuccuucgagcgcuucgagaucuuccccaagaccuccuccuggcccaaccacgacuccaacaagggcgucaccgccgccugcccccacgccggcgccaaguccuucuacaagaaccucaucuggcucgucaagaagggcaacuccuaccccaagcucuccaaguccuacaucaacgacaagggcaaggagguccucguccucuggggcauccaccaccccuccaccuccgccgaccagcagucccucuaccagaacgccgacgccuacgucuucgucggcaccucccgcuacuccaagaaguucaagcccgagaucgccauccgccccaagguccgcgaccaggagggccgcaugaacuacuacuggacccucgucgagcccggcgacaagaucaccuucgaggccaccggcaaccucgucgucccccgcuacgccuucgccauggagcgcaacgccggcuccggcaucaucaucuccgacacccccguccacgacugcaacaccaccugccagacccccaagggcgccaucaacaccucccuccccuuccacaacauccaccccaucaccaucggcaagugccccaaguacgucaaguccaccaagcuccgccucgccaccggccuccgcaacguccccuccauccagucccgcggccucuucggcgccaucgccggcuucaucgagggcggcuggaccggcauggucgacggcugguacggcuaccaccaccagaacgagcagggcuccggcuacgccgccgaccucaaguccacccagaacgccaucgacgagaucaccaacaaggucaacuccgucaucgagaagaugaacacccaguucaccgccgucggcaaggaguucaaccaccucgagaagcgcaucgagaaccucaacaagaaggucgacgacggcuuccucgacaucuggaccuacaacgccgagcuccucguccuccucgagaacgagcgcacccucgacuaccacgacuccaacgucaagaaccucuacgagaagguccgcucccagcucaagaacaacgccaaggagaucggcaacggcugcuucgaguucuaccacaagugcgacaacaccugcauggaguccgucaagaacggcaccuacgacuaccccaaguacuccgaggaggccaagcucaaccgcgaggagaucgacggcgucaagcucgaguccacccgcaucuaccagauccucgccaucuacuccaccgucgccuccucccucguccucgucgucucccucggcgccaucuccuucuggaugugcuccaacggcucccuccagugccgcaucugcaucuga

SEQ ID NO: 103977 - RNA, 1701 nt, Artificial Sequence; identical to SEQ ID NO: 98705
  derived and/or modified CDS sequence (opt2) from hemagglutinin__InfluenzaA__AEX25800

SEQ ID NO: 103978 - RNA, 1701 nt, Artificial Sequence; identical to SEQ ID NO: 98705
  derived and/or modified CDS sequence (opt2) from hemagglutinin__InfluenzaA__AEX25803

SEQ ID NO: 103979 - RNA, 1701 nt, Artificial Sequence; identical to SEQ ID NO: 98947
  derived and/or modified CDS sequence (opt2) from hemagglutinin__InfluenzaA__AEX25808

SEQ ID NO: 103980 - RNA, 1701 nt, Artificial Sequence; identical to SEQ ID NO: 101675
  derived and/or modified CDS sequence (opt2) from hemagglutinin__InfluenzaA__AEX25810

SEQ ID NO: 103981 - RNA, 1701 nt, Artificial Sequence
  derived and/or modified CDS sequence (opt2) from hemagglutinin__InfluenzaA__AEX25811
auggaggccauccucgucguccuccucuacaccuucgccaccgccaacgccgacacccucugcaucggcuaccacgccaacaacuccaccgacaccgucgacaccguccucgagaagaacgucaccgucacccacuccgucaaccuccucgaggacaagcacaacggcaagcucugcaagcuccgcggcgucgccccccuccaccucggcaagugcaacaucgccggcuggauccucggcaaccccgagugcgagucccucuucaccgccuccuccugguccuacaucgucgagaccuccuccuccgacaacggcaccugcuaccccggcgacuucaucgacuacgaggagcuccgcgagcagcucuccuccgucuccuccuucgagcgcuucgagaucuuccccaagaccuccuccuggcccaaccacgacuccaacaagggcgucaccgccgccugcccccacgccggcgccaaguccuucuacaagaaccucaucuggcucgucaagaagggcaacuccuaccccaagcucuccaaguccuacaucaacgacaagggcaaggagguccucguccucuggggcauccaccaccccuccaccuccgccgaccagcagucccucuaccagaacgccgacgccuacgucuucgucggcuccucccgcuacuccaagaaguucaagcccgagaucgccauccgccccaagguccgcgaccaggagggccgcaugaacuacuacuggacccucgucgagcccggcgacaagaucaccuucgaggccaccggcaaccucgucgucccccgcuacgccuucgccauggagcgcaaggccggcuccggcaucaucaucuccgacacccccguccacgacugcaacaccaccugccagacccccaagggcgccaucaacaccucccuccccuuccacaacauccaccccaucaccaucggcaagugccccaaguacgucaaguccaccaagcuccgccucgccaccggccuccgcaacguccccuccauccagucccgcggccucuucggcgccaucgccggcuucaucgagggcggcuggaccggcauggucgacggcugguacggcuaccaccaccagaacgagcagggcuccggcuacgccgccgaccucaaguccacccagaacgccaucgacgagaucaccaacaaggucaacuccgucaucgagaagaugaacacccaguucaccgccgucggcaaggaguucaaccaccucgagaagcgcaucgagaaccucaacaagaaggucgacgacggcuuccucgacaucuggaccuacaacgccgagcuccucguccuccucgagaacgagcgcacccucgacuaccacgacuccaacgucaagaaccucuacgagaagguccgcucccagcucaagaacaacgccaaggagaucggcaacggcugcuucgaguucuaccacaagugcgacaacaccugcauggaguccgucaagaacggcaccuacgacuaccccaaguacuccgaggaggccaagcucaaccgcgaggagaucgacggcgucaagcucgaguccacccgcaucuaccagauccucgccaucuacuccaccgucgccuccucccucguccucgucgucucccucggcgccaucuccuucuggaugugcuccaacggcucccuccagugccgcaucugcaucuga

SEQ ID NO: 103982 - RNA, 1701 nt, Artificial Sequence; identical to SEQ ID NO: 101675
  derived and/or modified CDS sequence (opt2) from hemagglutinin__InfluenzaA__AEX25814

SEQ ID NO: 103983 - RNA, 1701 nt, Artificial Sequence
  derived and/or modified CDS sequence (opt2) from hemagglutinin__InfluenzaA__AEX25816
augaaggccauccucgucguccuccucuacaccuucgccaccgccaacgccgacacccucugcaucggcuaccacgccaacaacuccaccgacaccgucgacaccguccucgagaagaacgucaccgucacccacuccgucaaccuccucgaggacaagcacaacggcaagcucugcaagcuccgcggcgucgccccccuccaccucggcaagugcaacaucgccggcuggauccucggcaaccccgagugcgagucccucuccaccgccaacuccugguccuacaucgucgagaccuccuccuccgacaacggcaccugcuaccccggcgacuucaucaacuacgaggagcuccgcgagcagcucuccuccgucuccuccuucgagcgcuucgagaucuuccccaagaccuccuccuggcccaaccacgacuccaacaagggcgucaccgccgccugcccccacgccggcgccaaguccuucuacaagaaccucaucuggcucgucaagaagggcaacuccuaccccaagcucuccaaguccuacaucaacgacaagggcaaggagguccucguccucuggggcauccaccaccccuccaccuccgccgaccagcagucccucuaccagaacgccgacgccuacgucuucgucggcaccucccgcuacuccaagaaguucaagcccgagaucgccauccgccccaagguccgcgaccaggagggccgcaugaacuacuacuggacccucgucgagcccggcgacaagaucaccuucgaggccaccggcaaccucgucgucccccgcuacgccuucgccauggagcgcaacgccggcuccggcaucaucaucuccgacacccccguccacgacugcaacaccaccugccagacccccaagggcgccaucaacaccucccuccccuuccagaacauccaccccaucaccaucggcaagugccccaaguacgucaaguccaccaagcuccgccucgccaccggccuccgcaacguccccuccauccagucccgcggccucuucggcgccaucgccggcuucaucgagggcggcuggaccggcauggucgacggcugguacggcuaccaccaccagaacgagcagggcuccggcuacgccgccgaccucaaguccacccagaacgccaucgacgagaucaccaacaaggucaacuccgucaucgagaagaugaacacccaguucaccgccgucggcaaggaguucaaccaccucgagaagcgcaucgagaaccucaacaagaaggucgacgacggcuuccucgacaucuggaccuacaacgccgagcuccucguccuccucgagaacgagcgcacccucgacuaccacgacuccaacgucaagaaccucuacgagaagguccgcucccagcucaagaacaacgccaaggagaucggcaacggcugcuucgaguucuaccacaagugcgacaacaccugcauggaguccgucaagaacggcaccuacgacuaccccaaguacuccgaggaggccaagcucaaccgcgaggagaucgacggcgucaagcucgaguccacccgcaucuaccagauccucgccaucuacuccaccgucgccuccucccucguccucgucgucucccucggcgccaucuccuucuggaugugcuccaacggcucccuccagugccgcaucugcaucuga

SEQ ID NO: 103984 - RNA, 1701 nt, Artificial Sequence
  derived and/or modified CDS sequence (opt2) from hemagglutinin__InfluenzaA__AEX25818
auggaggccauccucgucguccuccucuacaccuucgccaccgccaacgccgacacccucugcaucggcuaccacgccaacaacuccaccgacaccgucgacaccguccucgagaagaacgucaccgucacccacuccgucaaccuccucgaggacaagcacaacggcaagcucugcaagcuccgcggcgucgccccccuccaccucggcaagugcaacaucgccggcuggauccucggcaaccccgagugcgagucccucuccaccgccuccuccugguccuacaucgucgagaccuccaacuccgacaacggcaccugcuaccccggcgacuucaucgacuacgaggagcuccgcgagcagcucuccuccgucuccuccuucgagcgcuucgagaucuuccccaagaccuccuccuggcccaaccacgacuccaacaagggcgucaccgccgccugcccccacgccggcgccaaguccuucuacaagaaccucaucuggcucgucaagaagggcaacuccuaccccaagcucuccaaguccuacaucaacgacaagggcaaggagguccucguccucuggggcauccaccaccaguccaccuccgccgaccagcagucccucuaccagaacgccgacgccuacgucuucgucggcuccucccgcuacuccaagaaguucaagcccgagaucgccauccgccccaagguccgcgaccaggagggccgcaugaacuacuacuggacccucgucgagcccggcgacaagaucaccuucgaggccaccggcaaccucgucgucccccgcuacgccuucgccauggagcgcaacgccggcuccggcaucaucaucuccgacacccccguccacgacugcaacaccaccugccagacccccaagggcgccaucaacaccucccuccccuuccacaacauccaccccaucaccaucggcaagugccccaaguacgucaaguccaccaagcuccgccucgccaccggccuccgcaacguccccuccauccagucccgcggccucuucggcgccaucgccggcuucaucgagggcggcuggaccggcauggucgacggcugguacggcuaccaccaccagaacgagcagggcuccggcuacgccgccgaccucaaguccacccagaacgccaucgacgagaucaccaacaaggucaacuccgucaucgagaagaugaacacccaguucaccgccgucggcaaggaguucaaccaccucgagaagcgcaucgagaaccucaacaagaaggucgacgacggcuuccucgacaucuggaccuacaacgccgagcuccucguccuccucgagaacgagcgcacccucgacuaccacgacuccaacgucaagaaccucuacgagaagguccgcucccagcucaagaacaacgccaaggagaucggcaacggcugcuucgaguucuaccacaagugcgacaacaccugcauggaguccgucaagaacggcaccuacgacuaccccaaguacuccgaggaggccaagcucaaccgcgaggagaucgacggcgucaagcucgaguccacccgcaucuaccagauccucgccaucuacuccaccgucgccuccucccucguccucgucgucucccucggcgccaucuccuucuggaugugcuccaacggcucccuccagugccgcaucugcaucuga

SEQ ID NO: 103985 - RNA, 1701 nt, Artificial Sequence
  derived and/or modified CDS sequence (opt2) from hemagglutinin__InfluenzaA__AEX25824
augaaggccauccucgucguccuccucuacaccuucgccaccgccaacgccgacacccucugcaucggcuaccacgccaacaacuccaccgacaccgucgacaccguccucgagaagaacgucaccgucacccacuccgucaaccuccucgaggacaagcacaacggcaagcucugcaagcuccgcggcgucgccccccuccaccucggcaagugcaacaucgccggcuggauccucggcaaccccgagugcgagucccucuccaccgccuccuccugguccuacaucgucgagaccuccuccuccgacaacggcaccugcuaccccggcgacuucaucgacuacgaggagcuccgcgagcagcucuccuccgucuccuccuucgagcgcuucgagaucuuccccaagaccuccuccuggcccaaccacgacuccaacaagggcgucaccgccgccugcccccacgccggcgccaaguccuucuacaagaaccucaucuggcucgucaagaagggcaacuccuaccccaagcucuccaaguccuacaucaacgacaagggcaaggagguccucguccucuggggcauccaccaccccuccaccuccgccgaccagcagucccucuaccagaacgccgacgccuacgucuucgucggcaccucccgcuacuccaagaaguucaagcccgagaucgccauccgccccaagguccgcgaccaggagggccgcaugaacuacuacuggacccucgucgagcccggcgacaagaucaccuucgaggccaccggcaaccucgucgucccccgcuacgccuucgccauggagcgcaacgccggcuccggcaucaucaucuccgacacccccguccacgacugcaacaccaccugccagacccccaagggcgccaucaacaccucccuccccuuccagaacauccaccccaucaccaucggcaagugccccaaguacgucgaguccaccaagcuccgccucgccaccggccuccgcaacguccccuccauccagucccgcggccucuucggcgccaucgccggcuucaucgagggcggcuggaccggcauggucgacggcugguacggcuaccaccaccagaacgagcagggcuccggcuacgccgccgaccucaaguccacccagaacgccaucgacgagaucaccaacaaggucaacuccgucaucgagaagaugaacacccaguucaccgccgucggcaaggaguucaaccaccucgagaagcgcaucgagaaccucaacaagaaggucgacgacggcuuccucgacaucuggaccuacaacgccgagcuccucguccuccucgagaacgagcgcacccucgacuaccacgacuccaacgucaagaaccucuacgagaagguccgcucccagcucaagaacaacgccaaggagaucggcaacggcugcuucgaguucuaccacaagugcgacaacaccugcauggaguccgucaagaacggcaccuacgacuaccccaaguacuccgaggaggccaagcucaaccgcgaggagaucgacggcgucaagcucgaguccacccgcaucuaccagauccucgccaucuacuccaccgucgccuccucccucguccucgucgucucccucggcgccaucuccuucuggaugugcuccaacggcucccuccagugccgcaucugcaucuga

SEQ ID NO: 103986 - RNA, 1698 nt, Artificial Sequence
  derived and/or modified CDS sequence (opt2) from hemagglutinin__InfluenzaA__AEX33420
augaaggucaagcuccucguccuccucugcaucuucaccgccaccuacgccgacaccaucugcaucggcuaccacgccaacaacuccaccgacaccgucgacaccguccucgagaagaacgucaccgucacccacuccgucaaccuccucgaggacucccacaacggcaagcucugccuccucaagggcaucgccccccuccagcucggcaacugcuccgucgccggcuggauccucggcaaccccgagugcgagcuccucaucuccaaggaguccugguccuacaucgucgagacccccaaccccgagaacggcaccugcuaccccggcuacuucgccgacuacgaggagcuccgcgagcagcucuccuccgucuccuccuucgagcgcuucgagaucuuccccaaggaguccuccuggcccaaccacaccgucaccggcgucuccgccuccugcucccacaacggcaaguccuccuucuaccgcaaccuccucuggcucaccggcaaguccggccucuaccccaaccucuccaaguccuacgccaacaacaaggagaaggagguccucguccucuggggcguccaccacccccccaacaucggcgaccagcgcgcccucuaccacaccgagaacgccuacgucuccgucgucuccucccacuacucccgccgcuucacccccgagaucgccaagcgccccaagguccgcgaccaggagggccgcaucaacuacuacuggacccuccucgagcccggcgacaccaucaucuucgaggccaacggcaaccucaucgccccccgcuacgccuucgcccucucccgcggcuucggcuccggcaucaucaccuccaacgcccccauggacgagugcgacgccaagugccagaccccccagggcgccaucaacuccucccuccccuuccagaacguccaccccgucaccaucggcgagugccccaaguacgucaaguccgccaagcuccgcauggucaccggccuccgcaacauccccuccauccagucccgcggccucuucggcgccaucgccggcuucaucgagggcggcuggaccggcauggucgacggcugguacggcuaccaccaccagaacgagcagggcuccggcuacgccgccgaccagaaguccacccagaacgccaucaacggcaucaccaacaaggucaacuccgucaucgagaagaugaacacccaguucaccgccgucggcaaggaguucaacaagcucgagcgccgcauggagaaccucaacaagaaggucgacgacggcuuccucgacaucuggaccuacaacgccgagcuccucguccuccucgagaacgagcgcacccucgacuuccacgacuccaacgucaagaaccucuacgagaaggucaagucccagcucaagaacaacgccaaggagaucggcaacggcugcuucgaguucuaccacaagugcaacgacgagugcauggaguccgucaagaacggcaccuacgacuaccccaaguacuccgaggaguccaagcucaaccgcgagaagaucgacggcgucaagcucgaguccaugggcgucuaccagauccucgccaucuacuccaccgucgccuccucccucguccuccucgucucccucggcgccaucuccuucuggaugugcuccaacggcucccuccagugccgcaucugcaucuga

SEQ ID NO: 103987 - RNA, 1701 nt, Artificial Sequence
  derived and/or modified CDS sequence (opt2) from hemagglutinin__InfluenzaA__AEX33453
augaagaccaucaucgcccucuccuacauccucugccucgucuucgcccagaagcuccccggcaacgacaacuccaccgccacccucugccucggccaccacgccguccccaacggcaccaucgucaagaccaucaccaacgaccagaucgaggucaccaacgccaccgagcucguccaguccuccuccaccggcggcaucugcgacuccccccaccagauccucgacggcgagaacugcacccucaucgacgcccuccucggcgacccccagugcgacggcuuccagaacaagaagugggaccucuucgucgagcgcuccaaggccuacuccaacugcuaccccuacgacguccccgacuacgccucccuccgcucccucgucgccuccuccggcacccucgaguucaacaacgaguccuucaacuggaccggcgucacccagaacggcaccuccuccgccugcaagcgccgcuccgacaaguccuucuucucccgccucaacuggcucacccaccucaaguacaaguaccccgcccucaacgucaccaugcccaacaacgagaaguucgacaagcucuacaucuggggcguccaccaccccggcaccgacuccgaccagaucucccucuacgcccaggccuccggccgcaucaccgucuccaccaagcgcucccagcagaccgucauccccaacaucggcucccgcccccgcguccgcgacgucuccucccgcaucuccaucuacuggaccaucgucaagcccggcgacauccuccucaucaacuccaccggcaaccucaucgccccccgcggcuacuucaagauccgcuccggcaaguccuccaucaugcgcuccgacgcccccaucggcaagugcaacuccgagugcaucacccccaacggcuccauccccaacgacaagcccuuccagaacgucaaccgcaucaccuacggcgccugcccccgcuacgucaagcagaacacccucaagcucgccaccggcaugcgcaacguccccgagaagcagacccgcggcaucuucggcgccaucgccggcuucaucgagaacggcugggagggcauggucgacggcugguacggcuuccgccaccagaacuccgagggcaccggccaggccgccgaccucaaguccacccaggccgccaucaaccagaucaacggcaagcucaaccgccucaucggcaagaccaacgagaaguuccaccagaucgagaaggaguucuccgaggucgagggccgcauccaggaccucgagaaguacgucgaggacaccaagaucgaccucugguccuacaacgccgagcuccucgucgcccucgagaaccagcacaccaucgaccucaccgacuccgagaugaacaagcucuucgagcgcaccaagaagcagcuccgcgagaacgccgaggacaugggcaacggcugcuucaagaucuaccacaagugcgacaacgccugcaucggcuccauccgcaacggcaccuacgaccacgacgucuaccgcgacgaggcccucaacaaccgcuuccagaucaagggcgucgagcucaaguccggcuacaaggacuggauccucuggaucuccuucgccaucuccugcuuccuccucugcgucgcccuccucggcuucaucaugugggccugccagaagggcaacauccgcugcaacaucugcaucuga

SEQ ID NO: 103988 - RNA, 1701 nt, Artificial Sequence; identical to SEQ ID NO: 97831
  derived and/or modified CDS sequence (opt2) from hemagglutinin__InfluenzaA__AEX33464

SEQ ID NO: 103989 - RNA, 1701 nt, Artificial Sequence; identical to SEQ ID NO: 97831
  derived and/or modified CDS sequence (opt2) from hemagglutinin__InfluenzaA__AEX33475

SEQ ID NO: 103990 - RNA, 1701 nt, Artificial Sequence; identical to SEQ ID NO: 97831
  derived and/or modified CDS sequence (opt2) from hemagglutinin__InfluenzaA__AEX33486

SEQ ID NO: 103991 - RNA, 1701 nt, Artificial Sequence; identical to SEQ ID NO: 97831
  derived and/or modified CDS sequence (opt2) from hemagglutinin__InfluenzaA__AEX33497

SEQ ID NO: 103992 - RNA, 1701 nt, Artificial Sequence; identical to SEQ ID NO: 97831
  derived and/or modified CDS sequence (opt2) from hemagglutinin__InfluenzaA__AEX33508

SEQ ID NO: 103993 - RNA, 1701 nt, Artificial Sequence; identical to SEQ ID NO: 97831
  derived and/or modified CDS sequence (opt2) from hemagglutinin__InfluenzaA__AEX33519

SEQ ID NO: 103994 - RNA, 1701 nt, Artificial Sequence
  derived and/or modified CDS sequence (opt2) from hemagglutinin__InfluenzaA__AEX33541
augaagaccaucaucgcccucuccuacauccucugccucgucuucgcccagaagcuccccggcaacgacaacuccaccgccacccucugccucggccaccacgccguccccaacggcaccaucgucaagaccaucaccaacgaccagaucgaggucaccaacgccaccgagcucguccagaucuccuccaccggcggcaucugcgacuccccccaccagauccucgacggcgagaacugcacccucaucgacgcccuccucggcgacccccagugcgacggcuuccagaacaagaagugggaccucuucgucgagcgcuccaaggccuacuccaacugcuaccccuacgacguccccgacuacgccucccuccgcucccucgucgccuccuccggcacccucgaguucaacaacgaguccuucgacuggaccggcgucacccagaacggcaccuccuccuccugcaagcgccgcuccaacaaguccuucuucucccgccucaacuggcucacccaccucaaguacaaguaccccgcccucaacgucaccaugcccaacaacgagaaguucgacaagcucuacaucuggggcguccaccaccccggcaccgacuccgaccagaucucccucuacgcccaggccuccggccgcaucaccgucuccaccaagcgcucccagcagaccgucauccccaacaucggcucccgcccccgcguccgcgacgucuccucccgcaucuccaucuacuggaccaucgucaagcccggcgacauccuccucaucaacuccaccggcaaccucaucgccccccgcggcuacuucaagauccgcuccggcaaguccuccaucaugcgcuccgacgcccccaucggcaagugcaacuccgagugcaucacccccaacggcuccauccccaacgacaagcccuuccagaacgucaaccgcaucaccuacggcgccugcccccgcuacgucaagcagaacacccucaagcucgccaccggcaugcgcaacguccccgagaagcagacccgcggcaucuucggcgccaucgccggcuucaucgagaacggcugggagggcauggucgacggcugguacggcuuccgccaccagaacuccgagggcaccggccaggccgccgaccucaaguccacccaggccgccaucaaccagaucaacggcaagcucaaccgccucaucggcaagaccaacgagaaguuccaccagaucgagaaggaguucuccgaggucgagggccgcauccaggaccucgagaaguacgucgaggacaccaagaucgaccucugguccuacaacgccgagcuccucgucgcccucgagaaccagcacaccaucgaccucaccgacuccgagaugaacaagcucuucgagcgcaccaagaagcagcuccgcgagaacgccgaggacaugggcaacggcugcuucaagaucuaccacaagugcgacaacgccugcaucggcuccauccgcaacggcaccuacgaccacgacgucuaccgcgacgaggcccucaacaaccgcuuccagaucaagggcgucgagcucaaguccggcuacaaggacuggauccucuggaucuccuucgccaucuccugcuuccuccucugcgucgcccuccucggcuucaucaugugggccugccagaagggcaacauccgcugcaacaucugcaucuga

SEQ ID NO: 103995 - RNA, 1701 nt, Artificial Sequence
  derived and/or modified CDS sequence (opt2) from hemagglutinin__InfluenzaA__AEX33574
augaagaccaucaucgcccucuccuacauccucugccucgucuucgcccagaagcuccccggcaacgacaacuccaccgccacccucugccucggccaccacgccguccccaacggcaccaucgucaagaccaucaccaacgaccagaucgaggucaccaacgccaccgagcucguccaguccuccuccaccggcggcaucugcgacuccccccaccagauccucgacggcgagaacugcacccucaucgacgcccuccucggcgacccccagugcgacggcuuccagaacaagaagugggaccucuucgucgagcgcuccaaggccuacuccaacugcuaccccuacgacguccccgacuacgccucccuccgcucccucgucgccuccuccggcacccucgaguucaacaacgaguccuucaacuggaccggcgucacccagaacggcaccuccuccgccugcaagcgccgcuccaacaaguccuucuucucccgccucaacuggcucacccaccucaaguucaaguaccccgcccucaacgucaccaugcccaacaacgagaaguucgacaagcucuacaucuggggcguccaccaccccggcaccgacaacgaccagaucucccucuacgcccaggccuccggccgcaucaccgucuccaccaagcgcucccagcagaccgucauccccaacaucggcucccgcccccgcguccgcgacguccccucccgcaucuccaucuacuggaccaucgucaagcccggcgacauccuccucaucaacuccaccggcaaccucaucgccccccgcggcuacuucaagauccgcuccggcaaguccuccaucaugcgcuccgacgcccccaucggcaagugcaacuccgagugcaucacccccaacggcuccauccccaacgacaagcccuuccagaacgucaaccgcaucaccuacggcgccugcccccgcuacgucaagcagaacacccucaagcucgccaccggcaugcgcaacguccccgagaagcagacccgcggcaucuucggcgccaucgccggcuucaucgagaacggcugggagggcauggucgacggcugguacggcuuccgccaccagaacuccgagggcaccggccaggccgccgaccucaaguccacccaggccgccaucaaccagaucaacggcaagcucaaccgccucaucggcaagaccaacgagaaguuccaccagaucgagaaggaguucuccgaggucgagggccgcauccaggaccucgagaaguacgucgaggacaccaagaucgaccucugguccuacaacgccgagcuccucgucgcccucgagaaccagcacaccaucgaccucaccgacuccgagaugaacaagcucuucgagcgcaccaagaagcagcuccgcgagaacgccgaggacaugggcaacggcugcuucaagaucuaccacaagugcgacaacgacugcaucggcuccauccgcaacggcaccuacgaccacgacgucuaccgcgacgaggcccucaacaaccgcuuccagaucaagggcgucgagcucaaguccggcuacaaggacuggauccucuggaucuccuucgccaucuccugcuuccuccucugcgucgcccuccucggcuucaucaugugggccugccagaagggcaacauccgcugcaacaucugcaucuga

SEQ ID NO: 103996 - RNA, 1701 nt, Artificial Sequence; identical to SEQ ID NO: 97831
  derived and/or modified CDS sequence (opt2) from hemagglutinin__InfluenzaA__AEX33585

SEQ ID NO: 103997 - RNA, 1701 nt, Artificial Sequence
  derived and/or modified CDS sequence (opt2) from hemagglutinin__InfluenzaA__AEX33596
augaagaccaucaucgcccucuccuacauccucugccucgucuucgcccagaagcuccccggcaacgacaacuccaccgccacccucugccucggccaccacgccguccccaacggcaccaucgucaagaccaucaccaacgaccagaucgaggucaccaacgccaccgagcucguccaguccuccuccaccggcggcaucugcgacuccccccaccagauccucgacggcgagaacugcacccucaucgacgcccuccucggcgacccccagugcgacggcuuccagaacaagaagugggaccucuucgucgagcgcuccaaggccuacuccaacugcuaccccuacgacguccccgacuacgccucccuccgcucccucgucgccuccuccggcacccucgaguucaacaacgaguccuucaacuggaccggcgucacccagaacggcaccuccuccgccugcaagcgccgcuccaacaaguccuucuucucccgccucaacuggcucacccaccucaaguucaaguaccccgcccucaacgucaccaugcccaacaacgagaaguucgacaagcucuacaucuggggcguccaccaccccggcaccgacaacgaccagaucucccucuacgcccaggccuccggccgcaucaccgucuccaccaagcgcucccagcagaccgucauccccaacaucggcucccgcccccgcguccgcgacauccccucccgcaucuccaucuacuggaccaucgucaagcccggcgacauccuccucaucaacuccaccggcaaccucaucgccccccgcggcuacuucaagauccgcuccggcaaguccuccaucaugcgcuccgacgcccccaucggcaagugcaacuccgagugcaucacccccaacggcuccauccccaacgacaagcccuuccagaacgucaaccgcaucaccuacggcgccugcccccgcuacgucaagcagaacacccucaagcucgccaccggcaugcgcaacguccccgagaagcagacccgcggcaucuucggcgccaucgccggcuucaucgagaacggcugggagggcauggucgacggcugguacggcuuccgccaccagaacuccgagggcaccggccaggccgccgaccucaaguccacccaggccgccaucaaccagaucaacggcaagcucaaccgccucaucggcaagaccaacgagaaguuccaccagaucgagaaggaguucuccgaggucgagggccgcauccaggaccucgagaaguacgucgaggacaccaagaucgaccucugguccuacaacgccgagcuccucgucgcccucgagaaccagcacaccaucgaccucaccgacuccgagaugaacaagcucuucgagcgcaccaagaagcagcuccgcgagaacgccgaggacaugggcaacggcugcuucaagaucuaccacaagugcgacaacgccugcaucggcuccauccgcaacggcaccuacgaccacgacgucuaccgcgacgaggcccucaacaaccgcuuccagaucaagggcgucgagcucaaguccggcuacaaggacuggauccucuggaucuccuucgccaucuccugcuuccuccucugcgucgcccuccucggcuucaucaugugggccugccagaagggcaacauccgcugcaacaucugcaucuga

SEQ ID NO: 103998 - RNA, 1701 nt, Artificial Sequence; identical to SEQ ID NO: 97831
  derived and/or modified CDS sequence (opt2) from hemagglutinin__InfluenzaA__AEX33618

SEQ ID NO: 103999 - RNA, 1701 nt, Artificial Sequence; identical to SEQ ID NO: 97831
  derived and/or modified CDS sequence (opt2) from hemagglutinin__InfluenzaA__AEX33629

SEQ ID NO: 104000 - RNA, 1701 nt, Artificial Sequence; identical to SEQ ID NO: 103997
  derived and/or modified CDS sequence (opt2) from hemagglutinin__InfluenzaA__AEX33640

SEQ ID NO: 104001 - RNA, 1701 nt, Artificial Sequence
  derived and/or modified CDS sequence (opt2) from hemagglutinin__InfluenzaA__AEX33836
augaagaccaucaucgcccucuccuacauccucugccucgucuucgcccagaagcuccccggcaacgacaacuccaccgccacccucugccucggccaccacgccguccccaacggcaccaucgucaagaccaucaccaacgaccagaucgaggucaccaacgccaccgagcucguccaguccuccuccaccggcggcaucugcgacuccccccaccagauccucgacggcgagaacugcacccucaucgacgcccuccucggcgacccccagugcgacggcuuccagaacaagaagugggaccucuucgucgagcgcuccaaggccuacuccaacugcuaccccuacgacguccccgacuacgccucccuccgcucccucgucgccuccuccggcacccucgaguucaacaacgaguccuucaacuggaccggcgucacccagaacggcaccuccuccgccugcaagcgccgcuccaacaacuccuucuucucccgccucaacuggcucacccaccucaaguucaaguaccccgcccucaacgucaccaugcccaacaacgagaaguucgacaagcucuacaucuggggcguccaccaccccggcaccgacaacgaccagaucuuccucuacgcccaggccuccggccgcaucaccgucuccaccaagcgcucccagcagaccgucauccccaacaucggcucccgcccccgcguccgcaacauccccucccgcaucuccaucuacuggaccaucgucaagcccggcgacaucuuccucaucaacuccaccggcaaccucaucgccccccgcggcuacuucaagauccgcuccggcaaguccuccaucaugcgcuccgacgcccccaucggcaagugcaacuccgagugcaucacccccaacggcuccauccccaacgacaagcccuuccagaacgucaaccgcaucaccuacggcgccugcccccgcuacgucaagcagaacacccucaagcucgccaccggcaugcgcaacguccccgagaagcagacccgcggcaucuucggcgccaucgccggcuucaucgagaacggcugggagggcauggucgacggcugguacggcuuccgccaccagaacuccgagggcaucggccaggccgccgaccucaaguccacccaggccgccaucaaccagaucaacggcaagcucaaccgccucaucggcaagaccaacgagaaguuccaccagaucgagaaggaguucuccgaggucgagggccgcauccaggaccucgagaaguacgucgaggacaccaagaucgaccucugguccuacaacgccgagcuccucgucgcccucgagaaccagcacaccaucgaccucaccgacuccgagaugaacaagcucuucgagcgcaccaagaagcagcuccgcgagaacgccgaggacaugggcaacggcugcuucaagaucuaccacaagugcgacaacgccugcaucggcuccauccgcaacggcaccuacgaccacgacgucuaccgcgacgaggcccucaacaaccgcuuccagaucaagggcgucgagcucaaguccggcuacaaggacuggauccucuggaucuccuucgccaucuccugcuuccuccucugcgucgcccuccucggcuucaucaugugggccugccagaagggcaacauccgcugcaacaucugcaucuga

SEQ ID NO: 104002 - RNA, 1701 nt, Artificial Sequence; identical to SEQ ID NO: 96666
  derived and/or modified CDS sequence (opt2) from hemagglutinin__InfluenzaA__AEX33880

SEQ ID NO: 104003 - RNA, 1698 nt, Artificial Sequence
  derived and/or modified CDS sequence (opt2) from hemagglutinin__InfluenzaA__AEX33913
augaaggucaagcuccucguccuccucugcaccuucaccgccaccuacgccgacaccaucugcaucggcuaccacgccaacaacuccaccgacaccgucgacaccguccucgagaagaacgucaccgucacccacuccgucaaccuccucgaggacucccacaacggcaagcucugccuccucaagggcaucgccccccuccagcucggcaacugcuccgucgccggcuggauccucggcaaccccgagugcgagcuccucaucucccgcgaguccugguccuacaucgucgagaagcccaaccccgagaacggcaccugcuaccccggccacuucgccgacuacgaggagcuccgcgagcagcucuccuccgucuccuccuucgagcgcuucgagaucuuccccaaggagaacuccuggcccaaccacaccaccaccggcgucuccgccuccugcucccacaacggcgaguccuccuucuacaagaaccuccucuggcucaccggcaagaacggccucuaccccaaccucuccaaguccuacgccaacaacaagaagaaggagguccucguccucuggggcguccaccacccccccaacaucggcaaccagcgcgcccucuaccacaccgagaacgccuacgucuccgucgucuccucccacuacucccgcaaguucacccccgagaucgccaagcgccccaagguccgcgaccaggagggccgcaucaacuacuacuggacccuccucgagcccggcgacaccaucaucuucgaggccaacggcaaccucaucgccccccgcuacgccuucgcccucucccgcggcuucggcuccggcaucaucaacuccaacgcccccauggacgagugcgacgccaagugccagaccccccagggcgccaucaacuccucccuccccuuccagaacguccaccccgucaccaucggcgagugccccaaguacguccgcuccgccaagcuccgcauggucaccggccuccgcaacauccccuccauccagucccgcggccucuucggcgccaucgccggcuucaucgagggcggcuggaccggcauggucgacggcugguacggcuaccaccaccagaacgagcagggcuccggcuacgccgccgaccagaaguccacccagaacgccaucaacggcaucaccaacaaggucaacuccgucaucgagaagaugaacacccaguucaccgccgucggcaaggaguucaacaagcucgagcgccgcauggagaaccucaacaagaaggucgacgacggcuucaucgacaucuggaccuacaacgccgagcuccucguccuccucgagaacgagcgcacccucgacuuccacgacuccaacgucaagaaccucuacgagaaggucaagucccagcucaagaacaacgccaaggagaucggcaacggcugcuucgaguucuaccacaagugcaacgacgagugcauggaguccgucaagaacggcaccuacgacuaccccaaguacuccgaggaguccaagcucaaccgcgagaagaucgacggcgucaaguucgaguccaugggcgucuaccagauccucgccaucuacuccaccgucgccuccucccucguccuccucgucucccucggcgccaucuccuucuggaugugcuccaacggcucccuccagugccgcaucugcaucuga

SEQ ID NO: 104004 - RNA, 1698 nt, Artificial Sequence
  derived and/or modified CDS sequence (opt2) from hemagglutinin__InfluenzaA__AEX33924
augaaggucaagcuccucguccuccucugcaccuucaccgccaccuacgccgacaccaucugcaucggcuaccacgccaacaacuccaccgacaccgucgacaccguccucgagaagaacgucaccgucacccacuccgucaaccuccucgaggacucccacaacggcaagcucugccuccucaagggcaucgccccccuccagcucggcaacugcuccgucgccggcuggauccucggcaaccccgagugcgagucccucaucucccgcgaguccugguccuacaucgucgagaagcccucccccgagaacggcaccugcuaccccggccacuucgccgacuacgaggagcuccgcgagcagcucuccuccgucuccuccuucgagcgcuucgagaucuuccccaaggaguccuccuggcccaaccacaccgccaccggcgucuccgccuccugcucccacaacggcaaguccuccuucuacaagaaccuccucuggcucaccggcaagaacggccucuaccccaaccucuccaaguccuacgccaacaacaaggagaaggagguccucguccucuggggcguccaccacccccccaacaucggcgaccagcgcgcccucuaccacaccgagaacgccuacgucuccgucgucuccucccacuacucccgcaaguucacccccgagaucgccaagcgccccaagguccgcgaccagaagggccgcaucaacuacuacuggacccuccucgagcccggcgacaccaucaucuucgaggccaacggcaaccucaucgccccccgcuacgccuucgcccucucccgcggcuucggcuccggcaucaucaacuccaacgcccccauggacgagugcgacgccaagugccagaccccccagggcgccaucaacuccucccuccccuuccagaacguccaccccgucaccaucggcgagugccccaaguacguccgcuccgccaagcuccgcauggucaccggccuccgcaacauccccuccauccagucccgcggccucuucggcgccaucgccggcuucaucgagggcggcuggaccggcauggucgacggcugguacggcuaccaccaccagaacgagcagggcuccggcuacgccgccgaccagaaguccacccagaacgccaucaacggcaucaccaacaaggucaacuccgucaucgagaagaugaacacccaguucaccgccgucggcaaggaguucaacaagcucgagcgccgcauggagaaccucaacaagaaggucgacgacggcuucaucgacaucuggaccuacaacgccgagcuccucguccuccucgagaacgagcgcacccucgacuuccacgacuccaacgucaagaaccucuacgagaaggucaagucccagcucaagaacaacgccaaggagaucggcaacggcugcuucgaguucuaccacaagugcaacgacgagugcauggaguccgucaagaacggcaccuacgacuaccccaaguacuccgaggaguccaagcucaaccgcgagaagaucgacggcgucaagcucgaguccaugggcgucuaccagauccucgccaucuacuccaccgucgccuccucccucguccuccucgucucccucggcgccaucuccuucuggaugugcuccaacggcucccuccagugccgcaucugcaucuga

SEQ ID NO: 104005 - RNA, 1701 nt, Artificial Sequence
  derived and/or modified CDS sequence (opt2) from hemagglutinin__InfluenzaA__AEX33957
augaagaccaucaucgcccucuccuacauccucugccucgucuucgcccagaagcuccccggcaucgacaacuccaccgccacccucugccucggccaccacgccguccccaacggcaccaucgucaagaccaucaccaacgaccaggucgaggucaccaacgccaccgagcucguccagaacuccuccaccggcggcaucugcgacuccccccaccagauccucgacggcgagaacugcacccucaucgacgcccuccucggcgacccccagugcgacggcuuccagaacaagaagugggaccucuucgucgagcgcuccaaggccuacuccaacugcuaccccuacgacguccccgacuacgccucccuccgcucccucgucgccuccuccggcacccucgaguucaacaacgaguccuucaacuggaccggcgucacccagaacggcaccuccuccgccugcaagcgcggcuccaacaacuccuucuucucccgccucaacuggcucacccacuccaaguucaaguaccccgcccucaacgucaccaugcccaacaacgaggaguucgacaagcucuacaucuggggcguccaccaccccggcaccgacaacgaccagaucuuccucuacgcccaggccuccggccgcaucaccgucuccaccaagcgcucccagcagaccgucauccccaacaucggcucccgcccccgcguccgcaacauccccucccgcaucuccaucuacuggaccaucgucaagcccggcgacauccuccucaucaacuccaccggcaaccucaucgccccccgcggcuacuucaagauccgcuccggcaaguccuccaucaugcgcuccgacgcccccaucggcaagugcaacuccgagugcaucacccccaacggcuccauccccaacgacaagcccuuccagaacgucaaccgcaucaccuacggcgccugcccccgcuacgucaagcagaacacccucaagcucgccaccggcaugcgcaacguccccgagaagcagacccgcggcaucuucggcgccaucgccggcuucaucgagaacggcugggagggcauggucgacggcugguacggcuuccgccaccagaacuccgagggcaucggccaggccgccgaccucaaguccacccaggccgccaucgaccagaucaacggcaagcucaaccgccucaucggcaagaccaacgagaaguuccaccagaucgagaaggaguucuccgaggucgagggccgcauccaggaccucgagaaguacgucgaggacaccaagaucgaccucugguccuacaacgccgagcuccucgucgcccucgagaaccagcacaccaucgaccucaccgacuccgagaugaacaagcucuucgagaagaccaagaagcagcuccgcgagaacgccgaggacaugggcaacggcugcuucaagaucuaccacaagugcgacaacgccugcaucggcuccauccgcaacggcaccuacgaccacgacgucuaccgcgacgaggcccucaacaaccgcuuccagaucaagggcgucgagcucaaguccggcuacaaggacuggauccucuggaucuccuucgccaucuccugcuuccuccucugcgucgcccuccucggcuucaucaugugggccugccagaagggcaacauccgcugcaacaucugcaucuga

SEQ ID NO: 104006 - RNA, 1701 nt, Artificial Sequence
  derived and/or modified CDS sequence (opt2) from hemagglutinin__InfluenzaA__AEX33968
augaagaccaucaucgcccucuccuacauccucugccucgucuucgcccagaagcuccccggcaucgacaacuccaccgccacccucugccucggccaccacgccguccccaacggcaccaucgucaagaccaucaccaacgaccagaucgaggucaccaacgccaccgagcucguccagaacuccuccaccggcggcaucugcgacuccccccaccagauccucgacggcgagaacugcacccucaucgacgcccuccucggcgacccccagugcgacggcuuccagaacaagaagugggaccucuucgucgagcgcuccaaggccuacuccaacugcuaccccuacgacguccccgacuacgccucccuccgcucccucgucgccuccuccggcacccucgaguucaacaacgaguccuucaacuggaccggcgucacccagaacggcaccuccuccgccugcaagcgcggcuccaacaacuccuucuucucccgccucaacuggcucacccacuccaaguucaaguaccccgcccucaacgucaccaugcccaacaacgaggaguucgacaagcucuacaucuggggcguccaccaccccggcaccgacaacgaccagaucuuccuccacgcccaggccuccggccgcaucaccgucuccaccaagcgcucccagcagaccgucauccccaacaucggcucccgcccccgcguccgcaacauccccucccgcaucuccaucuacuggaccaucgucaagcccggcgacauccuccucaucaacuccaccggcaaccucaucgccccccgcggcuacuucaagauccgcuccggcaaguccuccaucaugcgcuccgacgcccccaucggcaagugcaacuccgagugcaucacccccaacggcuccauccccaacgacaagcccuuccagaacgucaaccgcaucaccuacggcgccugcccccgcuacgucaagcagaacacccucaagcucgccaccggcaugcgcaacguccccgagaagcagacccgcggcaucuucggcgccaucgccggcuucaucgagaacggcugggagggcauggucgacggcugguacggcuuccgccaccagaacuccgagggcaucggccaggccgccgaccucaaguccacccaggccgccaucgaccagaucaacggcaagcucaaccgccucaucggcaagaccaacgagaaguuccaccagaucgagaaggaguucuccgaggucgagggccgcauccaggaccucgagaaguacgucgaggacaccaagaucgaccucugguccuacaacgccgagcuccucgucgcccucgagaaccagcacaccaucgaccucaccgacuccgagaugaacaagcucuucgagaagaccaagaagcagcuccgcgagaacgccgaggacaugggcaacggcugcuucaagaucuaccacaagugcgacaacgccugcaucggcuccauccgcaacggcaccuacgaccacgacgucuaccgcgacgaggcccucaacaaccgcuuccagaucaagggcgucgagcucaaguccggcuacaaggacuggauccucuggaucuccuucgccaucuccugcuuccuccucugcgucgcccuccucggcuucaucaugugggccugccagaagggcaacauccgcugcaacaucugcaucuga

SEQ ID NO: 104007 - RNA, 1701 nt, Artificial Sequence
  derived and/or modified CDS sequence (opt2) from hemagglutinin__InfluenzaA__AEX33979
augaagaccaucaucgcccucuccuacauccucugccucgucuucgcccagaagcuccccggcaacgacaacuccaccgccacccucugccucggccaccacgccguccccaacggcaccaucgucaagaccaucaccaacgaccagaucgaggucaccaacgccaccgagcucguccaguccuccuccaccggcgagaucugcgacuccccccaccagauccucgacggcgagaacugcacccucaucgacgcccuccucggcgacccccagugcgacggcuuccagaacaagaagugggaccucuucgucgagcgcuccaaggccuacuccaacugcuaccccuacgacguccccgacuacgccucccuccgcucccucgucgccuccuccggcacccucgaguucaacaacgaguccuucaacuggaccggcgucacccagaacggcaccuccuccgccugcauccgccgcuccaacaacuccuucuucucccgccucaacuggcucacccaccucaaguucaaguaccccgcccucaacgucaccaugcccaacaacgagaaguucgacaagcucuacaucuggggcguccaccaccccggcaccgacaacgaccagaucuuccucuacgcccaggccuccggccgcaucaccgucuccaccaagcgcucccagcagaccgucauccccaacaucggcucccgcccccgcguccgcaacauccccucccgcaucuccaucuacuggaccaucgucaagcccggcgacauccuccucaucaacuccaccggcaaccucaucgccccccgcggcuacuucaagauccgcuccggcaaguccuccaucaugcgcuccgacgcccccaucggcaagugcaacuccgagugcaucacccccaacggcuccauccccaacgacaagcccuuccagaacgucaaccgcaucaccuacggcgccugcccccgcuacgucaagcagaacacccucaagcucgccaccggcaugcgcaacguccccgagaagcagacccgcggcaucuucggcgccaucgccggcuucaucgagaacggcugggagggcauggucgacggcugguacggcuuccgccaccagaacuccgagggcaucggccaggccgccgaccucaaguccacccaggccgccaucgaccagaucaacggcaagcucaaccgccucaucggcaagaccaacgagaaguuccaccagaucgagaaggaguucuccgaggucgagggccgcauccaggaccucgagaaguacgucgaggacaccaagaucgaccucugguccuacaacgccgagcuccucgucgcccucgagaaccagcacaccaucgaccucaccgacuccgagaugaacaagcucuucgagaagaccaagaagcagcuccgcgagaacgccgaggacaugggcaacggcugcuucaagaucuaccacaagugcgacaacgccugcaucggcuccauccgcaacggcaccuacgaccacgacgucuaccgcgacgaggcccucaacaaccgcuuccagaucaacggcgucgagcucaaguccggcuacaaggacuggauccucuggaucuccuucgccaucuccugcuuccuccucugcgucgcccuccucggcuucaucaugugggccugccagaagggcaacauccgcugcaacaucugcaucuga

SEQ ID NO: 104008 - RNA, 1701 nt, Artificial Sequence
  derived and/or modified CDS sequence (opt2) from hemagglutinin__InfluenzaA__AEX33990
augaagaccaucaucgcccucuccuacauccucuaccucgucuucgcccagaagcuccccggcaacgacaacuccaccgccacccucugccucggccaccacgccguccccaacggcaccaucgucaagaccaucaccaacgaccagaucgaggucaccaacgccaccgagcucguccaguccuccuccaccggcgagaucugcgacuccccccaccagauccucgacggcgagaacugcacccucaucgacgcccuccucggcgacccccagugcgacggcuuccagaacaagaagugggaccucuucgucgagcgcuccaaggccuacuccaacugcuaccccuacgacguccccgacuacgccucccuccgcucccucgucgccuccuccggcacccucgaguucaacaacgaguccuucaacuggaccggcgucacccagaacggcaccuccuccgccugcauccgccgcuccaacaacuccuucuucucccgccucaacuggcucacccaccucaaguucaaguaccccgcccucaacgucaccaugcccaacaacgagaaguucgacaagcucuacaucuggggcguccaccaccccggcaccgacaacgaccagaucuuccucuacgcccaggccuccggccgcaucaccgucuccaccaagcgcucccagcagaccgucauccccaacaucggcucccgcccccgcguccgcaacauccccucccgcaucuccaucuacuggaccaucgucaagcccggcgacauccuccucaucaacuccaccggcaaccucaucgccccccgcggcuacuucaagauccaguccggcaaguccuccaucaugcgcuccgacgcccccaucggcaagugcaacuccgagugcaucacccccaacggcuccauccccaacgacaagcccuuccagaacgucaaccgcaucaccuacggcgccugcccccgcuacgucaagcaggacacccucaagcucgccaccggcaugcgcaacguccccgagaagcagacccgcggcaucuucggcgccaucgccggcuucaucgagaacggcugggagggcauggucgacggcugguacggcuuccgccaccagaacuccgagggcaucggccaggccgccgaccucaaguccacccaggccgccaucgaccagaucaacggcaagcucaaccgccucaucggcaagaccaacgagaaguuccaccagaucgagaaggaguucuccgaggucgagggccgcauccaggaccucgagaaguacgucgaggacaccaagaucgaccucugguccuacaacgccgagcuccucgucgcccucgagaaccagcacaccaucgaccucaccgacuccgagaugaacaagcucuucgagaagaccaagaagcagcuccgcgagaacgccgaggacaugggcaacggcugcuucaagaucuaccacaagugcgacaacgccugcaucggcuccauccgcaacggcaccuacgaccacgacgucuaccgcgacgaggcccucaacaaccgcuuccagaucaaguccgucgagcucaaguccggcuacaaggacuggauccucuggaucuccuucgccaucuccugcuuccuccucugcgucgcccuccucggcuucaucaugugggccugccagaagggcaacauccgcugcaacaucugcaucuga

SEQ ID NO: 104009 - RNA, 1701 nt, Artificial Sequence
  derived and/or modified CDS sequence (opt2) from hemagglutinin__InfluenzaA__AEX34001
augaagaccaucaucgcccucuccuacauccucugccucgucuucgcccagaagcuccccggcaacgacaacuccaccgccacccucugccucggccaccacgccguccccaacggcaccaucgucaagaccaucaccaacgaccagaucgaggucaccaacgccaccgagcucguccaguccuccuccaccggcggcaucugcgacuccccccaccagauccucgacggcgagaacugcacccucaucgacgcccuccucggcgacccccagugcgacggcuuccagaacaagaagugggaccucuucgucgagcgcuccaaggccuacuccaacugcuaccccuacgacguccccgacuacgccucccuccgcucccucgucgccuccuccggcacccucgaguucaacuccgaguccuucaacuggaccggcgucacccagaacggcaccuccuccgccugcaagcgccgcuccaacaacuccuucuucucccgccucaacuggcucacccaccucaaguucaaguaccccgcccucaacgucaccaugcccaacaacgagaaguucgacaagcucuacaucuggggcguccaccaccccggcaccgacaacgaccagaucuuccucuacgcccaggccuccggccgcaucaccgucuccaccaagcgcucccagcagaccgucauccccaacaucggcucccgcccccgcguccgcaacauccccucccgcaucuccaucuacuggaccaucgucaagcccggcgacauccuccucaucaacuccaccggcaaccucaucgccccccgcggcuacuucaagauccgcuccggcaaguccuccaucaugcgcuccgacgcccccaucggcaagugcaacuccgagugcaucacccccaacggcuccauccccaacgacaagcccuuccagaacgucaaccgcaucaccuacggcgccugcccccgcuacgucaagcagaacacccucaagcucgccaccggcaugcgcaacguccccgagaagcagacccgcggcaucuucggcgccaucgccggcuucaucgagaacggcugggagggcauggucgacggcugguacggcuuccgccaccagaacgccgagggcaucggccaggccgccgaccucaaguccacccaggccgccaucaaccagaucaacggcaagcucaaccgccucaucggcaagaccaacgagaaguuccaccagaucgagaaggaguucuccgaggucgagggccgcauccaggaccucgagaaguacgucgaggacaccaagaucgaccucugguccuacaacgccgagcuccucgucgcccucgagaaccagcacaccaucgaccucaccgacuccgagaugaacaagcucuucgagcgcaccaagaagcagcuccgcgagaacgccgaggacaugggcaacggcugcuucaagaucuaccacaagugcgacaacgccugcaucggcuccauccgcaacggcaccuacgaccacgacgucuaccgcgacgaggcccucaacaaccgcuuccagaucaagggcgucgagcucaaguccggcuacaaggacuggauccucuggaucuccuucgccaucuccugcuuccuccucugcgucgcccuccucggcuucaucaugugggccugccagaagggcaacauccgcugcaacaucugcaucuga

SEQ ID NO: 104010 - RNA, 1701 nt, Artificial Sequence
  derived and/or modified CDS sequence (opt2) from hemagglutinin__InfluenzaA__AEX34012
augaagaccaucaucgcccucuccuacauccucuaccucgucuucgcccagaagcuccccggcaacgacaacuccaccgccacccucugccucggccaccacgccguccccaacggcaccaucgucaagaccaucaccaacgaccagaucgaggucaccaacgccaccgagcucguccaguccuccuccaccggcgagaucugcgacuccccccaccagauccucgacggcgagaacugcacccucaucgacgcccuccucggcgacccccagugcgacggcuuccagaacaagaagugggaccucuucgucgagcgcuccaaggccuacuccaacugcuaccccuacgacguccccgacuacgccucccuccgcucccucgucgccuccuccggcacccucgaguucaacaacgaguccuucaacuggaccggcgucacccagaacggcaccuccuccgccugcauccgccgcuccaacaacuccuucuucucccgccucaacuggcucacccaccucaaguucaaguaccccgcccucaacgucaccaugcccaacaacgagaaguucgacaagcucuacaucuggggcguccaccaccccggcaccgacaacgaccagaucuuccucuacgcccaggccuccggccgcaucaccgucuccaccaagcgcucccagcagaccgucauccccaacaucggcucccgcccccgcguccgcaacauccccucccgcaucuccaucuacuggaccaucgucaagcccggcgacauccuccucaucaacuccaccggcaaccucaucgccccccgcggcuacuucaagauccaguccggcaaguccuccaucaugcgcuccgacgcccccaucggcaagugcaacuccgagugcaucacccccaacggcuccauccccaacgacaagcccuuccagaacgucaaccgcaucaccuacggcgccugcccccgcuacgucaagcagaacacccucaagcucgccaccggcaugcgcaacguccccgagaagcagacccgcggcaucuucggcgccaucgccggcuucaucgagaacggcugggagggcauggucgacggcugguacggcuuccgccaccagaacuccgagggcaucggccaggccgccgaccucaaguccacccaggccgccaucgaccagaucaacggcaagcucaaccgccucaucggcaagaccaacgagaaguuccaccagaucgagaaggaguucuccgaggucgagggccgcauccaggaccucgagaaguacgucgaggacaccaagaucgaccucugguccuacaacgccgagcuccucgucgcccucgagaaccagcacaccaucgaccucaccgacuccgagaugaacaagcucuucgagaagaccaagaagcagcuccgcgagaacgccgaggacaugggcaacggcugcuucaagaucuaccacaagugcgacaacgccugcaucggcuccauccgcaacggcaccuacgaccacgacgucuaccgcgacgaggcccucaacaaccgcuuccagaucaagggcgucgagcucaaguccggcuacaaggacuggauccucuggaucuccuucgccaucuccugcuuccuccucugcgucgcccuccucggcuucaucaugugggccugccagaagggcaacauccgcugcaacaucugcaucuga

SEQ ID NO: 104011 - RNA, 1701 nt, Artificial Sequence; identical to SEQ ID NO: 98470
  derived and/or modified CDS sequence (opt2) from hemagglutinin__InfluenzaA__AEX34023

SEQ ID NO: 104012 - RNA, 1701 nt, Artificial Sequence
  derived and/or modified CDS sequence (opt2) from hemagglutinin__InfluenzaA__AEX34044
augaagaccaucaucgccuucuccuacauccucugccucgucuucgcccagaagcuccccggcaucgacaacuccaccgccacccucugccucggccaccacgccguccccaacggcaccaucgucaagaccaucaccaacgaccagaucgaggucaccaacgccaccgagcucguccaguccuccuccaccggcggcaucugcgacuccccccaccagauccucgacggcgagaacugcacccucaucgacgcccuccucggcgacccccagugcgacggcuuccagaacaagaagugggaccucuucgucgagcgcuccaaggccuacuccaacugcuaccccuacgacguccccgacuacgccucccuccgcucccucgucgccuccuccggcacccucgaguucaacaacgaguccuucaacuggaccggcgucacccagaacggcaccuccuccgccugcaagcgcggcuccaacaacuccuucuucucccgccucaacuggcucacccacuccaaguucaaguaccccgcccucaacgucaccaugcccaacaacgaggaguucgacaagcucuacaucuggggcguccaccaccccggcaccgacaacgaccagaucuuccucuacgcccaggccuccggccgcaucaccgucuccaccaagcgcucccagcagaccgucauccccaacaucggcucccgcccccgcguccgcaacauccccucccgcaucuccaucuacuggaccaucgucaagcccggcgacauccuccucaucaacuccaccggcaaccucaucgccccccgcggcuacuucaagauccgcuccggcaaguccuccaucaugcgcuccgacgcccccaucggcaagugcaacuccgagugcaucacccccaacggcuccauccccaacgacaagcccuuccagaacgucaaccgcaucaccuacggcgccugcccccgcuacgucaagcagaacacccucaagcucgccaccggcaugcgcaacguccccgagaagcagacccgcggcaucuucggcgccaucgccggcuucaucgagaacggcugggagggcauggucgacggcugguacggcuuccgccaccagaacuccgagggcaucggccaggccgccgaccucaaguccacccaggccgccaucgaccagaucaacggcaagcucaaccgccucaucggcaagaccaacgagaaguuccaccagaucgagaaggaguucuccgaggucgagggccgcauccaggaccucgagaaguacgucgaggacaccaagaucgaccucugguccuacaacgccgagcuccucgucgcccucgagaaccagcacaccaucgaccucaccgacuccgagaugaacaagcucuucgagaagaccaagaagcagcuccgcgagaacgccgaggacaugggcaacggcugcuucaagaucuaccacaagugcgacaacgccugcaucggcuccauccgcaacggcaccuacgaccacgacgucuaccgcgacgaggcccucaacaaccgcuuccagaucaagggcgucgagcucaaguccggcuacaaggacuggauccucuggaucuccuucgccaucuccugcuuccuccucugcgucgcccuccucggcuucaucaugugggccugccagaagggcaacauccgcugcaacaucugcaucuga

SEQ ID NO: 104013 - RNA, 1701 nt, Artificial Sequence
  derived and/or modified CDS sequence (opt2) from hemagglutinin__InfluenzaA__AEX34089
augaagaccaucaucgcccucuccuacauccucugccucgucuucgcccagaagcuccccggcaucgacaacuccaccgccacccucugccucggccaccacgccguccccaacggcaccaucgucaagaccaucaccaacgaccagaucgaggucaccaacgccaccgagcucguccagaacuccuccaccggcggcaucugcgacuccccccaccagauccucgacggcgagaacugcacccucaucgacgcccuccucggcgacccccagugcgacggcuuccagaacaagaagugggaccucuucgucgagcgcuccaaggccuacuccaacugcuaccccuacgacguccccgacuacgccucccuccgcucccucgucgccuccuccggcacccucgaguucaacaacgaguccuucaacuggaccggcgucacccagaacggcaccuccuccgccugcaagcgcggcuccuccaacuccuucuucucccgccucaacuggcucacccacuccaaguucaaguaccccgcccucaacgucaccaugcccaacaacgaggaguucgacaagcucuacaucuggggcguccaccaccccggcaccgacaacgaccagaucuuccucuacgcccaggccuccggccgcaucaccgucuccaccaagcgcucccagcagaccgucauccccaacaucggcucccgcccccgcguccgcaacauccccucccgcaucuccaucuacuggaccaucgucaagcccggcgacauccuccucaucaacuccaccggcaaccucaucgccccccgcggcuacuucaagauccgcuccggcaaguccuccaucaugcgcuccgacgcccccaucggcaagugcaacuccgagugcaucacccccaacggcuccauccccaacgacaagcccuuccagaacgucaaccgcaucaccuacggcgccugcccccgcuacgucaagcagaacacccucaagcucgccaccggcaugcgcaacguccccgagaagcagacccgcggcaucuucggcgccaucgccggcuucaucgagaacggcugggagggcauggucgacggcugguacggcuuccgccaccagaacuccgagggcaucggccaggccgccgaccucaaguccacccaggccgccaucgaccagaucaacggcaagcucaaccgccucaucggcaagaccaacgagaaguuccaccagaucgagaaggaguucuccgaggucgagggccgcauccaggaccucgagaaguacgucgaggacaccaagaucgaccucugguccuacaacgccgagcuccucgucgcccucgagaaccagcacaccaucgaccucaccgacuccgagaugaacaagcucuucgagaagaccaagaagcagcuccgcgagaacgccgaggacaugggcaacggcugcuucaagaucuaccacaagugcgacaacgccugcaucggcuccauccgcaacggcaccuacgaccacgacgucuaccgcgacgaggcccucaacaaccgcuuccagaucaagggcgucgagcucaaguccggcuacaaggacuggauccucuggaucuccuucgccaucuccugcuuccuccucugcgucgcccuccucggcuucaucaugugggccugccagaagggcaacauccgcugcaacaucugcaucuga

SEQ ID NO: 104014 - RNA, 1701 nt, Artificial Sequence
  derived and/or modified CDS sequence (opt2) from hemagglutinin__InfluenzaA__AEX34123
augaagaccaucaucgcccucuccuacauccucugccucgucuucgcccagaagcuccccggcaucgacaacuccaccgccacccucugccucggccaccacgccguccccaacggcaccaucgucaagaccaucaccaacgaccagaucgaggucaccaacgccaccgagcucguccagaacuccuccaccggcggcaucugcgacuccccccaccagauccucgacggcgagaacugcacccucaucgacgcccuccucggcgacccccagugcgacggcuuccagaacaagaagugggaccucuucgucgagcgcuccaaggccuacuccaacugcuaccccuacgacguccccgacuacgccucccuccgcucccucgucgccuccuccggcacccucgaguucaacaacgaguccuucaacuggaccggcgucacccagaacggcaccuccuccgccugcaagcgcggcuccaacaacuccuucuucucccgccucaacuggcucacccacuccaaguucaaguaccccgcccucaacgucaccaugcccaacaacgaggaguucgacaagcucuacaucuggggcguccaccaccccggcaccgacaacgaccagaucuuccucuacgcccaggccuccggccgcaucaccgucuccaccaagcgcucccagcagaccgucauccccaacaucggcucccgcccccgcguccgcaacauccccucccgcaucuccaucuacuggaccaucgucaagcccggcgacauccuccucaucaacuccaccggcaaccucaucgccccccgcggcuacuucaagauccgcuccggcaaguccuccaucaugcgcuccgacgcccccaucggcaagugcaacuccgagugcaucacccccaacggcuccauccccaacgacaagcccuuccagaacgucaaccgcaucaccuacggcgccugcccccgcuacgucaagcagaacacccucaagcucgccaccggcaugcgcaacguccccgagaagcagacccgcggcaucuucggcgccaucgccggcuucaucgagaacggcugggagggcauggucgacggcugguacggcuuccgccaccagaacuccgagggcaucggccaggccgccgaccucaaguccacccaggccgccaucgaccagaucaacggcaagcucaaccgccucaucggcaagaccaacgagaaguuccaccagaucgagaaggaguucuccgaggucgagggccgcauccaggaccucgagaaguacgucgaggacaccaagaucgaccucugguccuacaacgccgagcuccucgucgcccucgagaaccagcacaccaucgaccucaccgacuccgagaugaacaagcucuucgagaagaccaagaagcagcuccgcgagaacgccgaggacaugggcaacggcugcuucaagaucuaccacaagugcgacaacgccugcaucggcuccauccgcaacggcaccuacgaccacgacgucuaccgcgacgaggcccucaacaaccgcuuccagaucaagggcgucgagcucaaguccggcuacaaggacuggauccucuggaucuccuucgccaucuccugcuuccuccucugcgucgcccuccucggcuucaucaugugggccugccagaagggcaacauccgcugcaacaucugcaucuga

SEQ ID NO: 104015 - RNA, 1701 nt, Artificial Sequence
  derived and/or modified CDS sequence (opt2) from hemagglutinin__InfluenzaA__AEX34134
augaagaccaucaucgcccucuccuacauccucugccucgucuucgcccagaagcuccccggcaacgacaacuccauggccacccucugccucggccaccacgccguccccaacggcaccaucgucaagaccaucaccaacgaccagaucgaggucaccaacgccaccgagcucguccaguccuccuccaccggcgagaucugcgacuccccccaccagauccucgacggcgagaacugcacccucaucgacgcccuccucggcgacccccagugcgacggcuuccagaacaagaagugggaccucuucgucgagcgcuccaaggccuacuccaacugcuaccccuacgacguccccgacuacgccucccuccgcucccucgucgccuccuccggcacccucgaguucaacaacgaguccuucaacuggaccggcgucacccagaacggcaccuccuccgccugcauccgccgcuccaacaacuccuucuucucccgccucaacuggcucacccaccucaaguucaaguaccccgcccucaacgucaccaugcccaacaacgagaaguucgacaagcucuacaucuggggcguccaccaccccggcaccgacaacgaccagaucuuccucuacgcccaggccuccggccgcaucaccgucuccaccaagcgcucccagcagaccgucauccccaacaucggcucccgcccccgcguccgcaacauccccucccgcaucuccaucuacuggaccaucgucaagcccggcgacauccuccucaucaacuccaccggcaaccucaucgccccccgcggcuacuucaagauccgcuccggcaaguccuccaucaugcgcuccgacgcccccaucggcaagugcaacuccgagugcaucacccccaacggcuccauccccaacgacaagcccuuccagaacgucaaccgcaucaccuacggcgccugcccccgcuacgucaagcagaacacccucaagcucgccaccggcaugcgcaacguccccgagaagcagacccgcggcaucuucggcgccaucgccggcuucaucgagaacggcugggagggcauggucgacggcugguacggcuuccgccaccagaacuccgagggcaucggccaggccgccgaccucaaguccacccaggccgccaucgaccagaucaacggcaagcucaaccgccucaucggcaagaccaacgagaaguuccaccagaucgagaaggaguucuccgaggucgagggccgcauccaggaccucgagaaguacgucgaggacaccaagaucgaccucugguccuacaacgccgagcuccucgucgcccucgagaaccagcacaccaucgaccucaccgacuccgagaugaacaagcucuucgagaagaccaagaagcagcuccgcgagaacgccgaggacaugggcaacggcugcuucaagaucuaccacaagugcgacaacgccugcaucggcuccauccgcaacggcaccuacgaccacgacgucuaccgcgacgaggcccucaacaaccgcuuccagaucaagggcgucgagcucaaguccggcuacaaggacuggauccucuggaucuccuucgccaucuccugcuuccuccucugcgucgcccuccucggcuucaucaugugggccugccagaagggcaacauccgcugcaacaucugcaucuga

SEQ ID NO: 104016 - RNA, 1701 nt, Artificial Sequence; identical to SEQ ID NO: 104014
  derived and/or modified CDS sequence (opt2) from hemagglutinin__InfluenzaA__AEX34145

SEQ ID NO: 104017 - RNA, 1701 nt, Artificial Sequence
  derived and/or modified CDS sequence (opt2) from hemagglutinin__InfluenzaA__AEX34156
augaagaccaucaucgcccucuccuacauccucugccucgucuucgcccagaagcuccccggcaacgacaacuccaccgccacccucugccucggccaccacgccguccccaacggcaccaucgucaagaccaucaccaacgaccagaucgaggucaccaacgccaccgagcucguccaguccuccuccaccggcgagaucugcggcuccccccaccagauccucgacggcgagaacugcacccucaucgacgcccuccucggcgacccccagugcgacggcuuccagaacaagaagugggaccucuucgucgagcgcuccaaggccuacuccaacugcuaccccuacgacguccccgacuacgccucccuccgcucccucgucgccuccuccggcacccucgaguucaacaacgaguccuucaacuggaccggcgucacccagaacggcaccuccuccgccugcauccgccgcuccaacaacuccuucuucucccgccucaacuggcucacccaccucaaguucaaguaccccgcccucaacgucaccaugcccaacaacgagaaguucgacaagcucuacaucuggggcguccaccaccccggcaccgacaacgaccagaucuuccucuacgcccaggccuccggccgcaucaccgucuccaccaagcgcucccagcagaccgucauccccaacaucggcucccgcccccgcguccgcaacauccccucccgcaucuccaucuacuggaccaucgucaagcccggcgacauccuccucaucaacuccaccggcaaccucaucgccccccgcggcuacuucaagauccgcuccggcaaguccuccaucaugcgcuccgacgcccccaucggcaagugcaacuccgagugcaucacccccaacggcuccauccccaacgacaagcccuuccagaacgucaaccgcaucaccuacggcgccugcccccgcuacgucaagcagaacacccucaagcucgccaccggcaugcgcaacguccccgagaagcagacccgcggcaucuucggcgccaucgccggcuucaucgagaacggcugggagggcauggucgacggcugguacggcuuccgccaccagaacuccgagggcaccggccaggccgccgaccucaaguccacccaggccgccaucgaccagaucaacggcaagcucaaccgccucaucggcaagaccaacgagaaguuccaccagaucgagaaggaguucuccgaggucgagggccgcauccaggaccucgagaaguacgucgaggacaccaagaucgaccucugguccuacaacgccgagcuccucgucgcccucgagaaccagcacaccaucgaccucaccgacuccgagaugaacaagcucuucgagaagaccaagaagcagcuccgcgagaacgccgaggacaugggcaacggcugcuucaagaucuaccacaagugcgacaacgccugcaucggcuccauccgcaacggcaccuacgaccacgacgucuaccgcgacgaggcccucaacaaccgcuuccagaucaagggcgucgagcucaaguccggcuacaaggacuggauccucuggaucuccuucgccaucuccugcuuccuccucugcgucguccuccucggcuucaucaugugggccugccagaagggcaacauccgcugcaacaucugcaucuga

SEQ ID NO: 104018 - RNA, 1701 nt, Artificial Sequence; identical to SEQ ID NO: 97964
  derived and/or modified CDS sequence (opt2) from hemagglutinin__InfluenzaA__AEX34178

SEQ ID NO: 104019 - RNA, 1701 nt, Artificial Sequence
  derived and/or modified CDS sequence (opt2) from hemagglutinin__InfluenzaA__AEX34188
augaagaccaucaucgcccucuccuacauccucugccucgucuucgcccagaaguuccccggcaacgacaacuccaccgccacccucugccucggccaccacgccguccccaacggcaccaucgucaagaccaucaccaacgaccagaucgaggucaccaacgccaccgagcucguccaguccuccuccaccggcgagaucugcgacuccccccaccagauccucgacggcgagaacugcacccucaucgacgcccuccucggcgacccccagugcgacggcuuccagaacaagaacugggaccucuucgucgagcgcuccaaggccuacuccaacugcuaccccuacgacguccccgacuacgccucccuccgcucccucgucgccuccuccggcacccucgaguucaacaacgaguccuucaacuggaccggcgucacccagaacggcaccuccuccgccugcauccgccgcuccaacaacuccuucuucucccgccucaacuggcucacccaccucaaguucaaguaccccgcccucaacgucaccaugcccaacaacgagaacuucgacaagcucuacaucuggggcguccaccaccccggcaccgacaacgaccagaucuuccucuacgcccaggccuccggccgcaucaccgucuccaccaagcgcucccagcagaccgucauccccaacaucggcucccgcccccgcguccgcaacauccccucccgcaucuccaucuacuggaccaucgucaagcccggcgacauccuccucaucaacuccaccggcaaccucaucgccccccgcggcuacuucaagauccgcuccggcaaguccuccaucaugcgcuccgacgcccccaucggcaagugcaacuccgagugcaucacccccaacggcuccauccccaacgacaagcccuuccagaacgucaaccgcaucaccuacggcgccugcccccgcuacgucaagcagaacacccucaagcucgccaccggcaugcgcaacguccccgagaagcagacccgcggcaucuucggcgccaucgccggcuucaucgagaacggcugggagggcauggucgacggcugguacggcuuccgccaccagaacuccgagggcaucggccaggccgccgaccucaaguccacccaggccgccaucgaccagaucaacggcaagcucaaccgccucaucggcaagaccaacgagaaguuccaccagaucgagaaggaguucuccgaggucgagggccgcauccaggaccucgagaaguacgucgaggacaccaagaucgaccucugguccuacaacgccgagcuccucgucgcccucgagaaccagcacaccaucgaccucaccgacuccgagaugaacaagcucuucgagaagaccaagaagcagcuccgcgagaacgccgaggacaugggcaacggcugcuucaagaucuaccacaagugcgacaacgccugcaucggcuccauccgcaacggcaccuacgaccacgacgucuaccgcgacgaggcccucaacaaccgcuuccagaucaagggcgucgagcucaaguccggcuacaaggacuggauccucuggaucuccuucgccaucuccugcuuccuccucugcaucgcccuccucggcuucaucaugugggccugccagaagggcaacauccgcugcaacaucugcaucuga

SEQ ID NO: 104020 - RNA, 1701 nt, Artificial Sequence; identical to SEQ ID NO: 98470
  derived and/or modified CDS sequence (opt2) from hemagglutinin__InfluenzaA__AEX34199

SEQ ID NO: 104021 - RNA, 1701 nt, Artificial Sequence
  derived and/or modified CDS sequence (opt2) from hemagglutinin__InfluenzaA__AEX34221
augaagaccaucaucgcccucuccuacauccucugccucgucuucgcccagaagcuccccggcaucgacaacuccaccgccacccucugccucggccaccacgccguccccaacggcaccaucgucaagaccaucaccaacgaccagaucgaggucaccaacgccaccgagcucguccaguccuccuccaccggcggcaucugcgacuccccccaccagauccucgacggcgagaacugcacccucaucgacgcccuccucggcgacccccagugcgacggcuuccagaacaagaagugggaccucuucgucgagcgcuccaaggccuacuccaacugcuaccccuacgacguccccgacuacgccucccuccgcucccucgucgccuccuccggcacccucgaguucaacaacgaguccuucaacuggaccggcgucacccagaacggcaccuccuccgccugcaagcgcggcuccaacaacuccuucuucucccgccucaacuggcucacccacuccaaguucaaguaccccgcccucaacgucaccaugcccaacaacgaggaguucgacaagcucuacaucuggggcguccaccaccccggcaccgacaacgaccagaucuuccucuacgcccaggccuccggccgcaucaccgucuccaccaagcgcucccagcagaccgucauccccaacaucggcucccgcccccgcguccgcaacauccccucccgcaucuccaucuacuggaccaucgucaagcccggcgacauccuccucaucaacuccaccggcaaccucaucgccccccgcggcuacuucaagauccgcuccggcaaguccuccaucaugcgcuccgacgcccccaucggcaagugcgacuccgagugcaucacccccaacggcuccauccccaacgacaagcccuuccagaacgucaaccgcaucaccuacggcgccugcccccgcuacgucaagcagaacacccucaagcucgccaccggcaugcgcaacguccccgagaagcagacccgcggcaucuucggcgccaucgccggcuucaucgagaacggcugggagggcauggucgacggcugguacggcuuccgccaccagaacuccgagggcaucggccaggccgccgaccucaaguccacccaggccgccaucgaccagaucaacggcaagcucaaccgccucaucggcaagaccaacgagaaguuccaccagaucgagaaggaguucuccgaggucgagggccgcauccaggaccucgagaaguacgucgaggacaccaagaucgaccucugguccuacaacgccgagcuccucgucgcccucgagaaccagcacaccaucgaccucaccgacuccgagaugaacaagcucuucgagaagaccaagaagcagcuccgcgagaacgccgaggacaugggcaacggcugcuucaagaucuaccacaagugcgacaacgccugcaucggcuccauccgcaacggcaccuacgaccacgacgucuaccgcgacgaggcccucaacaaccgcuuccagaucaagggcgucgagcucaaguccggcuacaaggacuggauccucuggaucuccuucgccaucuccugcuuccuccucugcgucgcccuccucggcuucaucaugugggccugccagaagggcaacauccgcugcaacaucugcaucuga

SEQ ID NO: 104022 - RNA, 1701 nt, Artificial Sequence; identical to SEQ ID NO: 97964
  derived and/or modified CDS sequence (opt2) from hemagglutinin__InfluenzaA__AEX34243

SEQ ID NO: 104023 - RNA, 1701 nt, Artificial Sequence; identical to SEQ ID NO: 104019
  derived and/or modified CDS sequence (opt2) from hemagglutinin__InfluenzaA__AEX34254

SEQ ID NO: 104024 - RNA, 1701 nt, Artificial Sequence; identical to SEQ ID NO: 97964
  derived and/or modified CDS sequence (opt2) from hemagglutinin__InfluenzaA__AEX34265

SEQ ID NO: 104025 - RNA, 1701 nt, Artificial Sequence
  derived and/or modified CDS sequence (opt2) from hemagglutinin__InfluenzaA__AEX34275
augaagaccaucaucgcccucuccuacauccucugccucgucuucgcccagaagcuccccggcaucgacaacuccaccgccacccucugccucggccaccacgccguccccaacggcaccaucgucaagaccaucaccaacgaccagaucgaggucaccaacgccaccgagcucguccagaacuccuccaccggcggcaucugcgacuccccccaccagauccucgacggcgagaacugcacccucaucgacgcccuccucggcgacccccagugcgacggcuuccagaacaagaagugggaccucuucgucgagcgcuccaaggccuacuccaacugcuaccccuacgacguccccgacuacgccucccuccgcucccucgucgccuccuccggcacccucgaguucaacaacgaguccuucaacuggaccggcgucacccagaacggcaccuccuccgccugcaagcgcggcuccaacaacuccuucuucucccgccucaacuggcucacccacuccaaguucaaguaccccgcccucaacgucaccaugcccaacaacgaggaguucgacaagcucuacaucuggggcguccuccaccccggcaccgacaacgaccagaucuuccucuacgcccaggccuccggccgcaucaccgucuccaccaagcgcucccagcagaccgucauccccaacaucggcucccgcccccgcguccgcaacauccccucccgcaucuccaucuacuggaccaucgucaagcccggcgacauccuccucaucaacuccaccggcaaccucaucgccccccgcggcuacuucaagauccgcuccggcaaguccuccaucaugcgcuccgacgcccccaucggcaagugcaacuccgagugcaucacccccaacggcuccauccccaacgacaagcccuuccagaacgucaaccgcaucaccuacggcgccugcccccgcuacgucaagcagaacacccucaagcucgccaccggcaugcgcaacguccccgagaagcagacccgcggcaucuucggcgccaucgccggcuucaucgagaacggcugggagggcauggucgacggcugguacggcuuccgccaccagaacuccgagggcaucggccaggccgccgaccucaaguccacccaggccgccaucgaccagaucaacggcaagcucaaccgccucaucggcaagaccaacgagaaguuccaccagaucgagaaggaguucuccgaggucgagggccgcauccaggaccucgagaaguacgucgaggacaccaagaucgaccucugguccuacaacgccgagcuccucgucgcccucgagaaccagcacaccaucgaccucaccgacuccgagaugaacaagcucuucgagaagaccaagaagcagcuccgcgagaacgccgaggacaugggcaacggcugcuucaagaucuaccacaagugcgacaacgccugcaucggcuccauccgcaacggcaccuacgaccacuacgucuaccgcgacgaggcccucaacaaccgcuuccagaucaagggcgucgagcucaaguccggcuacaaggacuggauccucuggaucuccuucgccaucuccugcuuccuccucugcgucgcccuccucggcuucaucaugugggccugccagaagggcaacauccgcugcaacaucugcaucuga

SEQ ID NO: 104026 - RNA, 1698 nt, Artificial Sequence; identical to SEQ ID NO: 98524
  derived and/or modified CDS sequence (opt2) from hemagglutinin__InfluenzaA__AEX34318

SEQ ID NO: 104027 - RNA, 1698 nt, Artificial Sequence
  derived and/or modified CDS sequence (opt2) from hemagglutinin__InfluenzaA__AEX34329
augaaggucaagcuccucguccuccucugcaccuucaccgccaccuacgccgacaccaucugcaucggcuaccacgccaacaacuccaccgacaccgucgacaccguccucgagaagaacgucaccgucacccacuccgucaaccuccucgagaacucccacaacggcaagcucugccuccucaagggcaucgccccccuccagcucggcaacugcuccgucgccggcuggauccucggcaaccccgagugcgagcuccucgucuccaaggaguccugguccuacaucgucgagaagcccaaccccgagaacggcaccugcuaccccggccacuucgccgacuacgaggagcuccgcgagcagcucuccuccgucuccuccuucgagcgcuucgagaucuuccccaaggaguccuccuggcccaaccacaccgucaccggcgucuccgccuccugcucccacaacggcgaguccuccuucuaccgcaaccuccucuggcucaccggcaagaacggccucuaccccaaccucuccaaguccuacgccaacaacaaggagaaggagguccucguccucuggggcguccaccacccccccaacaucggcgaccagaaggcccucuaccacaccgagaacgccuacgucuccgucgucuccucccacuacucccgcaaguucacccccgagaucgccaagcgccccaagguccgcgaccaggagggccgcaucaacuacuacuggacccuccucgagcccggcgacaccaucaucuucgaggccaacggcaaccucaucgccccccgcuacgccuucgcccucucccgcggcuucggcuccggcaucaucaacuccaacgcccccauggacaagugcgacgccaagugccagaccccccagggcgccaucaacuccucccuccccuuccagaacguccaccccgucaccaucggcgagugccccaaguacguccgcuccgccaagcuccgcauggucaccggccuccgcaacauccccuccauccagucccgcggccucuucggcgccaucgccggcuucaucgagggcggcuggaccggcauggucgacggcugguacggcuaccaccaccagaacgagcagggcuccggcuacgccgccgaccagaaguccacccagaacgccaucaacggcaucaccaacaaggucaacuccgucaucgagaagaugaacacccaguucaccgccgucggcaaggaguucaacaagcucgagcgccgcauggagaaccucaacaagaaggucgacgacggcuucaucgacaucuggaccuacaacgccgagcuccucguccuccucgagaacgagcgcacccucgacuuccacgacuccaacgucaagaaccucuacgagaaggucaagucccagcucaagaacaacgccaaggagaucggcaacggcugcuucgaguucuaccacaagugcaacgacgagugcauggaguccgucaagaacggcaccuacgacuaccccaaguacuccgaggaguccaagcucaaccgcgagaagaucgagggcgucaagcucgaguccaugggcgucuaccagauccucgccaucuacuccaccgucgccuccucccucguccuccucgucucccucggcgccaucuccuucuggaugugcuccaacggcucccuccagugccgcaucugcaucuga

SEQ ID NO: 104028 - RNA, 1701 nt, Artificial Sequence
  derived and/or modified CDS sequence (opt2) from hemagglutinin__InfluenzaA__AEX34352
augaagaccaucaucgcccucuccuacauccucugccucgucuucgcccagaagcuccccggcaacgacaacuccaccgccacccucugccucggccaccacgccguccccaacggcaccaucgucaagaccaucaccaacgaccagaucgaggucaccaacgccaccgagcucguccaguccuccuccaccggcgagaucugcgacuccccccaccagauccucgacggcgagaacugcacccucaucgacgcccuccucggcgacccccagugcgacggcuuccagaacaagaagugggaccucuucgucgagcgcuccaaggccuacuccaacugcuaccccuacgacguccccgacuacgccucccuccgcucccucgucgccuccuccggcacccucgaguucaacaacgaguccuucaacuggaccggcgucacccagaacggcaccuccuccgccugcauccgccgcuccaacaacuccuucuucucccgccucaacuggcucacccaccucaaguucaaguaccccgcccucaacgucaccaugcccaacaacgagaaguucgacaagcucuacaucuggggcguccaccaccccggcaccgacaacgaccagaucuuccucuacgcccaggccuccggccgcaucaccgucuccaccaagcgcucccagcagaccgucauccccaacaucggcucccgcccccgcguccgcaacauccccucccgcaucuccaucuacuggaccaucgucaagcccggcgacauccuccucaucaacuccaccggcaaccucaucgccccccgcggcuacuucaagauccgcuccggcaaguccuccaucaugcgcuccgacgcccccaucggcaagugcaacuccgagugcaucacccccaacggcuccauccucaacgacaagcccuuccagaacgucaaccgcaucaccuacggcgccugcccccgcuacgucaagcagaacacccucaagcucgccaccggcaugcgcaacguccccgagaagcagacccgcggcaucuucggcgccaucgccggcuucaucgagaacggcugggagggcauggucgacggcugguacggcuuccgccaccagaacuccgagggcaucggccaggccgccgaccucaaguccacccaggccgccaucgaccagaucaacggcaagcucaaccgccucaucggcaagaccaacgagaaguuccaccagaucgagaaggaguucuccgaggucgagggccgcauccaggaccucgagaaguacgucgaggacaccaagaucgaccucugguccuacaacgccgagcuccucgucgcccucgagaaccagcacaccaucgaccucaccgacuccgagaugaacaagcucuucgagaagaccaagaagcagcuccgcgagaacgccgaggacaugggcaacggcugcuucaagaucuaccacaagugcgacaacgccugcaucggcuccauccgcaacggcaccuacgaccacgacgucuaccgcgacgaggcccucaacaaccgcuuccagaucaagggcgucgagcucaaguccggcuacaaggacuggauccucuggaucuccuucgccaucuccugcuuccuccucugcgucgcccuccucggcuucaucaugugggccugccagaagggcaacauccgcugcaacaucugcaucuga

SEQ ID NO: 104029 - RNA, 1701 nt, Artificial Sequence; identical to SEQ ID NO: 98470
  derived and/or modified CDS sequence (opt2) from hemagglutinin__InfluenzaA__AEX34364

SEQ ID NO: 104030 - RNA, 1701 nt, Artificial Sequence; identical to SEQ ID NO: 98470
  derived and/or modified CDS sequence (opt2) from hemagglutinin__InfluenzaA__AEX34375

SEQ ID NO: 104031 - RNA, 1701 nt, Artificial Sequence
  derived and/or modified CDS sequence (opt2) from hemagglutinin__InfluenzaA__AEX34386
augaagaccaucaucgcccucuccuacauccucugccucgucuucgcccagaagcuccccggcaacgacaacuccaccgccacccucugccucggccaccacgccguccccaacggcaccaucgucaagaccaucaccaacgaccagaucgaggucaccaacgccaccgagcucguccaguccuccuccaccggcgagaucugcgacuccccccaccagauccucgacggcgagaacugcacccucaucgacgcccuccucggcgacccccagugcgacggcuuccagaacaagaagugggaccucuucaucgagcgcuccaaggccuacuccaacugcuaccccuacgacguccccgacuacgccucccuccgcucccucgucgccuccuccggcacccucgaguucaacaacgaguccuucaacuggaccggcgucacccagaacggcaccuccuccgccugcauccgccgcuccaacaacuccuucuucucccgccucaacuggcucacccaccucaaguucaaguaccccgcccucaacgucaccaugcccaacaacgagcaguucgacaagcucuacaucuggggcguccaccaccccggcaccgacaacgaccagaucuuccucuacgcccaggccuccggccgcaucaccgucuccaccaagcgcucccagcagaccgucauccccaacaucggcucccgcccccgcguccgcaacauccccucccgcaucuccaucuacuggaccaucgucaagcccggcgacauccuccucaucaacuccaccggcaaccucaucgccccccgcggcuacuucaagauccgcuccggcaaguccuccaucaugcgcuccgacgcccccaucggcaagugcaacuccgagugcaucacccccaacggcuccauccccaacgacaagcccuuccagaacgucaaccgcaucaccuacggcgccugcccccgcuacgucaagcagaacacccucaagcucgccaccggcaugcgcaacguccccgagaagcagacccgcggcaucuucggcgccaucgccggcuucaucgagaacggcugggagggcauggucgacggcugguacggcuuccgccaccagaacuccgagggccgcggccaggccgccgaccucaaguccacccaggccgccaucgaccagaucaacggcaagcucaaccgccucaucggcaagaccaacgagaaguuccaccagaucgagaaggaguucuccgaggucgagggccgcauccaggaccucgagaaguacgucgaggacaccaagaucgaccucugguccuacaacgccgagcuccucgucgcccucgagaaccagcacaccaucgaccucaccgacuccgagaugaacaagcucuucgagaagaccaagaagcagcuccgcgagaacgccgaggacaugggcaacggcugcuucaagaucuaccacaagugcgacaacgccugcaucggcuccauccgcaacggcaccuacgaccacgacgucuaccgcgacgaggcccucaacaaccgcuuccagaucaagggcgucgagcucaaguccggcuacaaggacuggauccucuggaucuccuucgccaucuccugcuuccuccucugcgucgcccuccucggcuucaucaugugggccugccagaagggcaacauccgcugcaacaucugcaucuga

SEQ ID NO: 104032 - RNA, 1701 nt, Artificial Sequence
  derived and/or modified CDS sequence (opt2) from hemagglutinin__InfluenzaA__AEX34407
augaagaccaucaucgcccucuccuacauccucugccucgucuucgcccagaagcuccccggcaacgacaacuccauggccacccucugccucggccaccacgccguccccaacggcaccaucgucaagaccaucaccaacgaccagaucgaggucaccaacgccaccgagcucguccaguccuccuccaccggcgagaucugcgacuccccccaccagauccucgacggcgagaacugcacccucaucgacgcccuccucggcgacccccagugcgacggcuuccagaacaagaagugggaccucuucgucgagcgcuccaaggccuacuccaacugcuaccccuacgacguccccgacuacgccucccuccgcucccucgucgccuccuccggcacccucgaguucaacaacgaguccuucaacuggaccggcgucacccagaacggcaccuccuccgccugcauccgccgcuccaacaacuccuucuucucccgccucaacuggcucacccaccucaaguucaaguaccccgcccucaacgucaccaugcccaacaacgagcaguucgacaagcucuacaucuggggcguccaccaccccggcaccgacaacgaccagaucuuccucuacgcccaggccuccggccgcaucaccgucuccaccaagcgcucccagcagaccgucauccccaacaucggcucccgcccccgcguccgcaacauccccucccgcaucuccaucuacuggaccaucgucaagcccggcgacauccuccucaucaacuccaccggcaaccucaucgccccccgcggcuacuucaagauccucuccggcaaguccuccaucaugcgcuccgacgcccccaucggcaagugcaacuccgagugcaucacccccaacggcuccauccccaacgacaagcccuuccagaacgucaaccgcaucaccuacggcgccugcccccgcuacgucaagcagaacacccucaagcucgccaccggcaugcgcaacguccccgagaagcagacccgcggcaucuucggcgccaucgccggcuucaucgagaacggcugggagggcauggucgacggcugguacggcuuccgccaccagaacuccgagggccgcggccaggccgccgaccucaaguccacccaggccgccaucgaccagaucaacggcaagcucaaccgccucaucggcaagaccaacgagaaguuccaccagaucgagaaggaguucuccgaggucgagggccgcauccaggaccucgagaaguacgucgaggacaccaaggucgaccucugguccuacaacgccgagcuccucgucgcccucgagaaccagcacaccaucgaccucaccgacuccgagaugaacaagcucuucgagaagaccaagaagcagcuccgcgagaacgccgaggacaugggcaacggcugcuucaagaucuaccacaagugcgacaacgccugcaucggcuccauccgcaacggcaccuacgaccacgacgucuaccgcgacgaggcccucaacaaccgcuuccagaucaagggcgucgagcucaaguccggcuacaaggacuggauccucuggaucuccuucgccaucuccugcuuccuccucugcgucgcccuccucggcuucaucaugugggccugccagaagggcaacauccgcugcaacaucugcaucuga

SEQ ID NO: 104033 - RNA, 1698 nt, Artificial Sequence
  derived and/or modified CDS sequence (opt2) from hemagglutinin__InfluenzaA__AEX34440
augaaggucaagcuccucguccuccucugcaccuucaccgccaccuacgccgacaccaucugcaucggcuaccacgccaacaacuccaccgacaccgucgacaccguccucgagaagaacgucaccgucacccacuccgucaaccuccucgaggacucccacaacggcaagcucugccuccucaagggcaucgccccccuccagcucggcaacugcuccgucgccggcuggauccucggcaaccccgagugcgagcuccucaccucccgcgaguccugguccuacaucgucgagaagcccaaccccgagaacggcaccugcuaccccggccacuucgccgacuacgaggagcuccgcgagcagcucuccuccgucuccuccuucgagcgcuucgagaucuuccccaaggaguccuccuggcccaaccacaccaccaccggcgucuccgccuccugcucccacaacggcgaguccuccuucuacaagaaccuccucuggcucaccggcaagaacggccucuaccccaaccucuccaaguccuacgccaacaacaaggagaaggagguccucguccucuggggcguccaccacccccccaacaucggcaaccagcgcgcccucuaccacaccgagaacgccuacgucuccgucgucuccucccacuacucccgcaaguucacccccgagaucgccaagcgccccaagguccgcgaccaggagggccgcaucaacuacuacuggacccuccucgagcccggcgacaccaucaucuucgaggccaacggcaaccucaucgccccccgcuacgccuucgcccucucccgcggcuucggcuccggcaucaucaacuccaacgcccccauggacgagugcgacgccaagugccagaccccccagggcgccaucaacuccucccuccccuuccagaacguccaccccgucaccaucggcgagugccccaaguacguccgcuccgccaagcuccgcauggucaccggccuccgcaacauccccuccauccagucccgcggccucuucggcgccaucgccggcuucaucgagggcggcuggaccggcauggucgacggcugguacggcuaccaccaccagaacgagcagggcuccggcuacgccgccgaccagaaguccacccagaacgccaucaacggcaucaccaacaaggucaacuccgucaucgagaagaugaacacccaguucaccgccgucggcaaggaguucaacaagcucgagcgccgcauggagaaccucaacaagaaggucgacgacggcuucaucgacaucuggaccuacaacgccgagcuccucguccuccucgagaacgagcgcacccucgacuuccacgacuccaacgucaagaaccucuacgagaaggucaagucccagcucaagaacaacgccaaggagaucggcaacggcugcuucgaguucuaccacaagugcaacgacgagugcauggaguccgucaagaacggcaccuacgacuaccccaaguacuccgaggaguccaagcucaaccgcgagaagaucgacggcgucaagcucgaguccaugggcgucuaccagauccucgccaucuacuccaccgucgccuccucccucguccuccucgucucccucggcgccaucuccuucuggaugugcuccaacggcucccuccagugccgcaucugcaucuga

SEQ ID NO: 104034 - RNA, 1698 nt, Artificial Sequence; identical to SEQ ID NO: 96335
  derived and/or modified CDS sequence (opt2) from hemagglutinin__InfluenzaA__AEX34462

SEQ ID NO: 104035 - RNA, 1698 nt, Artificial Sequence
  derived and/or modified CDS sequence (opt2) from hemagglutinin__InfluenzaA__AEX34473
augaaggucaagcuccucguccuccucugcaccuucaccgccaccuacgccgacaccaucugcaucggcuaccacgccaacaacuccaccgacaccgucgacaccguccucgagaagaacgucaccgucacccacuccgucaaccuccucgaggacucccacaacggcaagcucugccuccucaagggcaucgccccccuccagcucggcaacugcuccgucgccggcuggauccucggcaaccccgagugcgagcuccucaucuccaaggaguccugguccuacaucgucgagacccccaaccccgagaacggcaccugcuaccccggcuacuucgccgacuacgaggagcuccgcgagcagcucuccuccgucuccuccuucgagcgcuucgagaucuuccccaaggaguccuccuggcccaaccacaccgucaccggcgucuccgccuccugcucccacaacggcaaguccuccuucuaccgcaaccuccucuggcucaccggcaaguccggccucuaccccaaccucuccaaguccuacgccaacaacaaggagaaggagguccucguccucuggggcguccaccacccccccaacaucggcgaccagcgcgcccucuaccacaccgagaacgccuacgucuccgucgucuccucccacuacucccgccgcuucacccccgagaucgccaagcgccccaagguccgcgaccaggagggccgcaucaacuacuacuggacccuccucgagcccggcgacaccaucaucuucgaggccaacggcaaccucaucgccccccgcuacgccuucgcccucucccgcggcuucggcuccggcaucaucaccuccaacgcccccauggacgagugcgacgccaagugccagaccccccagggcgccaucaacuccucccuccccuuccagaacguccaccccgucaccaucggcgagugccccaaguacgucaaguccgccaagcuccgcauggucaccggccuccgcaacauccccuccauccagucccgcggccucuucggcgccaucgccggcuucaucgagggcggcuggaccggcauggucgacggcugguacggcuaccaccaccagaacgagcagggcuccggcuacgccgccgaccagaaguccacccaguccgccaucaacggcaucaccaacaaggucaacuccgucaucgagaagaugaacacccaguucaccgccgucggcaaggaguucaacaagcucgagcgccgcauggagaaccucaacaagaaggucgacgacggcuuccucgacaucuggaccuacaacgccgagcuccucguccuccucgagaacgagcgcacccucgacuuccacgacuccaacgucaagaaccucuacgagaaggucaagucccagcucaagaacaacgccaaggagaucggcaacggcugcuucgaguucuaccacaagugcaacgacgagugcauggaguccgucaagaacggcaccuacgacuaccccaaguacuccgaggaguccaagcucaaccgcgagaagaucgacggcgucaagcucgaguccaugggcgucuaccagauccucgccaucuacuccaccgucgccuccucccucguccuccucgucucccucggcgccaucuccuucuggaugugcuccaacggcucccuccagugccgcaucugcaucuga

SEQ ID NO: 104036 - RNA, 1698 nt, Artificial Sequence
  derived and/or modified CDS sequence (opt2) from hemagglutinin__InfluenzaA__AEX34495
augaaggucaagcuccucguccuccucugcaucuucaccgccaccuacgccgacaccaucugcaucggcuaccacgccaacaacuccaccgacaccgucgacaccguccucgagaagaacgucaccgucacccacuccgucaaccuccucgaggacucccacaacggcaagcucugccuccucaagggcaucgccccccuccagcucggcaacugcuccgucgccggcuggauccucggcaaccccgagugcgagcuccucaucuccaaggaguccugguccuacaucgucgagacccccaaccccgagaacggcaccugcuaccccggcuacuucgccgacuacgaggagcuccgcgagcagcucuccuccgucuccuccuucgagcgcuucgagaucuuccccaaggaguccuccuggcccaaccacaccgucaccggcgucuccgccuccugcucccacaacggcaaguccuccuucuaccgcaaccuccucuggcucaccggcaaguccggccucuaccccaaccucuccaaguccuacgccaacaacaaggagaaggagguccucguccucuggggcguccaccacccccccaacaucggcguccagcgcgcccucuaccacaccgagaacgccuacgucuccgucgucuccucccacuacucccgccgcuucacccccgagaucgccaagcgccccaagguccgcgaccaggagggccgcaucaacuacuacuggacccuccucgagcccggcgacaccaucaucuucgaggccaacggcaaccucaucgccccccgcuacgccuucgcccucucccgcggcuucggcuccggcaucaucaccuccaacgcccccauggacgagugcgacgccaagugccagaccccccagggcgccaucaacuccucccuccccuuccagaacguccaccccgucaccaucggcgagugccccaaguacgucaaguccgccaagcuccgcauggucaccggccuccgcaacauccccuccauccagucccgcggccucuucggcgccaucgccggcuucaucgagggcggcuggaccggcauggucgacggcugguacggcuaccaccaccagaacgagcagggcuccggcuacgccgccgaccagaaguccacccagaacgccaucaacggcaucaccaacaaggucaacuccgucaucgagaagaugaacacccaguucaccgccgucggcaaggaguucaacaagcucgagcgccgcauggagaaccucaacaagaaggucgacgacggcuuccucgacaucuggaccuacaacgccgagcuccucguccuccucgagaacgagcgcacccucgacuuccacgacuccaacgucaagaaccucuacgagaaggucaagucccagcucaagaacaacgccaaggagaucggcaacggcugcuucgaguucuaccacaagugcaacgacgagugcauggaguccgucaagaacggcaccuacgacuaccccaaguacuccgaggaguccaagcucaaccgcgagaagaucgacggcgucaagcucgaguccaugggcgucuaccagauccucgccaucuacuccaccgucgccuccucccucguccuccucgucucccucggcgccaucuccuucuggaugugcuccaacggcucccuccagugccgcaucugcaucuga

SEQ ID NO: 104037 - RNA, 1698 nt, Artificial Sequence; identical to SEQ ID NO: 104036
  derived and/or modified CDS sequence (opt2) from hemagglutinin__InfluenzaA__AEX34506

SEQ ID NO: 104038 - RNA, 1698 nt, Artificial Sequence; identical to SEQ ID NO: 104036
  derived and/or modified CDS sequence (opt2) from hemagglutinin__InfluenzaA__AEX34517

SEQ ID NO: 104039 - RNA, 1698 nt, Artificial Sequence; identical to SEQ ID NO: 104036
  derived and/or modified CDS sequence (opt2) from hemagglutinin__InfluenzaA__AEX34528

SEQ ID NO: 104040 - RNA, 1698 nt, Artificial Sequence; identical to SEQ ID NO: 104036
  derived and/or modified CDS sequence (opt2) from hemagglutinin__InfluenzaA__AEX34539

SEQ ID NO: 104041 - RNA, 1698 nt, Artificial Sequence; identical to SEQ ID NO: 104036
  derived and/or modified CDS sequence (opt2) from hemagglutinin__InfluenzaA__AEX34550

SEQ ID NO: 104042 - RNA, 1698 nt, Artificial Sequence; identical to SEQ ID NO: 104036
  derived and/or modified CDS sequence (opt2) from hemagglutinin__InfluenzaA__AEX34561

SEQ ID NO: 104043 - RNA, 1698 nt, Artificial Sequence; identical to SEQ ID NO: 104036
  derived and/or modified CDS sequence (opt2) from hemagglutinin__InfluenzaA__AEX34572

SEQ ID NO: 104044 - RNA, 1698 nt, Artificial Sequence; identical to SEQ ID NO: 104036
  derived and/or modified CDS sequence (opt2) from hemagglutinin__InfluenzaA__AEX34583

SEQ ID NO: 104045 - RNA, 1698 nt, Artificial Sequence; identical to SEQ ID NO: 104036
  derived and/or modified CDS sequence (opt2) from hemagglutinin__InfluenzaA__AEX34594

SEQ ID NO: 104046 - RNA, 1698 nt, Artificial Sequence; identical to SEQ ID NO: 104036
  derived and/or modified CDS sequence (opt2) from hemagglutinin__InfluenzaA__AEX34605

SEQ ID NO: 104047 - RNA, 1698 nt, Artificial Sequence; identical to SEQ ID NO: 104036
  derived and/or modified CDS sequence (opt2) from hemagglutinin__InfluenzaA__AEX34616

SEQ ID NO: 104048 - RNA, 1698 nt, Artificial Sequence; identical to SEQ ID NO: 104036
  derived and/or modified CDS sequence (opt2) from hemagglutinin__InfluenzaA__AEX34627

SEQ ID NO: 104049 - RNA, 1698 nt, Artificial Sequence; identical to SEQ ID NO: 104036
  derived and/or modified CDS sequence (opt2) from hemagglutinin__InfluenzaA__AEX34638

SEQ ID NO: 104050 - RNA, 1698 nt, Artificial Sequence
  derived and/or modified CDS sequence (opt2) from hemagglutinin__InfluenzaA__AEX34650
augaaggucaagcuccucguccuccucugcaccuucaccgccaccuacgccgacaccaucugcaucggcuaccacgccaacaacuccaccgacaccgucgacaccguccucgagaagaacgucaccgucacccacuccgucaaccuccucgaggacucccacaacggcaagcucugccuccucaagggcaucgccccccuccagcucggcaacugcuccgucgccggcuggauccucggcaaccccgagugcgagcuccucaucuccaaggaguccugguccuacaucgucgagacccccaaccccgagaacggcaccugcuaccccggcuacuucgccgacuacgaggagcuccgcgagcagcucuccuccgucuccuccuucgagcgcuucgagaucuuccccaaggaguccuccuggcccaaccacaccgucaccggcgucuccgccuccugcucccacaacggcaaguccuccuucuaccgcaaccuccucuggcucaccggcaagaacggccucuaccccaaccucuccaaguccuacgccaacaacaaggagaaggagguccucguccucuggggcguccaccacccccccaacaucggcaaccagcgcucccucuaccacaccgagaacgccuacgucuccgucgucuccucccacuacucccgccgcuucacccccgagaucgccaagcgccccaagguccgcgaccaggagggccgcaucaacuacuacuggacccuccucgagcccggcgacaccaucaucuucgaggccaacggcaaccucaucgccccccgcuucgccuucgcccucucccgcggcuucggcuccggcaucaucaccuccaacgcccccauggacgagugcgacgccaagugccagaccccccagggcgccaucaacuccucccuccccuuccagaacguccaccccgucaccaucggcgagugccccaaguacguccgcuccgccaagcuccgcauggucaccggccuccgcaacauccccuccauccagucccgcggccucuucggcgccaucgccggcuucaucgagggcggcuggaccggcauggucgacggcugguacggcuaccaccaccagaacgagcagggcuccggcuacgccgccgaccagaaguccacccagaacgccaucaacggcaucaccaacaaggucaacuccgucaucgagaagaugaacacccaguucaccgccgucggcaaggaguucaacaagcucgagcgccgcauggagaaccucaacaagaaggucgacgacggcuuccucgacaucuggaccuacaacgccgagcuccucguccuccucgagaacgagcgcacccucgacuuccacgacuccaacgucaagaaccucuacgagaaggucaagucccagcucaagaacaacgccaaggagaucggcaacggcugcuucgaguucuaccacaagugcaacgacgagugcauggaguccgucaagaacggcaccuacgacuaccccaaguacuccgaggaguccaagcucaaccgcgagaagaucgacggcgucaagcucgaguccaugggcgucuaccagauccucgccaucuacuccaccgucgccuccucccucguccuccucgucucccucggcgccaucuccuucuggaugugcuccaacggcucccuccagugccgcaucugcaucuga

SEQ ID NO: 104051 - RNA, 1698 nt, Artificial Sequence
  derived and/or modified CDS sequence (opt2) from hemagglutinin__InfluenzaA__AEX34661
augaaggucaagcuccucguccuccucugcaccuucaccgccaccuacgccgacaccaucugcaucggcuaccacgccaacaacuccaccgacaccgucgacaccguccucgagaagaacgucaccgucacccacuccgucaaccuccucgaggacucccacaacggcaagcucugccuccucaagggcaucgccccccuccagcucggcaacugcuccgucgccggcuggauccucggcaaccccgagugcgagcuccucaucuccaaggaguccugguccuacaucgucgagacccccaaccccgagaacggcaccugcuaccccggcuacuucgccgacuacgaggagcuccgcgagcagcucuccuccgucuccuccuucgagcgcuucgagaucuuccccaaggaguccuccuggcccaaccacaccgucaccggcgucuccgccuccugcucccacaacggcaaguccuccuucuaccgcaaccuccucuggcucaccggcaagaagggccucuaccccaaccucuccaaguccuacgccaacaacaaggagaaggagguccucguccucuggggcguccaccacccccccaacaucggcgaccagcgcgcccucuaccacaccgagaacgccuacgucuccgucgucuccucccacuacucccgccgcuucacccccgagaucgccaagcgccccaagguccgcgaccaggagggccgcaucaacuacuacuggacccuccucgagcccggcgacaccaucaucuucgaggccaacggcaaccucaucgccccccgcuucgccuucgcccucucccgcggcuucggcuccggcaucaucaccuccaacgcccccauggacgagugcgacgccaagugccagaccccccagggcgccaucaacuccucccuccccuuccagaacguccaccccgucaccaucggcgagugccccaaguacguccgcuccgccaagcuccgcauggccaccggccuccgcaacauccccuccauccagucccgcggccucuucggcgccaucgccggcuucaucgagggcggcuggaccggcauggucgacggcugguacggcuaccaccaccagaacgagcagggcuccggcuacgccgccgaccagaaguccacccagaacgccaucaacggcaucaccaagaaggucaacuccgucaucgagaagaugaacacccaguucaccgccgucggcaaggaguucuccaagcucgagcgccgcauggagaaccucaacaagaaggucgacgacggcuuccucgacaucuggaccuacaacgccgagcuccucguccuccucgagaacgagcgcacccucgacuuccacgacuccaacgucaagaaccucuacgagaaggucaagucccagcucaagaacaacgccaaggagaucggcaacggcugcuucgaguucuaccacaagugcaacgacgagugcauggaguccgucaagaacggcaccuacgacuaccccaaguacuccgaggaguccaagcucaaccgcgagaagaucgacggcgucaagcucgaguccaugggcgucuaccagauccucgccaucuacuccaccgucgccuccucccucguccuccucgucucccucggcgccaucuccuucuggaugugcuccaacggcucccuccagugccgcaucugcaucuga

SEQ ID NO: 104052 - RNA, 1698 nt, Artificial Sequence
  derived and/or modified CDS sequence (opt2) from hemagglutinin__InfluenzaA__AEX34672
augaaggucaagcuccucguccuccucugcaccuucaccgccaccuacgccgacaccaucugcaucggcuaccacgccaacaacuccaccgacaccgucgacaccguccucgacaagaacgucaccgucacccacuccgucaaccuccucgaggacucccacaacggcaagcucugccuccucaagggcaucgccccccuccagcucggcaacugcuccgucgccggcuggauccucggcaaccccgagugcgagcuccucaucucccgcgaguccugguccuacaucgucgagaagcccaaccccgagaacggcaccugcuaccccggccacuucgccgacuacgaggagcuccgcgagcagcucuccuccgucuccuccuucgagcgcuucgagaucuuccccaaggaguccuccuggcccaaccacaccaccaccggcgucuccgccuccugcucccacgacggcgaguccuccuucuacaagaaccuccucuggcucaccggcaagaacggccucuaccccaaccucuccaaguccuacgccaacaacaaggagaaggagguccucguccucuggggcguccaccacccccccaacaucggcguccagcgcgcccucuaccacaccgagaacgccuacgucuccgucgucuccucccacuacucccgcaaguucacccccgagaucgccaagcgccccaagguccgcgaccaggagggccgcaucaacuacuacuggacccuccucgagcccggcgacaccaucaucuucgaggccaacggcaaccucaucgccccccgcuacgccuucgcccucucccgcggcuucggcuccggcaucaucaacuccaacgcccccauggacgagugcgacgccaagugccagaccccccagggcgccaucaacuccucccuccccuuccagaacguccaccccgucaccaucggcgagugccccaaguacguccgcuccgccaagcuccgcauggucaccggccuccgcaacauccccuccauccagucccgcggccucuucggcgccaucgccggcuucaucgagggcggcuggaccggcauggucgacggcugguacggcuaccaccaccagaacgagcagggcuccggcuacgccgccgaccagaaguccacccagaacgccaucaacggcaucaccaacaaggucaacuccgucaucgagaagaugaacacccaguucaccgccgucggcaaggaguucaacaagcucgagcgccgcauggagaaccucaacaagaaggucgacgacggcuucaucgacaucuggaccuacaacgccgagcuccucguccuccucgagaacgagcgcacccucgacuuccacgacuccaacgucaagaaccucuacgagaaggucaagucccagcucaagaacaacgccaaggagaucggcaacggcugcuucgaguucuaccacaagugcaacgacgagugcauggaguccgucaagaacggcaccuacgacuaccccaaguacuccgaggaguccaagcucaaccgcgagaagaucgacggcgucaagcucgaguccaugggcgucuaccagauccucgccaucuacuccaccgucgccuccucccucguccuccucgucucccucggcgccaucuccuucuggaugugcuccaacggcucccuccagugccgcaucugcaucuga

SEQ ID NO: 104053 - RNA, 1698 nt, Artificial Sequence
  derived and/or modified CDS sequence (opt2) from hemagglutinin__InfluenzaA__AEX34683
augaaggucaagcuccucguccuccucugcaccuucaccgccaccuacgccgacaccaucugcaucggcuaccacgccaacaacuccaccgacaccgucgacaccguccucgagaagaacgucaccgucacccacuccgucaaccuccucgaggacucccacaacggcaagcucugccuccucaagggcaucgccccccuccagcucggcaacugcuccgucgccggcuggauccucggcaaccccgagugcgagcuccucaucucccgcgaguccugguccuacaucgucgagaagcccaaccccgagaacggcaccugcuaccccggccacuucgccgacuacgaggagcuccgcgagcagcucuccuccgucuccuccuucgagcgcuucgagaucuuccccaaggaguccuccuggcccuaccacaccaccaccggcgucuccgccuccugcucccacaacggcgaguccuccuucuacaagaaccuccucuggcucaccggcaagaacggccucuaccccaaccucuccaaguccuacgccaacaacaaggagaaggagguccucguccucuggggcguccaccacccccccaacaucggcgaccagcgcgcccucuaccacaccgagaacgccuacgucuccgucgucuccucccacuacucccgcaaguucacccccgagaucgccaagcgccccaagguccgcgaccaggagggccgcaucaacuacuacuggacccuccucgagcccggcgacaccaucaucuucgaggccaacggcaaccucaucgccccccgcuacgccuucgcccucucccgcggcuucggcuccggcaucaucaacuccaacgcccccauggacgagugcgacgccaagugccagaccccccagggcgccaucaacuccucccuccccuuccagaacguccaccccgucaccaucggcgagugccccaaguacguccgcuccgccaagcuccgcauggucaccggccuccgcaacauccccuccauccagucccgcggccucuucggcgccaucgccggcuucaucgagggcggcuggaccggcauggucgacggcugguacggcuaccaccaccagaacgagcagggcuucggcuacgccgccgaccagaaguccacccagaacgccaucaacggcaucaccaacaaggucaacuccgucaucgagaagaugaacacccaguucaccgccgucggcaaggaguucaacaagcucgagcgccgcauggagaaccucaacaagaaggucgacgacggcuucaucgacaucuggaccuacaacgccgagcuccucguccuccucgagaacgagcgcacccucgacuuccacgacuccaacgucaagaaccucuacgagaaggucaagucccagcucaagaacaacgccaaggagaucggcaacggcugcuucgaguucuaccacaagugcaacgacgagugcauggaguccgucaagaacggcaccuacgacuaccccaaguacuccgaggaguccaagcucaaccgcgagaagaucgacggcgucaagcucgaguccaugggcgucuaccagauccucgccaucuacuccaccgucgccuccucccucguccuccucgucucccucggcgccaucuccuucuggaugugcuccaacggcucccuccagugccgcaucugcaucuga

SEQ ID NO: 104054 - RNA, 1698 nt, Artificial Sequence
  derived and/or modified CDS sequence (opt2) from hemagglutinin__InfluenzaA__AEX34757
augaaggucaagcuccucguccuccucugcaccuucaccgccaccuacgccgacaccaucugcaucggcuaccacgccaacaacuccaccgacaccgucgacaccguccucgagaagaacgucaccgucacccacuccgucaaccuccucgaggacucccacaacggcaagcucugccuccucaagggcaucgccccccuccagcucggcaacugcuccgucgccggcuggauccucggcaaccccgagugcgagcuccucaucucccgcgaguccugguccuacaucgucgagaagcccaaccccgagaacggcaccugcuaccccggccacuucgccgacuacgaggagcuccgcgagcagcucuccuccgucuccuccuucgagcgcuucgagaucuuccccaaggaguccuccuggcccaaccacaccaccaccggcgucuccgccuccugcucccacaacggcggcuccuccuucuacaagaaccuccucuggcucacccgcaagaacggccucuaccccaaccucuccaaguccuacgccaacaacaaggagaaggagguccucguccucuggggcguccaccacccccccaacaucggcgaccagcgcgcccucuaccacaccgagaacgccuacgucuccgucgucuccucccacuacucccgcaaguucacccccgagaucgccaagcgccccaagguccgcgaccaggagggccgcaucaacuacuacuggacccuccucgagcccggcgacaccaucaucuucgaggccaacggcaaccucaucgccccccgcuacgccuucgcccucucccgcggcuucggcuccggcaucaucaacuccaacgcccccauggacgagugcgacgccaagugccagaccccccagggcgccaucaacuccucccuccccuuccagaacguccaccccgucaccaucggcgagugccccaaguacguccgcuccgccaagcuccgcauggucaccggccuccgcaacauccccuccauccagucccgcggccucuucggcgccaucgccggcuucaucgagggcggcuggaccggcauggucgacggcugguacggcuaccaccaccagaacgagcagggcuccggcuacgccgccgaccagaaguccacccagaacgccaucaacggcaucaccaacaaggucaacuccgucaucgagaagaugaacacccaguucaccgccgucggcaaggaguucaacaagcucgagcgccgcauggagaaccucaacaagaaggucgacgacggcuucaucgacaucuggaccuacaacgccgagcuccucguccuccucgagaacgagcgcacccucgacuuccacgacuccaacgucaagaaccucuacgagaaggucaagucccagcucaagaacaacgccaaggagaucggcaacggcugcuucgaguucuaccacaagugcaacgacgagugcauggaguccgucaagaacggcaccuacgacuaccccaaguacuccgaggaguccaagcucaaccgcgagaagaucgacggcgucaagcucgaguccaugggcgucuaccagauccucgccaucuacuccaccgucgccuccucccucguccuccucgucucccucggcgccaucuccuucuggaugugcuccaacggcucccuccagugccgcaucugcaucuga

SEQ ID NO: 104055 - RNA, 1698 nt, Artificial Sequence
  derived and/or modified CDS sequence (opt2) from hemagglutinin__InfluenzaA__AEX34768
augaaggucaagcuccucguccuccucugcaccuucaccgccaccuacgccgacaccaucugcaucggcuaccacgccaacaacuccaccgacaccgucgacaccguccucgagaagaacgucaccgucacccacuccgucaaccuccucgaggacucccacaacggcaagcucugccuccucaagggcaucgccccccuccagcucggcaacugcuccgucgccggcuggauccucggcaaccccgagugcgagcuccucaucucccgcgaguccugguccuacaucgucgagaagcccaaccccgagaacggcaccugcuaccccggccacuucgccgacuacgaggagcuccgcgagcagcucuccuccgucuccuccuucgagcgcuucgagaucuuccccaaggacuccuccuggcccaaccacaccaccaccggcgucuccgccuccugcucccacaacggcgaguccuccuucuacaagaaccuccucuggcucaccggcaagaacggccucuaccccaaccucuccaaguccuacgccaacaacaaggagaaggagguccucguccucuggggcguccaccacccccccaacaucggcgaccagcgcgcccucuaccacaccgagaacgccuacgucuccgucgucuccucccacuacucccgcaaguucacccccgagaucgccaagcgccccaagguccgcgaccagggcggccgcaucaacuacuacuggacccuccucgagcccggcgacaccaucaucuucgaggccaacggcaaccucaucgccccccgcuacgccuucgcccucucccgcggcuucggcuccggcaucaucaacuccaacgcccccauggacgagugcgacgccaagugccagaccccccagggcgccaucaacuccucccuccccuuccagaacguccaccccgucaccaucggcgagugccccaaguacguccgcuccgccaagcuccgcauggucaccggccuccgcaacauccccuccauccagucccgcggccucuucggcgccaucgccggcuucaucgagggcggcuggaccggcauggucgacggcugguacggcuaccaccaccagaacgagcagggcuccggcuacgccgccgaccagaaguccacccagaacgccaucaacggcaucaccaacaaggucaacuccgucaucgagaagaugaacacccaguucaccgccgucggcaaggaguucaacaagcucgagcgccgcauggagaaccucaacaagaaggucgacgacggcuucaucgacaucuggaccuacaacgccgagcuccucguccuccucgagaacgagcgcacccucgacuuccacgacuccaacgucaagaaccucuacgagaaggucaagucccagcucaagaacaacgccaaggagaucggcaacggcugcuucgaguucuaccacaagugcaacgacgagugcauggaguccgucaagaacggcaccuacgacuaccccaaguacuccgaggaguccaagcucaaccgcgagaagaucgacggcgucaagcucgaguccaugggcgucuaccagauccucgccaucuacuccaccgucgccuccucccucguccuccucgucucccucggcgccaucuccuucuggaugugcuccaacggcucccuccagugccgcaucugcaucuga

SEQ ID NO: 104056 - RNA, 1698 nt, Artificial Sequence
  derived and/or modified CDS sequence (opt2) from hemagglutinin__InfluenzaA__AEX34779
augaaggucaagcuccucguccuccucugcaccuucaccgccaccuacgccgacaccaucugcaucggcuaccacgccaacaacuccaccgacaccgucgacaccguccucgagaagaacgucaccgucacccacuccgucaaccuccucgagaacucccacaacggcaagcucugccuccucaagggcaucgccccccuccagcucggcaacugcuccgucgccggcuggauccucggcaaccccgagugcgagcuccucaucuccaaggaguccugguccuacaucgucgagaagcccaaccccgagaacggcaccugcuaccccggccacuucgccgacuacgaggagcuccgcgagcagcucuccuccgucuccuccuucgagcgcuucgagaucuuccccaaggaguccuccuggcccaaccacaccgucaccggcgucuccgccuccugcucccacaacggcgagcgcuccuucuaccgcaaccuccucuggcucaccggcaagaacggccucuaccccaaccucuccaaguccuacgccaacaacaaggagaaggagguccucguccucuggggcguccaccacccccccaacaucggcaaccagaaggcccucuaccacaccgagaacgccuacgucuccgucgucuccucccacuacucccgcaaguucacccccgagaucgccaagcgccccaagguccgcgaccaggagggccgcaucaacuacuacuggacccuccucgagcccggcgacaccaucaucuucgaggccaacggcaaccucaucgccccccgcuacgccuucgcccucucccgcggcuucggcuccggcaucaucaacuccaacgcccccauggacaagugcgacgccaagugccagaccccccagggcgccaucaacuccucccuccccuuccagaacguccaccccgucaccaucggcgagugccccaaguacguccgcuccgccaagcuccgcauggucaccggccuccgcaacauccccuccauccagucccgcggccucuucggcgccaucgccggcuucaucgagggcggcuggaccggcauggucgacggcugguacggcuaccaccaccagaacgagcagggcuccggcuacgccgccgaccagaaguccacccagaacgccaucaacggcaucaccaacaaggucaacuccgucaucgagaagaugaacacccaguucaccgccgucggcaaggaguucaacaagcucgagcgccgcauggagaaccucaacaagaaggucgacgacggcuucaucgacaucuggaccuacaacgccgagcuccucguccuccucgagaacgagcgcacccucgacuuccacgacuccaacgucaagaaccucuacgagaaggucaagucccagcucaagaacaacgccaaggagaucggcaacggcugcuucgaguucuaccacaagugcaacgacgagugcauggaguccgucaagaacggcaccuacgacuaccccaaguacuccgaggaguccaagcucaaccgcgagaagaucgacggcgucaagcucgaguccaugggcgucuaccagauccucgccaucuacuccaccgucgccuccucccucguccuccucgucucccucggcgccaucuccuucuggaugugcuccaacggcucccuccagugccgcaucugcaucuga

SEQ ID NO: 104057 - RNA, 1698 nt, Artificial Sequence; identical to SEQ ID NO: 100133
  derived and/or modified CDS sequence (opt2) from hemagglutinin__InfluenzaA__AEX34790

SEQ ID NO: 104058 - RNA, 1698 nt, Artificial Sequence
  derived and/or modified CDS sequence (opt2) from hemagglutinin__InfluenzaA__AEX34801
augaaggucaagcuccucguccuccucugcaccuucaccgccaccuacgccgacaccaucugcaucggcuaccacgccaacaacuccaccgacaccgucgacaccguccucgagaagaacgucaccgucacccacuccgucaaccuccucgaggacaaccacaacggcaagcucugccuccucaagggcaucgccccccuccagcucggcaacugcuccgucgccggcuggauccucggcaaccccgagugcgagcuccucaucuccaaggaguccugguccuacaucgucgagaagcccaaccccgagaacggcgccugcuaccccggccacuucgccgacuacgaggagcuccgcgagcagcucuccuccgucuccuccuucaagcgcuucgagaucuuccccaaggaguccuccuggcccaaccacaccgucaccggcgucuccgccuccugcucccacaacggcgaguccuccuucuacaagaaccuccucuggcucaccggcaagaacggccucuaccccaaccucuccaaguccuacgccaacaacaaggagaaggagguccucguccucuggggcguccaccacccccccaacaucggcgaccagaugacccucuaccacaaggagaacgccuacgucuccgucgucuccucccacuacucccgcaaguucacccccgagaucgccaagcgccccaagguccgcgaccaggagggccgcaucaacuacuacuggacccuccucgagcccggcgacaccaucaucuucgaggccuccggcaaccucaucgccccccgcuacgccuucgcccucucccgcggcuucggcuccggcaucaucaacuccgacgcccccauggacgagugcgacgccaagugccagaccccccagggcgccaucaacuccucccuccccuuccagaacguccaccccgucaccaucggcgagugccccaaguacguccgcuccgccaagcuccgcauggucaccggccuccgcaacauccccuccauccagucccgcggccucuucggcgccaucgccggcuucaucgagggcggcuggaccggcauggucgacggcugguacggcuaccaccaccagaacgagcagggcuccggcuacgccgccgaccagaaguccacccagaacgccaucaacggcaucaccaacaaggucaacuccgucaucgagaagaugaacacccaguucaccgccgucggcaaggaguucaacaagcucgagcgccgcauggagaaccucaacaagaaggucgacgacggcuucaucgacgucuggaccuacaacgccgagcuccucguccuccucgagaacgagcgcacccucgacuuccacgacuccaacgucaagaaccucuacgagaaggucaagaaccagcucaagaacaacgccaaggagaucggcaacggcugcuucgaguucuaccacaagugcaacgacgagugcauggaguccgucaagaacggcaccuacgacuaccccaaguacuccgaggaguccaagcucucccgcgagaagaucgacggcgucaagcucgaguccaugggcgucuaccagauccucgccaucuacuccaccgucgccuccucccucguccuccucgucucccucggcgccaucuccuucuggaugugcuccaacggcucccuccagugccgcaucugcaucuga

SEQ ID NO: 104059 - RNA, 1698 nt, Artificial Sequence
  derived and/or modified CDS sequence (opt2) from hemagglutinin__InfluenzaA__AEX34812
augaaggucaagcuccucguccuccucugcaccuucaccgccaccuacgccgacaccaucugcaucggcuaccacgccaacaacuccaccgacaccgucgacaccguccucgagaagaacgucaccgucacccacuccgucaaccuccucgagaacucccacaacggcaagcucugccuccucaagggcaucgccccccuccagcucggcaacugcuccgucgccggcuggauccucggcaaccccgagugcgagcuccucaucuccaaggaguccugguccuacaucgucgagaagcccaaccccgagaacggcaccugcuaccccggccacuucgccgacuacgaggagcuccgcgagcagcucuccuccgucuccuccuucgagcgcuucgagaucuuccccaaggaguccuccuggcccaaccacaccgucaccggcgucuccgccuccugcucccacaacggcgaguccuccuucuaccgcaaccuccucuggcucaccggcaagaacggccucuaccccaaccucuccaaguccuacgccaacaacaaggagaaggagguccucguccucuggggcguccaccacccccccaacaucggcgaccagaaggcccucuaccacaccgagaacgccuacgucuccgucgucuccucccacuacucccgcaaguucacccccgagaucgccaagcgccccaagguccgcgaccaggagggccgcaucaacuacuacuggacccuccucgagcccggcgacaccaucaucuucgaggccaacggcaaccucaucgccccccgcuacgccuucgcccucucccgcggcuucggcuccggcaucaucaacuccaacgcccccauggacaagugcgacgccaagugccagaccccccagggcgccaucaacuccucccuccccuuccagaacguccaccccgucaccaucggcgagugccccaaguacguccgcuccgccaagcuccgcauggucaccggccuccgcaacauccccuccauccagucccgcggccucuucggcgccaucgccggcuucaucgagggcggcuggaccggcauggucgacggcugguacggcuaccaccaccagaacgagcagggcuccggcuacgccgccgaccagaaguccacccagaacgccaucgacggcaucaccaacaaggucaacuccgucaucgagaagaugaacacccaguucaccgccgucggcaaggaguucaacaagcucgagcgccgcauggagaaccucaacaagaaggucgacgacggcuucaucgacaucuggaccuacaacgccgagcuccucguccuccucgagaacgagcgcacccucgacuuccacgacuccaacgucaagaaccucuacgagaaggucaagucccagcucaagaacaacgccaaggagaucggcaacggcugcuucgaguucuaccacaagugcaacgacgagugcauggaguccgucaagaacggcaccuacgacuaccccaaguacuccgaggaguccaagcucaaccgcgagaagaucgacggcgucaagcucgaguccaugggcgucuaccagauccucgccaucuacuccaccgucgccuccucccucguccuccucgucucccucggcgccaucuccuucuggaugugcuccaacggcucccuccagugccgcaucugcaucuga

SEQ ID NO: 104060 - RNA, 1698 nt, Artificial Sequence
  derived and/or modified CDS sequence (opt2) from hemagglutinin__InfluenzaA__AEX34834
augaaggucaagcuccucguccuccucugcaccuucaccgccaccuacgccgacaccaucugcaucggcuaccacgccaacaacuccaccgacaccgucgacaccguccucgagaagaacgucaccgucacccacuccgucaaccuccucgaggacaaccacaacggcaagcucugccuccucaagggcaucgccccccuccagcucggcaacugcuccgucgccggcuggauccucggcaaccccgagugcgagcuccucaacuccaaggaguccugguccuacaucgucgagaagcccaaccccgagaacggcaccugcuaccccggccacuucgccgacuacgaggagcuccgcgagcagcucuccuccgucuccuccuucaagcgcuucgagaucuuccccaaggaguccuccuggcccaaccacaccgucaccggcgucuccgccuccugcucccacaacggcgaguccuccuucuacaagaaccuccucuggcucaccggcaagaacggccucuaccccaaccucuccaaguccuacgccaacaacaaggagaaggagguccucguccucuggggcguccaccacccccccaacaucggcgaccagaugacccucuaccacaaggagaacgccuacgucuccgucgucuccucccacuacucccgcaaguucacccccgagaucaccaagcgccccaagguccgcgaccaggagggccgcaucaacuacuacuggacccuccucgagcccggcgacaccaucaucuucgaggccuccggcaaccucaucgccccccgcuacgccuucgcccucucccgcggcuucggcuccggcaucaucaacuccaacgcccccauggacgagugcgacgccaagugccagaccccccagggcgccaucaacuccucccuccccuuccagaacguccaccccgucaccaucggcgagugccccaaguacguccgcuccgccaagcuccgcauggucaccggccuccgcaacauccccuccauccagucccgcggccucuucggcgccaucgccggcuucaucgagggcggcuggaccggcauggucgacggcugguacggcuaccaccaccagaacgagcagggcuccggcuacgccgccgaccagaaguccacccagaacgccaucaacggcaucaccaacaaggucaacuccgucaucgagaagaugaacacccaguucaccgccgucggcaaggaguucaacaagcucgagcgccgcauggagaaccucaacaagaaggucgacgacggcuucaucgacgucuggaccuacaacgccgagcuccucguccuccucgagaacgagcgcacccucgacuuccacgacuccaacgucaagaaccucuacgagaaggucaagaaccagcucaagaacaacgccaaggagaucggcaacggcugcuucgaguucuaccacaagugcaacgacgagugcauggaguccgucaagaacggcaccuacgacuaccccaaguacuccgaggaguccaagcucucccgcgagaagaucgacggcgucaagcucgaguccaugggcgucuaccagauccucgccaucuacuccaccgucgccuccucccucguccuccucgucucccucggcgccaucuccuucuggaugugcuccaacggcucccuccagugccgcaucugcaucuga

SEQ ID NO: 104061 - RNA, 1698 nt, Artificial Sequence
  derived and/or modified CDS sequence (opt2) from hemagglutinin__InfluenzaA__AEX34845
augaaggucaagcuccucguccuccucugcaccuucaccgccaccuacgccgacaccaucugcaucggcuaccacgccaacaacuccaccgacaccgucgacaccguccucgagaagaacgucaccgucacccacuccgucaaccuccucgagaacucccacaacggcaagcucugccuccucaagggcaucgccccccuccagcucggcaacugcuccgucgccggcuggauccucggcaaccccgagugcgagcuccucguccccaaggaguccugguccuacaucgucgagaagcccaaccccgagaacggcaccugcuaccccggccacuucgccgacuacgaggagcuccgcgagcagcucuccuccgucuccuccuucgagcgcuucgagaucuuccccaaggaguccuccuggcccaaccacaccgucaccggcgucuccgccuccugcucccacaacggcgaguccuccuucuaccgcaaccuccucuggcucaccggcaagaacggccucuaccccaaccucuccaaguccuacgccaacaacaaggagaaggagguccucguccucuggggcguccaccacccccccaacaucggcgaccagaaggcccucuaccacaccgagaacgccuacgucuccgucgucuccucccacuacucccgcaaguucacccccgagaucgccaagcgccccaagguccgcgaccaggagggccgcaucaacuacuacuggacccuccucgagcccggcgacaccaucaucuucgaggccaacggcaaccucaucgccccccgcuacgccuucgcccucucccgcggcuucggcuccggcaucaucaacuccaacgcccccauggacaagugcgacgccaagugccagaccccccagggcgccaucaacuccucccuccccuuccagaacguccaccccgucaccaucggcgagugccccaaguacguccgcuccgccaagcuccgcauggucaccggccuccgcaacauccccuccauccagucccgcggccucuucggcgccaucgccggcuucaucgagggcggcuggaccggcauggucgacggcugguacggcuaccaccaccagaacgagcagggcuccggcuacgccgccgaccagaaguccacccagaacgccaucaacggcaucaccaacaaggucaacuccgucaucgagaagaugaacacccaguucaccgccgucggcaaggaguucaacaagcucgagcgccgcauggagaaccucaacaagaaggucgacgacggcuucaucgacaucuggaccuacaacgccgagcuccucguccuccucgagaacgagcgcacccucgacuuccacgacuccaacgucaagaaccucuacgagaaggucaagucccagcucaagaacaacgccaaggagaucggcaacggcugcuucgaguucuaccacaagugcaacgacgagugcauggaguccgucaagaacggcaccuacgacuaccccaaguacuccgaggaguccaagcucaaccgcgagaagaucgagggcgucaagcucgaguccaugggcgucuaccagauccucgccaucuacuccaccgucgccuccucccucguccuccucgucucccucggcgccaucuccuucuggaugugcuccaacggcucccuccagugccgcaucugcaucuga

SEQ ID NO: 104062 - RNA, 1698 nt, Artificial Sequence; identical to SEQ ID NO: 100133
  derived and/or modified CDS sequence (opt2) from hemagglutinin__InfluenzaA__AEX34856

SEQ ID NO: 104063 - RNA, 1698 nt, Artificial Sequence
  derived and/or modified CDS sequence (opt2) from hemagglutinin__InfluenzaA__AEX34867
augaaggucaagcuccucguccuccucugcaccuucaccgccaccuacgccgacaccaucugcaucggcuaccacgccaacaacuccaccgacaccgucgacaccguccucgagaagaacgucaccgucacccacuccgucaaccuccucgagaacucccacaacggcaagcucugccuccucaagggcaucgccccccuccagcucggcaacugcuccgucgccggcuggauccucggcaaccccgagugcgagcuccucgucuccaaggaguccugguccuacaucgucgagaagcccaaccccgagaacggcaccugcuaccccggccacuucgccgacuacgaggagcuccgcgagcagcucaucuccgucuccuccuucgagcgcuucgagaucuuccccaaggaguccuccuggcccaaccacaccgucaccggcgucuccgccuccugcucccacaacggcgaguccuccuucuaccgcaaccuccucuggcucaccggcaagaacggccucuaccccaaccucuccaaguccuacgccaacaacaaggagaaggagguccucguccucuggggcguccaccacccccccaacaucggcgaccagaaggcccucuaccacaccgagaacgccuacgucuccgucgucuccucccacuacucccgcaaguucacccccgagaucgccaagcgccccaagguccgcgaccaggagggccgcaucaacuacuacuggacccuccucgagcccggcgacaccaucaucuucgaggccaacggcaaccucaucgccccccgcuacgccuucgcccucucccgcggcuucggcuccggcaucaucaacuccaacgcccccauggacaagugcgacgccaagugccagaccccccgcggcgccaucaacuccucccuccccuuccagaacguccaccccgucaccaucggcgagugccccaaguacguccgcuccgccaagcuccgcauggucaccggccuccgcaacauccccuccauccagucccgcggccucuucggcgccaucgccggcuucaucgagggcggcuggaccggcauggucgacggcugguacggcuaccaccaccagaacgagcagggcuccggcuacgccgccgaccagaaguccacccagaacgccaucaacggcaucaccaacaaggucaacuccgucaucgagaagaugaacacccaguucaccgccgucggcaaggaguucaacaagcucgagcgccgcauggagaaccucaacaagaaggucgacgacggcuucaucgacaucuggaccuacaacgccgagcuccucguccuccucgagaacgagcgcacccucgacuuccacgacuccaacgucaagaaccucuacgagaaggucaagucccagcucaagaacaacgccaaggagaucggcaacggcugcuucgaguucuaccacaagugcaacgacgagugcauggaguccgucaagaacggcaccuacgacuaccccaaguacuccgaggaguccaagcucaaccgcgagaagaucgagggcgucaagcucgaguccaugggcgucuaccagauccucgccaucuacuccaccgucgccuccucccucguccuccucgucucccucggcgccaucuccuucuggaugugcuccaacggcucccuccagugccgcaucugcaucuga

SEQ ID NO: 104064 - RNA, 1698 nt, Artificial Sequence; identical to SEQ ID NO: 100133
  derived and/or modified CDS sequence (opt2) from hemagglutinin__InfluenzaA__AEX34878

SEQ ID NO: 104065 - RNA, 1698 nt, Artificial Sequence
  derived and/or modified CDS sequence (opt2) from hemagglutinin__InfluenzaA__AEX34889
augaaggucaaccuccucguccuccucugcaccuucaccgccaccuacgccgacaccaucugcaucggcuaccacgccaacaacuccaccgacaccgucgacaccguccucgagaagaacgucaccgucacccacuccgucaaccuccucgagaacucccacaacggcaagcucugccuccucaagggcaucgccccccuccagcucggcaacugcuccgucgccggcuggauccucggcaaccccgagugcgagcuccucaucuccaaggaguccugguccuacaucgucgagaagcccaaccccgagaacggcaccugcuaccccggccacuucgccgacuacgaggagcuccgcgagcagcucuccuccgucuccuccuucgagcgcuucgagaucuuccccaaggaguccuccuggcccaaccacaccgucaccggcgucuccgccuccugcucccacaacggcgaguccuccuucuaccgcaaccuccucuggcucaccggcaagaacggccucuaccccaaccucuccaaguccuacgccaacaacaaggagaaggagguccucguccucuggggcguccaccacccccccaacaucggcgaccagaaggcccucuaccacaccgagaacgccuacgucuccgucgucuccucccacuacucccgcaaguucacccccgagaucgccaagcgccccaagguccgcgaccaggagggccgcaucaacuacuacuggacccuccucgagcccggcgacaccaucaucuucgaggccaacggcaaccucaucgccccccgcuacgccuucgcccucucccgcggcuucggcuccggcaucaucaacuccaacgcccccauggacaagugcgacgccaagugccagaccccccagggcgccaucaacuccucccuccccuuccagaacguccaccccgucaccaucggcgagugccccaaguacguccgcuccgccaagcuccgcauggucaccggccuccgcaacauccccuccauccagucccgcggccucuucggcgccaucgccggcuucaucgagggcggcuggaccggcauggucgacggcugguacggcuaccaccaccagaacgagcagggcuccggcuacgccgccgaccagaaguccacccagaacgccaucaacggcaucaccaacaaggucaacuccgucaucgagaagaugaacacccaguucaccgccgucggcaaggaguucaacaagcucgagcgccgcauggagaaccucaacaagaaggucgacgacggcuucaucgacaucuggaccuacaacgccgagcuccucguccuccucgagaacgagcgcacccucgacuuccacgacuccaacgucaagaaccucuacgagaaggucaagucccagcucaagaacaacgccaaggagaucggcaacggcugcuucgaguucuaccacaagugcaacgacgagugcauggaguccgucaagaacggcaccuacgacuaccccaaguacuccgaggaguccaagcucaaccgcgagaagaucgacggcgucaagcucgaguccaugggcgucuaccagauccucgccaucuacuccaccgucgccuccucccucguccuccucgucucccucggcgccaucuccuucuggaugugcuccaacggcucccuccagugccgcaucugcaucuga

SEQ ID NO: 104066 - RNA, 1698 nt, Artificial Sequence
  derived and/or modified CDS sequence (opt2) from hemagglutinin__InfluenzaA__AEX34900
augaaggucaagcuccucguccuccucugcaccuucaccgccaccuacgccgacaccaucugcaucggcuaccacgccaacaacuccaccgacaccgucgacaccguccucgagaagaacgucaccgucacccacuccgucaaccuccucgaggacaaccacaacggcaagcucugccuccucaagggcaucgccccccuccagcucggcaacugcuccgucgccggcuggauccucggcaaccccgagugcgagcuccucaucuccaaggaguccugguccuacaucgucgagaagcccaaccccgagaacggcaccugcuaccccggccacuucgccgacuacgaggagcuccgcgagcagcucuccuccgucuccuccuucgagcgcuucgagaucuuccccaaggaguccuccuggcccaaccacaccgucaccggcgucuccgccuccugcucccacaacggcgaguccuccuucuacaagaaccuccucuggcucaccggcaagaacggccucuaccccaaccucuccaaguccuacgccaacaacaaggagaaggagguccucguccucuggggcguccaccacccccccaacaucggcgaccagaugacccucuaccacaaggagaacgccuacgucuccgucgucuccucccacuacucccgcaaguucacccccgagaucgccaagcgccccaagguccgcgaccaggagggccgcaucaacuacuacuggacccuccucgagcccggcgacaccaucaucuucgaggccuccggcaaccucaucgccccccgcuacgccuucgcccucucccgcggcuucggcuccggcaucaucaacuccaacgcccccauggacgagugcgacgccaagugccagaccccccagggcgccaucaacuccucccuccccuuccagaacguccaccccgucaccaucggcgagugccccaaguacguccgcuccgccaagcuccgcauggucaccggccuccgcaacauccccuccauccagucccgcggccucuucggcgccaucgccggcuucaucgagggcggcuggaccggcauggucgacggcugguacggcuaccaccaccagaacgagcagggcuccggcuacgccgccgaccagaaguccacccagaacgccaucaacggcgucaccaacaaggucaacuccgucaucgagaagaugaacacccaguucaccgccgucggcaaggaguucaacaagcucgagcgccgcauggagaaccucaacaagaaggucgacgacggcuucaucgacgucuggaccuacaacgccgagcuccucguccuccucgagaacgagcgcacccucgacuuccacgacuccaacgucaagaaccucuacgagaaggucaagaaccagcucaagaacaacgccaaggagaucggcaacggcugcuucgaguucuaccacaagugcaacgacgagugcauggaguccgucaagaacggcaccuacgacuaccccaaguacuccgaggaguccaagcucucccgcgagaagaucgacggcgucgagcucgaguccaugggcgucuaccagauccucgccaucuacuccaccgucgccuccucccucguccuccucgucucccucggcgccaucuccuucuggaugugcuccaacggcucccuccagugccgcaucugcaucuga

SEQ ID NO: 104067 - RNA, 1698 nt, Artificial Sequence
  derived and/or modified CDS sequence (opt2) from hemagglutinin__InfluenzaA__AEX34911
augaaggucaagcuccucguccuccucugcaccuucaccgccaccuacgccgacaccaucugcaucggcuaccacgccaacaacuccaccgacaccgucgacaccguccucgagaagaacgucaccgucacccacuccgucaaccuccucgagaacucccacaacggcaagcucugccuccucaagggcaucgccccccuccagcucggcaacugcuccgucgccggcuggauccucggcaaccccgagugcgagcuccucaucucccaggaguccugguccuacaucgucgagaagcccaaccccgagaacggcaccugcuaccccggccacuucgccgacuacgaggagcuccgcgagcagcucuccuccgucuccuccuucgagcgcuucgagaucuuccccaaggaguccuccuggcccaaccacaccgucaccggcgucuccgccuccugcucccacaacggcgaguccuccuucuaccgcaaccuccucuggcucaccggcaagaacggccucuaccccaaccucuccaaguccuacgccaacaacaaggagaaggagguccucguccucuggggcguccaccacccccccaacaucggcgaccagaaggcccucuaccacaccgagaacgccuacgucuccgucgucuccucccacuacucccgcaaguucacccccgagaucgccaagcgccccaagguccgcgaccaggagggccgcaucaacuacuacuggacccuccucgagcccggcgacaccaucaucuucgaggccaacggcaaccucaucgccccccgcuacgccuucgcccucucccgcggcuucggcuccggcaucaucaacuccaacgcccccauggacaagugcgacgccaagugccagaccccccagggcgccaucaacuccucccuccccuuccagaacguccaccccgucaccaucggcgagugccccaaguacguccgcuccgccaagcuccgcauggucaccggccuccgcaacauccccuccauccagucccgcggccucuucggcgccaucgccggcuucaucgagggcggcuggaccggcauggucgacggcugguacggcuaccaccaccagaacgagcagggcuccggcuacgccgccgaccagaaguccacccagaacgccaucaacggcaucaccaacaaggucaacuccgucaucgagaagaugaacacccaguucaccgccgucggcaaggaguucaacaagcucgagcgccgcauggagaaccucaacaagaaggucgacgacggcuucaucgacaucuggaccuacaacgccgagcuccucguccuccucgagaacgagcgcacccucgacuuccacgacuccaacgucaagaaccucuacgagaaggucaagucccagcucaagaacaacgccaaggagaucggcaacggcugcuucgaguucuaccacaagugcaacgacgagugcauggaguccgucaagaacggcaccuacgacuaccccaaguacuccgaggaguccaagcucaaccgcgagaagaucgacggcgucaagcucggcuccaugggcgucuaccagauccucgccaucuacuccaccgucgccuccucccucguccuccucgucucccucggcgccaucuccuucuggaugugcuccaacggcucccuccagugccgcaucugcaucuga

SEQ ID NO: 104068 - RNA, 1698 nt, Artificial Sequence
  derived and/or modified CDS sequence (opt2) from hemagglutinin__InfluenzaA__AEX34922
augaaggucaagcuccucguccuccucugcaccuucaccgccaccuacgccgacaccaucugcaucggcuaccacgccaacaacuccaccgacaccgucgacaccguccucgagaagaacgucaccgucacccacuccgucaaccuccucgagaacucccacaacggcaagcucugccuccucaagggcaucgccccccuccagcucggcaacugcuccgucgccggcuggauccucggcaaccccgagugcgagcuccucaucuccaaggaguccugguccuacaucgucgagaagcccaaccccgagaacggcaccugcuaccccggccacuucgccgacuacgaggagcuccgcgagcagcucuccuccgucuccuccuucgagcgcuucgagaucuuccccaaggaguccuccuggcccaaccacaccgucaccggcgucuccgccuccugcucccacaacggcgaguccuccuucuaccgcaaccuccucuggcucaccggcaagaacggccucuaccccaaccucuccaaguccuacgccaacaacaaggagaaggagguccucguccucuggggcguccaccacccccccaacaucggcgaccagaaggcccucuaccacaccgagaacgccuacgucuccgucgucuccucccacuacucccgccgcuucacccccgagaucgccaagcgccccaagguccgcgaccaggagggccgcaucaacuacuacuggacccuccucgagcccggcgacaccaucaucuucgaggccaacggcaaccucaucgccccccgcuacgccuucgcccucucccgcggcuucggcuccggcaucaucaacuccaacgcccccauggacaagugcgacgccaagugccagaccccccagggcgccaucaacuccucccuccccuuccagaacguccaccccgucaccaucggcgagugccccaaguacguccgcuccgccaagcuccgcauggucaccggccuccgcaacauccccuccauccagucccgcggccucuucggcgccaucgccggcuucaucgagggcggcuggaccggcauggucgacggcugguacggcuaccaccaccagaacgagcagggcuccggcuacgccgccgaccagaaguccacccagaacgccaucaacggcaucaccaacaaggucaacuccgucaucgagaagaugaacacccaguucaccgccgucggcaaggaguucaacaagcucgagcgccgcauggagaaccucgacaagaaggucgacgacggcuucaucgacaucuggaccuacaacgccgagcuccucguccuccucgagaacgagcgcacccucgacuuccacgacuccaacgucaagaaccucuacgagaaggucaagucccagcucaagaacaacgccaaggagaucggcaacggcugcuucgaguucuaccacaagugcaacgacgagugcauggaguccgucaagaacggcaccuacgacuaccccaaguacuccgaggaguccaagcucaaccgcgagaagaucgacggcgucaagcucgaguccaugggcgucuaccagauccucgccaucuacuccaccgucgccuccucccucguccuccucgucucccucggcgccaucuccuucuggaugugcuccaacggcucccuccagugccgcaucugcaucuga

SEQ ID NO: 104069 - RNA, 1698 nt, Artificial Sequence; identical to SEQ ID NO: 98524
  derived and/or modified CDS sequence (opt2) from hemagglutinin__InfluenzaA__AEX34933

SEQ ID NO: 104070 - RNA, 1698 nt, Artificial Sequence; identical to SEQ ID NO: 98524
  derived and/or modified CDS sequence (opt2) from hemagglutinin__InfluenzaA__AEX34944

SEQ ID NO: 104071 - RNA, 1698 nt, Artificial Sequence
  derived and/or modified CDS sequence (opt2) from hemagglutinin__InfluenzaA__AEX34955
augaaggccaagcuccucguccuccucugcaccuucaccgccaccuacgccgacaccaucugcaucggcuaccacgccaacaacuccaccgacaccgucgacaccguccucgagaagaacgucaccgucacccacuccgucaaccuccucgagaacucccacaacggcaagcucugccuccucaagggcaucgccccccuccagcucggcaacugcuccgucgccggcuggauccucggcaaccccgagugcgagcuccucaucuccaaggaguccugguccuacaucgucgagaagcccaaccccgagaacggcaccugcuaccccggccacuucgccgacuacgaggagcuccgcgagcagcucuccuccgucuccuccuucgagcgcuucgagaucuuccccaaggaguccuccuggcccaaccacaccgucaccggcgucuccgccuccugcucccacaacggcgaguccuccuucuaccgcaaccuccucuggcucaccggcaagaacggccucuaccccaaccucuccaaguccuacgccaacaacaaggagaaggagguccucguccucuggggcguccaccacccccccaacaucggcgaccagaaggcccucuaccacaccgagaacgccuacgucuccgucgucuccucccacuacucccgcaaguucacccccgagaucgccaagcgccccaagguccgcgaccaggagggccgcaucaacuacuacuggacccuccucgagcccggcgacaccaucaucuucgaggccaacggcaaccucaucgccccccgcuacgccuucgcccucucccgcggcuucggcuccggcaucaucaacuccaacgcccccauggacaagugcgacgccaagugccagaccccccagggcgccaucaacuccucccuccccuuccagaacguccaccccgucaccaucggcgagugccccaaguacguccgcuccgccaagcuccgcauggucaccggccuccgcaacauccccuccauccagucccgcggccucuucggcgccaucgccggcuucaucgagggcggcuggaccggcauggucgacggcugguacggcuaccaccaccagaacgagcagggcuccggcuacgccgccgaccagaaguccacccagaacgccaucaacggcaucaccaacaaggucaacuccgucaucgagaagaugaacacccaguucaccgccgucggcaaggaguucaacaagcucgagcgccgcauggagaaccucaacaagaaggucgacgacggcuucaucgacaucuggaccuacaacgccgagcuccucguccuccucgagaacgagcgcacccucgacuuccacgacuccaacgucaagaaccucuacgagaaggucaagucccagcucaagaacaacgccaaggagaucggcaacggcugcuucgaguucuaccacaagugcaacgacgagugcauggaguccgucaagaacggcaccuacgacuaccccaaguacuccgaggaguccaagcucaaccgcgagaagaucgacggcgucaagcucgaguccaugggcgucuaccagauccucgccaucuacuccaccgucgccuccucccucguccuccucgucucccucggcgccaucuccuucuggaugugcuccaacggcucccuccagugccgcaucugcaucuga

SEQ ID NO: 104072 - RNA, 1698 nt, Artificial Sequence
  derived and/or modified CDS sequence (opt2) from hemagglutinin__InfluenzaA__AEX34966
augaaggucaagcuccucguccuccucugcaccuucaccgccaccuacgccgacaccaucugcaucggcuaccacgccaacaacuccaccgacaccgucgacaccguccucgagaagaacgucaccgucacccacuccgucaaccuccucgagaacucccacaacggcaagcucugccuccucaagggcaucgccccccuccagcucggcaacugcuccgucgccggcuggauccucggcaaccccgagugcgagcuccucaucuccaaggaguccugguccuacaucgucgagaagcccaaccccgagaacggcaccugcuaccccggccacuucgccgacuacgaggagcuccgcgagcagcucuccuccgucuccuccuucgagcgcuucgagaucuuccccaaggaguccuccuggcccaaccacaccgucaccggcgucuccgccuccugcucccacaacggcgaguccuccuucuaccgcaaccuccucuggcucaccggcaagaacggccucuaccccaaccucuccaaguccuacgccaacaacaaggagaaggagguccucguccucuggggcguccaccacccccccaacaucggcgaccagaaggcccucuaccacaccgagaacgccuacgucuccgucgucuccucccacuacucccgcaaguucacccccgagaucgccaagcgccccaagguccgcgaccaggagggccgcaucaacuacuacuggacccuccucgagcccggcgacaccaucauguucgaggccaacggcaaccucaucgccccccgcuacgccuucgcccucucccgcggcuucggcuccggcaucaucaacuccaacgcccccauggacaagugcgacgccaagugccagaccccccagggcgccaucaacuccucccuccccuuccagaacguccaccccgucaccaucggcgagugccccaaguacguccgcuccgccaagcuccgcauggucaccggccuccgcaacauccccuccauccagucccgcggccucuucggcgccaucgccggcuucaucgagggcggcuggaccggcauggucgacggcugguacggcuaccaccaccagaacgagcagggcuccggcuacgccgccgaccagaaguccacccagaacgccaucaacggcaucaccaacaaggucaacuccgucaucgagaagaugaacacccaguucaccgccgucggcaaggaguucaacaagcucgagcgccgcauggagaaccucaacaagaaggucgacgacggcuucaucgacaucuggaccuacaacgccgagcuccucguccuccucgagaacgagcgcacccucgacuuccacgacuccaacgucaagaaccucuacgagaaggucaagucccagcucaagaacaacgccaaggagaucggcaacggcugcuucgaguucuaccacaagugcaacgacgagugcauggaguccgucaagaacggcaccuacgacuaccccaaguacuccgaggaguccaagcucaaccgcgagaagaucgacggcgucaagcucgaguccaugggcgucuaccagauccucgccaucuacuccaccgucgccuccucccucguccuccucgucucccucggcgccaucuccuucuggaugugcuccaacggcucccuccagugccgcaucugcaucuga

SEQ ID NO: 104073 - RNA, 1698 nt, Artificial Sequence; identical to SEQ ID NO: 104072
  derived and/or modified CDS sequence (opt2) from hemagglutinin__InfluenzaA__AEX34977

SEQ ID NO: 104074 - RNA, 1698 nt, Artificial Sequence; identical to SEQ ID NO: 104072
  derived and/or modified CDS sequence (opt2) from hemagglutinin__InfluenzaA__AEX34988

SEQ ID NO: 104075 - RNA, 1698 nt, Artificial Sequence; identical to SEQ ID NO: 100133
  derived and/or modified CDS sequence (opt2) from hemagglutinin__InfluenzaA__AEX34999

SEQ ID NO: 104076 - RNA, 1698 nt, Artificial Sequence; identical to SEQ ID NO: 104072
  derived and/or modified CDS sequence (opt2) from hemagglutinin__InfluenzaA__AEX35010

SEQ ID NO: 104077 - RNA, 1698 nt, Artificial Sequence; identical to SEQ ID NO: 104072
  derived and/or modified CDS sequence (opt2) from hemagglutinin__InfluenzaA__AEX35032

SEQ ID NO: 104078 - RNA, 1698 nt, Artificial Sequence; identical to SEQ ID NO: 104072
  derived and/or modified CDS sequence (opt2) from hemagglutinin__InfluenzaA__AEX35043

SEQ ID NO: 104079 - RNA, 1698 nt, Artificial Sequence
  derived and/or modified CDS sequence (opt2) from hemagglutinin__InfluenzaA__AEX35054
augaaggucaagcuccucguccuccucugcaccuucaccgccaccuacgccgacaccaucugcaucggcuaccacgccaacaacuccaccgacaccgucgacaccguccucgagaagaacgucaccgucacccacuccgucaaccuccucgagaacucccacaacggcaagcucugccuccucaagggcaucgccccccuccagcucggcaacugcuccgucgccggcuggauccucggcaaccccgagugcgagcuccucaucuccaaggaguccugguccuacaucgucgagaagcccaaccccgagaacggcaccugcuaccccggccacuucgccgacuacgaggagcuccgcgagcagcucuccuccgucuccuccuucgagcgcuucgagaucuuccccaaggaguccuccuggcccaaccacaccgucaccggcgucuccgccuccugcucccacaacggcgaguccuccuucuaccgcaaccuccucuggcucaccggcaagaacggccucuaccccaaccucuccaaguccuacgccaacaacaaggagaaggagguccucguccucuggggcguccaccacccccccaacaucggcgaccagaaggcccucuaccacaccgagaacgccuacgucuccgucgucuccucccacuacucccgcaaguucacccccgagaucgccaagcgccccaagguccgcgaccaggagggccgcaucaacuacuacuggacccuccucgagcccggcgacaccaucauguucgaggccaacggcaaccucaucgccccccgcuacgccuucgcccucaaccgcggcuucggcuccggcaucaucaacuccaacgcccccauggacaagugcgacgccaagugccagaccccccagggcgccaucaacuccucccuccccuuccagaacguccaccccgucaccaucggcgagugccccaaguacguccgcuccgccaagcuccgcauggucaccggccuccgcaacauccccuccauccagucccgcggccucuucggcgccaucgccggcuucaucgagggcggcuggaccggcauggucgacggcugguacggcuaccaccaccagaacgagcagggcuccggcuacgccgccgaccagaaguccacccagaacgccaucaacggcaucaccaacaaggucaacuccgucaucgagaagaugaacacccaguucaccgccgucggcaaggaguucaacaagcucgagcgccgcauggagaaccucaacaagaaggucgacgacggcuucaucgacaucuggaccuacaacgccgagcuccucguccuccucgagaacgagcgcacccucgacuuccacgacuccaacgucaagaaccucuacgagaaggucaagucccagcucaagaacaacgccaaggagaucggcaacggcugcuucgaguucuaccacaagugcaacgacgagugcauggaguccgucaagaacggcaccuacgacuaccccaaguacuccgaggaguccaagcucaaccgcgagaagaucgacggcgucaagcucgaguccaugggcgucuaccagauccucgccaucuacuccaccgucgccuccucccucguccuccucgucucccucggcgccaucuccuucuggaugugcuccaacggcucccuccagugccgcaucugcaucuga

SEQ ID NO: 104080 - RNA, 1698 nt, Artificial Sequence; identical to SEQ ID NO: 104072
  derived and/or modified CDS sequence (opt2) from hemagglutinin__InfluenzaA__AEX35065

SEQ ID NO: 104081 - RNA, 1698 nt, Artificial Sequence; identical to SEQ ID NO: 98524
  derived and/or modified CDS sequence (opt2) from hemagglutinin__InfluenzaA__AEX35076

SEQ ID NO: 104082 - RNA, 1698 nt, Artificial Sequence
  derived and/or modified CDS sequence (opt2) from hemagglutinin__InfluenzaA__AEX35087
augaaggucaagcuccucguccuccucugcaccuucaccgccaccuacgccgacaccaucugcaucggcuaccacgccaacaacuccaccgacaccgucgacaccguccucgagaagaacgucaccgucacccacuccgucaaccuccucgaggacaaccacaacggcaagcucugccuccucaagggcaucgccccccuccagcucggcaacugcuccgucgccggcuggauccucggcaaccccgagugcgagcuccucaucuccaaggaguccugguccuacaucgucgagaagcccaaccccgagaacggcaccugcuaccccggccacuucgccgacuacgaggagcuccgcgagcagcucuccuccgucuccuccuucaagcgcuucgagaucuuccccaaggaguccuccuggcccaaccacaccgucaccggcgucuccgccuccugcucccacaacggcgaguccuccuucuacaagaaccuccucuggcucaccggcaagaacggccucuaccccaaccucuccaaguccuacgccaacaacaaggagaaggagguccucguccucuggggcguccaccacccccccaacaucggcgaccagaugacccucuaccacaaggagaacgccuacgucuccgucgucuccucccacuacucccgcaaguucacccccgagaucgccaagcgccccaagguccgcgaccaggagggccgcaucaacuacuacuggacccuccucgagcccggcgacaccaucaucuucgaggccuccggcaaccucaucgccccccgcuacgccuucgcccucucccgcggcuucggcuccggcaucaucaacuccaacgcccccauggacgagugcgacgccaagugccagaccccccagggcgccaucaacuccucccuccccuuccagaacguccaccccgucaccaucggcgagugccccaaguacguccgcuccgccaagcuccgcauggucaccggccuccgcaacauccccuccauccagucccgcggccucuucggcgccaucgccggcuucaucgagggcggcuggaccggcauggucgacggcugguacggcuaccaccaccagaacgagcagggcuccggcuacgccgccgaccagaaguccacccagaacgccaucaacggcaucaccaacaaggucaacuccgucaucgagaagaugaacacccaguucaccgccgucggcaaggaguucaacaagcucgagcgccgcauggagaaccucaacaagaaggucgacgacggcuucaucgacgucuggaccuacaacgccgagcuccucguccuccucgagaacgagcgcacccucgacuuccacgacuccaacgucaagaaccucuacgagaaggucaagaaccagcucaagaacaacgccaaggagaucggcaacggcugcuucgaguucuaccacaagugcaacgacgagugcauggaguccgucaagaacggcaccuacgacuaccccaaguacuccgaggaguccaagcucucccgcgagaagaucgacggcgucaagcucgaguccaugggcgucuaccagauccucgccaucuacuccaccgucgccuccucccucguccuccucgucucccucggcgccaucuccuucuggaugugcuccaacggcucccuccagugccgcaucugcaucuga

SEQ ID NO: 104083 - RNA, 1698 nt, Artificial Sequence
  derived and/or modified CDS sequence (opt2) from hemagglutinin__InfluenzaA__AEX35098
augaaggucaagcuccucguccuccucugcaccuucaccgccaccuacgccgacaccaucugcaucggcuaccacgccaacaacuccaccgacaccgucgacaccguccucgagaagaacgucaccgucacccacuccgucaaccuccucgagaacucccacaacggcaagcucugccuccucaagggcaucgccccccuccagcucggcaacugcuccgucgccggcuggauccucggcaaccccgagugcgagcuccucaucuccaaggaguccugguccuacaucgucgagaagcccaaccccgagaacggcaccugcuaccccggccacuucgccgacuacgaggagcuccgcgagcagcucuccuccgucuccuccuucgagcgcuucgagaucuuccccaaggaguccuccuggcccaaccacaccgucaccggcgucuccgccuccugcucccacaacggcgaguccuccuucuaccgcaaccuccucuggcucaccggcaagaacggccucuaccccaaccucuccaaguccuacgccaacaacaaggagaaggagguccucguccucuggggcguccaccacccccccaacaucggcgaccagaaggcccucuaccacaccgagaacgccuacgucuccgucauguccucccacuacucccgcaaguucacccccgagaucgccaagcgccccaagguccgcgaccaggagggccgcaucaacuacuacuggacccuccucgagcccggcgacaccaucaucuucgaggccaacggcaaccucaucgccccccgcuacgccuucgcccucucccgcggcuucggcuccggcaucaucaacuccaacgcccccauggacaagugcgacgccaagugccagaccccccagggcgccaucaacuccucccuccccuuccagaacguccaccccgucaccaucggcgagugccccaaguacguccgcuccgccaagcuccgcauggucaccggccuccgcaacauccccuccauccagucccgcggccucuucggcgccaucgccggcuucaucgagggcggcuggaccggcauggucgacggcugguacggcuaccaccaccagaacgagcagggcuccggcuacgccgccgaccagaaguccacccagaacgccaucaacggcaucaccaacaaggucaacuccgucaucgagaagaugaacacccaguucaccgccgucggcaaggaguucaacaagcucgagcgccgcauggagaaccucaacaagaaggucgacgacggcuucaucgacaucuggaccuacaacgccgagcuccucguccuccucgagaacgagcgcacccucgacuuccacgacuccaacgucaagaaccucuacgagaaggucaagucccagcucaagaacaacgccaaggagaucggcaacggcugcuucgaguucuaccacaagugcaacgacgagugcauggaguccgucaagaacggcaccuacgacuaccccaaguacuccgaggaguccaagcucaaccgcgagaagaucgacggcgucaagcucgaguccaugggcgucuaccagauccucgccaucuacuccaccgucgccuccucccucguccuccucgucucccucggcgccaucuccuucuggaugugcuccaacggcucccuccagugccgcaucugcaucuga

SEQ ID NO: 104084 - RNA, 1698 nt, Artificial Sequence
  derived and/or modified CDS sequence (opt2) from hemagglutinin__InfluenzaA__AEX35109
augaaggucaagcuccucguccuccucugcaccuucaccgccaccuacgccgacaccaucugcaucggcuaccacgccaacaacuccaccgacaccgucgacaccguccucgagaagaacgucaccgucacccacuccgucaaccuccucgagaacucccacaacggcaagcucugccuccucaagggcaucgccccccuccagcucggcaacugcuccgucgccggcuggauccucggcaaccccgagugcgagcuccucaucuccaaggaguccugguccuacaucgucgagaagcccaaccccgagaacggcaccugcuaccccggccacuucgccgacuacgaggagcuccgcgagcagcucuccuccgucuccuccuucgagcgcuucgagaucuuccccaaggaguccuccuggcccaaccacaccgucaccggcgucuccgccuccugcucccacaacggcgaguccuccuucuaccgcaaccuccucuggcucaccggcaagaacggccucuaccccaaccucuccaaguccuacgccaacaacaaggagaaggagguccucguccucuggggcguccaccagccccccaacaucggcgaccagaaggcccucuaccacaccgagaacgccuacgucuccgucgucuccucccacuacucccgcaaguucacccccgagaucgccaagcgccccaagguccgcgaccaggagggccgcaucaacuacuacuggacccuccucgagcccggcgacaccaucaucuucgaggccaacggcaaccucaucgccccccgcuacgccuucgcccucucccgcggcuucggcuccggcaucaucaacuccaacgcccccauggacaagugcgacgccaagugccagaccccccagggcgccaucaacuccucccuccccuuccagaacguccaccccgucaccaucggcgagugccccaaguacguccgcuccgccaagcuccgcauggucaccggccuccgcaacauccccuccauccagucccgcggccucuucggcgccaucgccggcuucaucgagggcggcuggaccggcauggucgacggcugguacggcuaccaccaccagaacgagcagggcuccggcuacgccgccgaccagaaguccacccagaacgccaucaacggcaucaccaacaaggucaacuccgucaucgagaagaugaacacccaguucaccgccgucggcaaggaguucaacaagcucgagcgccgcauggagaaccucaacaagaaggucgacgacggcuucaucgacaucuggaccuacaacgccgagcuccucguccuccucgagaacgagcgcacccucgacuuccacgacuccaacgucaagaaccucuacgagaaggucaagucccagcucaagaacaacgccaaggagaucggcaacggcugcuucgaguucuaccacaagugcaacgacgagugcauggaguccgucaagaacggcaccuacgacuaccccaaguacuccgaggaguccaagcucaaccgcgagaagaucgacggcgucaagcucgaguccaugggcgucuaccagauccucgccaucuacuccaccgucgccuccucccucguccuccucgucucccucggcgccaucuccuucuggaugugcuccaacggcucccuccagugccgcaucugcaucuga

SEQ ID NO: 104085 - RNA, 1698 nt, Artificial Sequence
  derived and/or modified CDS sequence (opt2) from hemagglutinin__InfluenzaA__AEX35120
augaaggucaagcuccucguccuccucugcaccuucaccgccaccuacgccgacaccaucugcaucggcuaccacgccaacaacuccaccgacaccgucgacaccguccucgagaagaacgucaccgucacccacuccgucaaccuccucgagaacucccacaacggcaagcucugccuccucaagggcaucgccccccuccagcucggcaacugcuccgucgccggcuggauccucggcaaccccgagugcgagcuccucaucuccaaggaguccugguccuacaucgucgagaagcccaaccccgagaacggcaccugcuaccccggccacuucgccgacuacgaggagcuccgcgagcagcucuccuccgucuccuccuucgagcgcuucgagaucuuccccaaggaguccuccuggcccaaccacaccgucaccggcgucuccgccuccugcucccacaacggcgaguccuccuucuaccgcaaccuccucuggcucaccggcaagaacggccucuaccccaaccucuccaaguccuacgccaacaacaaggagaaggagguccucguccucuggggcguccaccacccccccaacaucggcgaccagaaggcccucuaccacaccgagaacgccuacgucuccgucgucuccucccacuacucccgcaaguucacccccgagaucgccaagcgccccaagguccgcgaccgcgagggccgcaucaacuacuacuggacccuccucgagcccggcgacaccaucaucuucgaggccaacggcaaccucaucgccccccgcuacgccuucgcccucucccgcggcuucggcuccggcaucaucaacuccaacgcccccauggacaagugcgacgccaagugccagaccccccagggcgccaucaacuccucccuccccuuccagaacguccaccccgucaccaucggcgagugccccaaguacguccgcuccgccaagcuccgcauggucaccggccuccgcaacauccccuccauccagucccgcggccucuucggcgccaucgccggcuucaucgagggcggcuggaccggcauggucgacggcugguacggcuaccaccaccagaacgagcagggcuccggcuacgccgccgaccagaaguccacccagaacgccaucaacggcaucaccaacaaggucaacuccgucaucgagaagaugaacacccaguucaccgccgucggcaaggaguucaacaagcucgagcgccgcauggagaaccucaacaagaaggucgacgacggcuucaucgacaucuggaccuacaacgccgagcuccucguccuccucgagaacgagcgcacccucgacuuccacgacuccaacgucaagaaccucuacgagaaggucaagucccagcucaagaacaacgccaaggagaucggcaacggcugcuucgaguucuaccacaagugcaacgacgagugcauggaguccgucaagaacggcaccuacgacuaccccaaguacuccgaggaguccaagcucaaccgcgagaagaucgacggcgucaagcucgaguccaugggcgucuaccagauccucgccaucuacuccaccgucgccuccucccucguccuccucgucucccucggcgccaucuccuucuggaugugcuccaacggcucccuccagugccgcaucugcaucuga

SEQ ID NO: 104086 - RNA, 1698 nt, Artificial Sequence; identical to SEQ ID NO: 103829
  derived and/or modified CDS sequence (opt2) from hemagglutinin__InfluenzaA__AEX35131

SEQ ID NO: 104087 - RNA, 1698 nt, Artificial Sequence; identical to SEQ ID NO: 103829
  derived and/or modified CDS sequence (opt2) from hemagglutinin__InfluenzaA__AEX35142

SEQ ID NO: 104088 - RNA, 1698 nt, Artificial Sequence
  derived and/or modified CDS sequence (opt2) from hemagglutinin__InfluenzaA__AEX35153
augaaggucaagcuccucguccuccucugcaccuucaccgccaccuacgccgacaccaucugcaucggcuaccacgccaacaacuccaccgacaccgucgacaccguccucgagaagaacgucaccgucacccacuccgucaaccuccucgaggacaaccacaacggcaagcucugccuccucaagggcaucgccccccuccagcucggcaacugcuccgucgccggcuggauccucggcaaccccgagugcgagcuccucaucuccaaggaguccugguccuacaucgucgagaagcccaaccccgagaacggcaccugcuaccccggccacuucgccgacuacgaggagcuccgcgagcagcucuccuccgucuccuccuucgagcgcuucgagaucuuccccaaggaguccuccuggcccaaccacaccgucaccggcgucuccgccuccugcucccacaacggcgaguccuccuucuacaagaaccuccucuggcucaccggcaagaacggccucuaccccaaccucuccaaguccuacgccaacaacaaggagaaggagguccucguccucuggggcguccaccacccccccaacaucggcaaccagaugacccucuaccacaaggagaacgccuacgucuccgucgucuccucccacuacucccgcaaguucacccccgagaucgccaagcgccccaagguccgcgaccaggagggccgcaucaacuacuacuggacccuccucgagcccggcgacaccaucaucuucgaggccuccggcaaccucaucgccccccgcuacgccuucgcccucucccgcggcuucggcuccggcaucaucaacuccaacgcccccauggacgagugcgacgccaagugccagaccccccagggcgccaucaacuccaaccuccccuuccagaacguccaccccgucaccaucggcgagugccccaaguacguccgcuccgccaagcuccgcauggucaccggccuccgcaacauccccuccauccagucccgcggccucuucggcgccaucgccggcuucaucgagggcggcuggaccggcauggucgacggcugguacggcuaccaccaccagaacgagcagggcuccggcuacgccgccgaccagaaguccacccagaacgccaucaacggcaucaccaacaaggucaacuccgucaucgagaagaugaacacccaguucaccgccgucggcaaggaguucaacaagcucgagcgccgcauggagaaccucaacaagaaggucgacgacggcuucaucgacgucuggaccuacaacgccgagcuccucguccuccucgagaacgagcgcacccucgacuuccacgacuccaacgucaagucccucuacgagaaggucaagaaccagcucaagaacaacgccaaggagaucggcaacggcugcuucgaguucuaccacaagugcaacgacgagugcauggaguccgucaagaacggcaccuacgacuaccccaaguacuccgaggaguccaagcucucccgcgagaagaucgacggcgucaagcucgaguccaugggcgucuaccagauccucgccaucuacuccaccgucgccuccucccucguccuccucgucucccucggcgccaucuccuucuggaugugcuccaacggcucccuccagugccgcaucugcaucuga

SEQ ID NO: 104089 - RNA, 1698 nt, Artificial Sequence
  derived and/or modified CDS sequence (opt2) from hemagglutinin__InfluenzaA__AEX35164
augaaggucaagcuccucguccuccucugcgccuucaccgccaccuacgccgacaccaucugcaucggcuaccacgccaacaacuccaccgacaccgucgacaccguccucgagaagaacgucaccgucacccacuccgucaaccuccucgagaacucccacaacggcaagcucugccuccucaagggcaucgccccccuccagcucggcaacugcuccgucgccggcuggauccucggcaaccccgagugcgagcuccucaucuccaaggaguccugguccuacaucgucgagaagcccaaccccgagaacggcaccugcuaccccggccacuucgccgacuacgaggagcuccgcgagcagcucuccuccgucuccuccuucgagcgcuucgagaucuuccccaaggaguccuccuggcccaaccacaccgucaccggcgucuccgccuccugcucccacaacggcgaguccuccuucuaccgcaaccuccucuggcucaccggcaagaacggccucuaccccaaccucuccaaguccuacgccaacaacaaggagaaggagguccucguccucuggggcguccaccacccccccaacaucggcguccagaaggcccucuaccacaccgagaacgccuacgucuccgucgucuccucccacuacucccgcaaguucacccccgagaucgccaagcgccccaagguccgcgaccaggagggccgcaucaacuacuacuggacccuccucgagcccggcgacaccaucaucuucgaggccaacggcaaccucaucgccccccgcuacgccuucgcccucucccgcggcuucggcuccggcaucaucaacuccaacgcccccauggacaagugcgacgccaagugccagaccccccagggcgccaucaacuccucccuccccuuccagaacguccaccccgucaccaucggcgagugccccaaguacguccgcuccgccaagcuccgcauggucaccggccuccgcaacauccccuccauccagucccgcggccucuucggcgccaucgccggcuucaucgagggcggcuggaccggcauggucgacggcugguacggcuaccaccaccagaacgagcagggcuccggcuacgccgccgaccagaaguccacccagaacgccaucaacggcaucaccaacaaggucaacuccgucaucgagaagaugaacacccaguucaccgccgucggcaaggaguucaacaagcucgagcgccgcauggagaaccucaacaagaaggucgacgacggcuucaucgacaucuggaccuacaacgccgagcuccucguccuccucgagaacgagcgcacccucgacuuccacgacuccaacgucaagaaccucuacgagaaggucaagucccagcucaagaacaacgccaaggagaucggcaacggcugcuucgaguucuaccacaagugcaacgacgagugcauggaguccgucaagaacggcaccuacgacuaccccaaguacuccgaggaguccaagcucaaccgcgagaagaucgacggcgucaagcucgaguccaugggcgucuaccagauccucgccaucuacuccaccgucgccuccucccucguccuccucgucucccucggcgccaucuccuucuggaugugcuccaacggcucccuccagugccgcaucugcaucuga

SEQ ID NO: 104090 - RNA, 1698 nt, Artificial Sequence
  derived and/or modified CDS sequence (opt2) from hemagglutinin__InfluenzaA__AEX35175
augaaggucaagcuccucguccuccucugcaccuucaccgccaccuacgccgacaccaucugcaucggcuaccacgccaacaacuccaccgacaccgucgacaccguccucgagaagaacgucaccgucacccacuccgucgaccuccucgaggacucccacaacggcaagcucugccuccucaagggcaucgccccccuccagcucggcaacugcuccgucgccggcuggauccucggcaaccccgagugcgagcuccucaucuccaaggaguccugguccuacaucgucgagacccccaaccccgagaacggcaccugcuaccccggcuacuucgccgacuacgaggagcuccgcgagcagcucuccuccgucuccuccuucgagcgcuucgagaucuuccccaaggaguccuccuggcccaaccacaccgucaccggcgucaccgccuccugcucccacaacggcaaguccuccuucuaccgcaaccuccucuggcucaccggcaagaacggccucuaccccaaccucuccaaguccuacgccaacaacaaggagaaggagguccucguccucuggggcguccaccacccccccaacaucggcgaccagcgcgcccucuaccacaccgagaacgccuacgucuccgucgucuccucccacuacucccgccgcuucacccccgagaucgccaagcgccccaagguccgcgaccaggagggccgcaucaacuacuacuggacccuccucgagcccggcgacaccaucaucuucgaggccaacggcaaccucaucgccccccgcuucgccuucgcccucaaccgcggcuucggcuccggcaucaucaccuccaacgcccccauggacggcugcgacgccaagugccagaccccccagggcgccaucaacuccucccuccccuuccagaacguccaccccgucaccaucggcgagugccccaaguacguccgcuccgccaagcuccgcauggccaccggccuccgcaacauccccuccauccagucccgcggccucuucggcgccaucgccggcuucaucgagggcggcuggaccggcauggucgacggcugguacggcuaccaccaccagaacgagcagggcuccggcuacgccgccgaccagaaguccacccagaacgccaucaacggcaucaccaacaaggucaacuccgucaucgagaagaugaacacccaguucaccgccgucggcaaggaguucuccaagcucgagcgccgcauggagaaccucaacaagaaggucgacgacggcuuccucgacaucuggaccuacaacgccgagcuccucguccuccucgagaacgagcgcacccucgacuuccacgacuccaacgucaagaaccucuacgagaaggucaagucccagcucaagaacaacgccaaggagaucggcaacggcugcuucgaguucuaccacaagugcaacgacgagugcauggaguccgucaagaacggcaccuacgacuaccccaaguacuccgaggaguccaagcucaaccgcgagaagaucgacggcgucaagcucgaguccaugggcgucuaccagauccucgccaucuacuccaccgucgccuccucccucguccuccucgucucccucggcgccaucuccuucuggaugugcuccaacggcucccuccagugccgcaucugcaucuga

SEQ ID NO: 104091 - RNA, 1698 nt, Artificial Sequence
  derived and/or modified CDS sequence (opt2) from hemagglutinin__InfluenzaA__AEX35186
augaaggucaagcuccucguccuccucugcaccuucaccgccaccuacgccgacaccaucugcaucggcuaccacgccaacaacuccaccgacaccgucgacaccguccucgagaagaacgucaccgucacccacuccgucaaccuccucgaggacucccacaacggcaagcucugccuccucaagggcaucgccccccuccagcucggcaacugcuccgucgccggcuggauccucggcaaccccgagugcgagcuccucaucucccgcgaguccugguccuacaucgucgagaagcccaaccccgagaacggcaccugcuaccccggccacuucgccgacuacgaggagcuccgcgagcagcucuccuccgucuccuccuucgagcgcuucgagaucuuccccaaggaguccuccuggcccaaccacaccaccaccggcgucuccgccuccugcucccacaacggcgaguccuccuucuacaagaaccuccucuggcucaccggcaagaacggccucuaccccaaccucuccaaguccuacgccaacaacaaggagaaggagguccucguccucuggggcguccaccacccccccaacaucggcaaccagcgcgcccucuaccacaccgagaacgccuacgucuccgucgucuccucccacuacucccgcaaguucacccccgagaucgccaagcgccccaagguccgcgaccaggagggccgcaucaacuacuacuggacccuccucgagcccggcgacaccaucaucuucgaggccaacggcaaccucaucgccccccgcuacgccuucgcccucucccgcggcuucggcuccggcaucaucaacuccaacgcccccauggacgagugcgacgccaagugccagaccccccagggcgccaucaacuccucccuccccuuccagaacguccaccccgucaccaucggcgagugccccaaguacguccgcuccgccaagcuccgcauggucaccggccuccgcaacauccccuccauccagucccgcggccucuucggcgccaucgccggcuucaucgagggcggcuggaccggcauggucgacggcugguacggcuaccaccaccagaacgagcagggcuccggcuacgccgccgaccagaaguccacccagaacgccaucaacggcaucaccaacaaggucaacuccgucaucgagaagaugaacacccaguucaccgccgucggcaaggaguucaacaagcucgagcgccgcauggagaaccucaacaagaaggucgacgacggcuucaucgacaucuggaccuacaacgccgagcuccucguccuccucgagaacgagcgcacccucgacuuccacgacuccaacgucaagaaccucuacgagaaggucaagucccagcucaagaacaacgccaaggagaucggcaacggcugcuucgaguucuaccacaagugcaacgacgagugcauggaguccgucaagaacggcaccuacgacuaccccaaguacuccgaggaguccaagcucaaccgcgagaagaucgacggcgucaagcucgaguccaugggcgucuaccagauccucgccaucuacuccaccgucgccuccucccucguccuccucgucucccucggcgccaucuccuucuggaugugcuccaacggcucccuccagugccgcaucugcaucuga

SEQ ID NO: 104092 - RNA, 1698 nt, Artificial Sequence; identical to SEQ ID NO: 104091
  derived and/or modified CDS sequence (opt2) from hemagglutinin__InfluenzaA__AEX35197

SEQ ID NO: 104093 - RNA, 1698 nt, Artificial Sequence; identical to SEQ ID NO: 98524
  derived and/or modified CDS sequence (opt2) from hemagglutinin__InfluenzaA__AEX35208

SEQ ID NO: 104094 - RNA, 1701 nt, Artificial Sequence
  derived and/or modified CDS sequence (opt2) from hemagglutinin__InfluenzaA__AEX35219
augaagaccaucaucgcccucuccuacauccucugccucgucuucgcccagaagcuccccggcaacgacaacuccaccgccacccucugccucggccaccacgccguccccaacggcacccucgucaagaccaucaccaacgaccagaucgaggucaccaacgccaccgagcucguccaguccuccuccaccggcggcaucugcgacuccccccaccagauccucgacggcgagaacugcacccucaucgacgcccuccucggcgacccccacugcgacggcuuccagaacaaggagugggaccucuucgucgagcgcuccaaggccuacuccaacugcuaccccuacgacguccccgacuacgccucccuccgcucccucgucgccuccuccggcacccucgaguucaacaacgaguccuucaacuggaccggcgucgcccagaacggcaccuccuccgccugcaagcgccgcuccaacaaguccuucuucucccgccucaacuggcuccaccagcucaaguacaaguaccccgcccucaacgucaccaugcccaacaacgagaaguucgacaagcucuacaucuggggcguccaccaccccuccaccgacuccgaccagaucucccucuacgcccaggccuccggccgcgucaccgucuccaccaagcgcucccagcagaccgucauccccaacaucggcucccgccccuggguccgcgacgucuccucccgcaucuccaucuacuggaccaucgucaagcccggcgacauccuccucaucaacuccaccggcaaccucaucgccccccgcggcuacuucaagauccgcuccggcaaguccuccaucaugcgcuccgacgcccccaucggcaagugcaacuccgagugcaucacccccaacggcuccauccccaacgacaagcccuuccagaacgucaaccgcaucaccuacggcgccugcccccgcuacgucaagcagaacacccucaagcucgccaccggcaugcgcaacguccccgagaagcagacccgcggcaucuucggcgccaucgccggcuucaucgagaacggcugggagggcauggucgacggcugguacggcuuccgccaccagaacuccgagggcaccggccaggccgccgaccucaaguccacccaggccgccaucaaccagaucaacggcaagcucaaccgccucaucggcaagaccaacgagaaguuccaccagaucgagaaggaguucuccgaggucgagggccgcauccaggaccucgagaaguacgucgaggacaccaagaucgaccucugguccuacaacgccgagcuccucgucgcccucgagaaccagcacaccaucgaccucaccgacuccgagaugaacaagcucuucgagcgcaccaagaagcagcuccgcgagaacgccgaggacaugggcaacggcugcuucaagaucuaccacaagugcgacaacgccugcaucggcuccauccgcaacggcaccuacgaccacgacgucuaccgcgacgaggcccucaacaaccgcuuccagaucaagggcgucgagcucaaguccggcuacaaggacuggauccucuggaucuccuucgccauguccugcuuccuccucugcgucguccuccucggcuucaucaugugggccugccagaagggcaacauccgcugcaacaucugcaucuga

SEQ ID NO: 104095 - RNA, 1698 nt, Artificial Sequence; identical to SEQ ID NO: 104036
  derived and/or modified CDS sequence (opt2) from hemagglutinin__InfluenzaA__AEX35230

SEQ ID NO: 104096 - RNA, 1701 nt, Artificial Sequence; identical to SEQ ID NO: 97933
  derived and/or modified CDS sequence (opt2) from hemagglutinin__InfluenzaA__AEX35241

SEQ ID NO: 104097 - RNA, 1698 nt, Artificial Sequence; identical to SEQ ID NO: 104036
  derived and/or modified CDS sequence (opt2) from hemagglutinin__InfluenzaA__AEX35263

SEQ ID NO: 104098 - RNA, 1698 nt, Artificial Sequence; identical to SEQ ID NO: 104036
  derived and/or modified CDS sequence (opt2) from hemagglutinin__InfluenzaA__AEX35274

SEQ ID NO: 104099 - RNA, 1701 nt, Artificial Sequence; identical to SEQ ID NO: 97831
  derived and/or modified CDS sequence (opt2) from hemagglutinin__InfluenzaA__AEX35285

SEQ ID NO: 104100 - RNA, 1701 nt, Artificial Sequence; identical to SEQ ID NO: 103997
  derived and/or modified CDS sequence (opt2) from hemagglutinin__InfluenzaA__AEX35296

SEQ ID NO: 104101 - RNA, 1701 nt, Artificial Sequence
  derived and/or modified CDS sequence (opt2) from hemagglutinin__InfluenzaA__AEX35307
augaagaccaucaucgcccucuccuacauccucugccucgucuucgcccagaagauccccggcaacgacaacuccaccgccacccucugccucggccaccacgccguccccaacggcaccaucgucaagaccaucaccaacgaccagaucgaggucaccaacgccaccgagcucguccaguccuccuccaccggcggcaucugcgacuccccccaccagauccucgacggcgagaacugcacccucaucgacgcccuccucggcgacccccagugcgacggcuuccagaacaagaagugggaccucuucgucgagcgcuccaaggccuacuccaacugcuaccccuacgacguccccgacuacgccucccuccgcucccucgucgccuccuccggcacccucgaguucaacaacgaguccuucaacuggaccggcgucacccagaacggcaccuccuccgccugcaagcgccgcuccaacaaguccuucuucucccgccucaacuggcucacccaccucaaguacaaguaccccgcccucaacgucaccaugcccaacaacgagaaguucgacaagcucuacaucuggggcguccaccaccccggcaccgacuccgaccagaucucccucuacgcccaggccuccggccgcaucaccgucuccaccaagcgcucccagcagaccgucauccccaacaucggcucccgcccccgcguccgcgacgucuccucccgcaucuccaucuacuggaccaucgucaagcccggcgacauccuccucaucaacuccaccggcaaccucaucgccccccgcggcuacuucaagauccgcuccggcaaguccuccaucaugcgcuccgacgcccccaucggcaagugcaacuccgagugcaucacccccaacggcuccauccccaacgacaagcccuuccagaacgucaaccgcaucaccuacggcgccugcccccgcuacgucaagcagaacacccucaagcucgccaccggcaugcgcaacguccccgagaagcagacccgcggcaucuucggcgccaucgccggcuucaucgagaacggcugggagggcauggucgacggcugguacggcuuccgccaccagaacuccgagggcaccggccaggccgccgaccucaaguccacccaggccgccaucaaccagaucaacggcaagcucaaccgccucaucggcaagaccaacgagaaguuccaccagaucgagaaggaguucuccgaggucgagggccgcauccaggaccucgagaaguacgucgaggacaccaagaucgaccucugguccuacaacgccgagcuccucgucgcccucgagaaccagcacaccaucgaccucaccgacuccgagaugaacaagcucuucgagcgcaccaagaagcagcuccgcgagaacgccgaggacaugggcaacggcugcuucaagaucuaccacaagugcgacaacgccugcaucggcuccauccgcaacggcaccuacgaccacgacgucuaccgcgacgaggcccucaacaaccgcuuccagaucaagggcgucgagcucaaguccggcuacaaggacuggauccucuggaucuccuucgccaucuccugcuuccuccucugcgucguccuccucggcuucaucaugugggccugccagaagggcaacauccgcugcaacaucugcaucuga

SEQ ID NO: 104102 - RNA, 1701 nt, Artificial Sequence; identical to SEQ ID NO: 103997
  derived and/or modified CDS sequence (opt2) from hemagglutinin__InfluenzaA__AEX35318

SEQ ID NO: 104103 - RNA, 1701 nt, Artificial Sequence
  derived and/or modified CDS sequence (opt2) from hemagglutinin__InfluenzaA__AEX35329
augaagaccaucaucgcccucuccuacuuccucugccucgucuucgcccagaagcuccccggcaacgacaacuccaccgccacccucugccucggccaccacgccguccccaacggcaccaucgucaagaccaucaccaacgaccagaucgaggucaccaacgccaccgagcucguccagaacuccuccaccggcggcaucugcgacuccccccaccagauccucgacggcgagaacugcacccucaucgacgcccuccucggcgacccccagugcgacggcuuccagaacaagaagugggaccucuucgucgagcgcuccaaggccuacuccaacugcuaccccuacgacguccccgacuacgccucccuccgcucccucgucgccuccuccggcacccucgaguucaacaacgaguccuucaacuggaccggcgucacccagaacggcaccuccuccgccugcaagcgccgcuccaacaaguccuucuucucccgccucaacuggcucacccaccucaaguacaaguaccccgcccucaacgucaccaugcccaacaacgagaaguucgacaagcucuacaucuggggcguccaccaccccggcaccgacuccgaccagaucucccucuacgcccaggccuccggccgcaucaccgucuccaccaagcgcucccagcagaccgucauccccaacaucggcucccgcccccgcguccgcgacgucuccucccgcaucuccaucuacuggaccaucgucaagcccggcgacauccuccucaucaacuccaccggcaaccucaucgccccccgcggcuacuucaagauccgcuccggcaaguccuccaucaugcgcuccgacgcccccaucggcaagugcaacuccgagugcaucacccccaacggcuccauccccaacgacaagcccuuccagaacgucaaccgcaucaccuacggcgccugcccccgcuacgucaagcagaacacccucaagcucgccaccggcaugcgcaacguccccgagaagcagacccgcggcaucuucggcgccaucgccggcuucaucgagaacggcugggagggcauggucgacggcugguacggcuuccgccaccagaacuccgagggcaccggccaggccgccgaccucaaguccacccaggccgccaucaaccagaucaacggcaagcucaaccgccucaucggcaagaccaacgagaaguuccaccagaucgagaaggaguucuccgaggucgagggccgcauccaggaccucgagaaguacgucgaggacaccaagaucgaccucugguccuacaacgccgagcuccucgucgcccucgagaaccagcacaccaucgaccucaccgacuccgagaugaacaagcucuucgagcgcaccaagaagcagcuccgcgagaacgccgaggacaugggcaacggcugcuucaagaucuaccacaagugcgacaacgccugcaucggcuccauccgcaacggcaccuacgaccacgacgucuaccgcgacgaggcccucaacaaccgcuuccagaucaagggcgucgagcucaaguccggcuacaaggacuggauccucuggaucuccuucgccaucuccugcuuccuccucugcgucgcccuccucggcuucaucaugugggccugccagaagggcaacauccgcugcaacaucugcaucuga

SEQ ID NO: 104104 - RNA, 1701 nt, Artificial Sequence
  derived and/or modified CDS sequence (opt2) from hemagglutinin__InfluenzaA__AEX35340
augaagaccaucaucgcccucuccuacauccucugccucgucuucgcccagaagcuccccggcaacgacaacuccaccgccacccucugccucggccaccacgccguccccaacggcaccaucgucaagaccaucaccaacgaccagaucgaggucaccaacgccaccgagcucguccagaacuccuccaccggcggcaucugcgacuccccccaccagauccucgacggcgagaacugcacccucaucgacgcccuccucggcgacccccagugcgacggcuuccagaacaagaagugggaccucuucgucgagcgcuccaaggccuacuccaacugcuaccccuacgacguccccgacuacgccucccuccgcucccucgucgccuccuccggcacccucgaguucaacaacgaguccuucaacuggaccggcgucacccagaacggcaccuccuccgccugcaagcgccgcuccaacaaguccuucuucucccgccucaacuggcucacccaccucaaguacaaguaccccgcccucaacgucaccaugcccaacaacgagaaguucgacaagcucuacaucuggggcguccaccaccccggcaccgacuccgaccagaucucccucuacgcccaggccuccggccgcaucaccgucuccaccaagcgcucccagcagaccgucauccccaacaucggcucccgcccccgcguccgcgacgucuccucccgcaucuccaucuacuggaccaucgucaagcccggcgacauccuccucaucaacuccaccggcaaccucaucgccccccgcggcuacuucaagauccgcuccggcaaguccuccaucaugcgcuccgacgcccccaucggcaagugcaacuccgagugcaucacccccaacggcuccauccccaacgacaagcccuuccagaacgucaaccgcaucaccuacggcgccugcccccgcuacgucaagcagaacacccucaagcucgccaccggcaugcgcaacguccccgagaagcagacccgcggcaucuucggcgccaucgccggcuucaucgagaacggcugggagggcauggucgacggcugguacggcuuccgccaccagaacuccgagggcaccggccaggccgccgaccucaaguccacccaggccgccaucaaccagaucaacggcaagcucaaccgccucaucggcaagaccaacgagaaguuccaccagaucgagaaggaguucuccgaggucgagggccgcauccaggaccucgagaaguacgucgaggacaccaagaucgaccucugguccuacaacgccgagcuccucgucgcccucgagaaccagcacaccaucgaccucaccgacuccgagaugaacaagcucuucgagcgcaccaagaagcagcuccgcgagaacgccgaggacaugggcaacggcugcuucaagaucuaccacaagugcgacaacgccugcaucggcuccauccgcaacggcaccuacgaccacgacgucuaccgcgacgaggcccucaacaaccgcuuccagaucaagggcgucgagcucaaguccggcuacaaggacuggauccucuggaucuccuucgccaucuccugcuuccuccucugcgucgcccuccucggcuucaucaugugggccugccagaagggcaacauccgcugcaacaucugcaucuga

SEQ ID NO: 104105 - RNA, 1701 nt, Artificial Sequence; identical to SEQ ID NO: 103997
  derived and/or modified CDS sequence (opt2) from hemagglutinin__InfluenzaA__AEX35351

SEQ ID NO: 104106 - RNA, 1701 nt, Artificial Sequence; identical to SEQ ID NO: 103997
  derived and/or modified CDS sequence (opt2) from hemagglutinin__InfluenzaA__AEX35362

SEQ ID NO: 104107 - RNA, 1701 nt, Artificial Sequence; identical to SEQ ID NO: 97831
  derived and/or modified CDS sequence (opt2) from hemagglutinin__InfluenzaA__AEX35373

SEQ ID NO: 104108 - RNA, 1701 nt, Artificial Sequence
  derived and/or modified CDS sequence (opt2) from hemagglutinin__InfluenzaA__AEX35384
augaagaccaucaucgcccucuccuacauccucugccucgucuucgcccagaagcuccccggcaacgacaacuccaccgccacccucugccucggccaccacgccguccccaacggcaccaucgucaagaccaucaccaacgaccagaucgaggucaccaacgccaccgagcucguccaguccuccuccaccggcggcaucugcgacuccccccaccagauccucgacggcgagaacugcacccucaucgacgcccuccucggcgacccccagugcgacggcuuccagaacaagaagugggaccucuucgucgagcgcuccaaggccuacuccaacugcuaccccuacgacguccccgacuacgccucccuccgcucccucgucgccuccuccggcacccucgaguucaacaacgaguccuucaacuggaccggcgucacccagaacggcaccuccuccgccugcaagcgccgcuccaacaaguccuucuucucccgccucaacuggcucacccaccucaaguucaaguaccccgcccucuccgucaccaugcccaacaacgagaaguucgacaagcucuacaucuggggcguccaccaccccggcaccgacaacgaccagaucucccucuacgcccaggccuccggccgcaucaccgucuccaccaagcgcucccagcagaccgucauccccaacaucggcucccgcacccgcguccgcgacguccccucccgcaucuccaucuacuggaccaucgucaagcccggcgacauccuccucaucaacuccaccggcaaccucaucgccccccgcggcuacuucaagauccgcuccggcaaguccuccaucaugcgcuccgacgcccccaucggcaagugcaacuccgagugcaucacccccaacggcuccauccccaacgacaagcccuuccagaacgucaaccgcaucaccuacggcgccugcccccgcuacgucaagcagaacacccucaagcucgccaccggcaugcgcaacguccccgagaagcagacccgcggcaucuucggcgccaucgccggcuucaucgagaacggcugggagggcauggucgacggcugguacggcuuccgccaccagaacuccgagggcaccggccaggccgccgaccucaaguccacccaggccgccaucaaccagaucaacggcaagcucaaccgccucaucggcaagaccaacgagaaguuccaccagaucgagaaggaguucuccgaggucgagggccgcauccaggaccucgagaaguacgucgaggacaccaagaucgaccucugguccuacaacgccgagcuccucgucgcccucgagaaccagcacaccaucgaccucaccgacuccgagaugaacaagcucuucgagcgcaccaagaagcagcuccgcgagaacgccgaggacaugggcaacggcugcuucaagaucuaccacaagugcgacaacgccugcaucggcuccauccgcaacggcaccuacgaccacgacgucuaccgcgacgaggcccucaacaaccgcuuccagaucaagggcgucgagcucaaguccggcuacaaggacuggauccucuggaucuccuucgccaucuccugcuuccuccucugcgucgcccuccucggcuucaucaugugggccugccagaagggcaacauccgcugcaacaucugcaucuga

SEQ ID NO: 104109 - RNA, 1701 nt, Artificial Sequence
  derived and/or modified CDS sequence (opt2) from hemagglutinin__InfluenzaA__AEX35395
augaagaccaucaucgcccucuccuacauccucugccucgucuucgcccagaagcuccccggcaacgacaacuccaccgccacccucugccucggccaccacgccguccccaacggcaccaucgucaagaccaucaccaacgaccagaucgaggucaccaacgccaccgagcucguccaguccuccuccaccggcgagaucugcgacuccccccaccagauccucgacggcgagaacugcacccucaucgacgcccuccucggcgacccccagugcgacggcuuccagaacaagaaguggaaccucuucgucgagcgcuccaaggccuacuccaacugcuaccccuacgacguccccgacuacgccucccuccgcucccucgucgccuccuccggcacccucgaguucaacaacgaguccuucaacuggaccggcgucacccagaacggcaccuccuccgccugcaagcgccgcuccaacaaguccuucuucucccgccucaacuggcucacccaccucaaguucaaguaccccgcccucaacgucaccaugcccaacaacgagaaguucgacaagcucuacaucuggggcguccaccaccccggcaccgacaacgaccagaucucccucuacgcccaggccuccggccgcaucaccgucuccaccaagcgcucccagcagaccgucauccccaacaucggcucccgcccccgcguccgcgacguccccucccgcaucuccaucuacuggaccaucgucaagcccggcgacauccuccucaucaacuccaccggcaaccucaucgccccccgcggcuacuucaagauccgcuccggcaaguccuccaucaugcgcuccgacgcccccaucggcaagugcaacuccgagugcaucacccccaacggcuccauccccaacgacaagcccuuccagaacgucaaccgcaucaccuacggcgccugcccccgcuacgucaagcagaacacccucaagcucgccaccggcaugcgcaacguccccgagaagcagacccgcggcaucuucggcgccaucgccggcuucaucgagaacggcugggagggcauggucgacggcugguacggcuuccgccaccagaacuccgagggcaccggccaggccgccgaccucaaguccacccaggccgccaucaaccagaucaacggcaagcucaaccgccucaucggcaagaccaacgagaaguuccaccagaucgagaaggaguucuccgaggucgagggccgcauccaggaccucgagaaguacgucgaggacaccaagaucgaccucugguccuacaacgccgagcuccucgucgcccucgagaaccagcacaccaucgaccucaccgacuccgagaugaacaagcucuucgagcgcaccaagaagcagcuccgcgagaacgccgaggacaugggcaacggcugcuucaagaucuaccacaagugcgacaacgccugcaucggcuccauccgcaacggcaccuacgaccacgacgucuaccgcgacgaggcccucaacaaccgcuuccagaucaagggcgucgagcucaaguccggcuacaaggacuggauccucuggaucuccuucgccaucuccugcuuccuccucugcgucgcccuccucggcuucaucaugugggccugccagaagggcaacauccgcugcaacaucugcaucuga

SEQ ID NO: 104110 - RNA, 1701 nt, Artificial Sequence; identical to SEQ ID NO: 97831
  derived and/or modified CDS sequence (opt2) from hemagglutinin__InfluenzaA__AEX35406

SEQ ID NO: 104111 - RNA, 1701 nt, Artificial Sequence; identical to SEQ ID NO: 97831
  derived and/or modified CDS sequence (opt2) from hemagglutinin__InfluenzaA__AEX35417

SEQ ID NO: 104112 - RNA, 1701 nt, Artificial Sequence
  derived and/or modified CDS sequence (opt2) from hemagglutinin__InfluenzaA__AEX35428
augaagaccaucaucgcccucuccuacauccucugccucgucuucgcccagaagcuccccggcaacgacaacuccaccgccacccucugccucggccaccacgccguccccaacggcacccucgucaagaccaucaccaacgaccagaucgaggucaccaacgccaccgagcucguccaguccuccuccaccggcggcaucugcgacuccccccaccagauccucgacggcgagaacugcacccucaucgacgcccuccucggcgacccccacugcgacggcuuccagaacaagaagugggaccucuucgucgagcgcuccaaggccuacuccaacugcuaccccuacgacguccccgacuacgccucccuccgcucccucgucgccuccuccggcacccucgaguucaacaacgaguccuucaacuggaccggcgucgcccagaacggcaccuccuccgccugcaagcgccgcuccgacaaguccuucuucucccgccucaacuggcuccaccagcucaaguacaaguaccccgcccucaacgucaccaugcccaacaacgagaaguucgacaagcucuacaucuggggcguccaccaccccggcaccgacuccgaccagaucucccucuacgcccaggccuccggccgcaucaccgucuccaccaagcgcucccagcagaccgucauccccaacaucggcucccgcccccgcguccgcgacgucuccucccgcaucuccaucuacuggaccaucgucaagcccggcgacauccucuucaucaacuccaccggcaaccucaucgccccccgcggcuacuucaagauccgcuccggcaaguccuccaucaugcgcuccgacgcccccaucgacaagugcaacuccgagugcaucacccccaacggcuccauccccaacgacaagcccuuccagaacgucaaccgcaucaccuacggcgccugcccccgcuacgucaagcagaacacccucaagcucgccaccggcaugcgcaacguccccgagaagcagacccgcggcaucuucggcgccaucgccggcuucaucgagaacggcugggagggcauggucgacggcugguacggcuuccgccaccagaacuccgagggcaccggccaggccgccgaccucaaguccacccaggccgccaucaaccagaucaacggcaagcucaaccgccucaucggcaagaccaacgagaaguuccaccagaucgagaaggaguucuccgaggucgagggccgcauccaggaccucgagaaguacgucgaggacaccaagaucgaccucugguccuacaacgccgagcuccucgucgcccucgagaaccagcacaccaucgaccucaccgacuccgagaugaacaagcucuucgagcgcaccaagaagcagcuccgcgagaacgccgaggacaugggcaacggcugcuucaagaucuaccacaagugcgacaacgccugcaucggcuccauccgcaacggcaccuacgaccacgacgucuaccgcgacgaggcccucaacaaccgcuuccagaucaagggcgucgagcucaaguccggcuacaaggacuggauccucuggaucuccuucgccaucuccugcuuccuccucugcgucgcccuccucggcuucaucaugugggccugccagaagggcaacauccgcugcaacaucugcaucuga

SEQ ID NO: 104113 - RNA, 1698 nt, Artificial Sequence
  derived and/or modified CDS sequence (opt2) from hemagglutinin__InfluenzaA__AEX35439
augaaggucaagcuccucguccuccucugcaccuucaccgccaccuacgccgacaccaucugcaucggcuaccacgccaacaacuccaccgacaccgucgacaccguccucgagaagaacgucaccgucacccacuccgucaaccuccucgaggacucccacaacggcaagcucugccuccucaagggcaucgccccccuccagcucggcaacugcuccgucgccggcuggauccucggcaaccccgagugcgagcuccucaucuccaaggaguccugguccuacaucgucgagacccccaaccccgagaacggcaccugcuaccccggcuacuucgccgacuacgaggagcuccgcgagcagcucuccuccgucuccuccuucgagcgcuucgagaucuuccccaaggaguccuccuggcccaaccacaccgucaccggcgucuccgccuccugcucccacaacggcaaguccuccuucuaccgcaaccuccucuggcucaccggcaagaacggccucuaccccaaccucuccaaguccuacgccaacaacaaggagaaggagguccucguccucuggggcguccaccacccccccaacaucggcgaccagcgcgcccucuaccacaccgagaacgccuacgucuccgucgucuccucccacuacucccgccgcuucacccccgagaucgccaagcgccccaagguccgcgaccaggagggccgcaucaacuacuacuggacccuccucgagcccggcgacaccaucaucuucgaggccaacggcaaccucaucgccccccgcuucgccuucgcccucucccgcggcuucggcuccggcaucaucaccuccaacgcccccauggacgagugcgacgccaagugccagaccccccagggcgccaucaacuccucccuccccuuccagaacguccaccccgucaccaucggcgagugccccaaguacguccgcuccgccaagcuccgcauggucaccggccuccgcaacauccccuccauccagucccgcggccucuucggcgccaucgccggcuucaucgagggcggcuggaccggcauggucgacggcugguacggcuaccaccaccagaacgagcagggcuccggcuacgccgccgaccagaaguccacccagaacgccaucaacggcaucaccaacaaggucaacuccgucaucgagaagaugaacacccaguucaccgccgucggcaaggaguucaacaagcucgagcgccgcauggagaaccucaacaagaaggucgacgacggcuuccucgacaucuggaccuacaacgccgagcuccucguccuccucgagaacgagcgcacccucgacuuccacgacuccaacgucaagaaccucuacgagaaggucaagucccagcucaagaacaacgccaaggagaucggcaacggcugcuucgaguucuaccacaagugcaacgacgagugcauggaguccgucaagaacggcaccuacgacuaccccaaguacuccgaggaguccaagcucaaccgcgagaagaucgacggcgucaagcucgaguccaugggcgucuaccagauccucgccaucuacuccaccgucgccuccucccucguccuccucgucucccucggcgccaucuccuucuggaugugcuccaacggcucccuccagugccgcaucugcaucuga

SEQ ID NO: 104114 - RNA, 1701 nt, Artificial Sequence
  derived and/or modified CDS sequence (opt2) from hemagglutinin__InfluenzaA__AEX35450
augaagaccaucaucgcccucuccuacauccucugccucgucuucgcccagaagcuccccggcaacgacaacuccaccgccacccucugccucggccaccacgccguccccaacggcaccaucgucaagaccaucaccaacgaccagaucgaggucaccaacgccaccgagcucguccaguccuccuccaccggcggcaucugcgacuccccccaccagauccucgacggcgagaacugcacccucaucgacgcccuccucggcgacccccagugcgacggcuuccagaacaagaagugggaccucuucgucgagcgcuccaaggccuacuccaacugcuaccccuacgacguccccgacuacgccucccuccgcucccucgucgccuccuccggcacccucgaguucaacaacgagaacuucaacuggaccggcgucacccagaacggcaccuccuccgccugcaagcgccgcuccaacaacuccuucuucucccgccucaacuggcucacccaccucaaguucaaguaccccgcccucaacgucaccaugcccaacaacgagaaguucgacaagcucuacaucuggggcguccaccaccccggcaccgacaacgaccagaucuuccucuacgcccaggccuccggccgcaucaccgucuccaccaagcgcucccagcagaccgucauccccaacaucggcucccgcccccgcguccgcaacauccccucccgcaucuccaucuacuggaccaucgucaagcccggcgacauccuccucaucaacuccaccggcaaccucaucgccccccgcggcuacuucaagauccaguccggcaaguccuccaucaugcgcuccgacgcccccaucggcaagugcaacuccgagugcaucacccccaacggcuccauccccaacgacaagcccuuccagaacgucaaccgcaucaccuacggcgccugcccccgcuacgucaagcagaacacccucaagcucgccaccggcaugcgcaacguccccgagaagcagacccgcggcaucuucggcgccaucgccggcuucaucgagaacggcugggagggcauggucgacggcugguacggcuuccgccaccagaacuccgagggcaucggccaggccgccgaccucaaguccacccaggccgccaucaaccagaucaacggcaagcucaaccgccucaucggcaagaccaacgagaaguuccaccagaucgagaaggaguucuccgaggucgagggccgcauccaggaccucgagaaguacgucgaggacaccaagaucgaccucugguccuacaacgccgagcuccucgucgcccucgagaaccagcacaccaucgaccucaccgacuccgagaugaacaagcucuucgagcgcaccaagaagcagcuccgcgagaacgccgaggacaugggcaacggcugcuucaagaucuaccacaagugcgacaacgccugcaucggcuccauccgcaacggcaccuacgaccacgacgucuaccgcgacgaggcccucaacaaccgcuuccagaucaagggcgucgagcucaaguccggcuacaaggacuggauccucuggaucuccuucgccaucuccugcuuccuccucugcgucgcccuccucggcuucaucaugugggccugccagaagggcaacauccgcugcaacaucugcaucuga

SEQ ID NO: 104115 - RNA, 1701 nt, Artificial Sequence; identical to SEQ ID NO: 96666
  derived and/or modified CDS sequence (opt2) from hemagglutinin__InfluenzaA__AEX35461

SEQ ID NO: 104116 - RNA, 1701 nt, Artificial Sequence
  derived and/or modified CDS sequence (opt2) from hemagglutinin__InfluenzaA__AEX35472
augaagaccaucaucgcccucuccuacauccucugccucgucuucgcccagaagcuccccggcaacgacaacuccaccgccacccucugccucggccaccacgccguccccaacggcaccaucgucaagaccaucaccaacgaccagaucgaggucaccaacgccaccgagcucguccaguccuccuccaccggcggcaucugcgacuccccccaccagauccucgacggcgagaacugcacccucaucgacgcccuccucggcgacccccagugcgacgacuuccagaacaagaagugggaccucuucgucgagcgcuccaaggccuacuccaacugcuaccccuacgacguccccgacuacgccucccuccgcucccucgucgccuccuccggcacccucgaguucaacaacgaguccuucaacuggaccggcgucacccagaacggcaccuccuccgccugcaagcgccgcuccaacaacuccuucuucucccgccucaacuggcucacccaccucaaguucaaguaccccgcccucaacgucaccaugcccaacaacgagaaguucgacaagcucuacaucuggggcguccaccaccccggcaccgacaacgaccagaucuuccucuacgcccaggccuccggccgcaucaccgucuccaccaagcgcucccagcagaccgucauccccaacaucggcucccgcccccgcguccgcaacauccccucccgcaucuccaucuacuggaccaucgucaagcccggcgacauccuccucaucaacuccaccggcaaccucaucgccccccgcggcuacuucaagauccgcuccggcaaguccuccaucaugcgcuccgacgcccccaucggcaagugcaacuccgagugcaucacccccaacggcuccauccccaacgacaagcccuuccagaacgucaaccgcaucaccuacggcgccugcccccgcuacgucaagcagaacacccucaagcucgccaccggcaugcgcaacguccccgagaagcagacccgcggcaucuucggcgccaucgccggcuucaucgagaacggcugggagggcauggucgacggcugguacggcuuccgccaccagaacuccgagggcaucggccaggccgccgaccucaaguccacccaggccgccaucaaccagaucaacggcaagcucaaccgccucaucggcaagaccaacgagaaguuccaccagaucgagaaggaguucuccgaggucgagggccgcauccaggaccucgagaaguacgucgaggacaccaagaucgaccucugguccuacaacgccgagcuccucgucgcccucgagaaccagcacaccaucgaccucaccgacuccgagaugaacaagcucuucgagcgcaccaagaagcagcuccgcgagaacgccgaggacaugggcaacggcugcuucaagaucuaccacaagugcgacaacgccugcaucggcuccauccgcaacggcaccuacgaccacgacgucuaccgcgacgaggcccucaacaaccgcuuccagaucaagggcgucgagcucaaguccggcuacaaggacuggauccucuggaucuccuucgccaucuccugcuuccuccucugcgucguccuccucggcuucaucaugugggccugccagaagggcaacauccgcugcaacaucugcaucuga

SEQ ID NO: 104117 - RNA, 1701 nt, Artificial Sequence; identical to SEQ ID NO: 96666
  derived and/or modified CDS sequence (opt2) from hemagglutinin__InfluenzaA__AEX35483

SEQ ID NO: 104118 - RNA, 1701 nt, Artificial Sequence
  derived and/or modified CDS sequence (opt2) from hemagglutinin__InfluenzaA__AEX35494
augaagaccaucaucgcccucuccuacauccucugccucgucuucgcccagaagcuccccggcaacgacaacuccaccgccacccucugccucggccaccacgccguccccaacggcaccaucgucaagaccaucaccaacgaccagaucgaggucaccaacgccaccgagcucguccaguccuccuccaccggcggcaucugcgacuccccccaccagauccucgacggcgagaacugcacccucaucgacgcccuccucggcgacccccagugcgacggccuccagaacaagaagugggaccucuucgucgagcgcuccaaggccuacuccaacugcuaccccuacgacguccccgacuacgccucccuccgcucccucgucgccuccuccggcacccucgaguucaacaacgaguccuucaacuggaccggcgucacccagaacggcaccuccuccgccugcaagcgccgcuccaacaacuccuucuucucccgccucaacuggcucacccaccucaaguucaaguaccccgcccucaacgucaccaugcccaacaacgagaaguucgacaagcucuacaucuggggcguccaccaccccggcaccgacaacgaccagaucuuccucuacgcccaggccuccggccgcaucaccgucuccaccaagcgcucccagcagaccgucauccccaacaucggcucccgcccccgcguccgcaacauccccucccgcaucuccaucuacuggaccaucgucaagcccggcgacauccuccucaucaacuccaccggcaaccucaucgccccccgcggcuacuucaagauccgcuccggcaaguccuccaucaugcgcuccgacgcccccaucggcaagugcaacuccgagugcaucacccccaacggcuccauccccaacgacaagcccuuccagaacgucaaccgcaucaccuacggcgccugcccccgcuacgucaagcagaacacccucaagcucgccaccggcaugcgcaacguccccgagaagcagacccgcggcaucuucggcgccaucgccggcuucaucgagaacggcugggagggcaugauggacggcugguacggcuuccgccaccagaacuccgagggcaucggccaggccgccgaccucaaguccacccaggccgccaucaaccagaucaacggcaagcucaaccgccucaucggcaagaccaacgagaaguuccaccagaucgagaaggaguucuccgaggucgagggccgcauccaggaccucgagaaguacgucgaggacaccaagaucgaccucugguccuacaacgccgagcuccucgucgcccucgagaaccagcacaccaucgaccucaccgacuccgagaugaacaagcucuucgagcgcaccaagaagcagcuccgcgagaacgccgaggacaugggcaacggcugcuucaagaucuaccacaagugcgacaacgccugcaucggcuccauccgcaacggcaccuacgaccacgacgucuaccgcgacgaggcccucaacaaccgcuuccagaucaagggcgucgagcucaaguccggcuacaaggacuggauccucuggaucuccuucgccaucuccugcuuccuccucugcgucgcccuccucggcuucaucaugugggccugccagaagggcaacauccgcugcaacaucugcaucuga

SEQ ID NO: 104119 - RNA, 1701 nt, Artificial Sequence
  derived and/or modified CDS sequence (opt2) from hemagglutinin__InfluenzaA__AEX35505
augaagaccaucaucgcccucuccuacauccucugccucgucuucgcccagaagcuccccggcaacgacaacuccaccgccacccucugccucggccaccacgccguccccaacggcaccaucgucaagaccaucaccaacgaccagaucgaggucaccaacgccaccgagcucguccaguccuccuccaccggcggcaucugcgacuccccccaccagauccucgacggcgagaacugcacccucaucgacgcccuccucggcgacccccagugcgacgacuuccagaacaagaagugggaccucuucgucgagcgcuccaaggccuacuccaacugcuaccccuacgacguccccgacuacgccucccuccgcucccucgucgccuccuccggcacccucgaguucaacaacgaguccuucaacuggaccggcgucacccagaacggcaccuccuccgccugcaagcgccgcuccaacaacuccuucuucucccgccucaacuggcucacccaccucaaguucaaguaccccgcccucaacgucaccaugcccaacaacgagaaguucgacaagcucuacaucuggggcguccaccaccccggcaccgacaacgaccagaucuuccucuacgcccaggccuccggccgcaucaccgucuccaccaagcgcucccagcagaccgucauccccaacaucggcucccgcccccgcguccgcaacauccccucccgcaucuccaucuacuggaccaucgucaagcccggcgacauccuccucaucaacuccaccggcaaccucaucgccccccgcggcuacuucaagauccucuccggcaaguccuccaucaugcgcuccgacgcccccaucggcaagugcaacuccgagugcaucacccccaacggcuccauccccaacgacaagcccuuccagaacgucaaccgcaucaccuacggcgccugcccccgcuacgucaagcagaacacccucaagcucgccaccggcaugcgcaacguccccgagaagcagacccgcggcaucuucggcgccaucgccggcuucaucgagaacggcugggagggcauggucgacggcugguacggcuuccgccaccagaacuccgagggcaucggccaggccgccgaccucaaguccacccaggccgccaucaaccagaucaacggcaagcucaaccgccucaucggcaagaccaacgagaaguuccaccagaucgagaaggaguucuccgaggucgagggccgcauccaggaccucgagaaguacgucgaggacaccaagaucgaccucugguccuacaacgccgagcuccucgucgcccucgagaaccagcacaccaucgaccucaccgacuccgagaugaacaagcucuucgagcgcaccaagaagcagcuccgcgagaacgccgaggacaugggcaacggcugcuucaagaucuaccacaagugcgacaacgccugcaucggcuccauccgcaacggcaccuacgaccacgacgucuaccgcgacgaggcccucaacaaccgcuuccagaucaagggcgucgagcucaaguccggcuacaaggacuggauccucuggaucuccuucgccaucuccugcuuccuccucugcgucgcccuccucggcuucaucaugugggccugccagaagggcaacauccgcugcaacaucugcaucuga

SEQ ID NO: 104120 - RNA, 1701 nt, Artificial Sequence
  derived and/or modified CDS sequence (opt2) from hemagglutinin__InfluenzaA__AEX35516
augaagaccaucaucgcccucuccuacauccucugccucgucuucgcccagaagcuccccggcaacgacaacuccaccgccacccucugccucggccaccacgccguccccaacggcaccaucgucaagaccaucaccaacgaccagaucgaggucaccaacgccaccgagcucguccaguccuccuccaccggcggcaucugcgacuccccccaccagauccucgacggcgagaacugcacccucaucgacgcccuccucggcgacccccagugcgacggccuccagaacaagaagugggaccucuucgucgagcgcuccaaggccuacuccaacugcuaccccuacgacguccccgacuacgccucccuccgcucccucgucgccuccuccggcacccucgaguucaacaacgaguccuucaacuggaccggcgucacccagaacggcaccuccuccgccugcaagcgccgcuccaacaacuccuucuucucccgccucaacuggcucacccaccucaaguucaaguaccccgcccucaacgucaccaugcccaacaacgagaaguucgacaagcucuacaucuggggcguccaccaccccggcaccgacaacgaccagaucuuccucuacgcccaggccuccggccgcaucaccgucuccaccaagcgcucccagcagaccgucauccccaacaucggcucccgcccccgcguccgcaacauccccucccgcaucuccaucuacuggaccaucgucaagcccggcgacauccuccucaucaacuccaccggcaaccucaucgccccccgcggcuacuucaagauccgcuccggcaaguccuccaucaugcgcuccgacgcccccaucggcaagugcaacuccgagugcaucacccccaacggcuccauccccaacgacaagcccuuccagaacgucaaccgcaucaccuacggcgccugcccccgcuacgucaagcagaacacccucaagcucgccaccggcaugcgcaacguccccgagaagcagacccgcggcaucuucggcgccaucgccggcuucaucgagaacggcugggagggcauggucgacggcugguacggcuuccgccaccagaacuccgagggcaucggccaggccgccgaccucaaguccacccaggccgccaucaaccagaucaacggcaagcucaaccgccucaucggcaagaccaacgagaaguuccaccagaucgagaaggaguucuccgaggucgagggccgcauccaggaccucgagaaguacgucgaggacaccaagaucgaccucugguccuacaacgccgagcuccucgucgcccucgagaaccagcacaccaucgaccucaccgacuccgagaugaacaagcucuucgagcgcaccaagaagcagcuccgcgagaacgccgaggacaugggcaacggcugcuucaagaucuaccacaagugcgacaacgccugcaucggcuccauccgcaacggcaccuacgaccacgacgucuaccgcgacgaggcccucaacaaccgcuuccagaucaagggcgucgagcucaaguccggcuacaaggacuggauccucuggaucuccuucgccaucuccugcuuccuccucugcgucgcccuccucggcuucaucaugugggccugccagaagggcaacauccgcugcaacaucugcaucuga

SEQ ID NO: 104121 - RNA, 1701 nt, Artificial Sequence
  derived and/or modified CDS sequence (opt2) from hemagglutinin__InfluenzaA__AEX35527
augaagaccaucaucgcccucuccuacauccucugccucgucuucgcccagaagcuccccggcaacgacaacuccaccgccacccucugccucggccaccacgccguccccaacggcaccaucgucaagaccaucaccaacgaccagaucgaggucaccaacgccaccgagcucguccaguccuccuccaccggcggcaucugcgacuccccccaccagauccucgacggcgagaacugcacccucaucgacgcccuccucggcgacccccagugcgacggcuuccagaacaagaagugggaccucuucgucgagcgcuccaaggccuacuccaacugcuaccccuacgacguccccgacuacgucucccuccgcucccucgucgccuccuccggcacccucgaguucaacaacgaguccuucaacuggaccggcgucacccagaacggcaccuccuccgccugcaagcgccgcuccaacaacuccuucuucucccgccucaacuggcucacccaccucaaguucaaguaccccgcccucaacgucaccaugcccaacaacgagcaguucgacaagcucuacaucuggggcguccaccaccccggcaccgacaacgaccagaucucccucuacgcccaggccuccggccgcaucaccgucuccaccaagcgcucccagcagaccgucauccccaacaucggcucccgcccccgcguccgcgacauccccucccgcaucuccaucuacuggaccaucgucaagcccggcgacauccuccucaucaacuccaccggcaaccucaucgccccccgcggcuacuucaagauccgcuccggcaaguccuccaucaugcgcuccgacgcccccaucggcaagugcaacuccgagugcaucacccccaacggcuccauccccaacgacaagcccuuccagaacgucaaccgcaucaccuacggcgccugcccccgcuacgucaagcagaacacccucaagcucgccaccggcaugcgcaacguccccgagaagcagacccgcggcaucuucggcgccaucgccggcuucaucgagaacggcugggagggcauggucgacggcugguacggcuuccgccaccagaacuccgagggcaucggccaggccgccgaccucaaguccacccaggccgccaucaaccagaucaacggcaagcucaaccgccucaucggcaagaccaacgagaaguuccaccagaucgagaaggaguucuccgaggucgagggccgcauccaggaccucgagaaguacgucgaggacaccaagaucgaccucugguccuacaacgccgagcuccucgucgcccucgagaaccagcacaccaucgaccucaccgacuccgagaugaacaagcucuucgagcgcaccaagaagcagcuccgcgagaacgccgaggacaugggcaacggcugcuucaagaucuaccacaagugcgacaacgccugcaucggcuccauccgcaacggcaccuacgaccacgacgucuaccgcgacgaggcccucaacaaccgcuuccagaucaagggcgucgagcucaaguccggcuacaaggacuggauccucuggaucuccuucgccaucuccugcuuccuccucugcgucgcccuccucggcuucaucaugugggccugccagaagggcaacauccgcugcaacaucugcaucuga

SEQ ID NO: 104122 - RNA, 1701 nt, Artificial Sequence
  derived and/or modified CDS sequence (opt2) from hemagglutinin__InfluenzaA__AEX35549
augaagaccaucaucgcccucuccuacauccucugccucgucuucgcccagaagcuccccggcaacgacaacuccaccgccacccucugccucggccaccacgccguccccaacggcaccaucgucaagaccaucaccaacgaccagaucgaggucaccaacgccaccgagcucguccaguccuccuccaccggcggcaucugcgacuccccccaccagauccucgacggcgagaacugcacccucaucgacgcccuccucggcgacccccagugcgacggcuuccagaacaagaagugggaccucuucgucgagcgcuccaaggccuacuccaacugcuaccccuacgacguccccgacuacgccucccuccgcucccucaucgccuccuccggcacccucgaguucaacaacgaguccuucaacuggaccggcgucacccagaacggcaccuccuccgccugcaagcgcggcuccaacaacuccuucuucucccgccucaacuggcucacccaccucaaguucaaguaccccgcccucaacgucaccaugcccaacaacgaggaguucgacaagcucuacaucuggggcguccaccaccccggcaccgacaacgaccagaucucccucuacgcccaggccuccggcaagaucaccgucuccaccaagcgcucccagcagaccgucauccccaacaucggcucccgcccccgcguccgcgacauccccucccgcaucuccaucuacuggaccaucgucaagcccggcgacauccuccucaucaacuccaccggcaaccucaucgccccccgcggcuacuucaagauccgcuccggcaaguccuccaucaugcgcuccgacgcccccaucgacaagugcaacuccgagugcaucacccccaacggcuccauccccaacgacaagcccuuccagaacgucaacaagaucaccuacggcgccugcccccgcuacgucaagcagaacacccucaagcucgccaccggcaugcgcaacguccccgagaagcagacccgcggcaucuucggcgccaucgccggcuucaucgagaacggcugggagggcauggucgacggcugguacggcuuccgccaccagaacuccgagggcaucggccaggccgccgaccucaaguccacccaggccgccaucgaccagaucaacggcaagcucaaccgccucaucggcaagaccaacgagaaguuccaccagaucgagaaggaguucuccgaggucgagggccgcauccaggaccucgagaaguacgucgaggacaccaagaucgaccucugguccuacaacgccgagcuccucgucgcccucgagaaccagcacaccaucgaccucaccgacuccgagaugaacaagcucuucgagcgcaccaagaagcagcuccgcgagaacgccgaggacaugggcaacggcugcuucaagaucuaccacaagugcgacaacgccugcaucggcuccauccgcaacggcaccuacgaccacgacgucuaccgcgacgaggcccucaacaaccgcuuccagaucaagggcgucgagcucaaguccggcuacaaggacuggauccucuggaucuccuucgccaucuccugcuuccuccucugcgucgcccuccucggcuucaucaugugggccugccagaagggcaacauccgcugcaacaucugcaucuga

SEQ ID NO: 104123 - RNA, 1701 nt, Artificial Sequence
  derived and/or modified CDS sequence (opt2) from hemagglutinin__InfluenzaA__AEX35560
augaagaccaucaucgcccucuccuacauccucugccucgucuucgcccagaagcuccccggcaacgacaacuccaccgccacccucugccucggccaccacgccguccccaacggcaccaucgucaagaccaucaccaacgaccagaucgaggucaccaacgccaccgagcucguccaguccuccuccaccggcggcaucugcgacuccccccaccagauccucgacggcgagaacugcacccucaucgacgcccuccucggcgacccccagugcgacggcuuccagaacaagaagugggaccucuucgucgagcgcuccaaggccuacuccaacugcuaccccuacgacguccccgacuacgucucccuccgcucccucgucgccuccuccggcacccucgaguucaacaacgaguccuucaacuggaccggcgucacccagaacggcaccuccuccgccugcaagcgccgcuccaacaacuccuucuucucccgccucaacuggcucacccaccucaaguucaaguaccccgcccucaacgucaccaugcccaacaacgagcaguucgacaagcucuacaucuggggcguccaccaccccggcaccgacaacgaccagaucucccucuacgcccaggccuccggccgcaucaccgucuccaccaagcgcucccagcagaccgucauccccaacaucggcucccgcccccgcguccgcgacauccccucccgcaucuccaucuacuggaccaucgucaagcccggcgacauccuccucaucaacuccaccggcaaccucaucgccccccgcggcuacuucaagauccgcuccggcaaguccuccaucaugcgcuccgacgcccccaucggcaagugcaacuccgagugcaucacccccaacggcuccauccccaacgacaagcccuuccagaacgucaaccgcaucaccuacggcgccugcccccgcuacgucaagcagaacacccucaagcucgccaccggcaugcgcaacguccccgagaagcagacccgcggcaucuucggcgccaucgccggcuucaucgagaacggcugggagggcauggucgacggcugguacggcuuccgccaccagaacuccgucggcaucggccaggccgccgaccucaaguccacccaggccgccaucaaccagaucaacggcaagcucaaccgccucaucggcaagaccaacgagaaguuccaccagaucgagaaggaguucuccgaggucgagggccgcauccaggaccucgagaaguacgucgaggacaccaagaucgaccucugguccuacaacgccgagcuccucgucgcccucgagaaccagcacaccaucgaccucaccgacuccgagaugaacaagcucuucgagcgcaccaagaagcagcuccgcgagaacgccgaggacaugggcaacggcugcuucaagaucuaccacaagugcgacaacgccugcaucggcuccauccgcaacggcaccuacgaccacgacgucuaccgcgacgaggcccucaacaaccgcuuccagaucaagggcgucgagcucaaguccggcuacaaggacuggauccucuggaucuccuucgccaucuccugcuuccuccucugcgucgcccuccucggcuucaucaugugggccugccagaagggcaacauccgcugcaacaucugcaucuga

SEQ ID NO: 104124 - RNA, 1701 nt, Artificial Sequence
  derived and/or modified CDS sequence (opt2) from hemagglutinin__InfluenzaA__AEX35571
augaagaccaucaucgcccucuccuacauccucugccucgucuucgcccagaagcuccccggcaacgacaacuccaccgccacccucugccucggccaccacgccguccccaacggcaccaucgucaagaccaucaccaacgaccagaucgaggucaccaacgccaccgagcucguccaguccuccuccaccggcggcaucugcgacuccccccaccagauccucgacggcgagaacugcacccucaucgacgcccuccucggcgacccccagugcgacggcuuccagaacaagaagugggaccucuucgucgagcgcucccgcgccuacuccaacugcuaccccuacgacguccccgacuacgccucccuccgcucccucgucgccuccuccggcacccucgaguucaacaacgaguccuucaacuggaccggcgucacccagaacggcaccuccuccgccugcaagcgccgcuccaacaacuccuucuucucccgccucaacuggcucacccaccucaaguucaaguaccccgcccucaacgucaccaugcccaacaacgagaaguucgacaagcucuacaucuggggcguccaccaccccggcaccgacaacgaccagaucuuccucuacgcccaggccuccggccgcaucaccgucuccaccaagcgcucccagcagaccgucauccccaacaucggcucccgcccccgcguccgcaacauccccucccgcaucuccaucuacuggaccaucgucaagcccggcgacauccuccucaucaacuccaccggcaaccucaucgccccccgcggcuacuucaagauccgcuccggcaaguccuccaucaugcgcuccgacgcccccaucggcaagugcaacuccgagugcaucacccccaacggcuccauccccaacgacaagcccuuccagaacgucaaccgcaucaccuacggcgccugcccccgcuacgucaagcagaacacccucaagcucgccaccggcaugcgcaacguccccgagaagcagacccgcggcaucuucggcgccaucgccggcuucaucgagaacggcugggagggcauggucgacggcugguacggcuuccgccaccagaacuccgagggcaucggccaggccgccgaccucaaguccacccaggccgccaucaaccagaucaacggcaagcucaaccgccucaucggcaagaccaacgagaaguuccaccagaucgagaaggaguucuccgaggucgagggccgcauccaggaccucgagaaguacgucgaggacaccaagaucgaccucugguccuacaacgccgagcuccucgucgcccucgagaaccagcacaccaucgaccucaccgacuccgagaugaacaagcucuucgagcgcaccaagaagcagcuccgcgagaacgccgaggacaugggcaacggcugcuucaagaucuaccacaagugcgacaacgccugcaucggcuccauccgcaacggcaccuacgaccacgacgucuaccgcgacgaggcccucaacaaccgcuuccagaucaagggcgucgagcucaaguccggcuacaaggacuggauccucuggaucuccuucgccaucuccugcuuccuccucugcgucgcccuccucggcuucaucaugugggccugccagaagggcaacauccgcugcaacaucugcaucuga

SEQ ID NO: 104125 - RNA, 1701 nt, Artificial Sequence; identical to SEQ ID NO: 96666
  derived and/or modified CDS sequence (opt2) from hemagglutinin__InfluenzaA__AEX35582

SEQ ID NO: 104126 - RNA, 1701 nt, Artificial Sequence
  derived and/or modified CDS sequence (opt2) from hemagglutinin__InfluenzaA__AEX35593
augaagaccaucaucgcccucuccuacauccucugccucgucuucgcccagaagcuccccggcaacgacaacuccaccgccacccucugccucggccaccacgccguccccaacggcaccaucgucaagaccaucaccaacgaccagaucgaggucaccaacgccaccgagcucguccaguccuccuccaccggcggcaucugcgacuccccccaccagauccucgacggcgagaacugcacccucaucgacgcccuccucggcgacccccagugcgacggcuuccagaacaagaagugggaccucuucgucgagcgcuccaaggccuacuccaacugcuaccccuacgacguccccgacuacgccucccuccgcucccucgucgccuccuccggcacccucgaguucaacaacgaguccuucaacuggaccggcgucacccagaacggcaccuccuccgccugcaagcgccgcuccaacaacuccuucuucucccgccucaacuggcucacccaccucaaguucaaguaccccgcccucaacgucaccaugcccaacaacgagaaguucgacaagcucuacaucuggggcguccaccaccccggcaccgacaacgaccagaucuuccucuacgcccaggccuccggccgcaucaccgucuccaccaagcgcucccagcagaccgucauccccaacaucggcucccgcccccgcguccgcaacauccccucccgcaucuccaucuacuggaccaucgucaagcccggcgacauccuccucaucaacuccaccggcaaccucaucgccccccgcggcuacuucaagauccgcuccggcaaguccuccaucaugcgcuccgacgccccccucggcaagugcaacuccgagugcaucacccccaacggcuccauccccaacgacaagcccuuccagaacgucaaccgcaucaccuacggcgccugcccccgcuacgucaagcagaacacccucaagcucgccaccggcaugcgcaacguccccgagaagcagacccgcggcaucuucggcgccaucgccggcuucaucgagaacggcugggagggcauggucgacggcugguacggcuuccgccaccagaacuccgagggcaucggccaggccgccgaccucaaguccacccaggccgccaucaaccagaucaacggcaagcucaaccgccucaucggcaagaccaacgagaaguuccaccagaucgagaaggaguucuccgaggucgagggccgcauccaggaccucgagaaguacgucgaggacaccaagaucgaccucugguccuacaacgccgagcuccucgucgcccucgagaaccagcacaccaucgaccucaccgacuccgagaugaacaagcucuucgagcgcaccaagaagcagcuccgcgagaacgccgaggacaugggcaacggcugcuucaagaucuaccacaagugcgacaacgccugcaucggcuccauccgcaacggcaccuacgaccacgacgucuaccgcgacgaggcccucaacaaccgcuuccagaucaagggcgucgagcucaaguccggcuacaaggacuggauccucuggaucuccuucgccaucuccugcuuccuccucugcgucgcccuccucggcuucaucaugugggccugccagaagggcaacauccgcugcaacaucugcaucuga

SEQ ID NO: 104127 - RNA, 1701 nt, Artificial Sequence; identical to SEQ ID NO: 98408
  derived and/or modified CDS sequence (opt2) from hemagglutinin__InfluenzaA__AEX35604

SEQ ID NO: 104128 - RNA, 1701 nt, Artificial Sequence
  derived and/or modified CDS sequence (opt2) from hemagglutinin__InfluenzaA__AEX35615
augaagaccaucaucgcccucuccuacauccucugccucgucuucgcccagaagcuccccggcaacgacaacuccaccgccacccucugccucggccaccacgccguccccaacggcaccaucgucaagaccaucaccaacgaccagaucgaggucaccaacgccaccgagcucguccaguccuccuccaccggcgagaucugcgacuccccccaccagauccucgacggcgagaacugcacccucaucgacgcccuccucggcgacccccagugcgacggcuuccagaacaagaagugggaccucuucgucgagcgcuccaaggccuacuccaacugcuaccccuacgacguccccgacuacgccucccuccgcucccucgucgccuccuccggcacccucgaguucaacaacgaguccuucaacuggaccggcgucacccagaacggcaccuccuccgccugcauccgccgcuccaacaacuccuucuucucccgccucaacuggcucacccaccucaaguucaaguaccccgcccucaacgucaccaugcccaacaacgagaaguucgacaagcucuacaucuggggcguccaccaccccggcaccgacaacgaccagaucuuccucuacgcccaggccuccggccgcaucaccgucuccaccaagcgcucccagcagaccgucauccccaacaucggcucccgcccccgcguccgcaacauccccucccgcaucuccaucuacuggaccaucgucaagcccggcgacauccuccucaucaacuccaccggcaaccucaucgccccccgcggcuacuucaagauccgcuccggcaaguccuccaucaugcgcuccgacgcccccaucggcaagugcaacuccgagugcaucacccccaacggcuccauccccaacgacaagcccuuccagaacgucaaccgcaucaccuacggcgccugcccccgcuacgucaagcagaacacccucaagcucgccaccggcaugcgcaacguccccgagaagcagacccgcggcaucuucggcgccaucgccggcuucaucgagaacggcugggagggcauggucgacggcugguacggcuuccgccaccagaacuccgagggcaucggccaggccgccgaccucaaguccacccaggccgccaucgaccagaucaacggcaagcucaaccgccucaucggcaagaccaacgagaaguuccaccagaucgagaaggaguucuccgaggucgagggccgcauccaggaccucgagaaguacaucgaggacaccaagaucgaccucugguccuacaacgccgagcuccucgucgcccucgagaaccagcacaccaucgaccucaccgacuccgagaugaacaagcucuucgagaagaccaagaagcagcuccgcgagaacgccgaggacaugggcaacggcugcuucaagaucuaccacaagugcgacaacgccugcaucggcuccauccgcaacggcaccuacgaccacgacgucuaccgcgacgaggcccucaacaaccgcuuccagaucaagggcgucgagcucaaguccggcuacaaggacuggauccucuggaucuccuucgccaucuccugcuuccuccucugcgucgcccuccucggcuucaucaugugggccugccagaagggcaacauccgcugcaacaucugcaucuga

SEQ ID NO: 104129 - RNA, 1701 nt, Artificial Sequence; identical to SEQ ID NO: 98470
  derived and/or modified CDS sequence (opt2) from hemagglutinin__InfluenzaA__AEX35626

SEQ ID NO: 104130 - RNA, 1701 nt, Artificial Sequence
  derived and/or modified CDS sequence (opt2) from hemagglutinin__InfluenzaA__AEX35637
augaagaccaucaucgcccucuccuacauccucugccucgucuucgcccagaagcuccccggcaacgacaacuccaccgccacccucugccucggccaccacgccguccccaacggcaccaucgucaagaccaucaccaacgaccagaucgaggucaccaacgccaccgagcucguccaguccuccuccaccggcggcaucugcgacuccccccaccagauccucgacggcgagaacugcacccucaucgacgcccuccucggcgacccccagugcgacggcuuccagaacaagaagugggaccucuucgucgagcgcuccaaggccuacuccaacugcuaccccuacgacguccccgacuacgccucccuccgcucccucgucgccuccuccggcacccucgaguucaacaacgaguccuucaacuggaccggcgucacccagaacggcaccuccuccgccugcaagcgcggcuccgacaacuccuucuucuccaagcucaacuggcucacccaccucaaguucaaguaccccgcccucaacgucaccaugcccaacaacgagaaguucgacaagcucuacaucuggggcguccaccaccccggcaccgacaacgaccagaucuuccccuacgcccaggccuccggccgcaucaccgucuccaccaagcgcucccagcagaccgucauccccaacaucggcucccgcccccgcguccgcaacauccccucccgcaucuccaucuacuggaccaucgucaagcccggcgacauccuccucaucaacuccaccggcaaccucaucgccccccgcggcuacuucaagauccgcuccggcaaguccuccaucaugcgcuccgacgcccccaucggcaagugcaacuccgagugcaucacccccaacggcuccauccccaacgacaagcccuuccagaacgucaaccgcaucaccuacggcgccugcccccgcuacgucaagcagaacacccucaagcucgccaccggcaugcgcaacguccccgagaagcagacccgcggcaucuucggcgccaucgccggcuucaucgagaacggcugggagggcauggucgacggcugguacggcuuccgccaccagaacuccgagggcaucggccaggccgccgaccucaaguccacccaggccgccaucaaccagaucaacggcaagcucaaccgccucaucggcaagaccaacgagaaguuccaccagaucgagaaggaguucuccgaggucgagggccgcauccaggaccucgagaaguacgucgaggacaccaagaucgaccucugguccuacaacgccgagcuccucgucgcccucgagaaccagcacaccaucgaccucaccgacuccgagaugaacaagcucuucgagcgcaccaagaagcagcuccgcgagaacgccgaggacaugggcaacggcugcuucaagaucuaccacaagugcgacaacgccugcaucggcuccauccgcaacggcaccuacgaccacgacgucuaccgcgacgaggcccucaacaaccgcuuccagaucaagggcgucgagcucaaguccggcuacaaggacuggauccucuggaucuccuucgccaucuccugcuuccuccucugcgucgcccuccucggcuucaucaugugggccugccagaagggcaacauccgcugcaacaucugcaucuga

SEQ ID NO: 104131 - RNA, 1701 nt, Artificial Sequence; identical to SEQ ID NO: 98470
  derived and/or modified CDS sequence (opt2) from hemagglutinin__InfluenzaA__AEX35648

SEQ ID NO: 104132 - RNA, 1701 nt, Artificial Sequence
  derived and/or modified CDS sequence (opt2) from hemagglutinin__InfluenzaA__AEX36102
augaagaccaucaucgcccucuccuacauccucugccucgucuucgcccagaagcuccccggcaacaacaacuccaccgccacccucugccucggccaccacgccguccccaacggcaccaucgucaagaccaucaccaacgaccagaucgaggucaccaacgccaccgagcucguccaguccuccuccaccggcgagaucugcgacuccccccaccagauccucgacggcgagaacugcacccucaucgacgcccuccucggcgacccccagugcgacggcuuccagaacaagaagugggaccucuucgucgagcgcuccaaggccuacuccaacugcuaccccuacgacguccccgacuacgccucccuccgcucccucgucgccuccuccggcacccucgaguucaacaacgaguccuucaacuggaccggcgucacccagaacggcaccuccuccgccugcauccgccgcuccaacaacuccuucuucucccgccucaacuggcucacccaccucaaguucaaguaccccgcccucaacgucaccaugcccaacaacgagaaguucgacaagcucuacaucuggggcguccaccaccccggcaccgacaacgaccagaucuuccucuacgcccaggccuccggccgcaucaccgucuccaccaagcgcucccagcagaccgucauccccaacaucggcucccgcccccgcguccgcaacauccccucccgcaucuccaucuacuggaccaucgucaagcccggcgacauccuccucaucaacuccaccggcaaccucaucgccccccgcggcuacuucaagauccgcuccggcaaguccuccaucaugcgcuccgacgcccccaucggcaagugcaacuccgagugcaucacccccaacggcuccauccccaacgacaagcccuuccagaacgucaaccgcaucaccuacggcgccugcccccgcuacgucaagcagaacacccucaagcucgccaccggcaugcgcaacguccccgagaagcagacccgcggcaucuucggcgccaucgccggcuucaucgagaacggcugggagggcauggucgacggcugguacggcuuccgccaccagaacuccgagggcaucggccaggccgccgaccucaaguccacccaggccgccaucgaccagaucaacggcaagcucaaccgccucaucggcaagaccaacgagaaguuccaccagaucgagaaggaguucuccgaggucgagggccgcauccaggaccucgagaaguacgucgaggacaccaagaucgaccucugguccuacaacgccgagcuccucgucgcccucgagaaccagcacaccaucgaccucaccgacuccgagaugaacaagcucuucgagaagaccaagaagcagcuccgcgagaacgccgaggacaugggcaacggcugcuucaagaucuaccacaagugcgacaacgccugcaucggcuccauccgcaacggcaccuacgaccacgacgucuaccgcgacgaggcccucaacaaccgcuuccagaucaagggcgucgagcucaaguccggcuacaaggacuggauccucuggaucuccuucgccaucuccugcuuccuccucugcgucgcccuccucggcuucaucaugugggccugccagaagggcaacauccgcugcaacaucugcaucuga

SEQ ID NO: 104133 - RNA, 1701 nt, Artificial Sequence; identical to SEQ ID NO: 97951
  derived and/or modified CDS sequence (opt2) from hemagglutinin__InfluenzaA__AEX36113

SEQ ID NO: 104134 - RNA, 1701 nt, Artificial Sequence; identical to SEQ ID NO: 98470
  derived and/or modified CDS sequence (opt2) from hemagglutinin__InfluenzaA__AEX36124

SEQ ID NO: 104135 - RNA, 1701 nt, Artificial Sequence
  derived and/or modified CDS sequence (opt2) from hemagglutinin__InfluenzaA__AEX36146
augaagaccaucaucgcccucuccuacauccucugccucguccucgcccagaagcuccccggcgacgacaacuccaccgccacccucugccucggccaccacgccguccccaacggcaccaucgucaagaccaucaccaacgaccagaucgaggucaccaacgccaccgagcucguccaguccuccuccaccggcgagaucugcgacuccccccaccagauccucgacggcgagaacugcacccucaucgacgcccuccucggcgacccccagugcgacggcuuccagaacaagaagugggaccucuucgucgagcgcuccaaggccuacuccaacugcuaccccuacgacguccccgacuacgccucccuccgcucccucgucgccuccuccggcacccucgaguucaacaacgaguccuucaacuggaccggcgucacccagaacggcaccuccuccgccugcauccgccgcuccaacaacuccuucuucucccgccucaacuggcucacccaccucaaguucaaguaccccgcccucaacgucaccaugcccaacaacgagcaguucgacaagcucuacaucuggggcguccaccaccccggcaccgacaacgaccagaucuuccucuacgcccaggccuccggccgcaucaccgucuccaccaagcgcucccagcagaccgucauccccaacaucggcucccgcccccgcguccgcaacauccccucccgcaucuccaucuacuggaccaucgucaagcccggcgacauccuccucaucaacuccaccggcaaccucaucgccccccgcggcuacuucaagauccgcuccggcaaguccuccaucaugcgcuccgacgcccccaucggcaagugcaacuccgagugcaucacccccaacggcuccauccccaacgacaagcccuuccagaacgucaaccgcaucaccuacggcgccugcccccgcuacgucaagcagaacacccucaagcucgccaccggcaugcgcaacguccccgagaagcagacccgcggcaucuucggcgccaucgccggcuucaucgagaacggcugggagggcauggucgacggcugguacggcuuccgccaccagaacuccgagggccgcggccaggccgccgaccucaaguccacccaggccgccaucgaccagaucaacggcaagcucaaccgccucaucggcaagaccaacgagaaguuccaccagaucgagaaggaguucuccgaggucgagggccgcauccaggaccucgagaaguacgucgaggacaccaagaucgaccucugguccuacaacgccgagcuccucgucgcccucgagaaccagcacaccaucgaccucaccgacuccgagaugaacaagcucuucgagaagaccaagaagcagcuccgcgagaacgccgaggacaugggcaacggcugcuucaagaucuaccacaagugcgacaacgccugcaucggcuccauccgcaacggcaccuacgaccacgacgucuaccgcgacgaggcccucaacaaccgcuuccagaucaagggcgucgagcucaaguccggcuacaaggacuggauccucuggaucuccuucgccaucuccugcuuccuccucugcgucgcccuccucggcuucaucaugugggccugccagaagggcaacauccgcugcaacaucugcaucuga

SEQ ID NO: 104136 - RNA, 1701 nt, Artificial Sequence
  derived and/or modified CDS sequence (opt2) from hemagglutinin__InfluenzaA__AEX36168
augaagaccaucaucgcccucuccuacauccucugccucgucuucgcccagaagcuccccggcaucgacaacuccaccgccacccucugccucggccaccacgccguccccaacggcaccaucgucaagaccaucaccaacgaccagaucgaggucaccaacgccaccgagcucguccaguccuccuccaccggcggcaucugcgacuccccccaccagauccucgacggcgagaacugcacccucaucgacgcccuccucggcgacccccagugcgacggcuuccagaacaagaagugggaccucuucgucgagcgcuccaaggccuacuccaacugcuaccccuacgacguccccgacuacgccucccuccgcucccucgucgccuccuccggcacccucgaguucaacaacgaguccuucaacugggccggcgucacccagaacggcaccuccuccgccugcaagcgcggcuccgacaacuccuucuucucccgccucaacuggcucacccaccucaaguucaaguaccccgcccucaacgucaccaugcccaacaacgaggaguucgacaagcucuacaucuggggcguccaccaccccggcaccgacaacgaccagaucuuccucuacgcccaggccuccggccgcaucaccgucuccaccaagcgcucccagcagaccgucauccccaacaucggcucccgcccccgcguccgcaacauccccucccgcaucuccaucuacuggaccaucgucaagcccggcgacauccuccucaucaacuccaccggcaaccucaucgccccccgcggcuacuucaagauccgcuccggcaaguccuccaucaugcgcuccgacgcccccaucggcaagugcaacuccgagugcaucacccccaacggcuccauccccaacgacaagcccuuccagaacgucaaccgcaucaccuacggcgccugcccccgcuacgucaagcagaacacccucaagcucgccaccggcaugcgcaacguccccgagaagcagacccgcggcaucuucggcgccaucgccggcuucaucgagaacggcugggagggcauggucgacggcugguacggcuuccgccaccagaacuccgagggcaucggccaggccgccgaccucaaguccacccaggccgccaucgaccagaucaacggcaagcucaacaagcucaucggcaagaccaacgagaaguuccaccagaucgagaaggaguucuccgaggucgagggccgcauccaggaccucgagaaguacgucgaggacaccaagaucgaccucugguccuacaacgccgagcuccucgucgcccucgagaaccagcacaccaucgaccucaccgacuccgagaugaacaagcucuucgagaagaccaagaagcagcuccgcgagaacgccgaggacaugggcaacggcugcuucaagaucuaccacaagugcgacaacgccugcaucggcuccauccgcaacggcaccuacgaccacgacgucuaccgcgacgaggcccucaacaaccgcuucaagaucaagggcgucgagcucaaguccggcuacaaggacuggauccucuggaucuccuucgccaucuccugcuuccuccucugcgucgcccuccucggcuucaucaugugggccugccagaagggcaacaucaagugcaacaucugcaucuga

SEQ ID NO: 104137 - RNA, 1701 nt, Artificial Sequence; identical to SEQ ID NO: 98470
  derived and/or modified CDS sequence (opt2) from hemagglutinin__InfluenzaA__AEX36179

SEQ ID NO: 104138 - RNA, 1701 nt, Artificial Sequence; identical to SEQ ID NO: 104019
  derived and/or modified CDS sequence (opt2) from hemagglutinin__InfluenzaA__AEX36190

SEQ ID NO: 104139 - RNA, 1701 nt, Artificial Sequence; identical to SEQ ID NO: 104014
  derived and/or modified CDS sequence (opt2) from hemagglutinin__InfluenzaA__AEX36201

SEQ ID NO: 104140 - RNA, 1701 nt, Artificial Sequence
  derived and/or modified CDS sequence (opt2) from hemagglutinin__InfluenzaA__AEX36212
augaagaccaucaucgcccucuccuacauccucugccucgucuucgcccagaagcuccccggcaucgacaacuccaccgccacccucugccucggccaccacgccguccccaacggcaccaucgucaagaccaucaccaacgaccagaucgaggucaccaacgccaccgagcucguccagaacuccuccaccggcggcaucugcgacuccccccaccagauccucgacggcgagaacugcacccucaucgacgcccuccucggcgacccccagugcgacggcuuccagaacaagaagugggaccucuucgucgagcgcuccaaggccuacuccaacugcuaccccuacgacguccccgacuacgccucccuccgcucccucgucgccuccuccggcacccucgaguucaacaacgaguccuucaacuggaccggcgucacccagaacggcaccuccuccgccugcaagcgcggcuccaacaacuccuucuucucccgccucaacuggcucacccacuccaaguucaaguaccccgcccucaacgucaccaugcccaacaacgaggaguucgacaagcucuacaucuggggcguccaccaccccggcaccgacaacgaccagaucuuccucuacgcccaggccuccggccgcaucaccgucuccaccaagaucucccagcagaccgucauccccaacaucggcucccgcccccgcguccgcaacauccccucccgcaucuccaucuacuggaccaucgucaagcccggcgacauccuccucaucaacuccaccggcaaccucaucgccccccgcggcuacuucaagauccgcuccggcaaguccuccaucaugcgcuccgacgcccccaucggcaagugcaacuccgagugcaucacccccaacggcuccauccccaacgacaagcccuuccagaacgucaaccgcaucaccuacggcgccugcccccgcuacgucaagcagaacacccucaagcucgccaccggcaugcgcaacguccccgagaagcagacccgcggcaucuucggcgccaucgccggcuucaucgagaacggcugggagggcauggucgacggcugguacggcuuccgccaccagaacuccgagggcaucggccaggccgccgaccucaaguccacccaggccgccaucgaccagaucaacggcaagcucaaccgccucaucggcaagaccaacgagaaguuccaccagaucgagaaggaguucuccgaggucgagggccgcauccaggaccucgagaaguacgucgaggacaccaagaucgaccucugguccuacaacgccgagcuccucgucgcccucgagaaccagcacaccaucgaccucaccgacuccgagaugaacaagcucuucgagaagaccaagaagcagcuccgcgagaacgccgaggacaugggcaacggcugcuucaagaucuaccacaagugcgacaacgccugcaucggcuccauccgcaacggcaccuacgaccacgacgucuaccgcgacgaggcccucaacaaccgcuuccagaucaagggcgucgagcucaaguccggcuacaaggacuggauccucuggaucuccuucgccaucuccugcuuccuccucugcgucgcccuccucggcuucaucaugugggccugccagaagggcaacauccgcugcaacaucugcaucuga

SEQ ID NO: 104141 - RNA, 1701 nt, Artificial Sequence; identical to SEQ ID NO: 104014
  derived and/or modified CDS sequence (opt2) from hemagglutinin__InfluenzaA__AEX36223

SEQ ID NO: 104142 - RNA, 1701 nt, Artificial Sequence
  derived and/or modified CDS sequence (opt2) from hemagglutinin__InfluenzaA__AEX36234
augaagaccaucaucgcccucuccuacauccucugccucgucuucgcccagaagcuccccggcaacgacaacuccaccgccacccucugccucggccaccacgccguccccaacggcaccaucgucaagaccaucaccaacgaccagaucgaggucaccaacgccaccgagcucguccaguccuccuccaccggcggcaucugcgacuccccccaccagauccucgacggcgagaacugcacccucaucgacgcccuccucggcgacccccagugcgacggcuuccagaacaagaagugggaccucuucgucgagcgcuccaaggccuacuccaacugcuaccccuacgacguccccgacuacgccucccuccgcucccucgucgccuccuccggcacccucgaguucaacaacgaguccuucaacuggaccggcgucacccagaacggcaccuccuccgccugcaagcgcggcuccgacaacuccuucuucuccaagcucaacuggcucacccaccucaaguucaaguaccccgcccucaacgucaccaugcccaacaacgagaaguucgacaagcucuacaucuggggcguccaccaccccggcaccgacaacgaccagaucuuccucuacgcccaggccuccggccgcaucaccgucuccaccaagcgcucccagcagaccgucauccccaacaucggcucccgcccccgcguccgcaacauccccucccgcaucuccaucuacuggaccaucgucaagcccggcgacauccuccucaucaacuccaccggcaaccucaucgccccccgcggcuacuucaagauccgcuccggcaaguccuccaucaugcgcuccgacgcccccaucggcaagugcaacuccgagugcaucacccccaacggcuccauccccaacgacaagcccuuccagaacgucaaccgcaucaccuacggcgccugcccccgcuacgucaagcagaacacccucaagcucgccaccggcaugcgcaacguccccgagaagcagacccgcggcaucuucggcgccaucgccggcuucaucgagaacggcugggagggcauggucgacggcugguacggcuuccgccaccagaacuccgagggcaucggccaggccgccgaccucaaguccacccaggccgccaucaaccagaucaacggcaagcucaaccgccucaucggcaagaccaacgagaaguuccaccagaucgagaaggaguucuccgaggucgagggccgcauccaggaccucgagaaguacgucgaggacaccaagaucgaccucugguccuacaacgccgagcuccucgucgcccucgagaaccagcacaccaucgaccucaccgacuccgagaugaacaagcucuucgagcgcaccaagaagcagcuccgcgagaacgccgaggacaugggcaacggcugccucaagaucuaccacaagugcgacaacgccugcaucggcuccauccgcaacggcaccuacgaccacgacgucuaccgcgacgaggcccucaacaaccgcuuccagaucaagggcgucgagcucaaguccggcuacaaggacuggauccucuggaucuccuucgccaucuccugcuuccuccucugcgucgcccuccucggcuucaucaugugggccugccagaagggcaacauccgcugcaacaucugcaucuga

SEQ ID NO: 104143 - RNA, 1701 nt, Artificial Sequence
  derived and/or modified CDS sequence (opt2) from hemagglutinin__InfluenzaA__AEX36245
augaagaccaucaucgcccucuccuacauccucugccucgucuucgcccagaagcuccccggcaucgacaacuccaccgccacccucugccucggccaccacgccguccccaacggcaccaucgucaagaccaucaccaacgaccagaucgaggucaccaacgccaccgagcucguccagaacuccuccaccggcggcaucugcgacuccccccaccagauccucgacggcgagaacugcacccucaucgacgcccuccucggcgacccccagugcgacggcuuccagaacaagaagugggaccucuucgucgagcgcuccaagaccuacuccaacugcuaccccuacgacguccccgacuacgccucccuccgcucccucgucgccuccuccggcacccucgaguucaacaacgaguccuucaacuggaccggcgucacccagaacggcaccuccuccgccugcaagcgcggcuccaacaacuccuucuucucccgccucaacuggcucacccacuccaaguucaaguaccccgcccucaacgucaccaugcccaacaacgaggaguucgacaagcucuacaucuggggcguccaccaccccggcaccgacaacgaccagaucuuccucuacgcccaggccuccggccgcaucaccgucuccaccaagcgcucccagcagaccgucauccccaacaucggcucccgcccccgcguccgcaacauccccucccgcaucuccaucuacuggaccaucgucaagcccggcgacauccuccucaucaacuccaccggcaaccucaucgccccccgcggcuacuucaagauccgcuccggcaaguccuccaucaugcgcuccgacgcccccaucggcaagugcaacuccgagugcaucacccccaacggcuccauccccaacgacaagcccuuccagaacgucaaccgcaucaccuacggcgccugcccccgcuacgucaagcagaacacccucaagcucgccaccggcaugcgcaacguccccgagaagcagacccgcggcaucuucggcgccaucgccggcuucaucgagaacggcugggagggcauggucgacggcugguacggcuuccgccaccagaacuccgagggcaucggccaggccgccgaccucaaguccacccaggccgccaucgaccagaucaacggcaagcucaaccgccucaucggcaagaccaacgagaaguuccaccagaucgagaaggaguucuccgaggucgagggccgcauccaggaccucgagaaguacgucgaggacaccaagaucgaccucugguccuacaacgccgagcuccucgucgcccucgagaaccagcacaccaucgaccucaccgacuccgagaugaacaagcucuucgagaagaccaagaagcagcuccgcgagaacgccgaggacaugggcaacggcugcuucaagaucuaccacaagugcgacaacgccugcaucggcuccauccgcaacggcaccuacgaccacgacgucuaccgcgacgaggcccucaacaaccgcuuccagaucaagggcgucgagcucaaguccggcuacaaggacuggauccucuggaucuccuucgccaucuccugcuuccuccucugcgucgcccuccucggcuucaucaugugggccugccagaagggcaacauccgcugcaacaucugcaucuga

SEQ ID NO: 104144 - RNA, 1701 nt, Artificial Sequence
  derived and/or modified CDS sequence (opt2) from hemagglutinin__InfluenzaA__AEX36256
augaagaccaucaucgcccucuccuacauccucugccucgucuucacccagaagcuccccggcaacgacaacuccaccgccacccucugccucggccaccacgccguccccaacggcaccaucgucaagaccaucaccaacgaccagaucgaggucaccaacgccaccgagcucguccaguccuccuccaccggcgagaucugcgacuccccccaccagauccucgacggcgagaacugcacccucaucgacgcccuccucggcgacccccagugcgacggcuuccagaacaagaagugggaccucuucgucgagcgcuccaaggccuacuccaacugcuaccccuacgacguccccgacuacgccucccuccgcucccucgucgccuccuccggcacccucgaguucaacaacgaguccuucaacuggaccggcgucacccagaacggcaccuccuccgccugcauccgcaaguccaacaacuccuucuucucccgccucaacuggcucacccaccucaaguucaaguaccccgcccucaacgucaccaugcccaacaacgagcaguucgacaagcucuacaucuggggcguccaccaccccggcaccgacaacgaccagaucuuccucuacgcccaggccuccggccgcaucaccgucuccaccaagcgcucccagcagaccgucauccccaacaucggcucccgcccccgcguccgcaacauccccucccgcaucuccaucuacuggaccaucgucaagcccggcgacauccuccucaucaacuccaccggcaaccucaucgccccccgcggcuacuucaagauccgcuccggcaaguccuccaucaugcgcuccgacgcccccaucggcaagugcaacuccgagugcaucacccccaacggcuccauccccaacgacaagcccuuccagaacgucaaccgcaucaccuacggcgccugcccccgcuacgucaagcagaacacccucaagcucgccaccggcaugcgcaacguccccgagaagcagacccgcggcaucuucggcgccaucgccggcuucaucgagaacggcugggagggcauggucgacggcugguacggcuuccgccaccagaacuccgagggccgcggccaggccgccgaccucaaguccacccaggccgccaucgaccagaucaacggcaagcucaaccgccucaucggcaagaccaacgagaaguuccaccagaucgagaaggaguucuccgaggucgagggccgcauccaggaccucgagaaguacgucgaggacaccaagaucgaccucugguccuacaacgccgagcuccucgucgcccucgagaaccagcacaccaucgaccucaccgacuccgagaugaacaagcucuucgagaagaccaagaagcagcuccgcgagaacgccgaggacaugggcaacggcugcuucaagaucuaccacaagugcgacaacgccugcaucggcuccauccgcaacggcaccuacgaccacgacgucuaccgcgacgaggcccucaacaaccgcuuccagaucaagggcgucgagcucaaguccggcuacaaggacuggauccucuggaucuccuucgccaucuccugcuuccuccucugcgucgcccuccucggcuucaucaugugggccugccagaagggcaacauccgcugcaacaucugcaucuga

SEQ ID NO: 104145 - RNA, 1701 nt, Artificial Sequence; identical to SEQ ID NO: 104014
  derived and/or modified CDS sequence (opt2) from hemagglutinin__InfluenzaA__AEX36267

SEQ ID NO: 104146 - RNA, 1701 nt, Artificial Sequence
  derived and/or modified CDS sequence (opt2) from hemagglutinin__InfluenzaA__AEX36289
augaagaccaucaucgcccucuccuacauccucugccucgucuucgcccagaagcuccccggcaucgacaacuccaccgccacccucugccucggccaccacgccguccccaacggcaccaucgucaagaccaucaccaacgaccagaucgaggucaccaacgccaccgagcucguccagaacuccuccaccggcggcaucugcgacuccccccaccagauccucgacggcgagaacugcacccucaucgacgcccuccucggcgacccccagugcgacggcuuccagaacaagaagugggaccucuucgucgagcgcuccaaggccuacuccaacugcuaccccuacgacguccccgacuacgccucccuccgcucccucgucgccuccuccggcacccucgaguucaacaacgaguccuucaacuggaccggcgucacccagaacggcaccuccuccgccugcaagcgcggcuccaacaacuccuucuucucccgccucaacuggcucacccacuccaaguucaaguaccccgcccucaacgucaccaugcccaacaacgaggaguucgacaagcucuacaucuggggcguccaccaccccggcaccgacaacgaccagaucuuccucuacgcccaggccuccggccgcaucaccgucuccaccaagaucucccagcagaccgucauccccaacaucggcucccgcccccgcguccgcaacauccccucccgcaucuccaucuacuggaccaucgucaagcccggcgacauccuccucaucaacuccaccggcaaccucaucgccccccgcggcuacuucaagauccgcuccggcaaguccuccaucaugcgcuccgacgcccccaucggcaagugcaacuccgagugcaucacccccaacggcuccauccccaacgacaagcccuuccagaacgucaaccgcaucaccuacggcgccugcccccgcuacgucaagcagaacacccucaagcucgccaccggcaugcgcaacguccccgagaagcagacccgcggcaucuucggcgccaucgccggcuucaucgagaacggcugggagggcauggucgacggcugguacggcuaccgccaccagaacuccgagggcaucggccaggccgccgaccucaaguccacccaggccgccaucgaccagaucaacggcaagcucaaccgccucaucggcaagaccaacgagaaguuccaccagaucgagaaggaguucuccgaggucgagggccgcauccaggaccucgagaaguacgucgaggacaccaagaucgaccucugguccuacaacgccgagcuccucgucgcccucgagaaccagcacaccaucgaccucaccgacuccgagaugaacaagcucuucgagaagaccaagaagcagcuccgcgagaacgccgaggacaugggcaacggcugcuucaagaucuaccacaagugcgacaacgccugcaucggcuccauccgcaacggcaccuacgaccacgacgucuaccgcgacgaggcccucaacaaccgcuuccagaucaagggcgucgagcucaagcucggcuacaaggacuggauccucuggaucuccuucgccaucuccugcuuccuccucugcgucgcccuccucggcuucaucaugugggccugccagaagggcaacauccgcugcaacaucugcaucuga

SEQ ID NO: 104147 - RNA, 1701 nt, Artificial Sequence
  derived and/or modified CDS sequence (opt2) from hemagglutinin__InfluenzaA__AEX36300
augaagaccaucaucgcccucuccuacauccucugccucgucuucgcccagaagcuccccggcaucgacaacuccaccgccacccucugccucggccaccacgccguccccaacggcaccaucgucaagaccaucaccaacgaccagaucgaggucaccaacgccaccgagcucguccagaacuccuccaccggcggcaucugcgacuccccccaccagauccucgacggcgagaacugcacccucaucgacgcccuccucggcgacccccagugcgacggcuuccagaacaagaagugggaccucuucgucgagcgcuccaaggccuacuccaacugcuaccccuacgacguccccgacuacgccucccuccgcucccucgucgccuccuccggcacccucgaguucuccaacgaguccuucaacuggaccggcgucacccagaacggcaccuccuccgccugcaagcgcggcuccaacaacuccuucuucuccaagcucaacuggcucacccacuccaaguucaaguaccccgcccucaacgucaccaugcccaacaacgaggaguucgacaagcucuacaucuggggcguccaccaccccggcaccgacaacgaccagaucuuccucuacgcccaggccuccggccgcaucaccgucuccaccaagcgcucccagcagaccgucauccccaacaucggcucccgcccccgcguccgcaacauccccucccgcaucuccaucuacuggaccaucgucaagcccggcgacauccuccucaucaacuccaccggcaaccucaucgccccccgcggcuacuucaagauccgcuccggcaaguccuccaucaugcgcuccgacgcccccaucggcaagugcaacuccgagugcaucacccccaacggcuccauccccaacgacaagcccuuccagaacgucaaccgcaucaccuacggcgccugcccccgcuacgucaagcagaacacccucaagcucgccaccggcaugcgcaacguccccgagaagcagacccgcggcaucuucggcgccaucgccggcuucaucgagaacggcugggagggcauggucgacggcugguacggcuuccgccaccagaacuccgagggcaucggccaggccgccgaccucaaguccacccaggccgccaucgaccagaucaacggcaagcucaaccgccucaucggcaagaccaacgagaaguuccaccagaucgagaaggaguucuccgaggucgagggccgcauccaggaccucgagaaguacgucgaggacaccaagaucgaccucugguccuacaacgccgagcuccucgucgcccucgagaaccagcacaccaucgaccucaccgacuccgagaugaacaagcucuucgagaagaccaagaagcagcuccgcgagaacgccgaggacaugggcaacggcugcuucaagaucuaccacaagugcgacaacgccugcaucggcuccauccgcaacggcaccuacgaccacgacgucuaccgcgacgaggcccucaacaaccgcuuccagaucaagggcgucgagcucaaguccggcuacaaggacuggauccucuggaucuccuucgccaucuccugcuuccuccucugcgucgcccuccucggcuucaucaugugggccugccagaagggcaacauccgcugcaacaucugcaucuga

SEQ ID NO: 104148 - RNA, 1701 nt, Artificial Sequence
  derived and/or modified CDS sequence (opt2) from hemagglutinin__InfluenzaA__AEX36311
augaagaccaucaucgcccucuccuacauccucugccucgucuucgcccagaagcuccccggcaucgacaacuccaccgccacccucugccucggccaccacgccguccccaacggcaccaucgucaagaccaucaccaacgaccagaucgaggucaccaacgccaccgagcucguccaguccuccuccaccggcggcaucugcgacuccccccaccagauccucgacggcgagaacugcacccucaucgacgcccuccucggcgacccccagugcgacggcuuccagaacaagaagugggaccucuucgucgagcgcuccaaggccuacuccaacugcuaccccuacgacguccccgacuacgccucccuccgcucccucgucgccuccuccggcacccucgaguucaacaacgaguccuucaacugggccggcgucacccagaacggcaccuccuccgccugcaagcgcggcuccaacaacuccuucuucucccgccucaacuggcucacccaccucaaguucaaguaccccgcccucaacgucaccaugcccaacaacgaggaguucgacaagcucuacaucuggggcguccaccaccccggcaccgacaacgaccagaucuuccucuacgcccaggccuccggccgcaucaccgucuccaccaagcgcucccagcagaccgucauccccaacaucggcucccgcccccgcguccgcaacauccccucccgcaucuccaucuacuggaccaucgucaagcccggcgacauccuccucaucaacuccaccggcaaccucaucgccccccgcggcuacuucaagauccgcuccggcaaguccuccaucaugcgcuccgacgcccccaucggcaagugcaacuccgagugcaucacccccaacggcuccauccccaacgacaagcccuuccagaacgucaaccgcaucaccuacggcgccugcccccgcuacgucaagcagaacacccucaagcucgccaccggcaugcgcaacguccccgagaagcagacccgcggcaucuucggcgccaucgccggcuucaucgagaacggcugggagggcauggucgacggcugguacggcuuccgccaccagaacuccgagggcaucggccaggccgccgaccucaaguccacccaggccgccaucgaccagaucaacggcaagcucaaccgccucaucggcaagaccaacgagaaguuccaccagaucgagaaggaguucuccgaggucgagggccgcauccaggaccucgagaaguacgucgaggacaccaagaucgaccucugguccuacaacgccgagcuccucgucgcccucgagaaccagcacaccaucgaccucaccgacuccgagaugaacaagcucuucgagaagaccaagaagcagcuccgcgagaacgccgaggacaugggcaacggcugcuucaagaucuaccacaagugcgacaacgccugcaucggcuccauccgcaacggcaccuacgaccacgacgucuaccgcgacgaggcccucaacaaccgcuuccagaucaagggcgucgagcucaaguccggcuacaaggacuggauccucuggaucuccuucgccaucuccugcuuccuccucugcgucgcccuccucggcuucaucaugugggccugccagaagggcaacauccgcugcaacaucugcaucuga

SEQ ID NO: 104149 - RNA, 1701 nt, Artificial Sequence
  derived and/or modified CDS sequence (opt2) from hemagglutinin__InfluenzaA__AEX36322
augaagaccaucaucgcccucuccuacauccucugccucgucuucgcccagaagcuccccggcaucgacaacuccaccgccacccucugccucggccaccacgccguccccaacggcaccaucgucaagaccaucaccaacgaccagaucgaggucaccaacgccaccgagcucguccagaacuccuccaccggcggcaucugcgacuccccccaccagauccucgacggcgagaacugcacccucaucgacgcccuccucggcgacccccagugcgacggcuuccagaacaagaagugggaccucuucgucgagcgcuccaaggccuacuccaacugcuaccccuacgacguccccgacuacgccucccuccgcucccucgucgccuccuccggcacccucgaguucaacaacgaguccuucaacuggaccggcgucacccagaacggcaccuccuccgccugcaagcgcggcuccaacaacuccuucuucucccgccucaacuggcucacccacuccaaguucaaguaccccgcccucaacgucaccaugcccaacaacgaggaguucgacaagcucuacaucuggggcguccaccaccccggcaccgacaacgaccagaucuuccccuacgcccaggccuccggccgcaucaccgucuccaccaagaucucccagcagaccgucauccccaacaucggcucccgcccccgcguccgcaacauccccucccgcaucuccaucuacuggaccaucgucaagcccggcgacauccuccucaucaacuccaccggcaaccucaucgccccccgcggcuacuucaagauccgcuccggcaaguccuccaucaugcgcuccgacgcccccaucggcaagugcaacuccgagugcaucacccccaacggcuccauccccaacgacaagcccuuccagaacgucaaccgcaucaccuacggcgccugcccccgcuacgucaagcagaacacccucaagcucgccaccggcaugcgcaacguccccgagaagcagacccgcggcaucuucggcgccaucgccggcuucaucgagaacggcugggagggcauggucgacggcugguacggcuuccgccaccagaacuccgagggcaucggccaggccgccgaccucaaguccacccaggccgccaucgaccagaucaacggcaagcucaaccgccucaucggcaagaccaacgagaaguuccaccagaucgagaaggaguucuccgaggucgagggccgcauccaggaccucgagaaguacgucgaggacaccaagaucgaccucugguccuacaacgccgagcuccucgucgcccucgagaaccagcacaccaucgaccucaccgacuccgagaugaacaagcucuucgagaagaccaagaagcagcuccgcgagaacgccgaggacaugggcaacggcugcuucaagaucuaccacaagugcgacaacgccugcaucggcuccauccgcaacggcaccuacgaccacgacgucuaccgcgacgaggcccucaacaaccgcuuccagaucaagggcgucgagcucaaguccggcuacaaggacuggauccucuggaucuccuucgccaucuccugcuuccuccucugcaucgcccuccucggcuucaucaugugggccugccagaagggcaacauccgcugcaacaucugcaucuga

SEQ ID NO: 104150 - RNA, 1701 nt, Artificial Sequence
  derived and/or modified CDS sequence (opt2) from hemagglutinin__InfluenzaA__AEX36333
augaagaccaucaucgcccucuccuacauccucugccucgucuucgcccagaagcuccccggcaucgacaacuccaccgccacccucugccucggccaccacgccguccccaacggcaccaucgucaagaccaucaccaacgaccagaucgaggucaccaacgccaccgagcucguccagaacuccuccaccggcggcaucugcgacuccccccaccagauccucgacggcgagaacugcacccucaucgacgcccuccucggcgacccccagugcgacggcuuccagaacaagaagugggaccucuucgucgagcgcuccaaggccuacuccaacugcuaccccuacgacguccccgacuacgccucccuccgcucccucgucgccuccuccggcacccucgaguucaacaacgaguccuucaacuggaccggcgucacccagaacggcaccuccuccgccugcaagcgcggcuccaacaacuccuucuucucccgccucaacuggcucacccacuccaaguucaaguaccccgcccucaacgucaccaugcccaacaacgaggaguucgacaagcucuacaucuggggcguccaccaccccggcaccgacaacgaccagaucuuccucuacgcccaggccuccggccgcaucaccgucuccaccaagcgcucccagcagaccgucauccccaacaucggcucccgcccccgcguccgcaacauccccucccgcaucuccaucuacuggaccaucgucaagcccggcgacauccuccucaucaacuccaccggcaaccucaucgccccccgcggcuacuucaagauccgcuccggcaaguccuccaucaugcgcuccgacgcccccaucggcaagugcaacuccgagugcaucacccccaacggcuccauccccaacgacaagcccuuccagaacgucaaccgcaucaccuacggcgccugcccccgcuacgucaagcagaacacccucaagcucgccaccggcaugcgcaacguccccgagaagcagacccgcggcaucuucggcgccaucgccggcuucaucgagaacggcugggagggcauggucgacggcugguacggcuuccgccaccagaacuccgagggcaucggccaggccgccgaccucaaguccacccaggccgccaucgaccagaucaacggcaagcucaaccgccucaucggcaagaccaacgagaaguuccaccagaucgagaaggaguucuccgaggucgagggccgcauccaggaccucgagaaguacgucgaggacaccaagaucgaccucugguccuacaacgccgagcuccucgucgcccucgagaaccagcacaccaucgaccucaccgacuccgagaugaacaagcucuucgagaagaccaagaagcagcuccgcgagaacgccgaggacaugggcaacggcugcuucaagaucuaccacaagugcgacaacgccugcaucggcuccauccgcaacggcaccuacgaccacgacgccuaccgcgacgaggcccucaacaaccgcuuccagaucaagggcgucgagcucaaguccggcuacaaggacuggauccucuggaucuccuucgccaucuccugcuuccuccucugcgucgcccuccucggcuucaucaugugggccugccagaagggcaacauccgcugcaacaucugcaucuga

SEQ ID NO: 104151 - RNA, 1701 nt, Artificial Sequence
  derived and/or modified CDS sequence (opt2) from hemagglutinin__InfluenzaA__AEX36344
augaagaccaucaucgcccucuccuacauccucugccucgucuucgcccagaagcuccccggcaucgacaacuccaccgccacccucugccucggccaccacgccguccccaacggcaccaucgucaagaccaucaccaacgaccagaucgaggucaccaacgccaccgagcucguccaguccuccuccaccggcggcaucugcgacuccccccaccagauccucgacggcgagaacugcacccucaucgacgcccuccucggcgacccccagugcgacggcuuccagaacaagaagugggaccucuucgucgagcgcuccaacgccuacuccaacugcuaccccuacgacguccccgacuacgccucccuccgcucccucgucgccuccuccggcacccucgaguucaacaacgaguccuucaacugggccggcgucacccagaacggcaccuccuccgccugcaagcgcggcuccaacaacuccuucuucucccgccucaacuggcucacccaccucaaguucaaguaccccgcccucaacgucaccaugcccaacaacgaggaguucgacaagcucuacaucuggggcguccaccaccccggcaccgacaacgaccagaucuuccucuacgcccaggccuccggccgcaucaccgucuccaccaagcgcucccagcagaccgucauccccaacaucggcucccgcccccgcguccgcaacauccccucccgcaucuccaucuacuggaccaucgucaagcccggcgacauccuccucaucaacuccaccggcaaccucaucgccccccgcggcuacuucaagauccgcuccggcaaguccuccaucaugcgcuccgacgcccccaucggcaagugcaacuccgagugcaucacccccaacggcuccauccccaacgacaagcccuuccagaacgucaaccgcaucaccuacggcgccugcccccgcuacgucaagcagaacacccucaagcucgccaccggcaugcgcaacguccccgagaagcagacccgcggcaucuucggcgccaucgccggcuucaucgagaacggcugggagggcauggucgacggcugguacggcuuccgccaccagaacuccgagggcaucggccaggccgccgaccucaaguccacccaggccgccaucgaccagaucaacggcaagcucaaccgccucaucggcaagaccaacgagaaguuccaccagaucgagaaggaguucuccgaggucgagggccgcauccaggaccucgagaaguacgucgaggacaccaagaucgaccucugguccuacaacgccgagcuccucgucgcccucgagaaccagcacaccaucgaccucaccgacuccgagaugaacaagcucuucgagaagaccaagaagcagcuccgcgagaacgccgaggacaugggcaacggcugcuucaagaucuaccacaagugcgacaacgccugcaucgaguccauccgcaacggcaccuacgaccacgacgucuaccgcgacgaggcccucaacaaccgcuuccagaucaagggcgucgagcucaaguccggcuacaaggacuggauccucuggaucuccuucgccaucuccugcuuccuccucugcgucgcccuccucggcuucaucaugugggccugccagaagggcaacauccgcugcaacaucugcaucuga

SEQ ID NO: 104152 - RNA, 1701 nt, Artificial Sequence
  derived and/or modified CDS sequence (opt2) from hemagglutinin__InfluenzaA__AEX36366
augaagaccaucaucgcccucuccuacauccucugccucgucuucgcccagaagcucuccggcaacgacaacuccaccgccacccucugccucggccaccacgccguccccaacggcaccaucgucaagaccaucaccaacgaccagaucgaggucaccaacgccaccgagcucguccaguccuccuccaccggcgagaucugcgacuccccccaccagauccucgacggcgagaacugcacccucaucgacgcccuccucggcgacccccagugcgacggcuuccagaacaagaagugggaccucuucgucgagcgcuccaaggccuacuccaacugcuaccccuacgacguccccgacuacgccucccuccgcucccucgucgccuccuccggcacccucgaguucaacaacgaguccuucaacuggaccggcgucacccagaacggcaccuccuccgccugcauccgccgcuccaacaacuccuucuucucccgccucaacuggcucacccaccucaaguucaaguaccccgcccucaacgucaccaugcccaacaacgagaaguucgacaagcucuacaucuggggcguccaccaccccggcaccgacaacgaccagaucuuccucuacgcccaggccuccggccgcaucaccgucuccaccaagcgcucccagcagaccgucauccccaacaucggcucccgcccccgcguccgcaacauccccucccgcaucuccaucuacuggaccaucgucaagcccggcgacauccuccucaucaacuccaccggcaaccucaucgccccccgcggcuacuucaagauccgcuccggcaaguccuccaucaugcgcuccgacgcccccaucggcaagugcaacuccgagugcaucacccccaacggcuccauccccaacgacaagcccuuccagaacgucaaccgcaucaccuacggcgccugcccccgcuacgucaagcagaacacccucaagcucgccaccggcaugcgcaacguccccgagaagcagacccgcggcaucuucggcgccaucgccggcuucaucgagaacggcugggagggcauggucgacggcugguacggcuuccgccaccagaacuccgagggcaucggccaggccgccgaccucaaguccacccaggccgccaucgaccagaucaacggcaagcucaaccgccucaucggcaagaccaacgagaaguuccaccagaucgagaaggaguucuccgaggucgagggccgcauccaggaccucgagaaguacgucgaggacaccaagaucgaccucugguccuacaacgccgagcuccucgucgcccucgagaaccagcacaccaucgaccucaccgacuccgagaugaacaagcucuucgagaagaccaagaagcagcuccgcgagaacgccgaggacaugggcaacggcugcuucaagaucuaccacaagugcgacaacgccugcaucggcuccauccgcaacggcaccuacgaccacgacgucuaccgcgacgaggcccucaacaaccgcuuccagaucaagggcgucgagcucaaguccggcuacaaggacuggauccucuggaucuccuucgccaucuccugcuuccuccucugcgucgcccuccucggcuucaucaugugggccugccagaagggcaacauccgcugcaacaucugcaucuga

SEQ ID NO: 104153 - RNA, 1701 nt, Artificial Sequence; identical to SEQ ID NO: 97964
  derived and/or modified CDS sequence (opt2) from hemagglutinin__InfluenzaA__AEX36377

SEQ ID NO: 104154 - RNA, 1701 nt, Artificial Sequence
  derived and/or modified CDS sequence (opt2) from hemagglutinin__InfluenzaA__AEX36388
augaagaccaucaucgcccucuccuacauccucugccucgucuucgcccagaagcuccccggcaacgacaacuccaccgccacccucugccucggccaccacgccguccccaacggcaccaucgucaagaccaucaccaacgaccagaucgaggucaccaacgccaccgagcucguccaguccuccuccaccggcgagaucugcgacuccccccaccagauccucgacggcgagaacugcacccucaucgacgcccuccucggcgacccccagugcgacggcuuccagaacaagaagugggaccucuucgucgagcgcuccaaggccuacuccaacugcuaccccuacgacguccccgacuacgccucccuccgcucccucgucgccuccuccggcacccucgaguucaacaacgaguccuucaacuggaccggcgucacccagaacggcaccuccuccgccugcauccgccgcuccaacaacuccuucuucucccgccucaacuggcucacccaccucaaguucaaguaccccgcccucaacgucaccaugcccaacaacgagaaguucgacaagcucuacaucuggggcguccaccaccccggcaccgacaacgaccagaucuuccucuacgcccaggccuccggccgcaucaccgucuccaccaagcgcucccagcagaccgucauccccaacaucggcucccgcccccgcguccgcaacauccccucccgcaucuccaucuacuggaccaucgucaagcccggcgacauccuccucaucaacuccaccggcaaccucaucgccccccgcggcuacuucaagauccgcuccggcaaguccuccaucaugcgcuccgacgcccccaucggcaagugcaacuccgagugcaucacccccaacggcuccauccccaacgacaagcccuuccagaacgucaaccgcaucaccuacggcgccugcccccgcuacgucaagcagaacacccucaagcucgccaccggcaugcgcaacguccccgagaagcagacccgcggcaucuucggcgccaucgccggcuucaucgagaacggcugggagggcaugauggacggcugguacggcuuccgccaccagaacuccgagggcaucggccaggccgccgaccucaaguccacccaggccgccaucgaccagaucaacggcaagcucaaccgccucaucggcaagaccaacgagaaguuccaccagaucgagaaggaguucuccgaggucgagggccgcauccaggaccucgagaaguacgucgaggacaccaagaucgaccucugguccuacaacgccgagcuccucgucgcccucgagaaccagcacaccaucgaccucaccgacuccgagaugaacaagcucuucgagaagaccaagaagcagcuccgcgagaacgccgaggacaugggcaacggcugcuucaagaucuaccacaagugcgacaacgccugcaucggcuccauccgcaacggcaccuacgaccacgacgucuaccgcgacgaggcccucaacaaccgcuuccagaucaagggcgucgagcucaaguccggcuacaaggacuggauccucuggaucuccuucgccaucuccugcuuccuccucugcgucgcccuccucggcuucaucaugugggccugccagaagggcaacauccgcugcaacaucugcaucuga

SEQ ID NO: 104155 - RNA, 1701 nt, Artificial Sequence
  derived and/or modified CDS sequence (opt2) from hemagglutinin__InfluenzaA__AEX36399
augaagaccaucaucgcccucuccuacauccucugccucgucuucgcccagaagcuccccggcaacgacaacuccaccgccacccucugccucggccaccacgccguccccaacggcaccaucgucaagaccaucaccaacgaccagaccgaggucaccaacgccaccgagcucguccaguccuccuccaccggcgagaucugcgacuccccccaccagauccucgacggcgagaacugcacccucaucgacgcccuccucggcgacccccagugcgacggcuuccagaacaagaagugggaccucuucgucgagcgcuccaaggccuacuccaacugcuaccccuacgacguccccgacuacgccucccuccgcucccucgucgccuccuccggcacccucgaguucaacaacgaguccuucaacuggaccggcgucacccagaacggcaccuccuccgccugcauccgccgcuccaacaacuccuucuucucccgccucaacuggcucacccaccucaaguucaaguaccccgcccucaacgucaccaugcccaacaacgagaaguucgacaagcucuacaucuggggcguccaccaccccggcaccgacaacgaccagaucuuccucuacgcccaggccuccggccgcaucaccgucuccaccaagcgcucccagcagaccgucauccccaacaucggcucccgcccccgcguccgcaacauccccucccgcaucuccaucuacuggaccaucgucaagcccggcgacauccuccucaucaacuccaccggcaaccucaucgccccccgcggcuacuucaagauccgcuccggcaaguccuccaucaugcgcuccgacgcccccaucggcaagugcaacuccgagugcaucacccccaacggcuccauccccaacgacaagcccuuccagaacgucaaccgcaucaccuacggcgccugcccccgcuacgucaagcagaacacccucaagcucgccaccggcaugcgcaacguccccgagaagcagacccgcggcaucuucggcgccaucgccggcuucaucgagaacggcugggagggcauggucgacggcugguacggcuuccgccaccagaacuccgagggcaucggccaggccgccgaccucaaguccacccaggccgccaucgaccagaucaacggcaagcucaaccgccucaucggcaagaccaacgagaaguuccaccagaucgagaaggaguucuccgaggucgagggccgcauccaggaccucgagaaguacgucgaggacaccaagaucgaccucugguccuacaacgccgagcuccucgucgcccucgagaaccagcacaccaucgaccucaccgacuccgagaugaacaagcucuucgagaagaccaagaagcagcuccgcgagaacgccgaggacaugggcaacggcugcuucaagaucuaccacaagugcgacaacgccugcaucggcuccauccgcaacggcaccuacgaccacgacgucuaccgcgacgaggcccucaacaaccgcuuccagaucaagggcgucgagcucaaguccggcuacaaggacuggauccucuggaucuccuucgccaucuccugcuuccuccucugcgucgcccuccucggcuucaucaugugggccugccagaagggcaacauccgcugcaacaucugcaucuga

SEQ ID NO: 104156 - RNA, 1701 nt, Artificial Sequence
  derived and/or modified CDS sequence (opt2) from hemagglutinin__InfluenzaA__AEX36410
augaagaccaucaucgcccucuccuacauccucugccucgucuucgcccagaagcuccccggcaacgacaacuccaccgccacccucugccucggccaccacgccguccccaacggcaccaucgucaagaccaucaccaacgaccagaucgaggucaccaacgccaccgagcucguccagaacuccuccaccggcgagaucugcgacuccccccaccagauccucgacggcgagaacugcacccucaucgacgcccuccucggcgacccccagugcgacggcuuccagaacaagaagugggaccucuucgucgagcgcuccaaggccuacuccaacugcuaccccuacgacguccccgacuacgccucccuccgcucccucgucgccuccuccggcacccucgaguucaacaacgaguccuucaacuggaccggcgucacccagaacggcaccuccuccgccugcauccgccgcuccaacaacuccuucuucucccgccucaacuggcucacccaccucaaguucaaguaccccgcccucaacgucaccaugcccaacaacgagaaguucgacaagcucuacaucuggggcguccaccaccccggcaccgacaacgaccagaucuuccucuacgcccaggccuccggccgcaucaccgucuccaccaagcgcucccagcagaccgucauccccaacaucggcucccgcccccgcguccgcaacauccccucccgcaucuccaucuacuggaccaucgucaagcccggcgacauccuccucaucaacuccaccggcaaccucaucgccccccgcggcuacuucaagauccgcuccggcaaguccuccaucaugcgcuccgacgcccccaucggcaagugcaacuccgagugcaucacccccaacggcuccauccccaacgacaagcccuuccagaacgucaaccgcaucaccuacggcgccugcccccgcuacgucaagcagaacacccucaagcucgccaccggcaugcgcaacguccccgagaagcagacccgcggcaucuucggcgccaucgccggcuucaucgagaacggcugggagggcauggucgacggcugguacggcuuccgccaccagaacuccgagggcaucggccaggccgccgaccucaaguccacccaggccgccaucgaccagaucaacggcaagcucaaccgccucaucggcaagaccaacgagaaguuccaccagaucgagaaggaguucuccgaggucgagggccgcauccaggaccucgagaaguacgucgaggacaccaagaucgaccucugguccuacaacgccgagcuccucgucgcccucgagaaccagcacaccaucgaccucaccgacuccgagaugaacaagcucuucgagaagaccaagaagcagcuccgcgagaacgccgaggacaugggcaacggcugcuucaagaucuaccacaagugcgacaacgccugcaucggcuccauccgcaacggcaccuacgaccacgacgucuaccgcgacgaggcccucaacaaccgcuuccagaucaagggcgucgagcucaaguccggcuacaaggacuggauccucuggaucuccuucgccaucuccugcuuccuccucugcgucgcccuccucggcuucaucaugugggccugccagaagggcaacauccgcugcaacaucugcaucuga

SEQ ID NO: 104157 - RNA, 1701 nt, Artificial Sequence; identical to SEQ ID NO: 98470
  derived and/or modified CDS sequence (opt2) from hemagglutinin__InfluenzaA__AEX36421

SEQ ID NO: 104158 - RNA, 1701 nt, Artificial Sequence
  derived and/or modified CDS sequence (opt2) from hemagglutinin__InfluenzaA__AEX36432
augaagaccaucaucgcccucuccuacauccucugccucgucuucgcccagaagcuccccggcaacgacaacuccaccgccacccucugccucggccaccacgccguccccaacggcaccaucgucaagaccaucaccaacgaccagaucgaggucaccaacgccaccgagcucguccaguccuccuccaccggcgagaucugcgacuccccccaccagguccucgacggcgagaacugcacccucaucgacgcccuccucggcgacccccagugcgacggcuuccagaacaagaagugggaccucuucgucgagcgcuccaaggccuacuccaacugcuaccccuacgacguccccgacuacgccucccuccgcucccucgucgccuccuccggcacccucgaguucaacaacgaguccuucaacuggaccggcgucacccagaacggcaccuccuccgccugcauccgccgcuccaacaacuccuucuucucccgccucaacuggcucacccaccucaaguucaaguaccccgcccucaacgucaccaugcccaacaacgagcaguucgacaagcucuacaucuggggcguccaccaccccggcaccgacaacgaccagaucuuccucuacgcccaggccuccggccgcaucaccgucuccaccaagcgcucccagcagaccgucauccccaacaucggcucccgcccccgcguccgcaacauccccucccgcaucuccaucuacuggaccaucgucaagcccggcgacauccuccucaucaacuccaccggcaaccucaucgccccccgcggcuacuucaagauccgcuccggcaaguccuccaucaugcgcuccgacgcccccaucggcaagugcaacuccgagugcaucacccccaacggcuccauccccaacgacaagcccuuccagaacgucaaccgcaucaccuacggcgccugcccccgcuacgucaagcagaacacccucaagcucgccaccggcaugcgcaacguccccgagaagcagacccgcggcaucuucggcgccaucgccggcuucaucgagaacggcugggagggcauggucgacggcugguacggcuuccgccaccagaacuccgagggccgcggccaggccgccgaccucaaguccacccaggccgccaucgaccagaucaacggcaagcucaaccgccucaucggcaagaccaacgagaaguuccaccagaucgagaaggaguucuccgaggucgagggccgcauccaggaccucgagaaguacgucgaggacaccaagaucgaccucugguccuacaacgccgagcuccucgucgcccucgagaaccagcacaccaucgaccucaccgacuccgagaugaacaagcucuucgagaagaccaagaagcagcuccgcgagaacgccgaggacaugggcaacggcugcuucaagaucuaccacaagugcgacaacgccugcaucggcuccauccgcaacggcaccuacgaccacgacgucuaccgcgacgaggcccucaacaaccgcuuccagaucaagggcgucgagcucaaguccggcuacaaggacuggauccucuggaucuccuucgccaucuccugcuuccuccucugcgucgcccuccucggcuucaucaugugggccugccagaagggcaacauccgcugcaacaucugcaucuga

SEQ ID NO: 104159 - RNA, 1701 nt, Artificial Sequence
  derived and/or modified CDS sequence (opt2) from hemagglutinin__InfluenzaA__AEX36443
augaagaccaucaucgcccucuccuacauccucugccucgucuucgcccagaagcuccccggcaacgacaacuccaccgccacccucugccucggccaccacgccguccccaacggcaccaucgucaagaccaucaccaacgaccagaucgaggucaccaacgccaccgagcucguccaguccuccuccaccggcgagaucugcaacuccccccaccagauccucgacggcgagaacugcacccucaucgacgcccuccucggcgacccccagugcgacggcuuccagaacaagaagugggaccucuucgucgagcgcuccaaggccuacuccaacugcuaccccuacgacguccccgacuacgccucccuccgcucccucgucgccuccuccggcacccucgaguucaacaacgaguccuucaacuggaccggcgucacccagaacggcaccuccuccgccugcauccgccgcuccaacaacuccuucuucucccgccucaacuggcucacccaccucaaguucaaguaccccgcccucaacgucaccaugcccaacaacgaggaguucgacaagcucuacaucuggggcguccaccaccccggcaccgacaacgaccagaucuuccucuacgcccaggccuccggccgcaucaccgucuccaccaagcgcucccagcagaccgucauccccaacaucggcucccgcccccgcguccgcaacauccccucccgcaucuccaucuacuggaccaucgucaagcccggcgacauccuccucaucaacuccaccggcaaccucaucgccccccgcggcuacuucaagauccgcuccggcaaguccuccaucaugcgcuccgacgcccccaucggcaagugcaacuccgagugcaucacccccaacggcuccauccccaacgacaagcccuuccagaacgucaaccgcaucaccuacggcgccugcccccgcuacgucaagcagaacacccucaagcucgccaccggcaugcgcaacguccccgagaagcagacccgcggcaucuucggcgccaucgccggcuucaucgagaacggcugggagggcauggucgacggcugguacggcuuccgccaccagaacuccgagggcaucggccaggccgccgaccucaaguccacccaggccgccaucgaccagaucaacggcaagcucaaccgccucaucggcaagaccaacgagaaguuccaccagaucgagaaggaguucuccgaggucgagggccgcauccaggaccucgagaaguacgucgaggacaccaagaucgaccucugguccuacaacgccgagcuccucgucgcccucgagaaccagcacaccaucgaccucaccgacuccgagaugaacaagcucuucgagaagaccaagaagcagcuccgcgagaacgccgaggacaugggcaacggcugcuucaagaucuaccacaagugcgacaacgccugcaucggcuccauccgcaacggcaccuacgaccacgacgucuaccgcgacgaggcccucaacaaccgcuuccagaucaagggcgucgagcucaaguccggcuacaaggacuggauccucuggaucuccuucgccaucuccugcuuccuccucugcgucgcccuccucggcuucaucaugugggccugccagaagggcaacauccgcugcaacaucugcaucuga

SEQ ID NO: 104160 - RNA, 1701 nt, Artificial Sequence
  derived and/or modified CDS sequence (opt2) from hemagglutinin__InfluenzaA__AEX36454
augaagaccaucaucgcccucuccuacauccucugccucgucuucgcccagaagcuccccggcaacgacaacuccaccgccacccucugccucggccaccacgccguccccaacggcaccaucgucaagaccaucaccaacgaccagaucgaggucaccaacgccaccgagcucguccaguccuccuccaccggcgagaucugcaacuccccccaccagauccucgacggcgagaacugcacccucaucgacgcccuccucggcgacccccagugcgacggcuuccagaacaagaagugggaccucuucgucgagcgcuccaaggccuacuccaacugcuaccccuacgacguccccgacuacgccucccuccgcucccucgucgccuccuccggcacccucgaguucaacaacgaguccuucaacuggaccggcgucacccagaacggcaccuccuccgccugcauccgccgcuccaacaacuccuucuucucccgccucaacuggcucacccaccucaaguucaaguaccccgcccucaacgucaccaugcccaacaacgaggaguucgacaagcucuacaucuggggcguccaccaccccggcaccgacaacgaccagaucuuccucuacgcccaggccuccggccgcaucaccgucuccaccaagcgcucccagcagaccgucauccccaacaucggcucccgcccccgcguccgcaacauccccucccgcaucuccaucuacuggaccaucgucaagcccggcgacauccuccucaucaacuccaccggcaaccucaucgccccccgcggcuacuucaagauccgcuccggcaaguccuccaucaugcgcuccgacgcccccaucggcaagugcaacuccgagugcaucacccccaacggcuccauccccaacgacaagcccuuccagaacgucaaccgcaucaccuacggcgccugcccccgcuacgucaagcagaacacccucaagcucgccaccggcaugcgcaacguccccgagaagcagacccgcggcaucuucggcgccaucgccggcuucaucgagaacggcugggagggcauggucgacggcugguacggcuuccgccaccagaacuccgagggcaucggccaggccgccgaccucaaguccacccaggccgccaucgaccagaucaacggcaagcucaaccgccucaucggcaagaccaacgagaaguuccaccagaucgagaaggaguucuccgaggucgagggccgcauccaggaccucgagaaguacgucgaggacaccaagaucgaccucugguccuacaacgccgagcuccucgucgcccucgagaaccagcacaccaucgaccucaccgacuccgagaugaacaagcucuucgagaagaccaagaagcagcuccgcgagaacgccgaggacaugggcaacggcugcuucaagaucuaccacaagugcgacaacgccugcaucggcuccauccgcaacggcaccuacgaccacgacgucuaccgcgacgaggcccucaacaaccgcuuccagaucaagggcgucgagcucaaguccggcuacaaggacuggauccucuggaucuccuucgccaucuccugcuuccuccucugcgucguccuccucggcuucaucaugugggccugccagaagggcaacauccgcugcaacaucugcaucuga

SEQ ID NO: 104161 - RNA, 1701 nt, Artificial Sequence; identical to SEQ ID NO: 97765
  derived and/or modified CDS sequence (opt2) from hemagglutinin__InfluenzaA__AEX36465

SEQ ID NO: 104162 - RNA, 1701 nt, Artificial Sequence
  derived and/or modified CDS sequence (opt2) from hemagglutinin__InfluenzaA__AEX36476
augaagaccaucaucgcccucuccuacauccucugccucgucuucgcccagaagcuccccggcaucgacaacuccaccgccacccucugccucggccaccacgccguccccaacggcaccaucgucaagaccaucaccaacgaccagaucgaggucaccaacgccaccgagcucguccaguccuccuccaccggcggcaucugcgacuccccccaccagauccucgacggcgagaacugcacccucaucgacgcccuccucggcgacccccagugcgacggcuuccagaacaagaagugggaccucuucgucgagcgcuccaaggccuacuccaacugcuaccccuacgacguccccgacuacgccucccuccgcucccucgucgccuccuccggcacccucgaguucaacaacgaguccuucaacuggaccggcgucacccagaacggcaccuccuccgccugcaagcgcggcuccaacaacuccuucuucucccgccucaacuggcucacccacuccaaguucaaguaccccgcccucaacgucaccaugcccaacaacgaggaguucgacaagcucuacaucuggggcguccaccaccccggcaccgacaacgaccagaucuuccccuacgcccaggccuccggccgcaucaccgucuccaccaagcgcucccagcagaccgucauccccaacaucggcucccgcccccgcauccgcaacauccccucccgcaucuccaucuacuggaccaucgucaagcccggcgacauccuccucaucaacuccaccggcaaccucaucgccccccgcggcuacuucaagauccgcuccggcaaguccuccaucaugcgcuccgacgcccccaucggcaagugcgacuccgagugcaucacccccaacggcuccauccccaacgacaagcccuuccagaacgucaaccgcaucaccuacggcgccugcccccgcuacgucaagcagaacacccucaagcucgccaccggcaugcgcaacguccccgagaagcagacccgcggcaucuucggcgccaucgccggcuucaucgagaacggcugggagggcauggucgacggcugguacggcuuccgccaccagaacuccgagggcaucggccaggccgccgaccucaaguccacccaggccgccaucgaccagaucaacggcaagcucaaccgccucaucggcaagaccaacgagaaguuccaccagaucgagaaggaguucuccgaggucgagggccgcauccaggaccucgagaaguacgucgaggacaccaagaucgaccucugguccuacaacgccgagcuccucgucgcccucgagaaccagcacaccaucgaccucaccgacuccgagaugaacaagcucuucgagaagaccaagaagcagcuccgcgagaacgccgaggacaugggcaacggcugcuucaagaucuaccacaagugcgacaacgccugcaucggcuccauccgcaacggcaccuacgaccacgacgucuaccgcgacgaggcccucaacaaccgcuuccagaucaagggcgucgagcucaaguccggcuacaaggacuggauccucuggaucuccuucgccaucuccugcuuccuccucugcgucgcccuccucggcuucaucaugugggccugccagaagggcaacauccgcugcaacaucugcaucuga

SEQ ID NO: 104163 - RNA, 1701 nt, Artificial Sequence
  derived and/or modified CDS sequence (opt2) from hemagglutinin__InfluenzaA__AEX36487
augaagaccaucaucgcccucuccuacauccucugccucgucuucgcccagaagcuccccggcaucgacaacuccaccgccacccucugccucggccaccacgccguccccaacggcaccaucgucaagaccaucaccaacgaccagaucgaggucaccaacgccaccgagcucguccaguccuccuccaccggcggcaucugcgacuccccccaccagauccucgacggcgagaacugcacccucaucgacgcccuccucggcgacccccagugcgacggcuuccagaacaagaagugggaccucuucgucgagcgcuccaaggccuacuccaacugcuaccccuacgacguccccgacuacgccucccuccgcucccucgucgccuccuccggcacccucgaguucaacaacgaguccuucaacuggaccggcgucacccagaacggcaccuccuccgccugcaagcgcggcuccaacaacuccuucuucucccgccucaacuggcucacccacuccaaguucaaguaccccgcccucaacgucaccaugcccaacaacgaggaguucgacaagcucuacaucuggggcguccuccaccccggcaccgacaacgaccagaucuuccucuacgcccaggccuccggccgcaucaccgucuccaccaagcgcucccagcagaccgucauccccaacaucggcucccgcccccgcguccgcaacauccccucccgcaucuccaucuacuggaccaucgucaagcccggcgacauccuccucaucaacuccaccggcaaccucaucgccccccgcggcuacuucaagauccgcuccggcaaguccuccaucaugcgcuccgacgcccccaucggcaagugcaacuccgagugcaucacccccaacggcuccauccccaacgacaagcccuuccagaacgucaaccgcaucaccuacggcgccugcccccgcuacgucaagcagaacacccucaagcucgccaccggcaugcgcaacguccccgagaagcagacccgcggcaucuucggcgccaucgccggcuucaucgagaacggcugggagggcauggucgacggcugguacggcuuccgccaccagaacuccgagggcaucggccaggccgccgaccucaaguccacccaggccgccaucgaccagaucaacggcaagcucaaccgccucaucggcaagaccaacgagaaguuccaccagaucgagaaggaguucuccgaggucgagggccgcauccaggaccucgagaaguacgucgaggacaccaagaucgaccucugguccuacaacgccgagcuccucgucgcccucgagaaccagcacaccaucgaccucaccgacuccgagaugaacaagcucuucgagaagaccaagaagcagcuccgcgagaacgccgaggacaugggcaacggcugcuucaagaucuaccacaagugcgacaacgccugcaucggcuccauccgcaacggcaccuacgaccacgacgucuaccgcgacgaggcccucaacaaccgcuuccagaucaagggcgucgagcucaaguccggcuacaaggacuggauccucuggaucuccuucgccaucuccugcuuccuccucugcgucgcccuccucggcuucaucaugugggccugccagaagggcaacauccgcugcaacaucugcaucuga

SEQ ID NO: 104164 - RNA, 1701 nt, Artificial Sequence; identical to SEQ ID NO: 104014
  derived and/or modified CDS sequence (opt2) from hemagglutinin__InfluenzaA__AEX36498

SEQ ID NO: 104165 - RNA, 1701 nt, Artificial Sequence
  derived and/or modified CDS sequence (opt2) from hemagglutinin__InfluenzaA__AEX36509
augaagaccaucaucgcccucuccuacauccucugccucgucuucgcccagaagcuccccggcaucgacaacuccaccgccacccucugccucggccaccacgccguccccaacggcaccaucgucaagaccaucaccaacgaccagaucgaggucaccaacgccaccgagcucguccagaacuccuccaccggcggcaucugcgacuccccccaccagauccucgacggcgagaacugcacccucaucgacgcccuccucggcgacccccagugcgacggcuuccagaacaagaagugggaccucuucgucgagcgcuccaaggccuacuccaacugcuaccccuacgacguccccgacuacgccucccuccgcucccucgucgccuccuccggcacccucgaguucaacaacgaguccuucaacuggaccggcgucacccagaacggcaccuccuccgccugcaagcgcggcuccaacaacuccuucuucucccgccucaacuggcucacccacuccaaguucaaguaccccgcccucaacgucaccaugcccaacaacgaggaguucgacaagcucuacaucuggggcguccaccaccccggcaccgacaacgaccagaucuuccccuacgcccaggccuccggccgcaucaccgucuccaccaagcgcucccagcagaccgucauccccaacaucggcucccgcccccgcguccgcaacauccccucccgcaucuccaucuacuggaccaucgucaagcccggcgacauccuccucaucaacuccaccggcaaccucaucgccccccgcggcuacuucaagauccgcuccggcaaguccuccaucaugcgcuccgacgcccccaucggcaagugcaacuccgagugcaucacccccaacggcuccauccccaacgacaagcccuuccagaacgucaaccgcaucaccuacggcgccugcccccgcuacgucaagcagaacacccucaagcucgccaccggcaugcgcaacguccccgagaagcagacccgcggcaucuucggcgccaucgccggcuucaucgagaacggcugggagggcauggucgacggcugguacggcuuccgccaccagaacuccgagggcaucggccaggccgccgaccucaaguccacccaggccgccaucgaccagaucaacggcaagcucaaccgccucaucggcaagaccaacgagaaguuccaccagaucgagaaggaguucuccgaggucgagggccgcauccaggaccucgagaaguacgucgaggacaccaagaucgaccucugguccuacaacgccgagcuccucgucgcccucgagaaccagcacaccaucgaccucaccgacuccgagaugaacaagcucuucgagaagaccaagaagcagcuccgcgagaacgccgaggacaugggcaacggcugcuucaagaucuaccacaagugcgacaacgccugcaucggcuccauccgcaacggcaccuacgaccacgacgucuaccgcgacgaggcccucaacaaccgcuuccagaucaagggcgucgagcucaaguccggcuacaaggacuggauccucuggaucuccuucgccaucuccugcuuccuccucugcgucgcccuccucggcuucaucaugugggccugccagaagggcaacauccgcugcaacaucugcaucuga

SEQ ID NO: 104166 - RNA, 1701 nt, Artificial Sequence
  derived and/or modified CDS sequence (opt2) from hemagglutinin__InfluenzaA__AEX36520
augaagaccaucaucgcccucuccuacauccucugccucgucuucgcccagaagcuccccggcaacgacaacuccaccgccacccucugccucggccaccacgccguccccaacggcaccaucgucaagaccaucaccaacgaccagaucgaggucaccaacgccaccgagcucguccaguccuccuccaccggcgagaucugcgacuccccccaccagauccucgacggcgagaacugcacccucaucgacgcccuccucggcgacccccagugcgacggcuuccagaacaagaagugggaccucuucgucgagcgcuccaaggccuacuccaacugcuaccccuacgacguccccgacuacgccucccuccgcucccucgucgccuccuccggcacccucgaguucaacaacgaguccuucaacuggaccggcgucacccagaacggcaccuccuccgccugcauccgccgcuccaacaacuccuucuucucccgccucaacuggcucacccaccucaaguucaaguaccccgcccucaacgucaccaugcccaacaacgagcaguucgacaagcucuacaucuggggcguccaccaccccggcaccgacaacgaccagaucuuccucuacgcccaggccuccggccgcaucaccgucuccaccaagcgcucccagcagaccgucauccccaacaucggcucccgcccccgcguccgcaacauccccucccgcaucuccaucuacuggaccaucgucaagcccggcgacauccuccucaucaacuccaccggcaaccucaucgccccccgcggcuacuucaagauccgcuccggcaaguccuccaucaugcgcuccgacgcccccaucggcaagugcaacuccgagugcaucacccccaacggcuccauccccaacgacaagcccuuccagaacgucaaccgcaucaccuacggcgccugcccccgcuacgucaagcagaacacccucaagcucgccaccggcaugcgcaacguccccgagaagcagacccgcggcaucuucggcgccaucgccggcuucaucgagaacggcugggagggcauggucgacggcugguacggcuuccgccaccagaacuccgagggccgcggccaggccgccgaccucaaguccacccaggccgccaucgaccagaucaacggcaagcucaaccgccucaucggcaagaccaacgagaaguuccaccagaucgagaaggaguucuccgaggucgagggccgcauccaggaccucgagaaguacgucgaggacaccaagaucgaccucugguccuacaacgccgagcuccucgucgcccucgagaaccagcacaccaucgaccucaccgacuccgagaugaacaagcucuucgagaagaccaagaagcagcuccgcgagaacgccgaggacaugggcaacggcugcuucaagaucuaccacaagugcgacaacgccugcaucggcuccauccgcaacggcaccuacgaccacaacgucuaccgcgacgaggcccucaacaaccgcuuccagaucaagggcgucgagcucaaguccggcuacaaggacuggauccucuggaucuccuucgccaucuccugcuuccuccucugcgucgcccuccucggcuucaucaugugggccugccagaagggcaacauccgcugcaacaucugcaucuga

SEQ ID NO: 104167 - RNA, 1701 nt, Artificial Sequence
  derived and/or modified CDS sequence (opt2) from hemagglutinin__InfluenzaA__AEX36531
augaagaccaucaucgcccucuccuacauccucugccucgucuucgcccagaagcuccccggcaacgacaacuccaccgccacccucugccucggccaccacgccguccccaacggcaccaucgucaagaccaucaccaacgaccagaucgaggucaccaacgccaccgagcucguccaguccuccuccaccggcgagaucugcgacuccccccaccagauccucgacggcgagaacugcacccucaucgacgcccuccucggcgacccccagugcgacggcuuccagaacaagaagugggaccucuucgucgagcgcuccaaggccuacuccaacugcuaccccuacgacguccccgacuacgccucccuccgcucccucgucgccuccuccggcacccucgaguucaacaacgaguccuucaacuggaccggcgucacccagaacggcaccuccuccgccugcauccgccgcuccaacaacuccuucuucucccgccucaacuggcucacccaccucaaguucaaguaccccgcccucaacgucaccaugcccaacaacgagcaguucgacaagcucuacaucuggggcguccaccaccccggcaccgacaacgaccagaucuuccucuacgcccaggccuccggccgcaucaccgucuccaccaagcgcucccagcagaccgucauccccaacaucggcucccgcccccgcguccgcaacauccccucccgcaucuccaucuacuggaccaucgucaagcccggcgacauccuccucaucaacuccaccggcaaccucaucgccccccgcggcuacuucaagauccgcuccggcaaguccuccaucaugcgcuccgacgcccccaucggcaagugcaacuccgagugcaucacccccaacggcuccauccccaacgacaagcccuuccagaacgucaaccgcaucaccuacggcgccugcccccgcuacgucaagcagaacacccucaagcucgccaccggcaugcgcaacguccccgagaagcagacccgcggcaucuucggcgccaucgccggcuucaucgagaacggcugggagggcauggucgacggcugguacggcuuccgccaccagaacuccgagggccgcggccaggccgccgaccucaaguccacccaggccgccaucgaccagaucaacggcaagcucaaccgccucaucggcaagaccaacgagaaguuccaccagaucgagaaggaguucuccgaggucgagggccgcauccaggaccucgacaaguacgucgaggacaccaagaucgaccucugguccuacaacgccgagcuccucgucgcccucgagaaccagcacaccaucgaccucaccgacuccgagaugaacaagcucuucgagaagaccaagaagcagcuccgcgagaacgccgaggacaugggcaacggcugcuucaagaucuaccacaagugcgacaacgccugcaucggcuccauccgcaacggcaccuacgaccacgacgucuaccgcgacgaggcccucaacaaccgcuuccagaucaagggcgucgagcucaaguccggcuacaaggacuggauccucuggaucuccuucgccaucuccugcuuccuccucugcgucgcccuccucggcuucaucaugugggccugccagaagggcaacauccgcugcaacaucugcaucuga

SEQ ID NO: 104168 - RNA, 1701 nt, Artificial Sequence
  derived and/or modified CDS sequence (opt2) from hemagglutinin__InfluenzaA__AEX36542
augaagaccaucaucgcccucuccuacauccucugccucgucuucgcccagaagcuccccggcaacgacaacuccaccgccacccucugccucggccaccacgccguccccaacggcaccaucgucaagaccaucaccaacgaccagaucgaggucaccaacgccaccgagcucguccagaacuccuccaccggcgagaucugcgacuccccccaccagauccucgacggcgagaacugcacccucaucgacgcccuccucggcgacccccagugcgacggcuuccagaacaagaagugggaccucuucgucgagcgcuccaaggccuacuccaacugcuaccccuacgacguccccgacuacgccucccuccgcucccucgucgccuccuccggcacccucgaguucaacaacgaguccuucaacuggaccggcgucacccagaacggcaccuccuccgccugcauccgccgcuccaacaacuccuucuucucccgccucaacuggcucacccaccucaaguucaaguaccccgcccucaacgucaccaugcccaacaacgagcaguucgacaagcucuacaucuggggcguccaccaccccggcaccgacaacgaccagaucuuccucuacgcccaggccuccggccgcaucaccgucuccaccaagcgcucccagcagaccgucauccccaacaucggcucccgcccccgcguccgcaacauccccucccgcaucuccaucuacuggaccaucgucaagcccggcgacauccuccucaucaacuccaccggcaaccucaucgccccccgcggcuacuucaagauccgcuccggcaaguccuccaucaugcgcuccgacgcccccaucggcaagugcaacuccgagugcaucacccccaacggcuccauccccaacgacaagcccuuccagaacgucaaccgcaucaccuacggcgccugcccccgcuacgucaagcagaacacccucaagcucgccaccggcaugcgcaacguccccgagaagcagacccgcggcaucuucggcgccaucgccggcuucaucgagaacggcugggagggcauggucgacggcugguacggcuuccgccaccagaacuccgagggccgcggccaggccgccgaccucaaguccacccaggccgccaucgaccagaucaacggcaagcucaaccgccucaucggcaagaccaacgagaaguuccaccagaucgagaaggaguucuccgaggucgagggccgcauccaggaccucgagaaguacgucgaggacaccaagaucgaccucugguccuacaacgccgagcuccucgucgcccucgagaaccagcacaccaucgaccucaccgacuccgagaugaacaagcucuucgagaagaccaagaagcagcuccgcgagaacgccgaggacaugggcaacggcugcuucaagaucuaccacaagugcgacaacgccugcaucggcuccauccgcaacggcaccuacgaccacgacgucuaccgcgacgaggcccucaacaaccgcuuccagaucaagggcgucgagcucaaguccggcuacaaggacuggauccucuggaucuccuucgccaucuccugcuuccuccucugcgucgcccuccucggcuucaucaugugggccugccagaagggcaacauccgcugcaacaucugcaucuga

SEQ ID NO: 104169 - RNA, 1701 nt, Artificial Sequence; identical to SEQ ID NO: 104168
  derived and/or modified CDS sequence (opt2) from hemagglutinin__InfluenzaA__AEX36553

SEQ ID NO: 104170 - RNA, 1701 nt, Artificial Sequence; identical to SEQ ID NO: 104168
  derived and/or modified CDS sequence (opt2) from hemagglutinin__InfluenzaA__AEX36564

SEQ ID NO: 104171 - RNA, 1701 nt, Artificial Sequence
  derived and/or modified CDS sequence (opt2) from hemagglutinin__InfluenzaA__AEX36575
augaagaccaucaucgcccucuccuacauccucugccucgucuucgcccagaagcuccccggcaacggcaacuccaccgccacccucugccucggccaccacgccguccccaacggcaccaucgucaagaccaucaccaacgaccagaucgaggucaccaacgccaccgagcucguccaguccuccuccaccggcgagaucugcgacuccccccaccagauccucgacggcgagaacugcacccucaucgacgcccuccucggcgacccccagugcgacggcuuccagaacaagaagugggaccucuucgucgagcgcuccaaggccuacuccaacugcuaccccuacgacguccccgacuacgccucccuccgcucccucgucgccuccuccggcacccucgaguucaacaacgaguccuucaacuggaccggcgucacccagaacggcaccuccuccgccugcauccgccgcuccaacaacuccuucuucucccgccucaacuggcucacccaccucaaguucaaguaccccgcccucaacgucaccaugcccaacaacgagcaguucgacaagcucuacaucuggggcguccaccaccccggcaccgacaacgaccagaucuuccucuacgcccaggccuccggccgcaucaccgucuccaccaagcgcucccagcagaccgucauccccaacaucggcucccgcccccgcguccgcaacauccccucccgcaucuccaucuacuggaccaucgucaagcccggcgacauccuccucaucaacuccaccggcaaccucaucgccccccgcggcuacuucaagauccgcuccggcaaguccuccaucaugcgcuccgacgcccccaucggcaagugcaacuccgagugcaucacccccaacggcuccauccccaacgacaagcccuuccagaacgucaaccgcaucaccuacggcgccugcccccgcuacgucaagcagaacacccucaagcucgccaccggcaugcgcaacguccccgagaagcagacccgcggcaucuucggcgccaucgccggcuucaucgagaacggcugggagggcauggucgacggcugguacggcuuccgccaccagaacuccgagggccgcggccaggccgccgaccucaaguccacccaggccgccaucgaccagaucaacggcaagcucaaccgccucaucggcaagaccaacgagaaguuccaccagaucgagaaggaguucuccgaggucgagggccgcauccaggaccucgagaaguacgucgaggacaccaagaucgacaucugguccuacaacgccgagcuccucgucgcccucgagaaccagcacaccaucgaccucaccgacuccgagaugaacaagcucuucgagaagaccaagaagcagcuccgcgagaacgccgaggacaugggcaacggcugcuucaagaucuaccacaagugcgacaacgccugcaucggcuccauccgcaacggcaccuacgaccacgacgucuaccgcgacgaggcccucaacaaccgcuuccagaucaagggcgucgagcucaaguccggcuacaaggacuggauccucuggaucuccuucgccaucuccugcuuccuccucugcgucgcccuccucggcuucaucaugugggccugccagaagggcaacauccgcugcaacaucugcaucuga

SEQ ID NO: 104172 - RNA, 1701 nt, Artificial Sequence
  derived and/or modified CDS sequence (opt2) from hemagglutinin__InfluenzaA__AEX36586
augaagaccaucaucgcccucuccuacauccucugccucgucuucgcccagaagcuccccggcaacgacaacaacaccgccacccucugccucggccaccacgccguccccaacggcaccaucgucaagaccaucaccaacgaccagaucgaggucaccaacgccaccgagcucguccaguccuccuccaccggcgagaucugcgacuccccccaccagauccucgacggcgagaacugcacccucaucgacgcccuccucggcgacccccagugcgacggcuuccagaacaagaagugggaccucuucgucgagcgcuccaaggccuacuccaacugcuaccccuacgacguccccgacuacgccucccuccgcucccucgucgccuccuccggcacccucgaguucaacaacgaguccuucaacuggaccggcgucacccagaacggcaccuccuccgccugcauccgccgcuccaacaacuccuucuucucccgccucaacuggcucacccaccucaaguucaaguaccccgcccucaacgucaccaugcccaacaacgagcaguucgacaagcucuacaucuggggcguccaccaccccggcaccgacaacgaccagaucuuccucuacgcccaggccuccggccgcaucaccgucuccaccaagcgcucccagcagaccgucauccccaacaucggcucccgcccccgcguccgcaacauccccucccgcaucuccaucuacuggaccaucgucaagcccggcgacauccuccucaucaacuccaccggcaaccucaucgccccccgcggcuacuucaagauccgcuccggcaaguccuccaucaugcgcuccgacgcccccaucggcaagugcaacuccgagugcaucacccccaacggcuccauccccaacgacaagcccuuccagaacgucaaccgcaucaccuacggcgccugcccccgcuacgucaagcagaacacccucaagcucgccaccggcaugcgcaacguccccgagaagcagacccgcggcaucuucggcgccaucgccggcuucaucgagaacggcugggagggcauggucgacggcugguacggcuuccgccaccagaacuccgagggccgcggccaggccgccgaccucaaguccacccaggccgccaucgaccagaucaacggcaagcucaaccgccucaucggcaagaccaacgagaaguuccaccagaucgagaaggaguucuccgaggucgagggccgcauccaggaccucgagaaguacgucgaggacaccaagaucgaccucugguccuacaacgccgagcuccucgucgcccucgagaaccagcacaccaucgaccucaccgacuccgagaugaacaagcucuucgagaagaccaagaagcagcuccgcgagaacgccgaggacaugggcaacggcugcuucaagaucuaccacaagugcgacaacgccugcaucggcuccauccgcaacggcaccuacgaccacgacgucuaccgcgacgaggcccucaacaaccgcuuccagaucaagggcgucgagcucaaguccggcuacaaggacuggauccucuggaucuccuucgccaucuccugcuuccuccucugcgucgcccuccucggcuucaucaugugggccugccagaagggcaacauccgcugcaacaucugcaucuga

SEQ ID NO: 104173 - RNA, 1701 nt, Artificial Sequence
  derived and/or modified CDS sequence (opt2) from hemagglutinin__InfluenzaA__AEX36597
augaagaccaucaucgcccucuccuacauccucugccucgucuucgcccagaagcuccccggcaacgacaacuccauggccacccucugccucggccaccacgccguccccaacggcaccaucgucaagaccaucaccaacgaccagaucgaggucaccaacgccaccgagcucguccaguccuccuccaccggcgagaucugcgacuccccccaccagauccucgacggcgagaacugcacccucaucgacgcccuccucggcgacccccagugcgacggcuuccagaacaagaagugggaccucuucgucgagcgcuccaaggccuacuccaacugcuaccccuacgacguccccgacuacgccucccuccgcucccucgucgccuccuccggcacccucgaguucaacaacgaguccuucaacuggaccggcgucacccagaacggcaccuccuccgccugcauccgccgcuccaacaacuccuucuucucccgccucaacuggcucacccaccucaaguucaaguaccccgcccucaacgucaccaugcccaacaacgagcaguucgacaagcucuacaucuggggcguccaccaccccggcaccgacaacgaccagaucuuccucuacgcccaggccuccggccgcaucaccgucuccaccaagcgcucccagcagaccgucauccccaacaucggcucccgcccccgcguccgcaacauccccucccgcaucuccaucuacuggaccaucgucaagcccggcgacauccuccucaucaacuccaccggcaaccucaucgccccccgcggcuacuucaagauccgcuccggcaaguccuccaucaugcgcuccgacgcccccaucggcaagugcaacuccgagugcaucacccccaacggcuccauccccaacgacaagcccuuccagaacgucaaccgcaucaccuacggcgccugcccccgcuacgucaagcagaacacccucaagcucgccaccggcaugcgcaacguccccgagaagcagacccgcggcaucuucggcgccaucgccggcuucaucgagaacggcugggagggcauggucgacggcugguacggcuuccgccaccagaacuccgagggccgcggccaggccgccgaccucaaguccacccaggccgccaucgaccagaucaacggcaagcucaaccgccucaucggcaagaccaacgagaaguuccaccagaucgagaaggaguucuccgaggucgagggccgcauccaggaccucgagaaguacgucgaggacaccaaggucgaccucugguccuacaacgccgagcuccucgucgcccucgagaaccagcacaccaucgaccucaccgacuccgagaugaacaagcucuucgagaagaccaagaagcagcuccgcgagaacgccgaggacaugggcaacggcugcuucaagaucuaccacaagugcgacaacgccugcaucggcuccauccgcaacggcaccuacgaccacgacgucuaccgcgacgaggcccucaacaaccgcuuccagaucaagggcgucgagcucaaguccggcuacaaggacuggauccucuggaucuccuucgccaucuccugcuuccuccucugcgucgcccuccucggcuucaucaugugggccugccagaagggcaacauccgcugcaacaucugcaucuga

SEQ ID NO: 104174 - RNA, 1701 nt, Artificial Sequence
  derived and/or modified CDS sequence (opt2) from hemagglutinin__InfluenzaA__AEX36608
augaagaccaucaucgcccucuccuacauccucugccucgucuucgcccagaagcuccccggcaacgacaacuccaccgccacccucugccucggccaccacgccguccccaacggcaccaucgucaagaccaucaccaacgaccagaucgaggucaccaacgccaccgagcucguccaguccuccuccaccggcggcaucugcgacuccccccaccagauccucgacggcgagaacugcacccucaucgacgcccuccucggcgacccccagugcgacggcuuccagaacaagaagugggaccucuucgucgagcgcuccaaggccuacuccaacugcuaccccuacgacguccccgacuacgccucccuccgcucccucgucgccuccuccggcacccucgaguucaacaacgagaacuucaacuggaccggcgucacccagaacggcaccuccuccgccugcaagcgccgcuccaacaacuccuucuucucccgccucaacuggcucacccaccucaaguucaaguaccccgcccucaacgucaccaugcccaacaacgagaaguucgacaagcucuacaucuggggcguccaccaccccggcaccgacaacgaccagaucuuccucuacgcccaggccuccggccgcaucaccgucuccaccaagcgcucccagcagaccgucauccccaacaucggcucccgcccccgcguccgcaacauccccucccgcaucuccaucuacuggaccaucgucaagcccggcgacauccuccucaucaacuccaccggcaaccucaucgccccccgcggcuacuucaagauccgcuccggcaaguccuccaucaugcgcuccgacgcccccaucggcaagugcaacuccgagugcaucacccccaacggcuccauccccaacgacaagcccuuccagaacgucaaccgcaucaccuacggcgccugcccccgcuacgucaagcagaacacccucaagcucgccaccggcaugcgcaacguccccgagaagcagacccgcggcaucuucggcgccaucgccggcuucaucgagaacggcugggagggcauggucgacggcugguacggcuuccgccaccagaacuccgagggcaucggccaggccgccgaccucaaguccacccaggccgccaucaaccagaucaacggcaagcucaaccgccucaucggcaagaccaacgagaaguuccaccagaucgagaaggaguucuccgaggucgagggccgcauccaggaccucgagaaguacgucgaggacaccaagaucgaccucugguccuacaacgccgagcuccucgucgcccucgagaaccagcacaccaucgaccucaccgacuccgagaugaacaagcucuucgagcgcaccaagaagcagcuccgcgagaacgccgaggacaugggcaacggcugcuucaagaucuaccacaagugcgacaacgccugcaucggcuccauccgcaacggcaccuacgaccacgacgucuaccgcgacgaggcccucaacaagcgcuuccagaucaagggcgucgagcucaaguccggcuacaaggacuggauccucuggaucuccuucgccaucuccugcuuccuccucugcgucgcccuccucggcuucaucaugugggccugccagaagggcaacauccgcugcaacaucugcaucuga

SEQ ID NO: 104175 - RNA, 1701 nt, Artificial Sequence; identical to SEQ ID NO: 103997
  derived and/or modified CDS sequence (opt2) from hemagglutinin__InfluenzaA__AEX36619

SEQ ID NO: 104176 - RNA, 1701 nt, Artificial Sequence
  derived and/or modified CDS sequence (opt2) from hemagglutinin__InfluenzaA__AEX63617
auggaggccaagcucuucguccucuucugcgccuucaccgcccucaaggccgacaccaucugcgucggcuaccacgccaacaacuccaccgacaccgucgacaccauccucgagaagaacgucaccgucacccacuccgucaaccuccucgagaacucccacaacggcaagcucugcucccucaacggcaagaucccccuccagcucggcaacugcaacgucgccggcuggauccucggcaaccccaagugcgaccuccuccucaccgccaacuccugguccuacaucaucgagaccuccaacuccaagaacggcgccugcuaccccggcgaguucgccgacuacgaggagcucaaggagcagcucuccaccgucuccuccuucgagcgcuucgagaucuuccccaaggccaccuccuggcccaaccacgacaccacccgcggcaccaccgucgccugcucccacuccggcgccaacuccuucuaccgcaaccuccucuggaucgucaagaagggcaacuccuaccccaagcucuccaaguccuacaccaacaacaagggcaaggagguccucgucaucuggggcguccaccacccccccaccgacuccguccagcagacccucuaccagaacaaccacaccuacgucuccgucggcuccuccaaguacuacaagcgcuucacccccgagaucgucgcccgccccaagguccgcgagcaggccggccgcaugaacuacuacuggacccuccucgaccagggcgacaccaucaccuucgaggccaccggcaaccucaucgcccccuggcacgccuucgcccucaagaagggcuccuccuccggcaucaugcgcuccgacgcccagguccacaacugcaccaccaagugccagaccccccacggcgcccucaagggcaaccuccccuuccagaacguccaccccgucaccaucggcgagugccccaaguacgucaaguccacccagcuccgcauggccaccggccuccgcaacauccccuccauccagucccgcggccucuucggcgccaucgccggcuucaucgagggcggcuggaccggcauggucgacggcugguacggcuaccaccaccgcaacgagcagggcuccggcuacgccgccgaccagaaguccacccagaucgccaucgacggcaucuccaacaaggucaacuccgucaucgagaagaugaacauccaguucaccuccgucggcaaggaguucaacucccucgagaagcgcauggagaaccucaacaagaaggucgacgacggcuuccucgacgucuggaccuacaacgccgagcuccucauccuccucgagaacgagcgcacccucgacuuccacgaccucaacgucaagaaccucuacgagaaggucaagucccagcuccgcaacaacgccaaggagaucggcaacggcugcuucgaguucuaccacaagugcgacaacgagugcauggaguccgucaagaacggcaccuacaacuaccucaaguacuccgaggaguccaagcucaaccgcgaggagaucgacggcgucaagcucgaguccaugggcauccaccagauccucgccaucuacuccaccgucgccuccucccucguccuccucgucucccucggcgccaucuccuucuggaugugcuccaacggcucccuccagugccgcgucugcaucuga

SEQ ID NO: 104177 - RNA, 1698 nt, Artificial Sequence; identical to SEQ ID NO: 99314
  derived and/or modified CDS sequence (opt2) from hemagglutinin__InfluenzaA__AEX92873

SEQ ID NO: 104178 - RNA, 1701 nt, Artificial Sequence; identical to SEQ ID NO: 99869
  derived and/or modified CDS sequence (opt2) from hemagglutinin__InfluenzaA__AEY69088

SEQ ID NO: 104179 - RNA, 1701 nt, Artificial Sequence; identical to SEQ ID NO: 99466
  derived and/or modified CDS sequence (opt2) from hemagglutinin__InfluenzaA__AEY69098

SEQ ID NO: 104180 - RNA, 1701 nt, Artificial Sequence; identical to SEQ ID NO: 99447
  derived and/or modified CDS sequence (opt2) from hemagglutinin__InfluenzaA__AEY69120

SEQ ID NO: 104181 - RNA, 1701 nt, Artificial Sequence; identical to SEQ ID NO: 99649
  derived and/or modified CDS sequence (opt2) from hemagglutinin__InfluenzaA__AEY69131

SEQ ID NO: 104182 - RNA, 1701 nt, Artificial Sequence; identical to SEQ ID NO: 103024
  derived and/or modified CDS sequence (opt2) from hemagglutinin__InfluenzaA__AEY69153

SEQ ID NO: 104183 - RNA, 1701 nt, Artificial Sequence; identical to SEQ ID NO: 99649
  derived and/or modified CDS sequence (opt2) from hemagglutinin__InfluenzaA__AEY69164

SEQ ID NO: 104184 - RNA, 1701 nt, Artificial Sequence; identical to SEQ ID NO: 99649
  derived and/or modified CDS sequence (opt2) from hemagglutinin__InfluenzaA__AEY69175

SEQ ID NO: 104185 - RNA, 1701 nt, Artificial Sequence; identical to SEQ ID NO: 99649
  derived and/or modified CDS sequence (opt2) from hemagglutinin__InfluenzaA__AEY69186

SEQ ID NO: 104186 - RNA, 1701 nt, Artificial Sequence; identical to SEQ ID NO: 99649
  derived and/or modified CDS sequence (opt2) from hemagglutinin__InfluenzaA__AEY69197

SEQ ID NO: 104187 - RNA, 1701 nt, Artificial Sequence; identical to SEQ ID NO: 99649
  derived and/or modified CDS sequence (opt2) from hemagglutinin__InfluenzaA__AEY69208

SEQ ID NO: 104188 - RNA, 1701 nt, Artificial Sequence; identical to SEQ ID NO: 99649
  derived and/or modified CDS sequence (opt2) from hemagglutinin__InfluenzaA__AEY69219

SEQ ID NO: 104189 - RNA, 1701 nt, Artificial Sequence; identical to SEQ ID NO: 99447
  derived and/or modified CDS sequence (opt2) from hemagglutinin__InfluenzaA__AEY69258

SEQ ID NO: 104190 - RNA, 1701 nt, Artificial Sequence; identical to SEQ ID NO: 99649
  derived and/or modified CDS sequence (opt2) from hemagglutinin__InfluenzaA__AEY69269

SEQ ID NO: 104191 - RNA, 1701 nt, Artificial Sequence; identical to SEQ ID NO: 99447
  derived and/or modified CDS sequence (opt2) from hemagglutinin__InfluenzaA__AEY69291

SEQ ID NO: 104192 - RNA, 1701 nt, Artificial Sequence; identical to SEQ ID NO: 99447
  derived and/or modified CDS sequence (opt2) from hemagglutinin__InfluenzaA__AEY69302

SEQ ID NO: 104193 - RNA, 1701 nt, Artificial Sequence; identical to SEQ ID NO: 99447
  derived and/or modified CDS sequence (opt2) from hemagglutinin__InfluenzaA__AEY69313

SEQ ID NO: 104194 - RNA, 1701 nt, Artificial Sequence; identical to SEQ ID NO: 99447
  derived and/or modified CDS sequence (opt2) from hemagglutinin__InfluenzaA__AEY69785

SEQ ID NO: 104195 - RNA, 1701 nt, Artificial Sequence
  derived and/or modified CDS sequence (opt2) from hemagglutinin__InfluenzaA__AEY69807
augaagaccaucaucgcccucuccuacauccucugccucgucuucgcccagaagcuccccggcaacgacaacuccaccgccacccucugccucggccaccacgccguccccaacggcaccaucgucaagaccaucaccaacgaccagaucgaggucaccaacgccaccgagcucguccaguccuccuccaccggcgagaucugcgacuccccccaccagauccucgacggcaagaacugcacccucaucgacgcccuccucggcgacccccagugcgacggccuccagaacaagaagugggaccucuucgucgagcgcuccaaggccuacuccaacugcuaccccuacgacguccccgacuacgccucccuccgcucccucgucgccuccuccggcacccucgaguucaacaacgaguccuucaacuggaccggcgucacccagaacggcaccuccuccgccugcauccgccgcuccaagaacuccuucuucucccgccucaacuggcucacccaccucaacuucaaguaccccgcccucaacgucaccaugcccaacaacgagcaguucgacaagcucuacaucuggggcguccaccaccccggcaccgacaaggaccagaucuuccucuacgcccaggccuccggccgcaucaccgucuccaccaagcgcucccagcagaccgccauccccaacaucggcucccgcccccgcguccgcaacauccccucccgcaucuccaucuacuggaccaucgucaagcccggcgacauccuccucaucaacuccaccggcaaccucaucgccccccgcggcuacuucaagcuccgcuccggcaaguccuccaucaugcgcuccgacgcccccaucggcaagugcaacuccgagugcaucacccccaacggcuccauccccaacgacaagcccuuccagaacgucaaccgcaucaccuacggcgccugcccccgcuacgucaagcagaacacccucaagcucgccaccggcaugcgcaacguccccgagaagcagacccgcggcaucuucggcgccaucgccggcuucaucgagaacggcugggagggcauggucgacggcugguacggcuuccgccaccagaacuccgagggccgcggccaggccgccgaccucaaguccacccaggccgccaucgaccagaucaacggcaagcucaaccgccucaucggcaagaccaacgagaaguuccaccagaucgagaaggaguucuccgaggucgagggccgcauccaggaccucgagaaguacgucgaggacaccaagaucgaccucugguccuacaacgccgagcuccucgucgcccucgagaaccagcacaccaucgaccucaccgacuccgagaugaacaagcucuucgagaagaccaagaagcagcuccgcgagaacgccgaggacaugggcaacggcugcuucaagaucuaccacaagugcgacaacgccugcaucggcuccauccgcaacggcaccuacgaccacgacgucuaccgcgacgaggcccucaacaaccgcuuccagaucaagggcgucgagcucaaguccggcuacaaggacuggauccucuggaucuccuucgccaucuccugcuuccuccucugcgucgcccuccucggcuucaucaugugggccugccagaagggcaacauccgcugcaacaucugcaucuga

SEQ ID NO: 104196 - RNA, 1701 nt, Artificial Sequence; identical to SEQ ID NO: 99649
  derived and/or modified CDS sequence (opt2) from hemagglutinin__InfluenzaA__AEY69818

SEQ ID NO: 104197 - RNA, 1701 nt, Artificial Sequence; identical to SEQ ID NO: 99649
  derived and/or modified CDS sequence (opt2) from hemagglutinin__InfluenzaA__AEY69829

SEQ ID NO: 104198 - RNA, 1701 nt, Artificial Sequence; identical to SEQ ID NO: 99649
  derived and/or modified CDS sequence (opt2) from hemagglutinin__InfluenzaA__AEY69840

SEQ ID NO: 104199 - RNA, 1701 nt, Artificial Sequence; identical to SEQ ID NO: 99649
  derived and/or modified CDS sequence (opt2) from hemagglutinin__InfluenzaA__AEY69851

SEQ ID NO: 104200 - RNA, 1701 nt, Artificial Sequence; identical to SEQ ID NO: 99649
  derived and/or modified CDS sequence (opt2) from hemagglutinin__InfluenzaA__AEY69873

SEQ ID NO: 104201 - RNA, 1701 nt, Artificial Sequence; identical to SEQ ID NO: 99649
  derived and/or modified CDS sequence (opt2) from hemagglutinin__InfluenzaA__AEY69884

SEQ ID NO: 104202 - RNA, 1701 nt, Artificial Sequence; identical to SEQ ID NO: 99649
  derived and/or modified CDS sequence (opt2) from hemagglutinin__InfluenzaA__AEY69895

SEQ ID NO: 104203 - RNA, 1701 nt, Artificial Sequence; identical to SEQ ID NO: 103024
  derived and/or modified CDS sequence (opt2) from hemagglutinin__InfluenzaA__AEY69906

SEQ ID NO: 104204 - RNA, 1701 nt, Artificial Sequence; identical to SEQ ID NO: 99649
  derived and/or modified CDS sequence (opt2) from hemagglutinin__InfluenzaA__AEY69917

SEQ ID NO: 104205 - RNA, 1701 nt, Artificial Sequence
  derived and/or modified CDS sequence (opt2) from hemagglutinin__InfluenzaA__AEY69939
augaagaccaucaucgcccucuccuacauccucugccucgucuucgcccagaagauccccggcaacgacaacuccaccgccacccucugccucggccaccacgccguccccaacggcaccaucgucaagaccaucaccaacgaccagaucgaggucaccaacgccaccgagcucguccaguccuccuccaccggcgagaucugcgacuccccccaccagauccucgacggcaagaacugcacccucaucgacgcccuccucggcgacccccagugcgacggcuuccagaacaagaagugggaccucuucgucgagcgcuccaaggccuacuccaacugcuaccccuacgacguccccgacuacgccucccuccgcucccucgucgccuccuccggcacccucgaguucaacaacgaguccuucaacuggaccggcgucacccagaacggcaccuccuccgccugcauccgccgcuccaagaacuccuucuucucccgccucaacuggcucacccaccucaacuucaaguaccccgcccucaacgucaccaugcccaacaacgagcaguucgacaagcucuacaucuggggcguccaccaccccggcaccgacaaggaccagaucuuccucuacgcccaggccuccggccgcaucaccgucuccaccaagcgcucccagcagaccgccauccccaacaucggcucccgcccccgcguccgcaacauccccucccgcaucuccaucuacuggaccaucgucaagcccggcgacauccuccucaucaacuccaccggcaaccucaucgccccccgcggcuacuucaagauccgcuccggcaaguccuccaucaugcgcuccgacgcccccaucggcaagugcaacuccggcugcaucacccccaacggcuccauccccaacgacaagcccuuccagaacgucaaccgcaucaccuacggcgucugcccccgcuacgucaagcagaacacccucaagcucgccaccggcaugcgcaacguccccgagaagcagacccgcggcaucuucggcgccaucgccggcuucaucgagaacggcugggagggcauggucgacggcugguacggcuuccgccaccagaacuccgagggccgcggccaggccgccgaccucaaguccacccaggccgccaucgaccagaucaacggcaagcucaaccgccucaucggcaagaccaacgagaaguuccaccagaucgagaaggaguucuccgaggucgagggccgcauccaggaccucgagaaguacgucgaggacaccaagaucgaccucugguccuacaacgccgagcuccucgucgcccucgagaaccagcacaccaucgaccucaccgacuccgagaugaacaagcucuucgagaagaccaagaagcagcuccgcgagaacgccgaggacaugggcaacggcugcuucaagaucuaccacaagugcgacaacgccugcaucggcuccauccgcaacggcaccuacgaccacgacgucuaccgcgacgaggcccucaacaaccgcuuccagaucaagggcgucgagcucaaguccggcuacaaggacugguuccucuggaucuccuucgccaucuccugcuuccuccucugcgucgcccuccucggcuucaucaugugggccugccagaagggcaacauccgcugcaacaucugcaucuga

SEQ ID NO: 104206 - RNA, 1701 nt, Artificial Sequence; identical to SEQ ID NO: 104205
  derived and/or modified CDS sequence (opt2) from hemagglutinin__InfluenzaA__AEY69950

SEQ ID NO: 104207 - RNA, 1701 nt, Artificial Sequence; identical to SEQ ID NO: 104205
  derived and/or modified CDS sequence (opt2) from hemagglutinin__InfluenzaA__AEY69961

SEQ ID NO: 104208 - RNA, 1701 nt, Artificial Sequence
  derived and/or modified CDS sequence (opt2) from hemagglutinin__InfluenzaA__AEY69994
augaagaccaucaucgcccucuccuacauccucugccucgucuucgcccagaagauccccggcaacgacaacuccaccgccacccucugccucggccaccacgccguccccaacggcaccaucgucaagaccaucaccaacgaccagaucgaggucaccaacgccaccgagcucguccaguccuccuccaccggcgagaucugcgacuccccccaccagauccucgacggcaagaacugcacccucaucgacgcccuccucggcgacccccagugcgacggcuuccagaacaagaagugggaccucuucgucgagcgcuccaaggccuacuccaacugcuaccccuacgacguccccgacuacgccucccuccgcucccucgucgccuccuccggcacccucgaguucaacaacgaguccuucaacuggaccggcgucacccagaacggcaccuccuccgccugcauccgccgcuccaagaacuccuucuucucccgccucaacuggcucacccaccucaacuucaaguaccccgcccucaacgucaccaugcccaacaacgagcaguucgacaagcucuacaucuggggcguccaccaccccggcaccgacaaggaccagaucuuccucuacgcccaggccuccggccgcaucaccgucuccaccaagcgcucccagcagaccgccauccccaacaucggcucccgcccccgcguccgcaacauccccucccgcaucuccaucuacuggaccaucgucaagcccggcgacauccuccucaucaacuccaccggcaaccucaucgccccccgcggcuacuucaagauccgcuccggcaaguccuccaucaugcgcuccgacgcccccaucggcaagugcaacuccggcugcaucacccccaacggcuccauccccaacgacaagcccuuccagaacgucaaccgcaucaccuacggcgccugcccccgcuacgucaagcagaacacccucaagcucgccaccggcaugcgcaacguccccgagaagcagacccgcggcaucuucggcgccaucgccggcuucaucgagaacggcugggagggcauggucgacggcugguacggcuuccgccaccagaacuccgagggccgcggccaggccgccgaccucaaguccacccaggccgccaucgaccagaucaacggcaagcucaaccgccucaucggcaagaccaacgagaaguuccaccagaucgagaaggaguucuccgaggucgagggccgcauccaggaccucgagaaguacgucgaggacaccaagaucgaccucugguccuacaacgccgagcuccucgucgcccucgagaaccagcacaccaucgaccucaccgacuccgagaugaacaagcucuucgagaagaccaagaagcagcuccgcgagaacgccgaggacaugggcaacggcugcuucaagaucuaccacaagugcgacaacgccugcaucggcuccauccgcaacggcaccuacgaccacgacgucuaccgcgacgaggcccucaacaaccgcuuccagaucaagggcgucgagcucaaguccggcuacaaggacugguuccucuggaucuccuucgccaucuccugcuuccuccucugcgucgcccuccucggcuucaucaugugggccugccagaagggcaacauccgcugcaacaucugcaucuga

SEQ ID NO: 104209 - RNA, 1701 nt, Artificial Sequence; identical to SEQ ID NO: 104208
  derived and/or modified CDS sequence (opt2) from hemagglutinin__InfluenzaA__AEY70005

SEQ ID NO: 104210 - RNA, 1701 nt, Artificial Sequence; identical to SEQ ID NO: 99649
  derived and/or modified CDS sequence (opt2) from hemagglutinin__InfluenzaA__AEY70016

SEQ ID NO: 104211 - RNA, 1701 nt, Artificial Sequence
  derived and/or modified CDS sequence (opt2) from hemagglutinin__InfluenzaA__AEY70256
augaagaccaucaucgcccucuccuacauccucugccucgucuucgcccagaagcuccccggcaacgacaacuccaccgccacccucugccucggccaccacgccguccccaacggcaccaucgucaagaccaucaccaacgaccagaucgaggucaccaacgccaccgagcucguccaguccuccuccaccggcgagaucugcgacuccccccaccagauccucgacggcaagaacugcacccucaucgacgcccuccucggcgacccccagugcgacggcuuccagaacaagaagugggaccucuucgucgagcgcuccaaggccuacggcaacugcuaccccuacgacguccccgacuacgccucccuccgcucccucgucgccuccuccggcacccucgaguucaacaacgaguccuucaacuggaccggcgucacccagaacggcaccuccuccgccugcauccgccgcuccaagaacuccuucuucucccgccucaacuggcucacccaccucaacuucaaguaccccgcccucaacgucaccaugcccaacaacgagcaguucgacaagcucuacaucuggggcguccaccaccccggcaccgacaaggaccagaucuuccucuacgcccaggccuccggccgcaucaccgucuccaccaagcgcucccagcagaccgccauccccaacaucggcucccgcccccgcguccgcaacauccccucccgcaucuccaucuacuggaccaucgucaagcccggcgacaugcuccucaucaacuccaccggcaaccucaucgccccccgcggcuacuucaagauccgcuccggcaaguccuccaucaugcgcuccgacgcccccaucggcaagugcaacuccgagugcaucacccccaacggcuccauccccaacgacaagcccuuccagaacgucaaccgcaucaccuacggcgccugcccccgcuacgucaagcagaacacccucaagcucgccaccggcaugcgcaacguccccgagaagcagacccgcggcaucuucggcgccaucgccggcuucaucgagaacggcugggagggcauggucgacggcugguacggcuuccgccaccagaacuccgagggccgcggccaggccgccgaccucaaguccacccaggccgccaucgaccagaucaacggcaagcucaaccgccucaucggcaagaccaacgagaaguuccaccagaucgagaaggaguucuccgaggucgagggccgcauccaggaccucgagaaguacgucgaggacaccaagaucgaccucugguccuacaacgccgagcuccucgucgcccucgagaaccagcacaccaucgaccucaccgacuccgagaugaacaagcucuucgagaagaccaagaagcagcuccgcgagaacgccgaggacaugggcaacggcugcuucaagaucuaccacaagugcgacaacgccugcaucggcuccauccgcaacggcaccuacgaccacgacgucuaccgcgacgaggcccucaacaaccgcuuccagaucaagggcgucgagcucaaguccggcuacaaggacuggauccucuggaucuccuucgccaucuccugcuuccuccucugcgucgcccuccucggcuucaucaugugggccugccagaagggcaacauccgcugcaacaucugcaucuga

SEQ ID NO: 104212 - RNA, 1701 nt, Artificial Sequence; identical to SEQ ID NO: 99649
  derived and/or modified CDS sequence (opt2) from hemagglutinin__InfluenzaA__AEY70267

SEQ ID NO: 104213 - RNA, 1701 nt, Artificial Sequence; identical to SEQ ID NO: 99649
  derived and/or modified CDS sequence (opt2) from hemagglutinin__InfluenzaA__AEY70278

SEQ ID NO: 104214 - RNA, 1701 nt, Artificial Sequence; identical to SEQ ID NO: 99447
  derived and/or modified CDS sequence (opt2) from hemagglutinin__InfluenzaA__AEY70289

SEQ ID NO: 104215 - RNA, 1701 nt, Artificial Sequence; identical to SEQ ID NO: 99649
  derived and/or modified CDS sequence (opt2) from hemagglutinin__InfluenzaA__AEY70300

SEQ ID NO: 104216 - RNA, 1701 nt, Artificial Sequence; identical to SEQ ID NO: 99649
  derived and/or modified CDS sequence (opt2) from hemagglutinin__InfluenzaA__AEY70311

SEQ ID NO: 104217 - RNA, 1701 nt, Artificial Sequence; identical to SEQ ID NO: 99649
  derived and/or modified CDS sequence (opt2) from hemagglutinin__InfluenzaA__AEY70333

SEQ ID NO: 104218 - RNA, 1701 nt, Artificial Sequence; identical to SEQ ID NO: 104208
  derived and/or modified CDS sequence (opt2) from hemagglutinin__InfluenzaA__AEY70344

SEQ ID NO: 104219 - RNA, 1701 nt, Artificial Sequence; identical to SEQ ID NO: 101260
  derived and/or modified CDS sequence (opt2) from hemagglutinin__InfluenzaA__AEY70355

SEQ ID NO: 104220 - RNA, 1701 nt, Artificial Sequence; identical to SEQ ID NO: 99447
  derived and/or modified CDS sequence (opt2) from hemagglutinin__InfluenzaA__AEY70365

SEQ ID NO: 104221 - RNA, 1701 nt, Artificial Sequence; identical to SEQ ID NO: 99649
  derived and/or modified CDS sequence (opt2) from hemagglutinin__InfluenzaA__AEY70376

SEQ ID NO: 104222 - RNA, 1701 nt, Artificial Sequence
  derived and/or modified CDS sequence (opt2) from hemagglutinin__InfluenzaA__AFB18656
augaaggccauccucgucguccuccucuacaccuucgccaccgccaacgccgacacccucugcaucggcuaccacgccaacaacuccaccgacaccgucgacaccguccucgagaagaacgucaccgucacccacuccgucaaccuccucgaggacaagcacaacggcaagcucugcaagcuccgcggcgucgccccccuccaccucggcaagugcaacaucgccggcuggauccucggcaaccccgagugcgagacccucuccaccgccuccuccugguccuacaucgucgagaccuccuccuccgacaacggcaccugcuaccccggcgacuucaucgacuacgaggagcuccgcgagcagcucuccuccgucuccuccuucgagcgcuucgagaucuuccccaagaccuccuccuggcccaaccacgacuccaacaagggcgucaccgccgccugcccccacgccggcgccaagggcuucuacaagaaccucaucuggcucgucaagaagggcaacuccuaccccaagcucuccaaguccuacaucaacgacaagggcaaggagguccucguccucuggggcauccaccaccccuccaccaccgccgaccagcagucccucuaccagaacgccgacaccuacgucuucgucggcaccucccgcuacuccaagaaguucaagcccgagaucgccauccgccccaagguccgcgaccaggagggccgcaugaacuacuacuggacccucgucgagcccggcgacaagaucaccuucgaggccaccggcaaccucgucgucccccgcuacgccuucgccauggagcgcgacgccggcuccggcaucaucaucuccgacacccccguccacgacugcaacaccaccugccagacccccaagggcgccaucaacaccucccuccccuuccagaacauccaccccaucaccaucggcaagugccccaaguacgucaaguccaccaagcuccgccucgccaccggccuccgcaacguccccuccauccagucccgcggccucuucggcgccaucgccggcuucaucgagggcggcuggaccggcauggucgacggcugguacggcuaccaccaccagaacgagcagggcuccggcuacgccgccgaccucaaguccacccagaacgccaucgacaagaucaccaacaaggucaacuccgucaucgagaagaugaacacccaguucaccgccgucggcaaggaguucaaccaccucgagaagcgcaucgagaaccucaacaagaaggucgacgacggcuuccucgacaucuggaccuacaacgccgagcuccucguccuccucgagaacgagcgcacccucgacuaccacgacuccaacgucaagaaccucuacgagaagguccgcaaccagcucaagaacaacgccaaggagaucggcaacggcugcuucgaguucuaccacaagugcgacaacaccugcauggaguccgucaagaacggcaccuacgacuaccccaaguacuccgaggaggccaagcucaaccgcgaggagaucgacggcgucaagcucgaguccacccgcaucuaccagauccucgccaucuacuccaccgccgccuccucccucguccucgucgucucccucggcgccaucuccuucuggaugugcuccaacggcucccuccagugccgcaucugcaucuga

SEQ ID NO: 104223 - RNA, 1701 nt, Artificial Sequence; identical to SEQ ID NO: 103086
  derived and/or modified CDS sequence (opt2) from hemagglutinin__InfluenzaA__AFB40597

SEQ ID NO: 104224 - RNA, 1701 nt, Artificial Sequence; identical to SEQ ID NO: 103086
  derived and/or modified CDS sequence (opt2) from hemagglutinin__InfluenzaA__AFB40598

SEQ ID NO: 104225 - RNA, 1701 nt, Artificial Sequence
  derived and/or modified CDS sequence (opt2) from hemagglutinin__InfluenzaA__AFB40599
augaaggccauccucgucguccuccucuacaccuucgccaccgccaacgccgacacccucugcaucggcuaccacgccaacaacuccaccgacaccgucgacaccguccucgagaagaacgucaccgucacccacuccgucaaccuccucgaggacaagcacaacggcaagcucugcaagcuccgcggcgucgccccccuccaccucggcaagugcaacaucgccggcuggauccucggcaaccccgagugcgagucccucuccaccgccuccuccugguccuacaucgucgagaccuccuccuccgacaacggcaccugcuaccccggcgacuucaucgacuacgaggagcuccgcgagcagcucuccuccgucuccuccuucgagcgcuucgagaucuuccccaagaccuccuccuggcccaaccacgaccucaacaagggcgucaccgccgccugcccccacgccggcgccaaguccuucuacaagaaccucaucuggcucgucaagaagggcaacuccuaccccaagcucuccaaguccuacaucaacgacaagggcaaggagguccucguccucuggggcauccaccaccccuccaccuccgccgaccagcagucccucuaccagaacgccgacgccuacgucuucgucggcaccucccgcuacuccaagaaguucaagcccgagaucgccauccgccccaagguccgcgaccaggagggccgcaugaacuacuacuggacccucgucgagcccggcgacaagaucaccuucgaggccaccggcaaccucgucgucccccgcuacgccuucgccauggagcgcaacgccggcuccggcaucaucaucuccgacacccccguccacgacugcaacaccaccugccagacccccaagggcgccaucaacaccucccuccccuuccagaacauccaccccaucaccaucggcaagugccccaaguacgucaaguccaccaagcuccgccucgccaccggccuccgcaacguccccuccauccagucccgcggccucuucggcgccaucgccggcuucaucgagggcggcuggaccggcauggucgacggcugguacggcuaccaccaccagaacgagcagggcuccggcuacgccgccgaccucaaguccacccagaacgccaucgacaagaucaccaacaaggucaacuccgucaucgagaagaugaacacccaguucaccgccgucggcaaggaguucaaccaccucgagaagcgcaucgagaaccucaacaagaaggucgacgacggcuuccucgacaucuggaccuacaacgccgagcuccucguccuccucgagaacgagcgcacccucgacuaccacgacuccaacgucaagaaccucuacgagaagguccgcucccagcucaagaacaacgccaaggagaucggcaacggcugcuucgaguucuaccacaagugcgacaacaccugcauggaguccgucaagaacggcaccuacgacuaccccaaguacuccgaggaggccaagcucaaccgcgaggagaucgacggcgucaagcucgaguccacccgcaucuaccagauccucgccaucuacuccaccgucgccuccucccucguccucgucgucucccucggcgccaucuccuucuggaugugcuccaacggcucccuccagugccgcaucugcaucuga

SEQ ID NO: 104226 - RNA, 1701 nt, Artificial Sequence; identical to SEQ ID NO: 99869
  derived and/or modified CDS sequence (opt2) from hemagglutinin__InfluenzaA__AFB40600

SEQ ID NO: 104227 - RNA, 1701 nt, Artificial Sequence
  derived and/or modified CDS sequence (opt2) from hemagglutinin__InfluenzaA__AFB40601
augaaggccauccucgucguccuccucuacaccuucgccaccgccaacgccgacacccucugcaucggcuaccacgccaacaacuccaccgacaccgucgacaccguccucgagaagaacgucaccgucacccacuccgucaaccuccucgaggacaagcacaacggcaagcucugcaagcuccgcggcgucgccccccuccaccucggcaagugcaacaucgccggcuggauccucggcaaccccgagugcgagucccucuccaccgccuccuccugguccuacaucgucgagaccuccuccuccgacaacggcaccugcuaccccggcgacuucaucgacuacgaggagcuccgcgagcagcucuccuccgucuccuccuucgagcgcuucgagaucuuccccgagaccuccuccuggcccaaccacgacuccaacaagggcgucaccgccgccugcccccacgccggcgccaaguccuucuacaagaaccucaucuggcucgucaagaagggcaacuccuaccccaagcucuccaaguccuacaucaacgacaagggcaaggagguccucguccucuggggcauccaccaccccuccaccuccgccgaccagcagucccucuaccagaacgccgacgccuacgucuucgucggcaccucccgcuacuccaagaaguucaagcccgagaucgccauccgccccaagguccgcggccaggagggccgcaugaacuacuacuggacccucgucgagcccggcgacaagaucaccuucgaggccaccggcaaccucgucgucccccgcuacgccuucgccauggagcgcaacgccggcuccggcaucaucaucuccgacacccccguccacgacugcaacaccaccugccagacccccaagggcgccaucaacaccucccuccccuuccagaacauccaccccaucaccaucggcaagugccccaaguacgucaaguccaccaagcuccgccucgccaccggccuccgcaacguccccuccauccagucccgcggccucuucggcgccaucgccggcuucaucgagggcggcuggaccggcauggucgacggcugguacggcuaccaccaccagaacgagcagggcuccggcuacgccgccgaccucaaguccacccagaacgccaucgacgagaucaccaacaaggucaacuccgucaucgagaagaugaacacccaguucaccgccgucggcaaggaguucaaccaccucgagaagcgcaucgagaaccucaacaagaaggucgacgacggcuuccucgacaucuggaccuacaacgccgagcuccucguccuccucgagaacgagcgcacccucgacuaccacgacuccaacgucaagaaccucuacgagaagguccgcucccagcucaagaacaacgccaaggagaucggcaacggcugcuucgaguucuaccacaagugcgacaacaccugcauggaguccgucaagaacggcaccuacgacuaccccaaguacuccgaggaggccaagcucaaccgcgaggagaucgacggcgucaagcucgaguccacccgcaucuaccagauccucgccaucuacuccaccgucgccuccucccucguccucgucgucucccucggcgccaucuccuucuggaugugcuccaacggcucccuccagugccgcaucugcaucuga

SEQ ID NO: 104228 - RNA, 1701 nt, Artificial Sequence; identical to SEQ ID NO: 98705
  derived and/or modified CDS sequence (opt2) from hemagglutinin__InfluenzaA__AFB40602

SEQ ID NO: 104229 - RNA, 1701 nt, Artificial Sequence; identical to SEQ ID NO: 99869
  derived and/or modified CDS sequence (opt2) from hemagglutinin__InfluenzaA__AFB40603

SEQ ID NO: 104230 - RNA, 1701 nt, Artificial Sequence
  derived and/or modified CDS sequence (opt2) from hemagglutinin__InfluenzaA__AFB40604
augaaggccauccucgucguccuccucuacaccuucgccaccgccaacgccgacacccucugcaucggcuaccacgccaacaacuccaccgacaccgucgacaccguccucgagaagaacgucaccgucacccacuccgucaaccuccucgaggacaagcacaacggcaagcucugcaagcuccgcggcgucgccccccuccaccucggcaagugcaacaucgccggcuggauccucggcaaccccgagugcgagucccucuccaccgccuccuccugguccuacaucgucgagaccuccuccuccgacaacggcaccugcuaccccggcgacuucaucgacuacgaggagcuccgcgagcagcucuccuccgucuccuccuucgagcgcuucgagaucuuccccaagaccuccuccuggcccaaccacgacuccaacaagggcgucaccgccgccugcccccacgccggcgccaaguccuucuacaagaaccucaucuggcucgucaaggagggcaacuccuaccccaagcucuccaaguccuacaucaacgacaagggcaaggagguccucguccucuggggcauccaccacccccccaccaccgccgaccagcagucccucuaccagaacgccgacaccuacgucuucgucggcaccucccgcuacuccaagaaguucaagcccgagaucgccauccgccccaagguccgcgaccaggagggccgcaugaacuacuacuggacccucgucgagcccggcgacaagaucaccuucgaggccaccggcaaccucgucgucccccgcuacgccuucgccauggagcgcaacgccggcuccggcaucaucaucuccgacacccccguccacgacugcaacaccaccugccagacccccaagggcgccaucaacaccucccuccccuuccagaacauccaccccaucaccaucggcaagugccccaaguacgucaaguccaccaagcuccgccucgccaccggccuccgcaacguccccuccauccagucccgcggccucuucggcgccaucgccggcuucaucgagggcggcuggaccggcauggucgacggcugguacggcuaccaccaccagaacgagcagggcuccggcuacgccgccgaccucaaguccacccagaacgccaucgacaagaucaccaacaaggucaacuccgucaucgagaagaugaacacccaguucaccgccgucgacaaggaguucaaccaccucgagaagcgcaucggcaaccucaacaagaaggucgacgacggcuuccucgacaucuggaccuacaacgccgagcuccucguccuccucgagaacgagcgcacccucgacuaccacgacuccaacgucaagaaccucuacgagaagguccgcaaccagcucaagaacaacgccaaggagaucggcaacggcugcuucgaguucuaccacaagugcgacaacaccugcauggaguccgucaagaacggcaccuacgacuaccccaaguacuccgaggaggccaagcucaaccgcgaggagaucgacggcgucaagcucgaguccacccgcaucuaccagauccucgccaucuacuccaccgucgccuccucccucguccucgucgucucccucggcgccaucuccuucuggaugugcuccaacggcucccuccagugccgcaucugcaucuga

SEQ ID NO: 104231 - RNA, 1701 nt, Artificial Sequence; identical to SEQ ID NO: 98705
  derived and/or modified CDS sequence (opt2) from hemagglutinin__InfluenzaA__AFB70138

SEQ ID NO: 104232 - RNA, 1701 nt, Artificial Sequence
  derived and/or modified CDS sequence (opt2) from hemagglutinin__InfluenzaA__AFB70145
augaaggccauccucgucguccuccucuacaccuucgccaccgccaacgccgacacccucugcaucggcuaccacgccaacaacuccaccgacaccgucgacaccguccucgagaagaacgucaccgucacccacuccgucaaccuccucgaggacaagcacaacggcaagcucugcaagcuccgcggcgucgccccccuccaccucggcaagugcaacaucgccggcuggauccucggcaaccccgagugcgagucccucuccaccgccuccuccugguccuacaucgucgagaccuccuccuccgacaacggcaccugcuaccccggcgacuucaucgacuacgaggagcuccgcgagcagcucuccuccgucuccuccuucgagcgcuucgagaucuuccccaagaccuccuccuggcccaaccacgacuccaacaagggcaucaccgccgccugcccccacgccggcgccaaguccuucuacaagaaccucaucuggcucgucaagaagggcaacuccuaccccaagcucuccaaguccuacaucaacgacaagggcaaggagguccucguccucuggggcauccaccaccccuccaccuccgccgaccagcagucccucuaccagaacgccgacgccuacgucuucgucggcaccucccgcuacuccaagaaguucaagcccgagaucgccauccgccccaagguccgcgaccaggagggccgcaugaacuacuacuggacccucgucgagcccggcgacaagaucaccuucgaggccaccggcaaccucgucgucccccgcuacgccuucgccauggagcgcaacgccggcuccggcaucaucaucuccgacacccccguccacgacugcaacaccaccugccagacccccaagggcgccaucaacaccucccuccccuuccagaacauccaccccaucaccaucggcaagugccccaaguacgucaaguccaccaagcuccgccucgccaccggccuccgcaacguccccuccauccagucccgcggccucuucggcgccaucgccggcuucaucgagggcggcuggaccggcauggucgacggcugguacggcuaccaccaccagaacgagcagggcuccggcuacgccgccgaccucaaguccacccagaacgccaucgacgagaucaccaacaaggucaacuccgucaucgagaagaugaacacccaguucaccgccgucggcaaggaguucaaccaccucgagaagcgcaucgagaaccucaacaagaaggucgacgacggcuuccucgacaucuggaccuacaacgccgagcuccucguccuccucgagaacgagcgcacccucgacuaccacgacuccaacgucaagaaccucuacgagaagguccgcucccagcucaagaacaacgccaaggagaucggcaacggcugcuucgaguucuaccacaagugcgacaacaccugcauggaguccgucaagaacggcaccuacgacuaccccaaguacuccgaggaggccaagcucaaccgcgaggagaucgacggcgucaagcucgaguccacccgcaucuaccagauccucgccaucuacuccaccgucgccuccucccucguccucgucgucucccucggcgccaucuccuucuggaugugcuccaacggcucccuccagugccgcaucugcaucuga

SEQ ID NO: 104233 - RNA, 1701 nt, Artificial Sequence
  derived and/or modified CDS sequence (opt2) from hemagglutinin__InfluenzaA__AFB70154
augaaggccauccucgucguccuccucuacaccuucgccaccgccaacgccgacacccucugcaucggcuaccacgccaacaacuccaccgacaccgucgacaccguccucgagaagaacgucaccgucacccacuccgucaaccuccucgaggacaagcacaacgagaagcucugcaagcuccgcggcgucgccccccuccaccucggcaagugcaacaucgccggcuggauccucggcaaccccgagugcgagucccucuccaccgccuccuccugguccuacaucgucgagaccuccuccuccgacaacggcaccugcuaccccggcgacuucaucgacuacgaggagcuccgcgagcagcucuccuccgucuccuccuucgagcgcuucgagaucuuccccaagaccuccuccuggcccaaccacgacuccaacaagggcgucaccgccgccugcccccacgccggcgccaaguccuucuacaagaaccucaucuggcucgucaagaagggcaacuccuaccccaagcucuccaaguccuacaucaacgacaagggcaaggagguccucguccucuggggcauccaccaccccuccaccuccgccgaccagcagucccucuaccagaacgccgacgccuacgucuucgucggcaccucccgcuacuccaagaaguucaagcccgagaucgccauccgccccaagguccgcgaccaggagggccgcaugaacuacuacuggacccucgucgagcccggcgacaagaucaccuucgaggccaccggcaaccucgucgucccccgcuacgccuucgccauggagcgcaacgccggcuccggcaucaucaucuccgacacccccguccacgacugcaacaccaccugccagacccccaagggcgccaucaacaccucccuccccuuccagaacauccaccccaucaccaucggcaagugccccaaguacgucaaguccaccaagcuccgccucgccaccggccuccgcaacguccccuccauccagucccgcggccucuucggcgccaucgccggcuucaucgagggcggcuggaccggcauggucgacggcugguacggcuaccaccaccagaacgagcagggcuccggcuacgccgccgaccucaaguccacccagaacgccaucgacgagaucaccaacaaggucaacuccgucaucgagaagaugaacacccaguucaccgccgucggcaaggaguucaaccaccucgagaagcgcaucgagaaccucaacaagaaggucgacgacggcuuccucgacaucuggaccuacaacgccgagcuccucguccuccucgagaacgagcgcacccucgacuaccacgacuccaacgucaagaaccucuacgagaagguccgcucccagcucaagaacaacgccaaggagaucggcaacggcugcuucgaguucuaccacaagugcgacaacaccugcauggaguccgucaagaacggcaccuacgacuaccccaaguacuccgaggaggccaagcucaaccgcgaggagaucgacggcgucaagcucgaguccacccgcaucuaccagauccucgccaucuacuccaccgucgccuccucccucguccucgucgucucccucggcgccaucuccuucuggaugugcuccaacggcucccuccagugccgcaucugcaucuga

SEQ ID NO: 104234 - RNA, 1701 nt, Artificial Sequence; identical to SEQ ID NO: 98705
  derived and/or modified CDS sequence (opt2) from hemagglutinin__InfluenzaA__AFB70156

SEQ ID NO: 104235 - RNA, 1701 nt, Artificial Sequence; identical to SEQ ID NO: 98705
  derived and/or modified CDS sequence (opt2) from hemagglutinin__InfluenzaA__AFB70158

SEQ ID NO: 104236 - RNA, 1701 nt, Artificial Sequence; identical to SEQ ID NO: 104232
  derived and/or modified CDS sequence (opt2) from hemagglutinin__InfluenzaA__AFB70160

SEQ ID NO: 104237 - RNA, 1701 nt, Artificial Sequence; identical to SEQ ID NO: 99899
  derived and/or modified CDS sequence (opt2) from hemagglutinin__InfluenzaA__AFB70162

SEQ ID NO: 104238 - RNA, 1701 nt, Artificial Sequence
  derived and/or modified CDS sequence (opt2) from hemagglutinin__InfluenzaA__AFB70167
augaaggccauccucgucguccuccucuacaccuucgccaccgccaacgccgacacccucugcaucggcuaccacgccaacaacuccaccgacaccgucgacaccguccucgagaagaacgucaccgucacccacuccgucaaccuccucgaggacaagcacaacggcaagcucugcaagcuccgcggcgucgccccccuccaccucggcaagugcaacaucgccggcuggauccucggcaaccccgagugcgagucccucuccaccgccuccuccugguccuacaucgucgagaccuccuccuccgacaacggcaccugcuaccccggcgacuucaucgacuacgaggagcuccgcgagcagcucuccuccgucuccuccuucgagcgcuucgagaucuuccccaagaccuccuccuggcccaaccacgacuccaacaagggcgucaccgccgccugcccccacgccggcgccaaguccuucuacaagaaccucaucuggcucgucaagaagggcaacuccuaccccaagcucuccaaguccuacaucaacgacaagggcaaggagguccucguccucuggggcauccaccaccccuccaccuccgccgaccagcagucccucuaccagaacgccgacgccuacgucuucgucggcaccucccgcuacuccaagaaguucaagcccgagaucgccaugcgccccaagguccgcgaccaggagggccgcaugaacuacuacuggacccucgucgagcccggcgacaagaucaccuucgaggccaccggcaaccucgucgucccccgcuacgccuucgccauggagcgcaacgccggcuccggcaucaucaucuccgacacccccguccacgacugcaacaccaccugccagacccccaagggcgccaucaacaccucccuccccuuccagaacauccaccccaucaccaucggcaagugccccaaguacgucaaguccaccaagcuccgccucgccaccggccuccgcaacguccccuccauccagucccgcggccucuucggcgccaucgccggcuucaucgagggcggcuggaccggcauggucgacggcugguacggcuaccaccaccagaacgagcagggcuccggcuacgccgccgaccucaaguccacccagaacgccaucgacgagaucaccaacaaggucaacuccgucaucgagaagaugaacacccaguucaccgccgucggcaaggaguucaaccaccucgagaagcgcaucgagaaccucaacaagaaggucgacgacggcuuccucgacaucuggaccuacaacgccgagcuccucguccuccucgagaacgagcgcacccucgacuaccacgacuccaacgucaagaaccucuacgagaagguccgcucccagcucaagaacaacgccaaggagaucggcaacggcugcuucgaguucuaccacaagugcgacaacaccugcauggaguccgucaagaacggcaccuacgacuaccccaaguacuccgaggaggccaagcucaaccgcgaggagaucgacggcgucaagcucgaguccacccgcaucuaccagauccucgccaucuacuccaccgucgccuccucccucguccucgucgucucccucggcgccaucuccuucuggaugugcuccaacggcucccuccagugccgcaucugcaucuga

SEQ ID NO: 104239 - RNA, 1701 nt, Artificial Sequence; identical to SEQ ID NO: 98705
  derived and/or modified CDS sequence (opt2) from hemagglutinin__InfluenzaA__AFB70177

SEQ ID NO: 104240 - RNA, 1701 nt, Artificial Sequence; identical to SEQ ID NO: 99274
  derived and/or modified CDS sequence (opt2) from hemagglutinin__InfluenzaA__AFB70187

SEQ ID NO: 104241 - RNA, 1701 nt, Artificial Sequence; identical to SEQ ID NO: 99899
  derived and/or modified CDS sequence (opt2) from hemagglutinin__InfluenzaA__AFB70197

SEQ ID NO: 104242 - RNA, 1701 nt, Artificial Sequence; identical to SEQ ID NO: 98705
  derived and/or modified CDS sequence (opt2) from hemagglutinin__InfluenzaA__AFB70207

SEQ ID NO: 104243 - RNA, 1701 nt, Artificial Sequence; identical to SEQ ID NO: 98705
  derived and/or modified CDS sequence (opt2) from hemagglutinin__InfluenzaA__AFB70217

SEQ ID NO: 104244 - RNA, 1701 nt, Artificial Sequence; identical to SEQ ID NO: 98705
  derived and/or modified CDS sequence (opt2) from hemagglutinin__InfluenzaA__AFB70227

SEQ ID NO: 104245 - RNA, 1701 nt, Artificial Sequence
  derived and/or modified CDS sequence (opt2) from hemagglutinin__InfluenzaA__AFB70247
augaaggccauccucgucguccuccucuacaccuucgccaccgccaacgccgacacccucugcaucggcuaccacgccaacaacuccaccgacaccgucgacaccguccucgagaagaacgucaccgucacccacuccgucaaccuccucgaggacaagcacaacggcaagcucugcaagcuccgcggcgucgccccccuccaccucggcaagugcaacaucgccggcuggauccucggcaaccccgagugcgagucccucuccaccgccuccuccugguccuacaucgucgagaccuccuccuccgacaacggcaccugcuaccccggcgacuucaucgacuacgaggagcuccgcgagcagcucuccuccgucuccuccuucgagcgcuucgagaucuuccccaagaccuccuccuggcccaaccacgacuccaacaagggcgucaccgccgccugcccccacgccggcgccaaguccuucuacaagaaccucaucuggcucgucaagaagggcaacuccuaccccaagcucuccaaguccuacaucaacgacaagggcaaggagguccucguccucuggggcauccaccaccccuccaccuccgccgaccagcagucccucuaccagaacgccgacgccuacgucuucgucggcaccucccgcuacuccaaggaguucaagcccgagaucgccauccgccccaagguccgcgaccaggagggccgcaugaacuacuacuggacccucgucgagcccggcgacaagaucaccuucgaggccaccggcaaccucgucgucccccgcuacgccuucgccauggagcgcaacgccggcuccggcaucaucaucuccgacacccccguccacgacugcaacaccaccugccagacccccaagggcgccaucaacaccucccuccccuuccagaacauccaccccaucaccaucggcaagugccccaaguacgucaaguccaccaagcuccgccucgccaccggccuccgcaacguccccuccauccagucccgcggccucuucggcgccaucgccggcuucaucgagggcggcuggaccggcauggucgacggcugguacggcuaccaccaccagaacgagcagggcuccggcuacgccgccgaccucaaguccacccagaacgccaucgacgagaucaccaacaaggucaacuccgucaucgagaagaugaacacccaguucaccgccgucggcaaggaguucaaccaccucgagaagcgcaucgagaaccucaacaagaaggucgacgacggcuuccucgacaucuggaccuacaacgccgagcuccucguccuccucgagaacgagcgcacccucgacuaccacgacuccaacgucaagaaccucuacgagaagguccgcucccagcucaagaacaacgccaaggagaucggcaacggcugcuucgaguucuaccacaagugcgacaacaccugcauggaguccgucaagaacggcaccuacgacuaccccaaguacuccgaggaggccaagcucaaccgcgaggagaucgacggcgucaagcucgaguccacccgcaucuaccagauccucgccaucuacuccaccgucgccuccucccucguccucgucgucucccucggcgccaucuccuucuggaugugcuccaacggcucccuccagugccgcaucugcaucuga

SEQ ID NO: 104246 - RNA, 1701 nt, Artificial Sequence
  derived and/or modified CDS sequence (opt2) from hemagglutinin__InfluenzaA__AFB70257
augaaggccauccucgucguccuccucuacaccuucgccaccgccaacgccgacacccucugcaucggcuaccacgccaacaacuccaccgacaccgucgacaccguccucgagaagaacgucaccgucacccacuccgucaaccuccucgaggacaagcacaacggcaagcucugcaagcuccgcggcgucgccccccuccaccucggcaagugcaacaucgccggcuggauccucggcaaccccgagugcgagucccucuccaccgccuccuccugguccuacaucgucgagaccuccuccuccgacaacggcaccugcuaccccggcgacuucgucgacuacgaggagcuccgcgagcagcucuccuccgucuccuccuucgagcgcuucgagaucuuccccaagaccuccuccuggcccaaccacgacuccaacaagggcgucaccgccgccugcccccacgccggcgccaaguccuucuacaagaaccucaucuggcucgucaagaagggcaacuccuaccccaagcucuccaaguccuacaucaacgacaagggcaaggagguccucguccucuggggcauccaccaccccuccaccuccgccgaccagcagucccucuaccagaacgccgacgccuacgucuucgucggcaccucccgcuacuccaagaaguucaagcccgagaucgccauccgccccaagguccgcgaccaggagggccgcaugaacuacuacuggacccucgucgagcccggcgacaagaucaccuucgaggccaccggcaaccucgucgucccccgcuacgccuucgccauggagcgcaacgccggcuccggcaucaucaucuccgacacccccguccacgacugcaacaccaccugccagacccccaagggcgccaucaacaccucccuccccuuccagaacauccaccccaucaccaucggcaagugccccaaguacgucaaguccaccaagcuccgccucgccaccggccuccgcaacguccccuccauccagucccgcggccucuucggcgccaucgccggcuucaucgagggcggcuggaccggcauggucgacggcugguacggcuaccaccaccagaacgagcagggcuccggcuacgccgccgaccucaaguccacccagaacgccaucgacgagaucaccaacaaggucaacuccgucaucgagaagaugaacacccaguucaccgccgucggcaaggaguucaaccaccucgagaagcgcaucgagaaccucaacaagaaggucgacgacggcuuccucgacaucuggaccuacaacgccgagcuccucguccuccucgagaacgagcgcacccucgacuaccacgacuccaacgucaagaaccucuacgagaagguccgcucccagcucaagaacaacgccaaggagaucggcaacggcugcuucgaguucuaccacaagugcgacaacaccugcauggaguccgucaagaacggcaccuacgacuaccccaaguacuccgaggaggccaagcucaaccgcgaggagaucgacggcgucaagcucgaguccacccgcaucuaccagauccucgccaucuacuccaccgucgccuccucccucguccucgucgucucccucggcgccaucuccuucuggaugugcuccaacggcucccuccagugccgcaucugcaucuga

SEQ ID NO: 104247 - RNA, 1701 nt, Artificial Sequence; identical to SEQ ID NO: 103112
  derived and/or modified CDS sequence (opt2) from hemagglutinin__InfluenzaA__AFB70267

SEQ ID NO: 104248 - RNA, 1701 nt, Artificial Sequence; identical to SEQ ID NO: 99175
  derived and/or modified CDS sequence (opt2) from hemagglutinin__InfluenzaA__AFB70277

SEQ ID NO: 104249 - RNA, 1701 nt, Artificial Sequence; identical to SEQ ID NO: 98705
  derived and/or modified CDS sequence (opt2) from hemagglutinin__InfluenzaA__AFB70287

SEQ ID NO: 104250 - RNA, 1701 nt, Artificial Sequence; identical to SEQ ID NO: 98705
  derived and/or modified CDS sequence (opt2) from hemagglutinin__InfluenzaA__AFB70297

SEQ ID NO: 104251 - RNA, 1701 nt, Artificial Sequence; identical to SEQ ID NO: 98705
  derived and/or modified CDS sequence (opt2) from hemagglutinin__InfluenzaA__AFB70307

SEQ ID NO: 104252 - RNA, 1701 nt, Artificial Sequence; identical to SEQ ID NO: 104232
  derived and/or modified CDS sequence (opt2) from hemagglutinin__InfluenzaA__AFB70317

SEQ ID NO: 104253 - RNA, 1701 nt, Artificial Sequence
  derived and/or modified CDS sequence (opt2) from hemagglutinin__InfluenzaA__AFB70327
augaaggccauccucgucguccuccucuacaccuucgccaccgccaacgccgacacccucugcaucggcuaccacgccaacaacuccaccgacaccgucgacaccguccucgagaagaacgucaccgucacccacuccgucaaccuccucgaggacaagcacaacggcaagcucugcaagcuccgcggcgucgccccccuccaccucggcaagugcaacaucgccggcuggauccucggcaaccccgagugcgagucccucuccaccgccuccuccugguccuacaucgucgagaccuccuccuccgacaacggcaccugcuaccccggcgacuucaucgacuacgaggagcuccgcgagcagcucuccuccgucuccuccuucgagcgcuucgagaucuuccccaagaccuccuccuggcccaaccacgacuccaacaagggcgucaccgccgccugcccccacgccggcgccaaguccuucuacaagaaccucaucuggcucgucaagaagggcaacuccuaccccaagcucuccaaguccuacaucaacgacaagggcaaggagguccucguccucuggggcauccaccaccccuccaccuccgccgaccagcagucccucuaccagaacgccgacgccuacgucuucgucggcaccucccgcuacuccaagaaguucaagcccgagaucgccauccgccccaagguccgcgaccaggagggccgcaugaacuacuacuggacccucgucgagcccggcgacaagaucaccuucgaggccaccggcaaccucgucgucccccgcuacgccuucgccauggagcgcaacgccggcuccggcaucaucaucuccgacacccccguccacgacugcaacaccaccugccagacccccaagggcgccaucaacaccucccuccccuuccagaacauccaccccaucaccaucggcaagugccccaaguacgucaaguccaccaagcuccgccucgccaccggccuccgcaacguccccuccauccagucccgcggccucuucggcgccaucgccggcuucaucgagggcggcuggaccggcauggucgacggcugguacggcuaccaccaccagaacgagcagggcuccggcuacgccgccgaccucaaguccacccagaacgccaucgacgagaucaccaacaaggucaacuccgucaucgagaagaugaacacccaguucaccgccgucggcaaggaguucaaccaccucggcaagcgcaucgagaaccucaacaagaaggucgacgacggcuuccucgacaucuggaccuacaacgccgagcuccucguccuccucgagaacgagcgcacccucgacuaccacgacuccaacgucaagaaccucuacgagaagguccgcucccagcucaagaacaacgccaaggagaucggcaacggcugcuucgaguucuaccacaagugcgacaacaccugcauggaguccgucaagaacggcaccuacgacuaccccaaguacuccgaggaggccaagcucaaccgcgaggagaucgacggcgucaagcucgaguccacccgcaucuaccagauccucgccaucuacuccaccgucgccuccucccucguccucgucgucucccucggcgccaucuccuucuggaugugcuccaacggcucccuccagugccgcaucugcaucuga

SEQ ID NO: 104254 - RNA, 1701 nt, Artificial Sequence; identical to SEQ ID NO: 98705
  derived and/or modified CDS sequence (opt2) from hemagglutinin__InfluenzaA__AFB70337

SEQ ID NO: 104255 - RNA, 1701 nt, Artificial Sequence; identical to SEQ ID NO: 100675
  derived and/or modified CDS sequence (opt2) from hemagglutinin__InfluenzaA__AFB70347

SEQ ID NO: 104256 - RNA, 1701 nt, Artificial Sequence; identical to SEQ ID NO: 98705
  derived and/or modified CDS sequence (opt2) from hemagglutinin__InfluenzaA__AFB70367

SEQ ID NO: 104257 - RNA, 1701 nt, Artificial Sequence; identical to SEQ ID NO: 98705
  derived and/or modified CDS sequence (opt2) from hemagglutinin__InfluenzaA__AFB70377

SEQ ID NO: 104258 - RNA, 1701 nt, Artificial Sequence; identical to SEQ ID NO: 99274
  derived and/or modified CDS sequence (opt2) from hemagglutinin__InfluenzaA__AFB70387

SEQ ID NO: 104259 - RNA, 1701 nt, Artificial Sequence; identical to SEQ ID NO: 98705
  derived and/or modified CDS sequence (opt2) from hemagglutinin__InfluenzaA__AFB70397

SEQ ID NO: 104260 - RNA, 1701 nt, Artificial Sequence; identical to SEQ ID NO: 98705
  derived and/or modified CDS sequence (opt2) from hemagglutinin__InfluenzaA__AFB70407

SEQ ID NO: 104261 - RNA, 1701 nt, Artificial Sequence
  derived and/or modified CDS sequence (opt2) from hemagglutinin__InfluenzaA__AFB77618
augaaggccauccucgucguccuccucuacaccuucgccaccgccaacgccgacacccucugcaucggcuaccacgccaacaacuccaccgacaccgucgacaccguccucgagaagaacgucaccgucacccacuccgucaaccuccucgaggacaagcacaacggcaagcucugcaagcuccgcggcaucgccccccuccaccucggcaagugcaacaucgccggcuggauccucggcaaccccgagugcgagucccucuccaccgccuccuccugguccuacaucgucgagaccuccuccuccgacaacggcaccugcuaccccggcgacuucaucaacuacgaggagcuccgcgagcagcucuccuccgucuccuccuucgagcgcuucgagaucuuccccaagaccuccuccuggcccaaccacgacuccaacaagggcgucaccgccgccugcccccacgccggcgccaaguccuucuacaagaaccucaucuggcucgucaagaagggcaacuccuaccccaagcucuccaaguccuacaucaacgacaagggcaaggagguccucguccucuggggcauccaccaccccaccaccaccggcgaccagcagucccucuaccagaacgccgacggcuacgucuucgucggcaccacccgcuacuccaagaaguucaagcccgagaucggcauccgccccaaggucaaggaccaggagggccgcaugaacuacuacuggacccucgucgagcccggcgacaagaucaccuucgaggccaccggcaaccucgucgucccccgcuacgccuucgccauggagcgcaacgccggcuccggcaucaucaucuccgacacccccguccacgacugcaacaccaccugccagacccccaagggcgccaucaacaccucccuccccuuccagaacauccaccccaucaccaucggcaagugccccaaguacgucaaguccaccaagcuccgccucgccaccggccuccgcaacguccccuccauccagucccgcggccucuucggcgccaucgccggcuucaucgagggcggcuggaccggcauggucgacggcugguacggcuaccaccaccagaacgagcagggcuccggcuacgccgccgaccucaaguccacccagaacgccaucgacaagaucaccaacaaggucaacuccgucaucgagaagaugaacacccaguucaccgccgucggcaaggaguucaaccaccucgagaagcgcaucgagaaccucaacaagaaggucgacgacggcuuccucgacaucuggaccuacaacgccgagcuccucguccuccucgagaacgagcgcacccucgacuaccacgacuccaacgucaagaaccucuacgagaagguccgcaaccagcucaagaacaacgccaaggagaucggcaacggcugcuucgaguucuaccacaagugcgacaacaccugcauggaguccgucaagaacggcaccuacgacuaccccaaguacuccgaggaggccaagcucaaccgcgaggagaucgacggcgucaagcucgaguccacccgcaucuaccagauccucgccaucuacuccaccgucgccuccucccucgucauggucgucucccucggcgccaucuccuucuggaugugcuccaacggcucccuccagugccgcaucugcaucuga

SEQ ID NO: 104262 - RNA, 1701 nt, Artificial Sequence; identical to SEQ ID NO: 102903
  derived and/or modified CDS sequence (opt2) from hemagglutinin__InfluenzaA__AFB77619

SEQ ID NO: 104263 - RNA, 1701 nt, Artificial Sequence; identical to SEQ ID NO: 102903
  derived and/or modified CDS sequence (opt2) from hemagglutinin__InfluenzaA__AFB77620

SEQ ID NO: 104264 - RNA, 1701 nt, Artificial Sequence
  derived and/or modified CDS sequence (opt2) from hemagglutinin__InfluenzaA__AFB77621
augaaggccauccucgucguccuccucuacaccuucgccaccgccaacgccgacacccucugcaucggcuaccacgccaacaacuccaccgacaccgucgacaccguccucgagaagaacgucaccgucacccacuccgucaaccuccucgaggacaagcacaacggcaagcucugcaagcuccgcggcgucaccccccuccaccucggcaagugcaacaucgccggcuggauccucggcaaccccgagugcgagucccucuccaccgccuccuccugguccuacaucgucgagaccuccuccuccgacaacggcaccugcuaccccggcgacuucaucaacuacgaggagcuccgcgagcagcucuccuccgucuccuccuucgagcgcuucgagaucuuccccaagaccuccuccuggcccaaccacgacuccaacaagggcgucaccgccgccugcccccacgccggcgccaaguccuucuacaagaaccucaucuggcucgucaagaagggcaacuccuaccccaagcucuccaaguccuacaucaacgacaagggcaaggagguccucguccucuggggcauccaccaccccuccaccaccgccgaccagcagucccucuaccagaacgccgacgccuacgucuucgucggcaccucccgcuacuccaagaaguucaagcccgagaucgccauccgccccaagguccgcgaccaggagggccgcaugaacuacuacuggacccucgucgagcccggcgacaagaucaccuucgaggccaccggcaaccucgucgucccccgcuacgccuucgccauggagcgcaacgccggcuccggcaucaucaucuccgacacccccguccacgacugcaacaccaccugccagacccccaagggcgccaucaacaccucccuccccuuccagaacauccaccccaucaccaucggcaagugccccaaguacgucaaguccaccaagcuccgccucgccaccggccuccgcaacauccccuccauccagucccgcggccucuucggcgccaucgccggcuucaucgagggcggcuggaccggcauggucgacggcugguacggcuaccaccaccagaacgagcagggcuccggcuacgccgccgaccucaaguccacccagaacgccaucgacaagaucaccaacaaggucaacuccgucaucgagaagaugaacacccaguucaccgccgucggcaaggaguucaaccaccucgagaagcgcaucgagaaccucaacaagaaggucgacgacggcuuccucgacaucuggaccuacaacgccgagcuccucguccuccucgagaacgagcgcacccucgacuaccacgacuccaacgucaagaaccucuacgagaagguccgcaaccagcucaagaacaacgccaaggagaucggcaacggcugcuucgaguucuaccacaagugcgacaacaccugcauggaguccgucaagaacggcaccuacgacuaccccaaguacuccgaggaggccaagcucaaccgcgaggagaucgacggcgucaagcucgaguccacccgcaucuaccagauccucgccaucuacuccaccgucgccuccucccucguccucgucgucucccucggcgccaucuccuucuggaugugcuccaacggcucccuccagugccgcaucugcaucuga

SEQ ID NO: 104265 - RNA, 1701 nt, Artificial Sequence
  derived and/or modified CDS sequence (opt2) from hemagglutinin__InfluenzaA__AFB77622
augaaggccauccucgucguccuccucuacaccuucgccaccgccaacgccgacacccucugcaucggcuaccacgccaacaacuccaccgacaccgucgacaccguccucgagaagaacgucaccgucacccacuccgucaaccuccucgaggacaagcacaacggcaagcucugcaagcuccgcggcgucgccccccuccaccucggcaagugcaacaucgccggcuggauccucggcaaccccgagugcgagucccucuccaccgccuccuccugguccuacaucgucgagaccuccuccuccgacaacggcaccugcuaccccggcgacuucaucaacuacgaggagcuccgcgagcagcucuccuccgucuccuccuucgagcgcuucgagaucuuccccaagaccuccuccuggcccaaccacgaccccaacaagggcgucaccgccgccugcccccacgccggcgccaaguccuucuacaagaaccucaucuggcucgucaagaagggcaacuccuaccccaagcucuccaaguccuacaucaacgacaagggcaaggagguccucguccucuggggcauccaccaccccuccaccaccgccgaccagcagucccucuaccagaacgccgacgccuacgucuucgucggcaccucccgcuacuccaagaaguucaagcccgagaucgccauccgccccaagguccgcgaccaggagggccgcaugaacuacuacuggacccucgucgagcccggcgacaagaucaccuucgaggccaccggcaaccucgucgucccccgcuacgccuucgccauggagcgcaacgccggcuccggcaucaucaucuccgacacccccguccacgacugcaacaccaccugccagacccccaagggcgccaucaacaccucccuccccuuccagaacauccaccccaucaccaucggcaagugccccaaguacgucaaguccaccaagcuccgccucgccaccggccuccgcaacguccccuccauccagucccgcggccucuucggcgccaucgccggcuucaucgagggcggcuggaccggcauggucgacggcugguacggcuaccaccaccagaacgagcagggcuccggcuacgccgccgaccucaaguccacccagaacgccaucgacaagaucaccaacaaggucaacuccgucaucgagaagaugaacacccaguucaccgccgucggcaaggaguucaaccaccucgagaagcgcaucgagaaccucaacaagaaggucgacgacggcuuccucgacaucuggaccuacaacgccgagcuccucguccuccucgagaacgagcgcacccucgacuaccacgacuccaacgucaagaaccucuacgagaagguccgcaaccagcucaagaacaacgccaaggagaucggcaacggcugcuucgaguucuaccacaagugcgacaacaccugcauggaguccgucaagaacggcaccuacgacuaccccaaguacuccgaggaggccaagcucaaccgcgaggagaucgacggcgucaagcucgaguccacccgcaucuaccagauccucgccaucuacuccaccgucgccuccucccucguccucgucgucucccucggcgccaucuccuucuggaugugcuccaacggcucccuccagugccgcaucugcaucuga

SEQ ID NO: 104266 - RNA, 1701 nt, Artificial Sequence; identical to SEQ ID NO: 102903
  derived and/or modified CDS sequence (opt2) from hemagglutinin__InfluenzaA__AFB77623

SEQ ID NO: 104267 - RNA, 1701 nt, Artificial Sequence; identical to SEQ ID NO: 102903
  derived and/or modified CDS sequence (opt2) from hemagglutinin__InfluenzaA__AFB77624

SEQ ID NO: 104268 - RNA, 1701 nt, Artificial Sequence
  derived and/or modified CDS sequence (opt2) from hemagglutinin__InfluenzaA__AFB77625
augaaggccauccucgucguccuccucuacaccuucaccaccgccaacgccgacacccucugcaucggcuaccacgccaacaacuccaccgacaccgucgacaccguccucgagaagaacgucaccgucacccacuccgucaaccuccucgaggacaagcacaacggcaagcucugcaagcuccgcggcgucgccccccuccaccucggcaagugcaacaucgccggcuggauccucggcaaccccgagugcgagucccucuccaccgccuccuccugguccuacaucgucgagaccuccuccuccgacaacggcaccugcuaccccggcgacuucaucaacuacgaggagcuccgcgagcagcucuccuccgucuccuccuucgagcgcuucgagaucuuccccaagaccuccuccuggcccaaccacgacuccaacaagggcgucaccgccgccugcccccacgccggcgccaaguccuucuacaagaaccucaucuggcucgucaagaagggcaacuccuaccccaagcucuccaaguccuacaucaacgacaagggcaaggagguccucguccucuggggcauccaccaccccuccaccaccgccgaccagcagucccucuaccagaacgccgacgccuacgucuucgucggcaccucccgcuacuccaagaaguucaagcccgagaucgccauccgccccaagguccgcgaccaggagggccgcaugaacuacuacuggacccucgucgagcccggcgacaagaucaccuucgaggccaccggcaaccucgucgucccccgcuacgccuucgccauggagcgcaacgccggcuccggcaucaucaucuccgacacccccguccacgacugcaacaccaccugccagacccccaagggcgccaucaacaccucccuccccuuccagaacauccaccccaucaccaucggcaagugccccaaguacgucaaguccaccaagcuccgccucgccaccggccuccgcaacguccccuccauccagucccgcggccucuucggcgccaucgccggcuucaucgagggcggcuggaccggcauggucgacggcugguacggcuaccaccaccagaacgagcagggcuccggcuacgccgccgaccucaaguccacccagaacgccaucgacaagaucaccaacaaggucaacuccgucaucgagaagaugaacacccaguucaccgccgucggcaaggaguucaaccaccucgagaagcgcaucgagaaccucaacaagaaggucgacgacggcuuccucgacaucuggaccuacaacgccgagcuccucguccuccucgagaacgagcgcacccucgacuaccacgacuccaacgucaagaaccucuacgagaagguccgcaaccagcucaagaacaacgccaaggagaucggcaacggcugcuucgaguucuaccacaagugcgacaacaccugcauggaguccgucaagaacggcaccuacgacuaccccaaguacuccgaggaggccaagcucaaccgcgaggagaucgacggcgucaagcucgaguccacccgcaucuaccagauccucgccaucuacuccaccgucgccuccucccucguccucgucgucucccucggcgccaucuccuucuggaugugcuccaacggcucccuccagugccgcaucugcaucuga

SEQ ID NO: 104269 - RNA, 1701 nt, Artificial Sequence
  derived and/or modified CDS sequence (opt2) from hemagglutinin__InfluenzaA__AFB77627
augaaggccauccucgucguccuccucuacaccuucgccaccgccaacgccgacacccucugcaucggcuaccacgccaacaacuccaccgacaccgucgacaccguccucgagaagaacgucaccgucacccacuccgucaaccuccucgaggacaagcacaacggcaagcucugcaagcuccgcggcgucgccccccuccaccucggcaagugcaacaucgccggcuggauccucggcaaccccgagugcgagucccucuccaccgccuccuccugguccuacaucgucgagaccuccuccuccgacaacggcaccugcuaccccggcgacuucaucaacuacgaggagcuccgcgagcagcucuccuccgucuccuccuucgagcgcuucgagaucuucuccaagaccuccuccuggcccaaccacgacuccaacaagggcgucaccgccgccugcccccacgccggcgccaaguccuucuacaagaaccucaucuggcucgucaagaagggcaacuccuaccccaagcucuccaaguccuacaucaacgacaagggcaaggagguccucguccucuggggcauccaccaccccuccaccaccgccgaccagcagucccucuaccagaacgccgacgccuacgucuucgucggcaccucccgcuacuccaagaaguucaagcccgagaucgccauccgccccaagguccgcgaccaggagggccgcaugaacuacuacuggacccucgucgagcccggcgacaagaucaccuucgaggccaccggcaaccucgucgucccccgcuacgccuucgccauggagcgcaacgccggcuccggcaucaucaucuccgacacccccguccacgacugcaacaccaccugccagacccccaagggcgccaucaacaccucccuccccuuccagaacauccaccccaucaccaucggcaagugccccaaguacgucaaguccaccaagcuccgccucgccaccggccuccgcaacguccccuccauccagucccgcggccucuucggcgccaucgccggcuucaucgagggcggcuggaccggcauggucgacggcugguacggcuaccaccaccagaacgagcagggcuccggcuacgccgccgaccucaaguccacccagaacgccaucgacaagaucaccaacaaggucaacuccgucaucgagaagaugaacacccaguucaccgccgucggcaaggaguucaaccaccucgagaagcgcaucgagaaccucaacaagaaggucgacgacggcuuccucgacaucuggaccuacaacgccgagcuccucguccuccucgagaacgagcgcacccucgacuaccacgacuccaacgucaagaaccucuacgagaagguccgcaaccagcucaagaacaacgccaaggagaucggcaacggcugcuucgaguucuaccacaagugcgacaacaccugcauggaguccgucaagaacggcaccuacgacuaccccaaguacuccgaggaggccaagcucaaccgcgaggagaucgacggcgucaagcucgaguccacccgcaucuaccagauccucgccaucuacuccaccgucgccuccucccucguccucgucgucucccucggcgccaucuccuucuggaugugcuccaacggcucccuccagugccgcaucugcaucuga

SEQ ID NO: 104270 - RNA, 1701 nt, Artificial Sequence; identical to SEQ ID NO: 102903
  derived and/or modified CDS sequence (opt2) from hemagglutinin__InfluenzaA__AFB77628

SEQ ID NO: 104271 - RNA, 1701 nt, Artificial Sequence
  derived and/or modified CDS sequence (opt2) from hemagglutinin__InfluenzaA__AFB77629
augaaggccauccucgucguccuccucuacaccuucaccaccgccaacgccgacacccucugcaucggcuaccacgccaacaacuccaccgacaccgucgacaccguccucgagaagaacgucaccgucacccacuccgucaaccuccucgaggacaagcacaacggcaagcucugcaagcuccgcggcgucgccccccuccaccucggcaagugcaacaucgccggcuggauccucggcaaccccgagugcgagucccucuccaccgccuccuccugguccuacaucgucgagaccuccuccuccgacaacggcaccugcuaccccggcgacuucaucaacuacgaggagcuccgcgagcagcucuccuccgucuccuccuucgagcgcuucgagaucuuccccaagaccuccuccuggcccaaccacgacuccaacaagggcgucaccgccgccugcccccacgccggcgccaaguccuucuacaagaaccucaucuggcucgucaagaagggcaacuccuaccccaagcucuccaaguccuacaucaacgacaagggcaaggagguccucguccucuggggcauccaccaccccuccaccaccgccgaccagcagucccucuaccagaacgccgacgccuacgucuucgucggcaccucccgcuacuccaagaaguucaagcccgagaucgccauccgccccaagguccgcgaccaggagggccgcaugaacuacuacuggacccucgucgagcccggcgacaagaucaccuucgaggccaccggcaaccucgucgucccccgcuacgccuucgccauggagcgcaacgccggcuccggcaucaucaucuccgacacccccguccacgacugcaacaccaccugccagacccccaagggcgccaucaacaccucccuccccuuccagaacauccaccccaucaccaucggcaagugccccaaguacgucaaguccaccaagcuccgccucgccaccggccuccgcaacguccccuccauccagucccgcggccucuucggcgccaucgccggcuucaucgagggcggcuggaccggcauggucgacggcugguacggcuaccaccaccagaacgagcagggcuccggcuacgccgccgaccucaaguccacccagaacgccaucgacaagaucaccaacaaggucaacuccgucaucgagaagaugaacacccaguucaccgccgucggcaaggaguucaaccaccucgagaagcgcaucgagaaccucaacaagaaggucgacgacggcuuccucgacaucuggaccuacaacgaggagcuccucguccuccucgagaacgagcgcacccucgacuaccacgacuccaacgucaagaaccucuacgagaagguccgcaaccagcucaagaacaacgccaaggagaucggcaacggcugcuucgaguucuaccacaagugcgacaacaccugcauggaguccgucaagaacggcaccuacgacuaccccaaguacuccgaggaggccaagcucaaccgcgaggagaucgacggcgucaagcucgaguccacccgcaucuaccagauccucgccaucuacuccaccgucgccuccucccucguccucgucgucucccucggcgccaucuccuucuggaugugcuccaacggcucccuccagugccgcaucugcaucuga

SEQ ID NO: 104272 - RNA, 1701 nt, Artificial Sequence
  derived and/or modified CDS sequence (opt2) from hemagglutinin__InfluenzaA__AFB77630
augaaggccauccucgucguccuccucuacaccuucgccaccgccaacgccgacacccucugcaucggcuaccacgccaacaacuccaccgacaccgucgacaccguccucgagaagaacgucaccgucacccacuccgucaaccuccucgaggacaagcacaacggcaagcucugcaagcuccgcggcgucgccccccuccaccucggcaagugcaacaucgccggcuggauccucggcaaccccgagugcgagucccucuccaccgccuccuccugguccuacaucgucgagaccuccuccuccgacaacggcaccugcuaccccggcgacuucaucaacuacgaggagcuccgcgagcagcucuccuccgucuccuccuucgagcgcuucgagaucuuccccaagaccuccuccuggcccaaccacgaguccaacaagggcgucaccgccgccugcccccacgccggcgccaaguccuucuacaagaaccucaucuggcucgucaagaagggcaacuccuaccccaagcucuccaaguccuacaucaacgacaagggcaaggagguccucguccucuggggcauccaccaccccuccaccaccgccgaccagcagucccucuaccagaacgccgacgccuacgucuucgucggcaccucccgcuacuccaagaaguucaagcccgagaucgccauccgccccaagguccgcgaccaggagggccgcaugaacuacuacuggacccucgucgagcccggcgacaagaucaccuucgaggccaccggcaaccucgucgucccccgcuacgccuucgccauggagcgcaacgccggcuccggcaucaucaucuccgacacccccguccacgacugcaacaccaccugccagacccccaagggcgccaucaacaccucccuccccuuccagaacauccaccccaucaccaucggcaagugccccaaguacgucaaguccaccaagcuccgccucgccaccggccuccgcaacguccccuccauccagucccgcggccucuucggcgccaucgccggcuucaucgagggcggcuggaccggcauggucgacggcugguacggcuaccaccaccagaacgagcagggcuccggcuacgccgccgaccucaaguccacccagaacgccaucgacaagaucaccaacaaggucaacuccgucaucgagaagaugaacacccaguucaccgccgucggcaaggaguucaaccaccucgagaagcgcaucgagaaccucaacaagaaggucgacgacggcuuccucgacaucuggaccuacaacgccgagcuccucguccuccucgagaacgagcgcacccucgacuaccacgacuccaacgucaagaaccucuacgagaagguccgcaaccagcucaagaacaacgccaaggagaucggcaacggcugcuucgaguucuaccacaagugcgacaacaccugcauggaguccgucaagaacggcaccuacgacuaccccaaguacuccgaggaggccaagcucaaccgcgaggagaucgacggcgucaagcucgaguccacccgcaucuaccagauccucgccaucuacuccaccgucgccuccucccucguccucgucgucucccucggcgccaucuccuucuggaugugcuccaacggcucccuccagugccgcaucugcaucuga

SEQ ID NO: 104273 - RNA, 1701 nt, Artificial Sequence
  derived and/or modified CDS sequence (opt2) from hemagglutinin__InfluenzaA__AFB77631
augaaggccauccucgucguccuccucuacaccuucaccaccgccaacgccgacacccucugcaucggcuaccacgccaacaacuccaccgacaccgucgacaccguccucgagaagaacgucaccgucacccacuccgucaaccuccucgaggacaagcacaacggcaagcucugcaagcuccgcggcgucgccccccuccaccucggcaagugcaacaucgccggcuggauccucggcaaccccgagugcgagucccucuccaccgccuccuccugguccuacaucgucgagaccuccuccuccgacaacggcaccugcuaccccggcgacuucaucaacuacgaggagcuccgcgagcagcucuccuccgucuccuccuucgagcgcuucgagaucuuccccaagaccuccuccuggcccaaccacgacuccaacaagggcgucaccgccgccugcccccacgccggcgccaaguccuucuacaagaaccucaucuggcucgucaagaagggcaacuccuaccccaagcucuccaaguccuacaucaacgacaagggcaaggagguccucguccucuggggcauccaccaccccuccaccaccgccgaccagcagucccucuaccagaacgccgacgccuacgucuucgucggcaccucccgcuacuccaagaaguucaagcccgagaucgccauccgccccaagguccgcgaccaggagggccgcaugaacuacuacuggacccucgucgagcccggcgacaagaucaccuucgaggccaccggcaaccucgucgucccccgcuacgccuucgccauggagcgcaacgccggcuccggcaucaucaucuccgacacccccguccacgacugcaacaccaccugccagacccccaagggcgccaucaacaccucccuccccuuccagaacauccaccccaucaccaucggcaagugccccaaguacgucaaguccaccaagcuccgccucgccaccggccuccgcaacguccccuccauccagucccgcggccucuucggcgccaucgccggcuucaucgagggcggcuggaccggcauggucgacggcugguacggcuaccaccaccagaacgagcagggcuccggcuacgccgccgaccucaaguccacccagaacgccaucgacaagaucaccaacaaggucaacuccgucaucgagaagaugaacacccaguucaccgccgucggcaaggaguucaaccaccucgagaagcgcaucgagaaccucaacaagaaggucgacgacggcuuccucgacaucuggaccuacaacgccgagcuccucguccuccucgagaacgagcgcacccucgacuaccacgacuccaacgucaagaaccucuacgagaagguccgcaaccagcucaagaccaacgccaaggagaucggcaacggcugcuucgaguucuaccacaagugcgacaacaccugcauggaguccgucaagaacggcaccuacgacuaccccaaguacuccgaggaggccaagcucaaccgcgaggagaucgacggcgucaagcucgaguccacccgcaucuaccagauccucgccaucuacuccaccgucgccuccucccucguccucgucgucucccucggcgccaucuccuucuggaugugcuccaacggcucccuccagugccgcaucugcaucuga

SEQ ID NO: 104274 - RNA, 1701 nt, Artificial Sequence
  derived and/or modified CDS sequence (opt2) from hemagglutinin__InfluenzaA__AFB77632
augaaggccauccucgucguccuccucuacaccuucgccaccgccaacgccgacacccucugcaucggcuaccacgccaacaacuccaccgacaccgucgacaccguccucgagaagaacgucaccgucacccacuccgucaaccuccucgaggacaagcacaacggcaagcucugcaagcuccgcggcgucgccccccuccaccucggcaagugcaacaucgccggcuggauccucggcaaccccgagugcgagucccucaccaccgccuccuccugguccuacaucgucgagaccuccuccuccgacaacggcaccugcuaccccggcgacuucaucaacuacgaggagcuccgcgagcagcucuccuccgucuccuccuucgagcgcuucgagaucuuccccaagaccuccuccuggcccaaccacgacuccaacaagggcgucaccgccgccugcccccacgccggcgccaaguccuucuacaagaaccucaucuggcucgucaagaagggcaacuccuaccccaagcucuccaaguccuacaucaacgacaagggcaaggagguccucguccucuggggcauccaccaccccuccaccaccgccgaccagcagucccucuaccagaacgccgacgccuacgucuucgucggcaccucccgcuacuccaagaaguucaagcccgagaucgccauccgccccaagguccgcgaccaggagggccgcaugaacuacuacuggacccucgucgagcccggcgacaagaucaccuucgaggccaccggcaaccucgucgucccccgcuacgccuucgccauggagcgcaacgccggcuccggcaucaucaucuccgacacccccguccacgacugcaacaccaccugccagacccccaagggcgccaucaacaccucccuccccuuccagaacauccaccccaucaccaucggcaagugccccaaguacgucaaguccaccaagcuccgccucgccaccggccuccgcaacguccccuccauccagucccgcggccucuucggcgccaucgccggcuucaucgagggcggcuggaccggcauggucgacggcugguacggcuaccaccaccagaacgagcagggcuccggcuacgccgccgaccucaaguccacccagaacgccaucgacaagaucaccaacaaggucaacuccgucaucgagaagaugaacacccaguucaccgccgucggcaaggaguucaaccaccucgagaagcgcaucgagaaccucaacaagaaggucgacgacggcuuccucgacaucuggaccuacaacgccgagcuccucguccuccucgagaacgagcgcacccucgacuaccacgacuccaacgucaagaaccucuacgagaagguccgcaaccagcucaagaacaacgccaaggagaucggcaacggcugcuucgaguucuaccacaagugcgacaacaccugcauggaguccgucaagaacggcaccuacgacuaccccaaguacuccgaggaggccaagcucaaccgcgaggagaucgacggcgucaagcucgaguccacccgcaucuaccagauccucgccaucuacuccaccgucgccuccucccucguccucgucgucucccucggcgccaucuccuucuggaugugcuccaacggcucccuccagugcaagaucugcaucuga

SEQ ID NO: 104275 - RNA, 1701 nt, Artificial Sequence
  derived and/or modified CDS sequence (opt2) from hemagglutinin__InfluenzaA__AFB77633
augaaggccauccucgucguccuccucuacaccuucgccaccgccaacgccgacacccucugcaucggcuaccacgccaacaacuccaccgacaccgucgacaccguccucgagaagaacgucaccgucacccacuccgucaaccuccucgaggacaagcacaacggcaagcucugcaagcuccgcggcgucgccccccuccaccucggcaagugcaacaucgccggcuggauccucggcaaccccgagugcgagucccucuccaccgccuccuccugguccuacaucgucgagaccuccuccuccgacaacggcaccugcuaccccggcgacuucaucaacuacgaggagcuccgcgagcagcucuccuccgucuccuccuucgagcgcuucgagaucuuccccaagaccuccuccuggcccaaccacgacuccaacaagggcgucaccgccgccugcucccacgccggcgccaaguccuucuacaagaaccucaucuggcucgucaagaagggcaacuccuaccccaagcucuccaaguccuacaucaacgacaagggcaaggagguccucguccucuggggcauccaccaccccuccaccaccgccgaccagcagucccucuaccagaacgccgacgccuacgucuucgucggcaccucccgcuacuccaagaaguucaagcccgagaucgccauccgccccaagguccgcgaccaggagggccgcaugaacuacuacuggacccucgucgagcccggcgacaagaucaccuucgaggccaccggcaaccucgucgucccccgcuacgccuucgccauggagcgcaacgccggcuccggcaucaucaucuccgacacccccguccacgacugcaacaccaccugccagacccccaagggcgccaucaacaccucccuccccuuccagaacauccaccccaucaccaucggcaagugccccaaguacgucaaguccaccaagcuccgccucgccaccggccuccgcaacguccccuccauccagucccgcggccucuucggcgccaucgccggcuucaucgagggcggcuggaccggcauggucgacggcugguacggcuaccaccaccagaacgagcagggcuccggcuacgccgccgaccucaaguccacccagaacgccaucgacaagaucaccaacaaggucaacuccgucaucgagaagaugaacacccaguucaccgccgucggcaaggaguucaaccaccucgagaagcgcaucgagaaccucaacaagaaggucgacgacggcuuccucgacaucuggaccuacaacgccgagcuccucguccuccucgagaacgagcgcacccucgacuaccacgacuccaacgucaagaaccucuacgagaaggucaagaaccagcucaagaacaacgccaaggagaucggcaacggcugcuucgaguucuaccacaagugcgacaacacccccaucaagaacgucaagaacggcaccuacgacuaccccaaguacuccgaggaggccaagcucaaccgcgaggagaucgacggcgucaagcucgaguccacccgcaucuaccagauccucgccaucuacuccaccgucgccuccucccucguccucgucgucucccucggcgccaucuccuucuggaugugcuccaacggcucccuccagugccgcaucugcaucuga

SEQ ID NO: 104276 - RNA, 1701 nt, Artificial Sequence
  derived and/or modified CDS sequence (opt2) from hemagglutinin__InfluenzaA__AFB77634
augaaggccauccucgucguccuccucuacaccuucgccaccgccaacgccgacacccucugcaucggcuaccacgccaacaacuccaccgacaccgucgacaccguccucgagaagaacgucaccgucacccacuccgucaaccuccucgaggacaagcacaacggcaagcucugcaagcuccgcggcgucgccccccuccaccucggcaagugcaacaucgccggcuggauccucggcaaccccgagugcgagucccucuccaccgccuccuccugguccuacaucgucgagaccuccuccuccgacaacggcaccugcuaccccggcgacuucaucaacuacgaggagcuccgcgagcagcucuccuccgucuccuccuucgagcgcuucgagaucuuccccaagaccuccuccuggcccaaccacgacuccaacaagggcgucaccgccgccugcccccacgccggcgccaaguccuucuacaagaaccucaucuggcucgucaagaagggcaacuccuaccccaagcucuccaaguccuacaucaacgacaagggcaaggagguccucguccucuggggcauccaccaccccuccaccaccgccgaccagcagucccucuaccagaacgccgacgccuacgucuucgucggcaccucccgcuacuccaagaaguucaagcccgagaucgccauccgccccaagguccgcgaccaggagggccgcaugaacuacuacuggacccucgucgagcccggcgagaagaucaccuucgaggccaccggcaaccucgucgucccccgcuacgccuucgccauggagcgcaacgccggcuccggcaucaucaucuccgacacccccguccacgacugcaacaccaccugccagacccccaagggcgccaucaacaccucccuccccuuccagaacauccaccccaucaccaucggcaagugccccaaguacgucaaguccaccaagcuccgccucgccaccggccuccgcaacguccccuccauccagucccgcggccucuucggcgccaucgccggcuucaucgagggcggcuggaccggcauggucgacggcugguacggcuaccaccaccagaacgagcagggcuccggcuacgccgccgaccucaaguccacccagaacgccaucgacaagaucaccaacaaggucaacuccgucaucgagaagaugaacacccaguucaccgccgucggcaaggaguucaaccaccucgagaagcgcaucgagaaccucaacaagaaggucgacgacggcuuccucgacaucuggaccuacaacgccgagcuccucguccuccucgagaacgagcgcacccucgacuaccacgacuccaacgucaagaaccucuacgagaagguccgcaaccagcucaagaacaacgccaaggagaucggcaacggcugcuucgaguucuaccacaagugcgacaacaccugcauggaguccgucaagaacggcaccuacgacuaccccaaguacuccgaggaggccaagcucaaccgcgaggagaucgacggcgucaagcucgaguccacccgcaucuaccagauccucgccaucuacuccaccgucgccuccucccucguccucgucgucucccucggcgccaucuccuucuggaugugcuccaacggcucccuccagugccgcaucugcaucuga

SEQ ID NO: 104277 - RNA, 1701 nt, Artificial Sequence
  derived and/or modified CDS sequence (opt2) from hemagglutinin__InfluenzaA__AFB77635
augaaggccauccucgucguccuccucuacaccuucgccaccgccaacgccgacacccucugcaucggcuaccacgccaacaacuccaccgacaccgucgacaccguccucgagaagaacgucaccgucacccacuccgucaaccuccucgaggacaagcacaacggcaagcucugcaagcuccgcggcgucgccccccuccaccucggcaagugcaacaucgccggcuggauccucggcaaccccgagugcgagucccucuccaccgccucccccugguccuacaucgucgagaccuccuccuccgacaacggcaccugcuaccccggcgacuucaucaacuacgaggagcuccgcgagcagcucuccuccgucuccuccuucgagcgcuucgagaucuuccccaagaccuccuccuggcccaaccacgacuccaacaagggcgucaccgccgccugcccccacgccggcgccaaguccuucuacaagaaccucaucuggcucgucaagaagggcaacuccuaccccaagcucuccaaguccuacaucaacgacaagggcaaggagguccucguccucuggggcauccaccaccccuccaccaccgccgaccagcagucccucuaccagaacgccgacgccuacgucuucgucggcaccucccgcuacuccaagaaguucaagcccgagaucgccauccgccccaagguccgcgaccaggagggccgcaugaacuacuacuggacccucgucgagcccggcgacaagaucaccuucgaggccaccggcaaccucgucgucccccgcuacgccuucgccauggagcgcaacgccggcuccggcaucaucaucuccgacacccccguccacgacugcaacaccaccugccagacccccaagggcgccaucaacaccucccuccccuuccagaacauccaccccaucaccaucggcaagugccccaaguacgucaaguccaccaagcuccgccucgccaccggccuccgcaacguccccuccauccagucccgcggccucuucggcgccaucgccggcuucaucgagggcggcuggaccggcauggucgacggcugguacggcuaccaccaccagaacgagcagggcuccggcuacgccgccgaccucaaguccacccagaacgccaucgacaagaucaccaacaaggucaacuccgucaucgagaagaugaacacccaguucaccgccgucggcaaggaguucaaccaccucgagaagcgcaucgagaaccucaacaagaaggucgacgacggcuuccucgacaucuggaccuacaacgccgagcuccucguccuccucgagaacgagcgcacccucgacuaccacgacuccaacgucaagaaccucuacgagaagguccgcaaccagcucaagaacaacgccaaggagaucggcaacggcugcuucgaguucuaccacaagugcgacaacaccugcauggaguccgucaagaacggcaccuacgacuaccccaaguacuccgaggaggccaagcucaaccgcgaggagaucgacggcgucaagcucgaguccacccgcaucuaccagauccucgccaucuacuccaccgucgccuccucccucguccucgucgucucccucggcgccaucuccuucuggaugugcuccaacggcucccuccagugccgcaucugcaucuga

SEQ ID NO: 104278 - RNA, 1701 nt, Artificial Sequence
  derived and/or modified CDS sequence (opt2) from hemagglutinin__InfluenzaA__AFB77636
augaaggccauccucgucguccuccucuacaccuucgccaccgccaacgccgacacccucugcaucggcuaccacgccaacaacuccaccgacaccgucgacaccguccucgagaagaacgucaccgucacccacuccgucaaccuccucgaggacaagcacaacggcaagcucugcaagcuccgcggcgucgccccccuccaccucggcaagugcaacaucgccggcuggauccucggcaaccccgagugcgagucccucuccaccgccuccuccugguccuacaucgucgagaccuccuccuccgacaacggcaccugcuaccccggcgacuucaucaacuacgaggagcuccgcgagcagcucuccuccgucuccuccuucgagcgcuucgagaucuuccccaagaccuccuccuggcccaaccacgacuccaacaagggcgucaccgccgccugcccccacgccggcgccaaguccuucuacaagaaccucaucuggcucgucaagaagggcaacuccuaccccaagcucuccaaguccuacaucaacgacaagggcaaggagguccucguccucuggggcauccaccaccccuccaccaccgccgaccagcagucccucuaccagaacgccgacgccuacgucuucgucggcaccucccgcuacuccaagaaguucaagcccgagaucgccauccgccccaagguccgcgaccaggagggccgcaugaacuacuacuggacccucgucgagcccggcgacaagaucaccuucgaggccaccggcaaccucgucgucccccgcuacgccuucgccauggagcgcaaggccggcuccggcaucaucaucuccgacacccccguccacgacugcaacaccaccugccagacccccaagggcgccaucaacaccucccuccccuuccagaacauccaccccaucaccaucggcaagugccccaaguacgucaaguccaccaagcuccgccucgccaccggccuccgcaacguccccuccauccagucccgcggccucuucggcgccaucgccggcuucaucgagggcggcuggaccggcauggucgacggcugguacggcuaccaccaccagaacgagcagggcuccggcuacgccgccgaccucaaguccacccagaacgccaucgacaagaucaccaacaaggucaacuccgucaucgagaagaugaacacccaguucaccgccgucggcaaggaguucaaccaccucgagaagcgcaucgagaaccucaacaagaaggucgacgacggcuuccucgacaucuggaccuacaacgccgagcuccucguccuccucgagaacgagcgcacccucgacuaccacgacuccaacgucaagaaccucuacgagaagguccgcaaccagcucaagaacaacgccaaggagaucggcaacggcugcuucgaguucuaccacaagugcgacaacaccugcauggaguccgucaagaacggcaccuacgacuaccccaaguacuccgaggaggccaagcucaaccgcgaggagaucgacggcgucaagcucgaguccacccgcaucuaccagauccucgccaucuacuccaccgucgccuccucccucgucauggucgucucccucggcgccaucuccuucuggaugugcuccaacggcucccuccagugccgcaucugcaucuga

SEQ ID NO: 104279 - RNA, 1701 nt, Artificial Sequence
  derived and/or modified CDS sequence (opt2) from hemagglutinin__InfluenzaA__AFB77637
augaaggccauccucgucguccuccucuacaccuucgccaccgccaacgccgacacccucugcaucggcuaccacgccaacaacuccaccgacaccgucgacaccguccucgagaagaacgucaccgucacccacuccgucaaccuccucgaggacaagcacaacggcaagcucugcaagcuccgcggcgucgccccccuccaccucggcaagugcaacaucgccggcuggauccucggcaaccccgagugcgagucccucuccaccgccuccuccugguccuacaucgucgagaccuccuccuccgacaacggcaccugcuaccccggcgacuucaucaacuacgaggagcuccgcgagcagcucuccuccgucuccuccuucgagcgcuucgagaucuuccccaagaccuccuccuggcccaaccacgacuccaacaagggcgucaccgccgccugcccccacgccggcgccaaguccuucuacaagaaccucaucuggcucgucaagaagggcaacuccuaccccaagcucuccaaguccuacaucaacgacaagggcaaggagguccucguccucuggggcauccaccaccccuccaccaccgccgaccagcagucccucuaccagaacgccgacgccuacgucuucgucggcaccucccgcuacuccaagaaguucaagcccgagaucgccauccgccccaagggccgcgaccaggagggccgcaugaacuacuacuggacccucgucgagcccggcgacaagaucaccuucgaggccaccggcaaccucgucgucccccgcuacgccuucgccauggagcgcaacgccggcuccggcaucaucaucuccgacacccccguccacgacugcaacaccaccugccagacccccaagggcgccaucaacaccucccuccccuuccagaacauccaccccaucaccaucggcaagugccccaaguacgucaaguccaccaagcuccgccucgccaccggccuccgcaacguccccuccauccagucccgcggccucuucggcgccaucgccggcuucaucgagggcggcuggaccggcauggucgacggcugguacggcuaccaccaccagaacgagcagggcuccggcuacgccgccgaccucaaguccacccagaacgccaucgacaagaucaccaacaaggucaacuccgucaucgagaagaugaacacccaguucaccgccgucggcaaggaguucaaccaccucgagaagcgcaucgagaaccucaacaagaaggucgacgacggcuuccucgacaucuggaccuacaacgccgagcuccucguccuccucgagaacgagcgcacccucgacuaccacgacuccaacgucaagaaccucuacgagaagguccgcaaccagcucaagaacaacgccaaggagaucggcaacggcugcuucgaguucuaccacaagugcgacaacaccugcauggaguccgucaagaacggcaccuacgacuaccccaaguacuccgaggaggccaagcucaaccgcgaggagaucgacggcgucaagcucgaguccacccgcaucuaccagauccucgccaucuacuccaccgucgccuccucccucguccucgucgucucccucggcgccaucuccuucuggaugugcuccaacggcucccuccagugccgcaucugcaucuga

SEQ ID NO: 104280 - RNA, 1701 nt, Artificial Sequence
  derived and/or modified CDS sequence (opt2) from hemagglutinin__InfluenzaA__AFB77638
augaaggccauccucgucguccuccucuacaccuucgccaccgccaacgccgacacccucugcaucggcuaccacgccaacaacuccaccgacaccgucgacaccguccucgagaagaacgucaccgucacccacuccgucaaccuccucgaggacaagcacaacggcaagcucugcaagcuccgcggcgucgccccccuccaccucggcaagugcaacaucgccggcuggauccucggcaaccccgagugcgagucccucuccaccgccuccuccugguccuacaucgucgagaccuccuccuccgacaacggcaccugcuaccccggcgacuucaucaacuacgaggagcuccgcgagcagcucuccuccgucuccuccuucgagcgcuucgagaucuuccccaagaccuccuccuggcccaaccacgacuccaacaagggcgucaccgccgccugcccccacgccggcgccaaguccuucuacaagaaccucaucuggcucgucaagaagggcaacuccuaccccaagcucuccaaguucuacaucaacgacaagggcaaggagguccucguccucuggggcauccaccaccccuccaccaccgccgaccagcagucccucuaccagaacgccgacgccuacgucuucgucggcaccucccgcuacuccaagaaguucaagcccgagaucgccauccgccccaagguccgcgaccaggagggccgcaugaacuacuacuggacccucgucgagcccggcgacaagaucaccuucgaggccaccggcaaccucgucgucccccgcuacgccuucgccauggagcgcaacgccggcuccggcaucaucaucuccgacacccccguccacgacugcaacaccaccugccagacccccaagggcgccaucaacaccucccuccccuuccagaacauccaccccaucaccaucggcaagugccccaaguacgucaaguccaccaagcuccgccucgccaccggccuccgcaacguccccuccauccagucccgcggccucuucggcgccaucgccggcuucaucgagggcggcuggaccggcauggucgacggcugguacggcuaccaccaccagaacgagcagggcuccggcuacgccgccgaccucaaguccacccagaacgccaucgacaagaucaccaacaaggucaacuccgucaucgagaagaugaacacccaguucaccgccgucggcaaggaguucaaccaccucgagaagcgcaucgagaaccucaacaagaaggucgacgacggcuuccucgacaucuggaccuacaacgccgagcuccucguccuccucgagaacgagcgcacccucgacuaccacgacuccaacgucaagaaccucuacgagaagguccgcaaccagcucaagaacaacgccaaggagaucggcaacggcugcuucgaguucuaccacaagugcgacaacaccugcauggaguccgucaagaacggcaccuacgacuaccccaaguacuccgaggaggccaagcucaaccgcgaggagaucgacggcgucaagcucgaguccacccgcaucuaccagauccucgccaucuacuccaccgucgccuccucccucguccucgucgucucccucggcgccaucuccuucuggaugugcuccaacggcucccuccagugccgcaucugcaucuga

SEQ ID NO: 104281 - RNA, 1701 nt, Artificial Sequence; identical to SEQ ID NO: 102903
  derived and/or modified CDS sequence (opt2) from hemagglutinin__InfluenzaA__AFB77639

SEQ ID NO: 104282 - RNA, 1701 nt, Artificial Sequence
  derived and/or modified CDS sequence (opt2) from hemagglutinin__InfluenzaA__AFB77640
augaaggccauccucgucguccuccucuacaccuucgccaccgccaacgccgacacccucugcaucggcuaccacgccaacaacuccaccgacaccgucgacaccguccucgagaagaacgucaccgucacccacuccgucaaccuccucgaggacaagcacaacggcaagcucugcaagcuccgcggcgucgccccccuccaccucggcaagugcaacaucgccggcuggauccucggcaaccccgagugcgagucccucuccaccgccuccuccugguccuacaucgucgagaccuccuccuccgacaacggcaccugcuaccccggcgacuucaucaacuacgaggagcuccgcgagcagcucuccuccgucuccuccuucgagcgcuucgagaucuuccccaagaccuccuccuggcccaaccacgacuccaacaagggcgucaccgccgccugcccccacgccggcgccaaguccuucuacaagaaccucaucuggcucgucaagaagggcaacuccuaccccaagcucuccaaguccuacaucaacgacaagggcaaggagguccucguccucuggggcauccaccaccccuccaccaccgccgaccagcagggccucuaccagaacgccgacgccuacgucuucgucggcaccucccgcuacuccaagaaguucaagcccgagaucgccauccgccccaagguccgcgaccaggagggccgcaugaacuacuacuggacccucgucgagcccggcgacaagaucaccuucgaggccaccggcaaccucgucgucccccgcuacgccuucgccauggagcgcaacgccggcuccggcaucaucaucuccgacacccccguccacgacugcaacaccaccugccagacccccaagggcgccaucaacaccucccuccccuuccagaacauccaccccaucaccaucggcaagugccccaaguacgucaaguccaccaagcuccgccucgccaccggccuccgcaacguccccuccauccagucccgcggccucuucggcgccaucgccggcuucaucgagggcggcuggaccggcauggucgacggcugguacggcuaccaccaccagaacgagcagggcuccggcuacgccgccgaccucaaguccacccagaacgccaucgacaagaucaccaacaaggucaacuccgucaucgagaagaugaacacccaguucaccgccgucggcaaggaguucaaccaccucgagaagcgcaucgagaaccucaacaagaaggucgacgacggcuuccucgacaucuggaccuacaacgccgagcuccucguccuccucgagaacgagcgcacccucgacuaccacgacuccaacgucaagaaccucuacgagaagguccgcaaccagcucaagaacaacgccaaggagaucggcaacggcugcuucgaguucuaccacaagugcgacaacaccugcauggaguccgucaagaacggcaccuacgacuaccccaaguacuccgaggaggccaagcucaaccgcgaggagaucgacggcgucaagcucgaguccacccgcaucuaccagauccucgccaucuacuccaccgucgccuccucccucguccucgucgucucccucggcgccaucuccuucuggaugugcuccaacggcucccuccagugccgcaucugcaucuga

SEQ ID NO: 104283 - RNA, 1701 nt, Artificial Sequence
  derived and/or modified CDS sequence (opt2) from hemagglutinin__InfluenzaA__AFB77641
augaaggccauccucgucguccuccucuacaccuucgccaccgccaacgccgacacccucugcaucggcuaccacgccaacaacuccaccgacaccgucgacaccguccucgagaagaacgucaccgucacccacuccgucaaccuccucgaggacaagcacaacggcaagcucugcaagcuccgcggcgucgccccccuccaccucggcaagugcaacaucgccggcuggauccucggcaaccccgagugcgagucccucuccaccgccuccuccugguccuacaucgucgagaccuccuccuccgacaacggcaccugcuaccccggcgacuucaucaacuacgaggagcuccgcgagcagcucuccuccgucuccuccuucgagcgcuucgagaucuuccccaagaccuccuccuggcccaaccacgacuccaacaagggcgucaccgccgccugcccccacgccggcgccaaguccuucuacaagaaccucaucuggcucgucaagaagggcaacuccuaccccaagcucuccaaguccuacaucaacgacaagggcaaggagguccucguccucuggggcauccaccaccccuccaccaccgccgaccagcagucccucuaccagaacgccgacgccuacgucuucgucggcaccucccgcuacuccaagaaguucaagcccgagaucgccauccgccccaagguccgcgaccaggagggccgcaugaacuacuacuggacccucgucgagcccggcgacaagaucaccuucgaggccaccggcaaccucgucgucccccgcuacgccuucgccauggagcgcaacgccggcuccggcaucaucaucuccgacacccccguccacgacugcaacaccaccugccagacccccaagggcgccaucaacaccucccuccccuuccagaacauccaccccaucaccaucggcaagugccccaaguacgucaaguccaccaagcuccgccucgccaccggccuccgcaacguccccuccauccagucccgcggccucuucggcgccaucgccggcuucaucgagggcggcuggaccggcauggucgacggcugguacggcuaccaccaccagaacgagcagggcuccggcuacgccgccgaccucaaguccacccagaacgccaucgacaagaucaccaacaaggucaacuccgucaucgagaagaugaacacccaguucaccgccgucggcaaggaguucaaccaccucgagaagcgcaucgagaaccucaacaagaaggucgacgacggcuuccucgacaucuggaccuacaacgccgagcuccucguccuccucgagaacgagcgcacccucgacuaccacgacuccaacgucaagaaccucuacgagaagguccgcaaccagcucaagaacaacgccaaggagaucggcaacggcugcuucgaguucuaccacaagugcgacaacaugugcauggaguccgucaagaacggcaccuacgacuaccccaaguacuccgaggaggccaagcucaaccgcgaggagaucgacggcgucaagcucgaguccacccgcaucuaccagauccucgccaucuacuccaccgucgccuccucccucguccucgucgucucccucggcgccaucuccuucuggaugugcuccaacggcucccuccagugccgcaucugcaucuga

SEQ ID NO: 104284 - RNA, 1701 nt, Artificial Sequence; identical to SEQ ID NO: 102903
  derived and/or modified CDS sequence (opt2) from hemagglutinin__InfluenzaA__AFB77642

SEQ ID NO: 104285 - RNA, 1701 nt, Artificial Sequence
  derived and/or modified CDS sequence (opt2) from hemagglutinin__InfluenzaA__AFB77643
augaaggccauccucgucguccuccucuacaccuucgccaccgccaacgccgacacccucugcaucggcuaccacgccaacaacuccaccgacaccgucgacaccguccucgagaagaacgucaccgucacccacuccgucaaccuccucgaggacaagcacaacggcaagcucugcaagcuccgcggcgucgccccccuccaccucggcaagugcaacaucgccggcuggauccucggcaaccccgagugcgagucccucuccaccgccuccuccugguccuacaucgucgagaccuccuccuccgacaacggcaccugcuaccccggcgacuucaucaacuacgaggagcuccgcgagcagcucuccuccgucuccuccuucgagcgcuucgagaucuuccccaagcccuccuccuggcccaaccacgacuccaacaagggcgucaccgccgccugcccccacgccggcgccaaguccuucuacaagaaccucaucuggcucgucaagaagggcaacuccuaccccaagcucuccaaguccuacaucaacgacaagggcaaggagguccucguccucuggggcauccaccaccccuccaccaccgccgaccagcagucccucuaccagaacgccgacgccuacgucuucgucggcaccucccgcuacuccaagaaguucaagcccgagaucgccauccgccccaagguccgcgaccaggagggccgcaugaacuacuacuggacccucgucgagcccggcgacaagaucaccuucgaggccaccggcaaccucgucgucccccgcuacgccuucgccauggagcgcaacgccggcuccggcaucaucaucuccgacacccccguccacgacugcaacaccaccugccagacccccaagggcgccaucaacaccucccuccccuuccagaacauccaccccaucaccaucggcaagugccccaaguacgucaaguccaccaagcuccgccucgccaccggccuccgcaacguccccuccauccagucccgcggccucuucggcgccaucgccggcuucaucgagggcggcuggaccggcauggucgacggcugguacggcuaccaccaccagaacgagcagggcuccggcuacgccgccgaccucaaguccacccagaacgccaucgacaagaucaccaacaaggucaacuccgucaucgagaagaugaacacccaguucaccgccgucggcaaggaguucaaccaccucgagaagcgcaucgagaaccucaacaagaaggucgacgacggcuuccucgacaucuggaccuacaacgccgagcuccucguccuccucgagaacgagcgcacccucgacuaccacgacuccaacgucaagaaccucuacgagaagguccgcaaccagcucaagaacaacgccaaggagaucggcaacggcugcuucgaguucuaccacaagugcgacaacaccugcauggaguccgucaagaacggcaccuacgacgacaccaaggacuccgaggaggccaagcucaaccgcgaggagaucgacggcgucaagcucgaguccacccgcaucuaccagauccucgccaucuacuccaccgucgccuccucccucguccucgucgucucccucggcgccaucuccuucuggaugugcuccaacggcucccuccagugccgcaucugcaucuga

SEQ ID NO: 104286 - RNA, 1701 nt, Artificial Sequence
  derived and/or modified CDS sequence (opt2) from hemagglutinin__InfluenzaA__AFB77691
augaagaccaucaucgcccucuccuacauccucugccucgucuucgcccagaagcuccccggcaacgacaacuccaccgccacccucugccucggccaccacgccguccccaacggcaccaucgucaagaccaucaccaacgaccagaucgaggucaccaacgccaccgagcucguccagaacuccuccaccggcgagaucugcgacuccccccaccagauccucgacggcgagaacugcacccucaucgacgcccuccucggcgacccccagugcgacggcuuccagaacaagaagugggaccucuucgucgagcgcuccaaggccuacuccaacugcuaccccuacgacguccccgacuacgccucccuccgcucccucgucgccuccuccggcacccucgaguucaacaacgaguccuucaacuggaccggcgucacccagaacggcaccuccuccgccugcauccgccgcuccaacaacuccuucuucucccgccucaacuggcucacccaccucaacuucaaguaccccgcccucaacgucaccaugcccaacaacgagcaguucgagaagcucuacaucuggggcguccaccaccccggcaccgacaaggaccagaucuuccucuacgcccaggccuccggccgcaucaccgucuccaccaagcgcucccagcaggccgucauccccaacaucggcucccgccuccgcguccgcaacauccccucccgcaucuccaucuacuggaccaucgucaagcccggcgacauccuccucaucaacuccaccggcaaccucaacgccccccgcggcuacuucaagauccgcuccggcaaguccuccaucaugcgcuccgacgcccccaucggcaagugcaacuccgagugcaucacccccaacggcuccauccccaacgacaagcccuuccagaacgucaaccgcaucaccuacggcgccugcccccgcuacgucaagcagaacacccucaagcucgccaccggcaugcgcaacguccccgagaagcagacccgcggcaucuucggcgccaucgccggcuucaucgagaacggcugggagggcauggucgacggcugguacggcuuccgccaccagaacuccgagggccgcggccaggccgccgaccucaaguccacccaggccgccaucgaccagaucaacggcaagcucaaccgccucaucggcaagaccaacgagaaguuccaccagaucgagaaggaguucuccgaggucgagggccgcauccaggaccucgagaaguacgucgaggacaccaagaucgaccucugguccuacaacgccgagcuccucgucgcccucgagaaccagcacaccaucgaccucaccgacuccgagaugaacaagcucuucgagaagaccaagaaccagcuccgcgagaacgccgaggacaugggcaacggcugcuucaagaucuaccacaagugcgacaacaccugcaucggcuccauccgcaacggcaccuacgaccacgacgccuaccgcgacgaggcccucaacaaccgcuuccagaucaagggcgucgagcucaaguccggcuacaaggacuggauccucuggaucuccuucgccaucuccugcuuccuccucugcgucgcccuccucggcuucaucaugugggccugccagaagggcaacauccgcugcaacaucugcaucuga

SEQ ID NO: 104287 - RNA, 1701 nt, Artificial Sequence
  derived and/or modified CDS sequence (opt2) from hemagglutinin__InfluenzaA__AFB77692
augaagaccaucaucgcccucuccuacauccucugccucgucuucgcccagaagcuccccggcaacgacaacuccaccgccacccucugccucggccaccacgccguccccaacggcaccaucgucaagaccaucaccaacgaccagaucgaggucaccaacgccaccgagcucguccagaacuccuccaccggcgagaucugcgacuccccccaccagauccucgacggcgagaacugcacccucaucgacgcccuccucggcgacccccagugcgacggcuuccagaacaagaagugggaccucuucgucgagcgcuccaaggccuacuccaacugcuaccccuacgacguccccgacuacgccucccuccgcucccucgucgccuccuccggcacccucgaguucaacaacgaguccuucaacuggaccggcgucacccagaacggcaccuccuccgccugcauccgccgcuccaacaacuccuucuucucccgccucaacuggcucacccaccucaacuucaaguaccccgcccucaacgucaccaugcccaacaacgagcaguucgacaagcucuacaucuggggcguccaccaccccggcaccgacaaggaccagaucuuccucuacgcccaggccuccggccgcaucaccgucuccaccaagcgcucccagcaggccgucauccccaacaccggcucccgcccccgcguccgcaacauccccucccgcaucuccaucuacuggaccaucgucaagcccggcgacauccuccucaucaacuccaccggcaaccucaucgccccccgcggcuacuucaagauccgcuccggcaaguccuccaucaugcgcuccgacgcccccaucggcaagugcaacuccgagugcaucacccccaacggcuccauccccaacgacaagcccuuccagaacgucaaccgcaucaccuacggcgccugcccccgcuacgucaagcagaacacccucaagcucgccaccggcaugcgcaacguccccgagaagcagacccgcggcaucuucggcgccaucgccggcuucaucgagaacggcugggagggcauggucgacggcugguacggcuuccgccaccagaacuccgagggccgcggccaggccgccgaccucaaguccacccaggccgccaucgaccagaucaacggcaagcucaaccgccucaucggcaagaccaacgagaaguuccaccagaucgagaaggaguucuccgaggucgagggccgcauccaggaccucgagaaguacgucgaggacaccaagaucgaccucugguccuacaacgccgagcuccucgucgcccucgagaaccagcacaccaucgaccucaccgacuccgagaugaacaagcucuucgagaagaccaagaagcagcuccgcgagaacgccgaggacaugggcaacggcugcuucaagaucuaccacaagugcgacaacgccugcaucggcuccauccgcaacggcaccuacgaccacgacgucuaccgcgacgaggcccucaacaaccgcuuccagaucaagggcgucgagcucaaguccggcuacaaggacuggauccucuggaucuccuucgccaucuccugcuuccuccucugcgucgcccuccucggcuucaucaugugggccugccagaagggcaacauccgcugcaacaucugcaucuga

SEQ ID NO: 104288 - RNA, 1701 nt, Artificial Sequence; identical to SEQ ID NO: 103818
  derived and/or modified CDS sequence (opt2) from hemagglutinin__InfluenzaA__AFB77693

SEQ ID NO: 104289 - RNA, 1701 nt, Artificial Sequence
  derived and/or modified CDS sequence (opt2) from hemagglutinin__InfluenzaA__AFB77694
augaagaccaucaucgcccucuccuacauccucugccucgucuucgcccagaagcuccccggcaacgacaacuccaccgccacccucugccucggccaccacgccguccccaacggcaccaucgucaagaccaucgccaacgaccagaucgaggucaccaacgccaccgagcucguccagaacuccuccaccggcgagaucugcgacuccccccaccagauccucgacggcgagaacugcacccucaucgacgcccuccucggcgacccccagugcgacgacuuccagaacaagaagugggaccucuucgucgagcgcuccaaggccuacuccaacugcuaccccuacgacguccccgacuacgccucccuccgcucccucgucgccuccuccggcacccucgaguucaacaacgaguccuucaacuggaccggcgucacccagaacggcaccuccuccgccugcauccgccgcuccaacaacuccuucuucucccgccucaacuggcucacccaccucaacuucaaguaccccgcccucaacgucaccaugcccaacaacgagcaguucgacaagcucuacaucuggggcguccaccaccccggcaccgacaaggaccagaucuuccucuacgcccaggccuccggccgcaucaccgucuccaccaagcgcucccagcaggccgucauccccaacaucggcucccgcccccgcguccgcaacauccccucccgcaucuccaucuacuggaccaucgucaagcccggcgacauccuccucaucaacuccaccggcaaccucaucgccccccgcggcuacuucaagauccgcuccggcaaguccuccaucaugcgcuccgacgcccccaucggcaagugcaacuccgagugcaucacccccaacggcuccauccccaacgacaagcccuuccagaacgucaaccgcaucaccuacggcgccugcccccgcuacgucaagcagaacacccucaagcucgccaccggcaugcgcaacguccccgagaagcagacccgcggcaucuucggcgccaucgccggcuucaucgagaacggcugggagggcauggucgacggcugguacggcuuccgccaccagaacuccgagggccgcggccaggccgccgaccucaaguccacccaggccgccaucgaccagaucaacggcaagcucaaccgccucaucggcaagaccaacgagaaguuccaccagaucgagaaggaguucuccgaggucgagggccgcauccaggaccucgagaaguacgucgaggacaccaagaucgaccucugguccuacaacgccgagcuccucgucgcccucgagaaccagcacaccaucgaccucaccgacuccgagaugaacaagcucuucgagaagaccaagaagcagcuccgcgagaacgccgaggacaugggcaacggcugcuucaagaucuaccacaagugcgacaacaccugcaucggcuccauccgcaacggcaccuacgaccacgacgucuaccgcgacgaggcccucaacaaccgcuuccagaucaagggcgucgagcucaaguccggcuacaaggacuggauccucuggaucuccuucgccaucuccugcuuccuccucugcgucgcccuccucggcuucaucaugugggccugccagaagggcaacauccgcugcaacaucugcaucuga

SEQ ID NO: 104290 - RNA, 1701 nt, Artificial Sequence
  derived and/or modified CDS sequence (opt2) from hemagglutinin__InfluenzaA__AFB77695
augaagaccaucaucgcccucuccuacauccucugccucgucuucgcccagaagcuccccggcaacgacaacuccaccgccacccucugccucggccaccacgccguccccaacggcaccaucgucaagaccaucaccaacgaccagaucgaggucaccaacgccaccgagcucguccagaacuccuccaccggcgagaucugcgacuccccccaccagauccucgacggcgagaacugcacccucaucgacgcccuccucggcgacccccagugcgacgacuuccagaacaagaagugggaccucuucgucgagcgcuccaaggccuacuccaacugcuaccccuacgacguccccgacuacgccucccuccgcucccucgucgccuccuccggcacccucgaguucaacaacgaguccuucaacuggaccggcgucacccagaacggcaccuccuccgccugcauccgccgcuccaacaacuccuucuucucccgccucaacuggcucacccaccucaacuucaaguaccccgcccucaacgucaccaugcccaacaacgagcaguucgacaagcucuacaucuggggcguccaccaccccggcaccgacaaggaccagaucuuccucuacgcccaggccuccggccgcaucaccgucuccaccaagcgcucccagcaggccgucauccccaacaucggcucccgcccccgcguccgcaacauccccucccgcaucuccaucuacuggaccaucgucaagcccggcgacauccuccucaucaacuccaccggcaaccucaucgccccccgcggcuacuucaagauccgcuccggcaaguccuccaucaugcgcuccgacgcccccaucggcaagugcaacuccgagugcaucacccccaacggcuccauccccaacgacaagcccuuccagaacgucaaccgcaucaccuacggcgccugcccccgcuacgucaagcagaacacccucaagcucgccaccggcaugcgcaacguccccgagaagcagacccgcggcaucuucggcgccaucgccggcuucaucgagaacggcugggagggcauggucgacggcugguacggcuuccgccaccagaacuccgagggccgcggccaggccgccgaccucaaguccacccaggccgccaucgaccagaucaacggcaagcucaaccgccucaucggcaagaccaacgagaaguuccaccagaucgagaaggaguucuccgaggucgagggccgcauccaggaccucgagaaguacgucgaggacaccaagaucgaccucugguccuacaacgccgagcuccucgucgcccucgagaaccagcacaccaucgaccucaccgacuccgagaugaacaagcucuucgagaagaccaagaagcagcuccgcgagaacgccgaggacaugggcaacggcugcuucaagaucuaccacaagugcgacaacgccugcaucggcuccauccgcaacggcaccuacgaccacgacgucuaccgcgacgaggcccucaacaaccgcuuccagaucaagggcgucgagcucaaguccggcuacaaggacuggauccucuggaucuccuucgccaucuccugcuuccuccucugcgucgcccuccucggcuucaucaugugggccugccagaagggcaacauccgcugcaacaucugcaucuga

SEQ ID NO: 104291 - RNA, 1701 nt, Artificial Sequence
  derived and/or modified CDS sequence (opt2) from hemagglutinin__InfluenzaA__AFB78126
augaagaccaucaucgcccucuccuacauccucugccucgucuucgcccagaagcuccccggcaacgacaacuccaccgccacccucugccucggccaccacgccgucuccaacggcacccucgucaagaccaucaccaacgaccagaucgaggucaccaacgccaccgagcucguccaguccuccuccaccggccgcaucugcgacuccccccaccagauccucgacggcgagaacugcacccucaucgacgcccuccucggcgacccccacugcgacggcuuccagaacaaggagugggaccucuucgucgagcgcuccaaggccuacuccaacugcuaccccuacgacguccccgacuacgccucccuccgcucccucgucgccuccuccggcacccucgaguucaacaacgaguccuucaacuggaccggcgucgcccaggacggcaccuccuccgccugcaagcgccgcuccaacaaguccuucuucucccgccucaacuggcuccaccagcucaaguacaaguaccccgcccucaacgucaccaugcccaacaacgagaaguucgacaagcucuacaucuggggcguccaccaccccuccaccgacuccgaccagaucuccaucuacgcccaggccuccggccgcgucaccgucuccaccaagcgcucccagcagaccgucauccccaacaucggcuccucccccuggguccgcggcgccuccucccgcaucuccaucuacuggaccaucgucaagcccggcgacauccuccucaucaacuccaccggcaaccucaucgccccccgcggcuacuucaagauccgcuccggcaaguccuccaucaugcgcuccgacgcccccaucggcaagugcaacuccgagugcaucacccccaacggcuccauccccaacgacaagcccuuccagaacgucaaccgcaucaccuacggcgccugcccccgcuacgucaagcagaacacccucaagcucgccaccggcaugcgcaacguccccgagaagcagacccgcggcaucuucggcgccaucgccggcuucaucgagaacggcugggagggcauggucgacggcugguacggcuuccgccaccagaacuccgagggcaccggccaggccgccgaccucaaguccacccaggccgccaccaaccagaucaacggcaagcucaaccgccucaucgagaagaccaacgagaaguuccaccagaucgagaaggaguucuccgaggucgagggccgcauccaggaccucgagaaguacgucgaggacaccaagaucgaccucugguccuacaacgccgagcuccucgucgcccucgagaaccagcacaccaucgaccucaccgacuccgagaugaacaagcucuucgagcgcaccaagaagcagcuccgcgagaacgccgaggacaugggcaacggcugcuucaagaucuaccacaagugcgacaacgccugcaucggcuccauccgcaacggcaccuacgaccacgacgucuaccgcgacgaggcccucaacaaccgcuuccagaucaagggcgucgagcucaaguccggcuacaaggacuggauccucuggaucuccuucgccaucuccugcuuccuccucugcgucguccuccucggcuucaucaugugggccugccagaagggcaacauccgcugcaacaucugcaucuga

SEQ ID NO: 104292 - RNA, 1701 nt, Artificial Sequence
  derived and/or modified CDS sequence (opt2) from hemagglutinin__InfluenzaA__AFC34056
augaagaccaucaucgcccucuccuacauccucugccucgucuucgcccagaagcuccccggcaacgacaacuccaccgccacccucugccucggccaccacgccguccccaacggcaccaucgucaagaccaucaccaacgaccagaucgaggucaccaacgccaccgagcucguccaguccuccuccaccggcgagaucugcgacuccccccaccagauccucgacggcgagaacugcacccucaucgacgcccuccucggcgacccccagugcgacggcuuccagaacaagaagugggaccucuucgucgagcgcuccaaggccuacuccaacugcuaccccuacgacguccccgacuacgccucccuccgcucccucgucgccuccuccggcacccucgaguucaacaacgaguccuucaacuggaccggcgucacccagaacggcaccuccuccgccugcauccgccgcuccaacuccuccuucuucucccgccucaacuggcucacccaccucaacuucaaguaccccgcccucaacgucaccaugcccaacaacgagcaguucgacaagcucuacaucuggggcguccaccaccccggcaccgacaaggaccagaucuuccucuacgcccaguccuccggccgcaucaccgucuccaccaagcgcucccagcaggccgucauccccaacaucggcucccgcccccgcauccgcaacauccccucccgcaucuccaucuacuggaccaucgucaagcccggcgacauccuccucaucaacuccaccggcaaccucaucgccccccgcggcuacuucaagauccgcuccggcaaguccuccaucaugcgcuccgacgcccccaucggcaagugcaacuccgagugcaucacccccaacggcuccauccccaacgacaagcccuuccagaacgucaaccgcaucaccuacggcgccugcccccgcuacgucaagcagcgcacccucaagcucgccaccggcaugcgcaacguccccgagaagcagacccgcggcaucuucggcgccaucgccggcuucaucgagaacggcugggagggcauggucgacggcugguacggcuuccgccaccagaacuccgagggccgcggccaggccgccgaccucaaguccacccaggccgccaucgaccagaucaacggcaagcucaaccgccucaucggcaagaccaacgagaaguuccaccagaucgagaaggaguucuccgaggucgagggccgcauccaggaccucgagaaguacgucgaggacaccaagaucgaccucugguccuacaacgccgagcuccucgucgcccucgagaaccagcacaccaucgaccucaccgacuccgagaugaacaagcucuucgagaagaccaagaagcagcuccgcgagaacgccgaggacaugggcaacggcugcuucaagaucuaccacaagugcgacaacgccugcaucggcuccauccgcaacggcaccuacaaccacgacgucuaccgcgacgaggcccucaacaaccgcuuccagaucaagggcgucgagcucaaguccggcuacaaggacuggauccucuggaucuccuucgccaucuccugcuuccuccucugcgucgcccuccucggcuucaucaugugggccugccagaagggcaacauccgcugcaacaucugcaucuga

SEQ ID NO: 104293 - RNA, 1701 nt, Artificial Sequence; identical to SEQ ID NO: 104292
  derived and/or modified CDS sequence (opt2) from hemagglutinin__InfluenzaA__AFC34057

SEQ ID NO: 104294 - RNA, 1701 nt, Artificial Sequence
  derived and/or modified CDS sequence (opt2) from hemagglutinin__InfluenzaA__AFD32426
augaaggccaaccuccucguccuccucuccgcccucgccgccgccgacgccgacaccaucugcaucggcuaccacgccaacaacuccaccgacaccgucgacaccguccucgagaagaacgucaccgucacccacuccgucaaccuccucgaggacucccacaacggcaagcucugcaagcuccgcggcgucgccccccuccaccucggcaagugcaacaucgccggccgcauccucggcaaccccgagugcgagucccucuccaccgccuccuccugguccuacaucgucgagacccccuccuccgacaacggcaccugcuaccccggcgacuucaucgacuacgaggagcuccgcgagcagcucuccuccgucuccuccuucgagcgcuucgagaucuuccccaagaccuccuccuggcccaaccacgacuccaacaagggcgucaccgccgccugcccccacgccggcgccaaguccuucuacaagaaccucaucuggcucgucaagaagggcaacuccuaccccaagcucuccaaguccuacaucaacgacaagggcaaggagguccucguccucuggggcauccaccaccccuccaccuccgccgaccagcagucccucuaccagaacgccgacaccuacgucuucgucggcuccucccgcuacuccaagaaguucaagcccgagaucgccauccgccccaagguccgcgaccaggagggccgcaugaacuacuacuggacccucgucgagcccggcgacaagaucaccuucgaggccaccggcaaccucgucgucccccgcuacgccuucgccauggagcgcaacgccggcuccggcaucaucaucuccgacacccccguccacgacugcaacaccaagugccagaccccccucggcgccaucaacuccucccuccccuaccagaacauccaccccgucaccaucggcgagugccccaaguacguccgcuccgccaagcuccgcauggucaccggccuccgcaacacccccuccauccagucccgcggccucuucggcgccaucgccggcuucaucgagggcggcuggaccggcaugaucgacggcugguacggcuaccaccaccagaacgagcagggcuccggcuacgccgccgaccagaaguccacccagaacgccaucaacggcaucaccaacaaggucaacaccgucaucgagaagaugaacauccaguucaccgccgucggcaaggaguucaacaagcucgagaagcgcauggagaaccucaacaagaaggucgacgacggcuuccucgacaucuggaccuacaacgccgagcuccucguccuccucgagaacgagcgcacccucgacuuccacgacuccaacgucaagaaccucuacgagaaggucaagucccagcucaagaacaacgccaaggagaucggcaacggcugcuucgaguucuaccacaagugcgacaacgagugcauggaguccguccgcaacggcaccuacgacuaccccaaguacuccgaggaguccaagcucaaccgcgagaaggucgacggcgucaagcucgaguccaugggcaucuaccagauccucgccaucuacuccaccgucgccuccucccucguccuccucgucucccucggcgccaucuccuucuggaugugcuccaacggcucccuccagugccgcaucugcaucuga

SEQ ID NO: 104295 - RNA, 1698 nt, Artificial Sequence
  derived and/or modified CDS sequence (opt2) from hemagglutinin__InfluenzaA__AFD32427
augaaggccaaccuccucguccuccucuccgcccucgccgccgccgacgccgacaccaucugcaucggcuaccacgccaacaacuccaccgacaccgucgacaccguccucgagaagaacgucaccgucacccacuccgucaaccuccucgaggacucccacaacggcaagcucugcgaccucgacggcgucaagccccucauccuccgcgacugcuccgucgccggcuggcuccucggcaaccccaugugcgacgaguucaucaacguccccgagugguccuacaucgucgagaaggccaaccccgucaacgaccucugcuaccccggcgacuucaacgacuacgaggagcucaagcaccuccucucccgcaucaaccacuucgagaagauccagaucauccccaaguccuccugguccucccacgaggccucccucggcgucuccuccgccugccccuaccagggcaaguccuccuucuuccgcaacgucgucuggcucaucaagaagaacuccaccuaccccaccaucaagcgcuccuacaacaacaccaaccaggaggaccuccucguccucuggggcauccaccaccccaacgacgccgccgagcagaccaagcucuaccagaaccccaccaccuacaucuccgucggcaccuccacccucaaccagcgccucgucccccgcaucgccacccgcuccaaggucaacggccaguccggccgcauggaguucuucuggaccauccucaagcccaacgacgccaucaacuucgaguccaacggcaacuucaucgcccccgaguacgccuacaagaucgucaagaagggcgacuccaccaucaugaaguccgagcucgaguacggcaacugcaacaccaagugccagaccccccucggcgccaucaacuccucccuccccuaccagaacauccaccccgucaccaucggcgagugccccaaguacguccgcuccgccaagcuccgcauggucaccggccuccgcaacacccccuccauccagucccgcggccucuucggcgccaucgccggcuucaucgagggcggcuggaccggcaugaucgacggcugguacggcuaccaccaccagaacgagcagggcuccggcuacgccgccgaccagaaguccacccagaacgccaucaacggcaucaccaacaaggucaacaccgucaucgagaagaugaacauccaguucaccgccgucggcaaggaguucaacaagcucgagaagcgcauggagaaccucaacaagaaggucgacgacggcuuccucgacaucuggaccuacaacgccgagcuccucguccuccucgagaacgagcgcacccucgacuuccacgacuccaacgucaagaaccucuacgagaaggucaagucccagcucaagaacaacgccaaggagaucggcaacggcugcuucgaguucuaccacaagugcgacaacgagugcauggaguccguccgcaacggcaccuacgacuaccccaaguacuccgaggaguccaagcucaaccgcgagaaggucgacggcgucaagcucgaguccaugggcaucuaccagauccucgccaucuacuccaccgucgccuccucccucguccuccucgucucccucggcgccaucuccuucuggaugugcuccaacggcucccuccagugccgcaucugcaucuga

SEQ ID NO: 104296 - RNA, 1722 nt, Artificial Sequence
  derived and/or modified CDS sequence (opt2) from hemagglutinin__InfluenzaA__AFD32428
augaagaccaucaucgcccucuccuacauccucugccucgucuucgcccagaagcuccccggcaacgacaacuccaccgccacccucugccucggccaccacgccguccccaacggcaccaucgucaagaccaucaccaacgaccagaucgaggucaccaacgccaccgagcucguccaguccuccuccaccggcgagaucugcgaccucgacggcgucaagccccucauccuccgcgacugcuccgucgccggcuggcuccucggcaaccccaugugcgacgaguucaucaacguccccgagugguccuacaucgucgagaaggccaaccccgucaacgaccucugcuaccccggcgacuucaacgacuacgaggagcucaagcaccuccucucccgcaucaaccacuucgagaagauccagaucauccccaaguccuccugguccucccacgaggccucccucggcgucuccuccgccugccccuaccagggcaaguccuccuucuuccgcaacgucgucuggcucaucaagaagaacuccaccuaccccaccaucaagcgcuccuacaacaacaccaaccaggaggaccuccucguccucuggggcauccaccaccccaacgacgccgccgagcagaccaagcucuaccagaaccccaccaccuacaucuccgucggcaccuccacccucaaccagcgccucgucccccgcaucgccacccgcuccaaggucaacggccaguccggccgcauggaguucuucuggaccauccucaagcccaacgacgccaucaacuucgaguccaacggcaacuucaucgcccccgaguacgccuacaagaucgucaagaagggcgacuccaccaucaugaaguccgagcucgaguacggcaacugcaacuccgagugcaucacccccaacggcuccauccccaacgacaagcccuuccagaacgucaaccgcaucaccuacggcgccugcccccgcuacgucaagcagaacacccucaagcucgccaccggcaugcgcaacguccccgagaagcagacccgcggcaucuucggcgccaucgccggcuucaucgagaacggcugggagggcauggucgacggcugguacggcuuccgccaccagaacuccgagggccgcggccaggccgccgaccucaaguccacccaggccgccaucgaccagaucaacggcaagcucaaccgccucaucggcaagaccaacgagaaguuccaccagaucgagaaggaguucuccgaggucgagggccgcauccaggaccucgagaaguacgucgaggacaccaagaucgaccucugguccuacaacgccgagcuccucgucgcccucgagaaccagcacaccaucgaccucaccgacuccgagaugaacaagcucuucgagaagaccaagaagcagcuccgcgagaacgccgaggacaugggcaacggcugcuucaagaucuaccacaagugcgacaacgccugcaucggcuccauccgcaacggcaccuacgaccacgacgucuaccgcgacgaggcccucaacaaccgcuuccagaucaagggcgucgagcucaaguccggcuacaaggacuggauccucuggaucuccuucgccaucuccugcuuccuccucugcgucgcccuccucggcuucaucaugugggccugccagaagggcaacauccgcugcaacaucugcaucuga

SEQ ID NO: 104297 - RNA, 1704 nt, Artificial Sequence
  derived and/or modified CDS sequence (opt2) from hemagglutinin__InfluenzaA__AFD32429
augaagaccaucaucgcccucuccuacauccucugccucgucuucgcccagaagcuccccggcaacgacaacuccaccgccacccucugccucggccaccacgccguccccaacggcaccaucgucaagaccaucaccaacgaccagaucgaggucaccaacgccaccgagcucguccaguccuccuccaccggcgagaucugcacccagggcaagcgccccaccgaccucggccagugcggccuccucggcacccucaucggccccccccagugcgaccaguuccucgaguucgacgccgaccucaucaucgagcgccgcgagggcaccgacgucugcuaccccggcaaguucaccaacgaggagucccuccgccagauccuccgcggcuccggcggcaucgacaaggaguccaugggcuucaccuacuccggcauccgcaccaacggcgccaccuccgccugccgccgcuccggcuccuccuucuacgccgagaugaaguggcuccucuccaacuccgacaacgccgaguucccccagaugaccaaguccuaccgcaacccccgcaacaagcccgcccucaucaucuggggcguccaccacuccggcuccgccaccgagcagaccaagcucuacggcuccggcaacaagcucaucaccgucggcuccuccaaguaccagcaguccuucacccccucccccggcgcccgcccccaggucaacggccaguccggccgcaucgacuuccacuggcuccuccucgaccccaacgacaccgucaccuucaccuucaacggcgccuucaucgcccccgaccgcgccuccuucuuccgcggcgagucccucggcguccaguccgacgucccccucgacuccggcugcaacuccgagugcaucacccccaacggcuccauccccaacgacaagcccuuccagaacgucaaccgcaucaccuacggcgccugcccccgcuacgucaagcagaacacccucaagcucgccaccggcaugcgcaacguccccgagaagcagacccgcggcaucuucggcgccaucgccggcuucaucgagaacggcugggagggcauggucgacggcugguacggcuuccgccaccagaacuccgagggccgcggccaggccgccgaccucaaguccacccaggccgccaucgaccagaucaacggcaagcucaaccgccucaucggcaagaccaacgagaaguuccaccagaucgagaaggaguucuccgaggucgagggccgcauccaggaccucgagaaguacgucgaggacaccaagaucgaccucugguccuacaacgccgagcuccucgucgcccucgagaaccagcacaccaucgaccucaccgacuccgagaugaacaagcucuucgagaagaccaagaagcagcuccgcgagaacgccgaggacaugggcaacggcugcuucaagaucuaccacaagugcgacaacgccugcaucggcuccauccgcaacggcaccuacgaccacgacgucuaccgcgacgaggcccucaacaaccgcuuccagaucaagggcgucgagcucaaguccggcuacaaggacuggauccucuggaucuccuucgccaucuccugcuuccuccucugcgucgcccuccucggcuucaucaugugggccugccagaagggcaacauccgcugcaacaucugcaucuga

SEQ ID NO: 104298 - RNA, 1701 nt, Artificial Sequence; identical to SEQ ID NO: 96109
  derived and/or modified CDS sequence (opt2) from hemagglutinin__InfluenzaA__AFD63527

SEQ ID NO: 104299 - RNA, 1701 nt, Artificial Sequence
  derived and/or modified CDS sequence (opt2) from hemagglutinin__InfluenzaA__AFD63538
augaagaccaucaucgcccucuccuacauccucugccucgucuucgcccagaagcuccccggcaacgacaacuccaccgccacccucugccucggccaccacgccguccccaacggcaccaucgucaagaccaucaccaacgaccagaucgaggucaccaacgccaccgagcucguccaguccuccuccaccggcggcaucugcgacuccccccaccagauccucgacggcgagaacugcacccucaucgacgcccuccucggcgacccccagugcgacggcuuccagaacaagaagugggaccucuucgucgagcgcuccaaggccuacuccaacugcuaccccuacgacguccccgacuacgccucccuccgcuccaucgucgccuccuccggcacccucgaguucaacaacgaguccuucaacuggaccggcgucacccagaacggcaccuccuccgccugcaagcgcaaguccaacaaguccuucuucucccgccucaacuggcucacccaccucaaguacaaguaccccgcccucaacgucaccaugcccaacaacgagaaguucgacaagcucuacaucuggggcguccaccaccccggcaccgacaacgaccagaucucccucuacgcccaggccuccggccgcaucaccgucuccaccaagcgcucccagcagaccgucauccccaacaucggcucccgcccccgcguccgcgacgucuccucccgcaucuccaucuacuggaccaucgucaagcccggcgacauccuccucaucaacuccaccggcaaccucaucgccccccgcggcuacuucaagauccgcuccggcaaguccuccaucaugcgcuccgacgcccccaucggcaagugcaacuccgagugcaucacccccaacggcuccauccccaacgacaagcccuuccagaacgucaaccgcaucaccuacggcgccugcccccgcuacgucaagcagaacacccucaagcucgccaccggcaugcgcaacguccccgagaagcagacccgcggcaucuucggcgccaucgccggcuucaucgagaacggcugggagggcauggucgacggcugguacggcuuccgccaccagaacuccgagggcaccggccaggccgccgaccucaaguccacccaggccgccaucaaccagaucaacggcaagcucaaccgccucaucggcaagaccaacgagaaguuccaccagaucgagaaggaguucuccgaggucgagggccgcauccaggaccucgagaaguacgucgaggacaccaagaucgaccucugguccuacaacgccgagcuccucgucgcccucgagaaccagcacaccaucgaccucaccgacuccgagaugaacaagcucuucgagcgcaccaagaagcagcuccgcgagaacgccgaggacaugggcaacggcugcuucaagaucuaccacaagugcgacaacgccugcaucggcuccauccgcaacggcaccuacgaccacgacgucuaccgcgacgaggcccucaacaaccgcuaccagaucaagggcgucgagcucaaguccggcuacaaggacuggauccucuggaucuccuucgccaucuccugcuuccuccucugcgucgcccuccucggcuucaucaugugggccugccagaagggcaacauccgcugcaacaucugcaucuga

SEQ ID NO: 104300 - RNA, 1701 nt, Artificial Sequence
  derived and/or modified CDS sequence (opt2) from hemagglutinin__InfluenzaA__AFD63549
augaagaccaucaucgcccucuccuacauccucugccucgucuucgcccagaagcuccccggcaacgacaacuccaccgccacccucugccucggccaccacgccguccccaacggcaccaucgucaagaccaucaccaacgaccagaucgaggucaccaacgccaccgagcucguccagaucuccuccaccggcggcaucugcgacuccccccaccagauccucgacggcgagaacugcacccucaucgacgcccuccucggcgacccccagugcgacggcuuccagaacaagaagugggaccucuucgucgagcgcuccaaggccuacuccaacugcuaccccuacgacguccccgacuacgccucccuccgcucccucgucgccuccuccggcacccucgaguucaacaacgaguccuucgacuggaccggcgucacccagaacggcaccuccuccgccugcaagcgccgcuccaacaaguccuucuucucccgccucaacuggcucacccaccucaaguacaaguaccccgcccucaacgucaccaugcccaacaacgagaaguucgacaagcucuacaucuggggcguccaccaccccggcaccgacaacgaccagaucucccucuacgcccaggccuccggccgcaucaccgucuccaccaagcgcucccagcagaccgucauccccaacaucggcucccgcccccgcguccgcgacgucuccucccgcaucuccaucuacuggaccaucgucaagcccggcgacauccuccucaucaacuccaccggcaaccucaucgccccccgcggcuacuucaagauccgcuccggcaaguccuccaucaugcgcuccgacgcccccaucggcaagugcaacuccgagugcaucacccccaacggcuccauccccaacgacaagcccuuccagaacgucaaccgcaucaccuacggcgccugcccccgcuacgucaagcagaacacccucaagcucgccaccggcaugcgcaacguccccgagaagcagacccgcggcaucuucggcgccaucgccggcuucaucgagaacggcugggagggcauggucgacggcugguacggcuuccgccaccagaacuccgagggcaccggccaggccgccgaccucaaguccacccaggccgccaucaaccagaucaacggcaagcucaaccgccucaucggcaagaccaacgagaaguuccaccagaucgagaaggaguucuccgaggucgagggccgcauccaggaccucgagaaguacgucgaggacaccaagaucgaccucugguccuacaacgccgagcuccucgucgcccucgagaaccagcacaccaucgaccucaccgacuccgagaugaacaagcucuucgagcgcaccaagaagcagcuccgcgagaacgccgaggacaugggcaacggcugcuucaagaucuaccacaagugcgacaacgccugcaucggcuccauccgcaacggcaccuacgaccacgacgucuaccgcgacgaggcccucaacaaccgcuuccagaucaagggcgucgagcucaaguccggcuacaaggacuggauccucuggaucuccuucgccaucuccugcuuccuccucugcgucgcccuccucggcuucaucaugugggccugccagaagggcaacauccgcugcaacaucugcaucuga

SEQ ID NO: 104301 - RNA, 1701 nt, Artificial Sequence; identical to SEQ ID NO: 96109
  derived and/or modified CDS sequence (opt2) from hemagglutinin__InfluenzaA__AFD63571

SEQ ID NO: 104302 - RNA, 1701 nt, Artificial Sequence
  derived and/or modified CDS sequence (opt2) from hemagglutinin__InfluenzaA__AFD63615
augaagaccaucaucgcccucuccuacauccucugccucgucuucgcccagaagcuccccggcaacgacaacuccaccgccacccucugccucggccaccacgccguccccaacggcaccaucgucaagaccaucaccaacgaccagaucgaggucaccaacgccaccgagcucguccaguccuccuccaccggcggcaucugcgacuccccccaccagauccucgacggcgagaacugcacccucaucgacgcccuccucggcgacccccagugcgacggcuuccagaacaagaagugggaccucuucgucgagcgcuccaaggccuacuccaacugcuaccccuacgacguccccgacuacgccucccuccgcucccucgucgccuccuccggcacccucgaguucaacaacgaguccuucaacuggaccggcgucacccagaacggcaccuccuccgccugcaagcgcaaguccaacaaguccuucuucucccgccucaacuggcucacccaccucaaguacaaguaccccgcccucaacgucaccaugcccaacaacgagaaguucgacaagcucuacaucuggggcguccaccaccccggcaccgacaacgaccagaucucccucuacgcccaggccuccggccgcaucaccgucuccaccaagcgcucccagcagaccgucauccccaacaucggcucccgcccccgcguccgcgacgucuccucccgcaucuccaucuacuggaccaucgucaagcccggcgacauccuccucaucaacuccaccggcaaccucaucgccccccgcggcuacuucaagauccgcuccggcaaguccuccaucaugcgcuccgacgcccccaucggcaagugcaacuccgagugcaucacccccaacggcuccauccccaacgacaagcccuuccagaacgucaaccgcaucaccuacggcgccugcccccgcuacgucaagcagaacacccucaagcucgccaccggcaugcgcaacguccccgagaagcagacccgcggcaucuucggcgccaucgccggcuucaucgagaacggcugggagggcauggucgacggcugguacggcuuccgccaccagaacuccgagggcaccggccaggccgccgaccucaaguccacccaggccgccaucaaccagaucaacggcaagcucaaccgccucaucggcaagaccaacgagaaguuccaccagaucgagaaggaguucuccgaggucgaggagcgcauccaggaccucgagaaguacgucgaggacaccaagaucgaccucugguccuacaacgccgagcuccucgucgcccucgagaaccagcacaccaucgaccucaccgacuccgagaugaacaagcucuucgagcgcaccaagaagcagcuccgcgagaacgccgaggacaugggcaacggcugcuucaagaucuaccacaagugcgacaacgccugcaucggcuccauccgcaacggcaccuacgaccacgacgucuaccgcgacgaggcccucaacaaccgcuuccagaucaagggcgucgagcucaaguccggcuacaaggacuggauccucuggaucuccuucgccaucuccugcuuccuccucugcgucgcccuccucggcuucaucaugugggccugccagaagggcaacauccgcugcaacaucugcaucuga

SEQ ID NO: 104303 - RNA, 1701 nt, Artificial Sequence
  derived and/or modified CDS sequence (opt2) from hemagglutinin__InfluenzaA__AFD63626
augaagaccaucaucgcccucuccuacauccucugccucgucuucgcccagaagcuccccggcaacgacaacuccaccgccacccucugccucggccaccacgccguccccaacggcaccaucgucaagaccaucaccaacgaccagaucgaggucaccaacgccaccgagcucguccagaucuccuccaccggcggcaucugcgacuccccccaccagauccucgacggcgagaacugcacccucaucgacgcccuccucggcgacccccagugcgacggcuuccagaacaagaagugggaccucuucgucgagcgcuccaaggccuacuccaacugcuaccccuacgacguccccgacuacgccucccuccgcucccucgucgccuccuccggcacccucgaguucaacaacgaguccuucgacuggaccggcgucacccagaacggcaccuccuccgccugcaagcgccgcuccaacaaguccuucuucucccgccucaacuggcucacccaccucaaguacaaguaccccgcccucaacgucaccaugcccaacaacgagaaguucgacaagcucuacaucuggggcguccaccaccccggcaccgacuccgaccagaucucccucuacgcccaggccuccggccgcaucaccgucuccaccaagcgcucccagcagaccgucauccccaacaucggcucccgcccccgcguccgcgacaucuccucccgcaucuccaucuacuggaccaucgucaagcccggcgacauccuccucaucaacuccaccggcaaccucaucgccccccgcggcuacuucaagauccgcuccggcaaguccuccaucaugcgcuccgacgcccccaucggcaagugcaacuccgagugcaucacccccaacggcuccauccccaacgacaagcccuuccagaacgucaaccgcaucaccuacggcgccugcccccgcuacgucaagcagaacacccucaagcucgccaccggcaugcgcaacguccccgagaagcagacccgcggcaucuucggcgccaucgccggcuucaucgagaacggcugggagggcauggucgacggcugguacggcuuccgccaccagaacuccgagggcaccggccaggccgccgaccucaaguccacccaggccgccaucaaccagaucaacggcaagcucaaccgccucaucggcaagaccaacgagaaguuccaccagaucgagaaggaguucuccgaggucgagggccgcauccaggaccucgagaaguacgucgaggacaccaagaucgaccucugguccuacaacgccgagcuccucgucgcccucgagaaccagcacaccaucgaccucaccgacuccgagaugaacaagcucuucgagcgcaccaagaagcagcuccgcgagaacgccgaggacaugggcaacggcugcuucaagaucuaccacaagugcgacaacgccugcaucggcuccauccgcaacggcaccuacgaccacgacgucuaccgcgacgaggcccucaacaaccgcuuccagaucaagggcgucgagcucaaguccggcuacaaggacuggauccucuggaucuccuucgccaucuccugcuuccuccucugcgucgcccuccucggcuucaucaugugggccugccagaagggcaacauccgcugcaacaucugcaucuga

SEQ ID NO: 104304 - RNA, 1701 nt, Artificial Sequence
  derived and/or modified CDS sequence (opt2) from hemagglutinin__InfluenzaA__AFD63637
augaagaccaucaucgcccucuccuacauccucugccucgucuucgcccagaagcuccccggcaacgacaacuccaccgccacccucugccucggccaccacgccguccccaacggcaccaucgucaagaccaucaccaacgaccagaucgaggucaccaacgccaccgagcucguccagaucuccuccaccggcggcaucugcgacuccccccaccagauccucgacggcgagaacugcacccucaucgacgcccuccucggcgacccccagugcgacggcuuccagaacaagaagugggaccucuucgucgagcgcuccaaggccuacuccaacugcuaccccuacgacguccccgacuacgccucccuccgcucccucgucgccuccuccggcacccucgaguucaacaacgaguccuucgacuggaccggcgucacccagaacggcaccuccuccaccugcaagcgccgcuccaacaaguccuucuucucccgccucaacuggcucacccaccucaaguacaaguaccccgcccucaacgucaccaugcccaacaacgagaaguucgacaagcucuacaucuggggcguccaccaccccggcaccgacuccgaccagaucucccucuacgcccaggccuccggccgcaucaccgucuccaccaagcgcucccagcagaccgucauccccaacaucggcucccgcccccgcguccgcgacgucuccucccgcaucuccaucuacuggaccaucgucaagcccggcgacauccuccucaucaacuccaccggcaaccucaucgccccccgcggcuacuucaagauccgcuccggcaaguccuccaucaugcgcuccgacgcccccaucggcaagugcaacuccgagugcaucacccccaacggcuccauccccaacgacaagcccuuccagaacgucaaccgcaucaccuacggcgccugcccccgcuacgucaagcagaacacccucaagcucgccaccggcaugcgcaacguccccgagaagcagacccgcggcaucuucggcgccaucgccggcuucaucgagaacggcugggagggcauggucgacggcugguacggcuuccgccaccagaacuccgagggcaccggccaggccgccgaccucaaguccacccaggccgccaucaaccagaucaacggcaagcucaaccgccucaucggcaagaccaacgagaaguuccaccagaucgagaaggaguucuccgaggucgagggccgcauccaggaccucgagaaguacgucgaggacaccaagaucgaccucugguccuacaacgccgagcuccucgucgcccucgagaaccagcacaccaucgaccucaccgacuccgagaugaacaagcucuucgagcgcaccaagaagcagcuccgcgagaacgccgaggacaugggcaacggcugcuucaagaucuaccacaagugcgacaacgccugcaucggcuccauccgcaacggcaccuacgaccacgacgucuaccgcgacgaggcccucaacaaccgcuuccagaucaagggcgucgagcucaaguccggcuacaaggacuggauccucuggaucuccuucgccaucuccugcuuccuccucugcgucgcccuccucggcuucaucaugugggccugccagaagggcaacauccgcugcaacaucugcaucuga

SEQ ID NO: 104305 - RNA, 1701 nt, Artificial Sequence
  derived and/or modified CDS sequence (opt2) from hemagglutinin__InfluenzaA__AFD63648
augaagaccaucaucgcccucuccuacauccucugccucgucuucgcccagaagcuccccggcaacgacaacuccauggccacccucugccucggccaccacgccguccccaacggcaccaucgucaagaccaucaccaacgaccagaucgaggucaccaacgccaccgagcucguccagaucuccuccaccggcggcaucugcgacuccccccaccagauccucgacggcgagaacugcacccucaucgacgcccuccucggcgacccccagugcgacggcuuccagaacaagaagugggaccucuucgucgagcgcuccaaggccuacuccaacugcuaccccuacgacguccccgacuacgccucccuccgcucccucgucgccuccuccggcacccucgaguucaacaacgaguccuucgacuggaccggcgucacccagaacggcaccuccuccgccugcaagcgccgcuccaacaaguccuucuucucccgccucaacuggcucacccaccucaaguacaaguaccccgcccucaacgucaccaugcccaacaacgagaaguucgacaagcucuacaucuggggcguccaccaccccggcaccgacuccgaccagaucucccucuacgcccaggccuccggccgcaucaccgucuccaccaagcgcucccagcagaccgucauccccaacaucggcucccgcccccgcguccgcgacgucuccucccgcaucuccaucuacuggaccaucgucaagcccggcgacauccuccucaucaacuccaccggcaaccucaucgccccccgcggcuacuucaagauccgcuccggcaaguccuccaucaugcgcuccgacgcccccaucggcaagugcaacuccgagugcaucacccccaacggcuccauccccaacgacaagcccuuccagaacgucaaccgcaucaccuacggcgccugcccccgcuacgucaagcagaacacccucaagcucgccaccggcaugcgcaacguccccgagaagcagacccgcggcaucuucggcgccaucgccggcuucaucgagaacggcugggagggcauggucgacggcugguacggcuuccgccaccagaacuccgagggcaccggccaggccgccgaccucaaguccacccaggccgccaucaaccagaucaacggcaagcucaaccgccucaucggcaagaccaacgagaaguuccaccagaucgagaaggaguucuccgaggucgagggccgcauccaggaccucgagaaguacgucgaggacaccaagaucgaccucugguccuacaacgccgagcuccucgucgcccucgagaaccagcacaccaucgaccucaccgacuccgagaugaacaagcucuucgagcgcaccaagaagcagcuccgcgagaacgccgaggacaugggcaacggcugcuucaagaucuaccacaagugcgacaacgccugcaucggcuccauccgcaacggcaccuacgaccacgacgucuaccgcgacgaggcccucaacaaccgcuuccagaucaagggcgucgagcucaaguccggcuacaaggacuggauccucuggaucuccuucgccaucuccugcuuccuccucugcgucgcccuccucggcuucaucaugugggccugccagaagggcaacauccgcugcaacaucugcaucuga

SEQ ID NO: 104306 - RNA, 1701 nt, Artificial Sequence; identical to SEQ ID NO: 96109
  derived and/or modified CDS sequence (opt2) from hemagglutinin__InfluenzaA__AFD63659

SEQ ID NO: 104307 - RNA, 1701 nt, Artificial Sequence
  derived and/or modified CDS sequence (opt2) from hemagglutinin__InfluenzaA__AFD63681
augaagaccaucaucgcccucuccuacauccucugccucgucuucgcccagaagcuccccggcaacgacaacuccaccgccacccucugccucggccaccacgccguccccaacggcaccaucgucaagaccaucaccaacgaccagaucgaggucaccaacgccaccgagcucguccaguccuccuccaccggcggcaucugcgacuccccccaccagauccucgacggcgagaacugcacccucaucgacgcccuccucggcgacccccagugcgacggcuuccagaacaagaagugggaccucuucgucgagcgcuccaaggccuacuccaacugcuaccccuacgacguccccgacuacgccucccuccgcucccucgucgccuccuccggcacccucgaguucaacaacgaguccuucaacuggaccggcgucacccagaacggcaccuccuccgccugcaagcgcaaguccaacaaguccuucuucucccgccucaacuggcucacccaccucaaguacaaguaccccgcccucaacgucaccaugcccaacaacgagaaguucgacaagcucuacaucuggggcguccaccaccccggcaccgacaacgaccagaucucccucuacgcccaggccuccggccgcaucaccgucuccaccaagcgcucccagcagaccgucauccccaacaucggcucccgcccccgcguccgcgacgucuccucccgcaucuccaucuacuggaccaucgucaagcccggcgacauccuccucaucaacuccaccggcaaccucaucgccccccgcggcuacuucaagguccgcuccggcaaguccuccaucaugcgcuccgacgcccccaucggcaagugcaacuccgagugcaucacccccaacggcuccauccccaacgacaagcccuuccagaacgucaaccgcaucaccuacggcgccugcccccgcuacgucaagcagaacacccucaagcucgccaccggcaugcgcaacguccccgagaagcagacccgcggcaucuucggcgccaucgccggcuucaucgagaacggcugggagggcauggucgacggcugguacggcuuccgccaccagaacuccgagggcaccggccaggccgccgaccucaaguccacccaggccgccaucaaccagaucaacggcaagcucaaccgccucaucggcaagaccaacgagaaguuccaccagaucgagaaggaguucuccgaggucgagggccgcauccaggaccucgagaaguacgucgaggacaccaagaucgaccucugguccuacaacgccgagcuccucgucgcccucgagaaccagcacaccaucgaccucaccgacuccgagaugaacaagcucuucgagcgcaccaagaagcagcuccgcgagaacgccgaggacaugggcaacggcugcuucaagaucuaccacaagugcgacaacgccugcaucggcuccauccgcaacggcaccuacgaccacgacgucuaccgcgacgaggcccucaacaaccgcuuccagaucaagggcgucgagcucaaguccggcuacaaggacuggauccucuggaucuccuucgccaucuccugcuuccuccucugcgucgcccuccucggcuucaucaugugggccugccagaagggcaacauccgcugcaacaucugcaucuga

SEQ ID NO: 104308 - RNA, 1701 nt, Artificial Sequence
  derived and/or modified CDS sequence (opt2) from hemagglutinin__InfluenzaA__AFD63692
augaagaccaucaucgcccucuccuacauccucugccucgucuucgcccagaagcuccccggcaacgacaacuccaccgccacccucugccucggccaccacgccguccccaacggcaccaucgucaagaccaucaccaacgaccagaucgaggucaccaacgccaccgagcucguccaguccuccuccaccggcggcaucugcgacuccccccaccagauccucgacggcgagaacugcacccucaucgacgcccuccucggcgacccccagugcgacggcuuccagaacaagaagugggaccucuucgucgagcgcuccaaggccuacuccaacugcuaccccuacgacguccccgacuacgccucccuccgcucccucgucgccuccuccggcacccucgaguucaacaacgaguccuucgacuggaccggcgucacccagaacggcaccuccuccgccugcaagcgccgcuccaacaaguccuucuucucccgccucaacuggcucacccaccucaaguacaaguaccccgcccucaacgucaccaugcccaacaacgagaaguucgacaagcucuacaucuggggcguccuccaccccggcaccgacuccgaccagaucucccucuacgcccaggccuccggccgcaucaccgucuccaccaagcgcucccagcagaccgucauccccaacaucggcucccgcccccgcguccgcgacgucuccucccgcaucuccaucuacuggaccaucgucaagcccggcgacauccuccucaucaacuccaccggcaaccucaucgccccccgcggcuacuucaagauccgcuccggcaaguccuccaucaugcgcuccgacgcccccaucggcaagugcaacuccgagugcaucacccccaacggcuccauccccaacgacaagcccuuccagaacgucaaccgcaucaccuacggcgccugcccccgcuacgucaagcagaacacccucaagcucgccaccggcaugcgcaacguccccgagaagcagacccgcggcaucuucggcgccaucgccggcuucaucgagaacggcugggagggcauggucgacggcugguacggcuuccgccaccagaacuccgagggcaccggccaggccgccgaccucaaguccacccaggccgccaucaaccagaucaacggcaagcucaaccgccucaucggcaagaccaacgagaaguuccaccagaucgagaaggaguucuccgaggucgagggccgcauccaggaccucgagaaguacgucgaggacaccaagaucgaccucugguccuacaacgccgagcuccucgucgcccucgagaaccagcacaccaucgaccucaccgacuccgagaugaacaagcucuucgagcgcaccaagaagcagcuccgcgagaacgccgaggacaugggcaacggcugcuucaagaucuaccacaagugcgacaacgccugcaucggcuccauccgcaacggcaccuacgaccacgacgucuaccgcgacgaggcccucaacaaccgcuuccagaucaagggcgucgagcucaaguccggcuacaaggacuggauccucuggaucuccuucgccaucuccugcuuccuccucugcgucgcccuccucggcuucaucaugugggccugccagaagggcaacauccgcugcaacaucugcaucuga

SEQ ID NO: 104309 - RNA, 1701 nt, Artificial Sequence
  derived and/or modified CDS sequence (opt2) from hemagglutinin__InfluenzaA__AFD63703
augaagaccaucaucgcccucuccuacauccucugccucgucuucgcccagaagcuccccggcaacgacaacuccaccgccacccucugccucggccaccacgccguccccaacggcaccaucgucaagaccaucaccaacgaccagaucgaggucaccaacgccaccgagcucguccagaucuccuccaccuccggcaucugcgacucccccuaccagauccucgacggcgagaacugcacccucaucgacgcccuccucggcgacccccagugcgacggcuuccagaacaagaagugggaccucuucgucgagcgcuccaaggccuacuccaacugcuaccccuacgacguccccgacuacgccucccuccgcucccucgucgccuccuccggcacccucgaguucaacaacgaguccuucgacuggaccggcgucacccagaacggcaccuccuccgccugcaagcgccgcuccaacaaguccuucuucucccgccucaacuggcucacccaccucaaguacaaguaccccgcccucaacgucaccaugcccaacaacgagaaguucgacaagcucuacaucuggggcguccaccaccccggcaccgacuccgaccagaucucccucuacgcccaggccuccggccgcaucaccgucuccaccaagcgcucccagcagaccgucauccccaacaucggcucccgcccccgcguccgcgacgucuccucccagaucuccaucuacuggaccaucgucaagcccggcgacauccuccucaucaacuccaccggcaaccucaucgccccccgcggcuacuucaagauccgcuccggcaaguccuccaucaugcgcuccgacgcccccaucggcaagugcaacuccgagugcaucacccccaacggcuccauccccaacgacaagcccuuccagaacgucaaccgcaucaccuacggcgccugcccccgcuacgucaagcagaacacccucaagcucgccaccggcaugcgcaacguccccgagaagcagacccgcggcaucuucggcgccaucgccggcuucaucgagaacggcugggagggcauggucgacggcugguacggcuuccgccaccagaacuccgagggcaccggccaggccgccgaccucaaguccacccaggccgccaucaaccagaucaacggcaagcucaaccgccucaucggcaagaccaacgagaaguuccaccagaucgagaaggaguucuccgaggucgagggccgcauccaggaccucgagaaguacgucgaggacaccaagaucgaccucugguccuacaacgccgagcuccucgucgcccucgagaaccagcacaccaucgaccucaccgacuccgagaugaacaagcucuucgagcgcaccaagaagcagcuccgcgagaacgccgaggacaugggcaacggcugcuucaagaucuaccacaagugcgacaacgccugcaucggcuccauccgcaacggcaccuacgaccacgacgucuaccgcgacgaggcccucaacaaccgcuuccagaucaagggcgucgagcucaaguccggcuacaaggacuggauccucuggaucuccuucgccaucuccugcuuccuccucugcgucgcccuccucggcuucaucaugugggccugccagaagggcaacauccgcugcaacaucugcaucuga

SEQ ID NO: 104310 - RNA, 1701 nt, Artificial Sequence
  derived and/or modified CDS sequence (opt2) from hemagglutinin__InfluenzaA__AFD63714
augaagaccaucaucgcccucuccuacauccucugccucgucuucgcccagaagcuccccggcaacgacaacuccaccgccacccucugccucggccaccacgccguccccaacggcaccaucgucaagaccaucaccaacgaccagaucgaggucaccaacgccaccgagcucguccagaucuccuccaccggcggcaucugcgacuccccccaccagauccucgacggcgagaacugcacccucaucgacgcccuccucggcgacccccagugcgacggcuuccagaacaagaagugggaccucuucgucgagcgcuccaaggccuacuccaacugcuaccccuacgacguccccgacuacgccucccuccgcucccucgucgccuccuccggcacccucgaguucaacaacgaguccuucgacuggaccggcgucacccagaacggcaccuccuccaccugcaagcgccgcuccaacaaguccuucuucucccgccucaacuggcucacccaccucaaguacaaguaccccgcccucaacgucaccaugcccaacaacgagaaguucgacaagcucuacaucuggggcguccaccaccccggcaccgacaacgaccagaucucccucuacgcccaggccuccggccgcaucaccgucuccaccaagcgcucccagcagaccgucauccccaacaucggcucccgcccccgcguccgcgacgucuccucccgcaucuccaucuacuggaccaucgucaagcccggcgacauccuccucaucaacuccaccggcaaccucaucgccccccgcggcuacuucaagauccgcuccggcaaguccuccaucaugcgcuccgacgcccccaucggcaagugcaacuccgagugcaucacccccaacggcuccauccccaacgacaagcccuuccagaacgucaaccgcaucaccuacggcgccugcccccgcuacgucaagcagaacacccucaagcucgccaccggcaugcgcaacguccccgagaagcagacccgcggcaucuucggcgccaucgccggcuucaucgagaacggcugggagggcauggucgacggcugguacggcuuccgccaccagaacuccgagggcaccggccaggccgccgaccucaaguccacccaggccgccaucaaccagaucaacggcaagcucaaccgccucaucggcaagaccaacgagaaguuccaccagaucgagaaggaguucuccgaggucgagggccgcauccaggaccucgagaaguacgucgaggacaccaagaucgaccucugguccuacaacgccgagcuccucgucgcccucgagaaccagcagaccaucgaccucaccgacuccgagaugaacaagcucuucgagcgcaccaagaagcagcuccgcgagaacgccgaggacaugggcaacggcugcuucaagaucuaccacaagugcgacaacgccugcaucggcuccauccgcaacggcaccuacgaccacgacgucuaccgcgacgaggcccucaacaaccgcuuccacaucaagggcgucgagcucaaguccggcuacaaggacuggauccucuggaucuccuucgccaucuccugcuuccuccucugcgucgcccuccucggcuucaucaugugggccugccagaagggcaacauccgcugcaacaucugcaucuga

SEQ ID NO: 104311 - RNA, 1701 nt, Artificial Sequence
  derived and/or modified CDS sequence (opt2) from hemagglutinin__InfluenzaA__AFD63736
augaagaccaucaucgcccucuccuacauccucugccucgucuucgcccagaagcuccccggcaacgacaacuccaccgccacccucugccucggccaccacgccguccccaacggcaccaucgucaagaccaucaccaacgaccagaucgaggucaccaacgccaccgagcucguccagaucuccuccaccggcggcaucugcgacuccccccaccagauccucgacggcgagaacugcacccucaucgacgcccuccucggcgacccccagugcgacggcuuccagaacaagaagugggaccucuucgucgagcgcuccaaggccuacuccaacugcuaccccuacgacguccccgacuacgccucccuccgcucccucgucgccuccuccggcacccucgaguucaacaacgaguccuucgacuggaccggcgucacccagaacggcaccuccuccaccugcaagcgccgcuccaacaaguccuucuucucccgccucaacuggcucacccaccucaaguacaaguaccccgcccucaacgucaccaugcccaacaacgagaaguucgacaagcucuacaucuggggcguccaccaccccggcaccgacaacgaccagaucucccucuacgcccaggccuccggccgcaucaccgucuccaccaagcgcucccagcagaccgucauccccaacaucggcucccgcccccgcguccgcgacgucuccucccgcaucuccaucuacuggaccaucgucaagcccggcgacauccuccucaucaacuccaccggcaaccucaucgccccccgcggcuacuucaagauccgcuccggcaaguccuccaucaugcgcuccgacgcccccaucggcaagugcaacuccgagugcaucacccccaacggcuccauccccaacgacaagcccuuccagaacgucaaccgcaucaccuacggcgccugcccccgcuacgucaagcagaacacccucaagcucgccaccggcaugcgcaacguccccgagaagcagacccgcggcaucuucggcgccaucgccggcuucaucgagaacggcugggagggcauggucgacggcugguacggcuuccgccaccagaacuccgagggcaccggccaggccgccgaccucaaguccacccaggccgccaucaaccagaucaacggcaagcucaaccgccucaucggcaagaccaacgagaaguuccaccagaucgagaaggaguucuccgaggucgagggccgcauccaggaccucgagaaguacgucgaggacaccaagaucgaccucugguccuacaacgccgagcuccucgucgcccucgagaaccagcacaccaucgaccucaccgacuccgagaugaacaagcucuucgagcgcaccaagaagcagcuccgcgagaacgccgaggacaugggcaacggcugcuucaagaucuaccacaagugcgacaacgccugcaucggcuccauccgcaacggcaccuacgaccacgacgucuaccgcgacgaggcccucaacaaccgcuuccacaucaagggcgucgagcucaaguccggcuacaaggacuggauccucuggaucuccuucgccaucuccugcuuccuccucugcgucgcccuccucggcuucaucaugugggccugccagaagggcaacauccgcugcaacaucugcaucuga

SEQ ID NO: 104312 - RNA, 1701 nt, Artificial Sequence
  derived and/or modified CDS sequence (opt2) from hemagglutinin__InfluenzaA__AFD63747
augaagaccaucaucgcccucuccuacauccucugccucgucuucgcccagaagcuccccggcaacgacaacuccaccgccacccucugccucggccaccacgccguccccaacggcaccaucgucaagaccaucaccaacgaccagaucgaggucaccaacgccaccgagcucguccaguccuccuccaccggcggcaucugcgacuccccccaccagauccucgacggcgagaacugcacccucaucgacgcccuccucggcgacccccagugcgacggcuuccagaacaagaagugggaccucuucgucgagcgcuccaaggccuacuccaacugcuaccccuacgacguccccgacuacgccucccuccgcucccucgucgccuccuccggcacccucgaguucaacaacgaguccuucgacuggaccggcgucacccagaacggcaccuccuccgccugcaagcgccgcuccaacaaguccuucuucucccgccucaacuggcucacccaccucaaguacaaguaccccgcccucaacgucaccaugcccaacaacgagaaguucgacaagcucuacaucuggggcguccaccaccccggcaccgacuccgaccagaucucccucuacgcccaggccuccggccgcaucaccgucuccaccaagcgcucccagcagaccgucauccccaacaucggcucccgcccccgcguccgcgacgucuccucccgcaucuccaucuacuggaccaucgucaagcccggcgacauccuccucaucaacuccaccggcaaccucaucgccccccgcggcuacuucaagauccgcuccggcaaguccuccaucaugcgcuccgacgcccccaucggcaagugcaacuccgagugcaucacccccaacggcuccauccccaacgacaagcccuuccagaacgucaaccgcaucaccuacggcgccugcccccgcuacgucaagcagaacacccucaagcucgccaccggcaugcgcaacguccccgagaagcagacccgcggcaucuucggcgccaucgccggcuucaucgagaacggcugggagggcauggucgacggcugguacggcuuccgccaccagaacuccgagggcaccggccaggccgccgaccucaaguccacccaggccgccaucaaccagaucaacggcaagcucaaccgccucaucggcaagaccaacgagaaguuccaccgcaucgagaaggaguucuccgaggucgagggccgcauccaggaccucgagaaguacgucgaggacaccaagaucgaccucugguccuacaacgccgagcuccucgucgcccucgagaaccagcacaccaucgaccucaccgacuccgagaugaacaagcucuucgagcgcaccaagaagcagcuccgcgagaacgccgaggacaugggcaacggcugcuucaagaucuaccacaagugcgacaacgccugcaucggcuccauccgcaacggcaccuacgaccacgacgucuaccgcgacgaggcccucaacaaccgcuuccagaucaagggcgucgagcucaaguccggcuacaaggacuggauccucuggaucuccuucgccaucuccugcuuccuccucugcgucgcccuccucggcuucaucaugugggccugccagaagggcaacauccgcugcaacaucugcaucuga

SEQ ID NO: 104313 - RNA, 1701 nt, Artificial Sequence
  derived and/or modified CDS sequence (opt2) from hemagglutinin__InfluenzaA__AFD63758
augaagaccaucaucgcccucuccuacauccucugccucgucuucgcccagaagcuccccggcaacgacaacuccaccgccacccucugccucggccaccacgccguccccaacggcaccaucgucaagaccaucaccaacgaccagaucgaggucaccaacgccaccgagcucguccaguccuccuccaccggcggcaucugcgacuccccccaccagauccucgacggcgagaacugcacccucaucgacgcccuccucggcgacccccagugcgacggcuuccagaacaagaagugggaccucuucgucgagcgcuccaaggccuacuccaacugcuaccccuacgacguccccgacuacgccucccuccgcucccucgucgccuccuccggcacccucgaguucaacaacgaguccuucaacuggaccggcgucacccagaacggcaccuccuccgccugcaagcgcaaguccaacaaguccuucuucucccgccucaacuggcucacccaccucaaguacaaguaccccgcccucaacgucaccaugcccaacaacgagaaguucgacaagcucuacaucuggggcguccaccaccccggcaccgacaacgaccagaucucccucuacgcccaggccuccggccgcaucaccgucuccaccaagcgcucccagcagaccgucauccccaacaucggcucccgcccccgcguccgcgacgucuccucccgcaucuccaucuacuggaccaucgucaagcccggcgacauccuccucaucaacuccaccggcaaccucaucgccccccgcggcuacuucaagauccgcuccggcaaguccuccaucaugcgcuccgacgcccccaucggcaagugcaacuccgagugcaucacccccaacggcuccauccccaacgacaagcccuuccagaacgucaaccgcaucaccuacggcgccugcccccgcuacgucaagcagaacacccucaagcucgccaccggcaugcgcaacguccccgagaagcagacccgcggcaucuucggcgccaucgccggcuucaucgagaacggcugggagggcauggucgacggcugguacggcuuccgccaccagaacuccgagggcaccggccaggccgccgaccucaaguccacccaggccgccaucaaccagaucaacggcaagcucaaccgccucaucggcaagaccaacgagaaguuccaccagaucgagaaggaguucuccgaggucgagggccgcauccaggaccucgagaaguacgucgaggacaccaagaucgaccucugguccuacaacgccgagcuccucgucgcccucgagaaccagcacaccaucgaccucaccgacuccgagaugaacaagcucuucgagcgcaccaagaagcagcuccgcgagaacgccgaggacaugggcaacggcugcuucaagaucuaccacaagugcgacaacgccugcaucggcuccauccgcaacggcaccuacgaccacgacgucuaccgcgacgaggcccucaacaaccgcuuccagaucaagggcgucgagcucaaguccggcuacaaggacuggauccucuggaucuccuucgccaucuccugcuuccuccucugcgucgcccuccucggcuucaucaugugggccugccagaagggcaacauccgcugcaacaucugcaucuga

SEQ ID NO: 104314 - RNA, 1701 nt, Artificial Sequence
  derived and/or modified CDS sequence (opt2) from hemagglutinin__InfluenzaA__AFD63769
augaagaccaucaucgcccucuccuacauccucugccucgucuucgcccagaagcuccccggcaacgacaacuccaccgccacccucugccucggccaccacgccguccccaacggcaccaucgucaagaccaucaccaacgaccagaucgaggucaccaacgccaccgagcucguccagaucuccuccaccggcggcaucugcgacuccccccaccagauccucgacggcgagaacugcacccucaucgacgcccuccucggcgacccccagugcgacggcuuccagaacaagaagugggaccucuucgucgagcgcuccaaggccuacuccaacugcuaccccuacgacguccccgacuacgccucccuccgcucccucgucgccuccuccggcacccucgaguucaacaacgaguccuucgacuggaccggcgucacccagaacggcaccuccuccgccugcaagcgccgcuccaacaaguccuucuucucccgccucaacuggcucacccaccucaaguacaaguaccccgcccucaacgucaccaugcccaacaacgagaaguucgacaagcucuacaucuggggcguccaccaccccggcaccgacaacgaccagaucucccucuacgcccaggccuccggccgcaucaccgucuccaccaagcgcucccagcagaccgucauccccaacaucggcucccgcccccgcguccgcgacgucuccucccgcaucuccaucuacuggaccaucgucaagcccggcgacauccuccucaucaacuccaccggcaaccucaucgccccccgcggcuacuucaagauccgcuccggcaaguccuccaucaugcgcuccgacgcccccaucggcaagugcaacuccgagugcaucacccccaacggcuccauccccaacgacaagcccuuccagaacgucaaccgcaucaccuacggcgccugcccccgcuacgucaagcagaacacccucaagcucgccaccggcaugcgcaacguccccgagaagcagacccgcggcaucuucggcgccaucgccggcuucaucgagaacggcugggagggcauggucgacggcugguacggcuuccgccaccagaacuccgagggcaccggccaggccgccgaccucaaguccacccaggccgccaucaaccagaucaacggcaagcucaaccgccucaucggcaagaccaacgagaaguuccaccagaucgagaaggaguucuccgaggucgagggccgcauccaggaccucgagaaguacgucgaggacaccaagaucgaccucugguccuacaacgccgagcuccucgucgcccucgagaaccagcacaccaucgaccucaccgacuccgagaugaacaagcucuucgagcgcaccaagaagcagcuccgcgagaacgccgaggacaugggcaacggcugcuucaagaucuaccacaagugcgacaacgccugcaucggcuccauccgcaacggcaccuacgaccacgacgucuaccgcgacgaggcccucaacaaccgcuuccacaucaaguccgucgagcucaaguccggcuacaaggacuggauccucuggaucuccuucgccaucuccugcuuccuccucugcgucgcccuccucggcuucaucaugugggccugccagaagggcaacauccgcugcaacaucugcaucuga

SEQ ID NO: 104315 - RNA, 1701 nt, Artificial Sequence; identical to SEQ ID NO: 96109
  derived and/or modified CDS sequence (opt2) from hemagglutinin__InfluenzaA__AFD63780

SEQ ID NO: 104316 - RNA, 1701 nt, Artificial Sequence; identical to SEQ ID NO: 104313
  derived and/or modified CDS sequence (opt2) from hemagglutinin__InfluenzaA__AFD63791

SEQ ID NO: 104317 - RNA, 1701 nt, Artificial Sequence; identical to SEQ ID NO: 96109
  derived and/or modified CDS sequence (opt2) from hemagglutinin__InfluenzaA__AFD63802

SEQ ID NO: 104318 - RNA, 1701 nt, Artificial Sequence
  derived and/or modified CDS sequence (opt2) from hemagglutinin__InfluenzaA__AFD63813
augaagaccaucaucgcccucuccuacauccucucccucgucuucgcccagaaguuccccggcaacgacaacuccaccgccacccucugccucggccaccacgccguccccaacggcaccaucgucaagaccaucaccaacgaccagaucgaggucaccaacgccaccgagcucguccagaucuccuccaccggcggcaucugcgacuccccccaccagauccucgacggcgagaacugcacccucaucgacgcccuccucggcgacccccagugcgacggcuuccagaacaagaagugggaccucuucgucgagcgcuccaaggccuacuccaacugcuaccccuacgacguccccgacuacgccucccuccgcucccucgucgccuccuccggcucccucgaguucaacaacgaguccuucgacuggaccggcgucacccagaacggcaccuccuccgccugcaagcgccgcuccaacaaguccuucuucucccgccucaacuggcucacccaccucaaguacaaguaccccgcccucaacgucaccaugcccaacaacgagaaguucgacaagcucuacaucuggggcguccaccaccccggcaccgacuccgaccagaucucccucuacgcccaggccuccggccgcaucaccgucuccaccaagcgcucccagcagaccgucauccccaacaucggcucccgcccccgcguccgcgacaucuccucccgcaucuccaucuacuggaccaucgucaagcccggcgacauccuccucaucaacuccaccggcaaccucaucgccccccgcggcuacuucaagauccgcuccggcaaguccuccaucaugcgcuccgacgcccccaucggcaagugcaacuccgagugcaucacccccaacggcuccauccccaacgacaagcccuuccagaacgucaaccgcaucaccuacggcgccugcccccgcuacgucaagcagaacacccucaagcucgccaccggcaugcgcaacguccccgagaagcagacccgcggcaucuucggcgccaucgccggcuucaucgagaacggcugggagggcauggucgacggcugguacggcuuccgccaccagaacuccgagggcaccggccaggccgccgaccucaaguccacccaggccgccaucaaccagaucaacggcaagcucaaccgccucaucggcaagaccaacgagaaguuccaccagaucgagaaggaguucuccgaggucgagggccgcauccaggaccucgagaaguacgucgaggacaccaagaucgaccucugguccuacaacgccgagcuccucgucgcccucgagaaccagcacaccaucgaccucaccgacuccgagaugaacaagcucuucgagcgcaccaagaagcagcuccgcgagaacgccgaggacaugggcaacggcugcuucaagaucuaccacaagugcgacaacgccugcaucggcuccauccgcaacggcaccuacgaccacgacgucuaccgcgacgaggcccucaacaaccgcuuccagaucaagggcgucgagcucaaguccggcuacaaggacuggauccucuggaucuccuucgccaccuccugcuuccuccucugcgucgcccuccucggcuucaucaugugggccugccagaagggcaacauccgcugcaacaucugcaucuga

SEQ ID NO: 104319 - RNA, 1701 nt, Artificial Sequence; identical to SEQ ID NO: 104303
  derived and/or modified CDS sequence (opt2) from hemagglutinin__InfluenzaA__AFD63824

SEQ ID NO: 104320 - RNA, 1701 nt, Artificial Sequence; identical to SEQ ID NO: 96109
  derived and/or modified CDS sequence (opt2) from hemagglutinin__InfluenzaA__AFD63846

SEQ ID NO: 104321 - RNA, 1701 nt, Artificial Sequence; identical to SEQ ID NO: 97347
  derived and/or modified CDS sequence (opt2) from hemagglutinin__InfluenzaA__AFD63857

SEQ ID NO: 104322 - RNA, 1701 nt, Artificial Sequence; identical to SEQ ID NO: 96109
  derived and/or modified CDS sequence (opt2) from hemagglutinin__InfluenzaA__AFD63868

SEQ ID NO: 104323 - RNA, 1701 nt, Artificial Sequence; identical to SEQ ID NO: 96109
  derived and/or modified CDS sequence (opt2) from hemagglutinin__InfluenzaA__AFD63890

SEQ ID NO: 104324 - RNA, 1701 nt, Artificial Sequence; identical to SEQ ID NO: 96109
  derived and/or modified CDS sequence (opt2) from hemagglutinin__InfluenzaA__AFD63901

SEQ ID NO: 104325 - RNA, 1701 nt, Artificial Sequence; identical to SEQ ID NO: 96109
  derived and/or modified CDS sequence (opt2) from hemagglutinin__InfluenzaA__AFD63912

SEQ ID NO: 104326 - RNA, 1701 nt, Artificial Sequence
  derived and/or modified CDS sequence (opt2) from hemagglutinin__InfluenzaA__AFD63923
augaagaccaucaucgcccucuccuacauccucugccucgucuucgcccagaagcuccccggcaacgacaacuccaccgccacccucugccucggccaccacgccguccccaacggcaccaucgucaagaccaucaccaacgaccagaucgaggucaccaacgccaccgagcucguccaguccuccuccaccggcggcaucugcgacuccccccaccagauccucgacggcgagaacugcacccucaucgacgcccuccucggcgacccccagugcgacggcuuccagaacaagaagugggaccucuucgucgagcgcuccaaggccuacuccaacugcuaccccuacgacguccccgacuacgccucccuccgcucccucgucgccuccuccggcacccucgaguucaacaacgaguccuucaacuggaccggcgucacccagaacggcaccuccuccgccugcaagcgcaaguccaacaaguccuucuucucccgccucaacuggcucacccaccucaaguacaaguaccccgcccucaacgucaccaugcccaacaacgagaaguucgacaagcucuacaucuggggcguccaccaccccggcaccgacaacgaccagaucucccucuacgcccaggccuccggccgcaucaccgucuccaccaagcgcucccagcagaccgucauccccaacaucggcucccgcccccgcguccgcgacaucuccucccgcaucuccaucuacuggaccaucgucaagcccggcgacauccuccucaucaacuccaccggcaaccucaucgccccccgcggcuacuucaagauccgcuccggcaaguccuccaucaugcgcuccgacgcccccaucggcaagugcaacuccgagugcaucacccccaacggcuccauccccaacgacaagcccuuccagaacgucaaccgcaucaccuacggcgccugcccccgcuacgucaagcagaacacccucaagcucgccaccggcaugcgcaacguccccgagaagcagacccgcggcaucuucggcgccaucgccggcuucaucgagaacggcugggagggcauggucgacggcugguacggcuuccgccaccagaacuccgagggcaccggccaggccgccgaccucaaguccacccaggccgccaucaaccagaucaacggcaagcucaaccgccucaucggcaagaccaacgagaaguuccaccagaucgagaaggaguucuccgaggucgagggccgcauccaggaccucgagaaguacgucgaggacaccaagaucgaccucugguccuacaacgccgagcuccucgucgcccucgagaaccagcacaccaucgaccucaccgacuccgagaugaacaagcucuucgagcgcaccaagaagcagcuccgcgagaacgccgaggacaugggcaacggcugcuucaagaucuaccacaagugcgacaacgccugcaucggcuccauccgcaacggcaccuacgaccacgacgucuaccgcgacgaggcccucaacaaccgcuuccagaucaagggcgucgagcucaaguccggcuacaaggacuggauccucuggaucuccuucgccaucuccugcuuccuccucugcgucgcccuccucggcuucaucaugugggccugccagaagggcaacauccgcugcaacaucugcaucuga

SEQ ID NO: 104327 - RNA, 1701 nt, Artificial Sequence
  derived and/or modified CDS sequence (opt2) from hemagglutinin__InfluenzaA__AFD63934
augaagaccaucaucgcccucuccuacauccucugccucgucuucgcccagaagcuccccggcaacgacaacuccaccgccacccucugccucggccaccacgccguccccaacggcaccaucgucaagaccaucaccaacgaccagaucgaggucaccaacgccaccgagcucguccaguccuccuccaccggcggcaucugcgacuccccccaccagauccucgacggcgagaacugcacccucaucgacgcccuccucggcgacccccagugcgacggcuuccagaacaagaagugggaccucuucgucgagcgcuccaaggccuacuccaacugcuaccccuacgacguccccgacuacgccucccuccgcucccucgucgccuccuccggcacccucgaguucaacaacgaguccuucgacuggaccggcgucacccagaacggcaccuccuccgccugcaagcgccgcuccaacaaguccuucuucucccgccucaacuggcucacccaccucaaguacaaguaccccgcccucaacgucaccaugcccaacaacgagaaguucgacaagcucuacaucuggggcguccaccaccccggcaccgaguccgaccagaucucccucuacgcccaggccuccggccgcaucaccgucuccaccaagcgcucccagcagaccgucauccccaacaucggcucccgcccccgcguccgcgacgucuccucccgcaucuccaucuacuggaccgucgucaagcccggcgacauccuccucaucaacuccaccggcaaccucaucgccccccgcggcuacuucaagauccgcuccggcaaguccuccaucaugcgcuccgacgcccccaucggcaagugcaacuccgagugcaucacccccaacggcuccauccccaacgacaagcccuuccagaacgucaaccgcaucaccuacggcgccugcccccgcuacgucaagcagaacacccucaagcucgccaccggcaugcgcaacguccccgagaagcagacccgcggcaucuucggcgccaucgccggcuucaucgagaacggcugggagggcauggucgacggcugguacggcuuccgccaccagaacuccgagggcaccggccaggccgccgaccucaaguccacccaggccgccaucaaccagaucaacggcaagcucaaccgccucaucggcaagaccaacgagaaguuccaccagaucgagaaggaguucuccgaggucgagggccgcauccaggaccucgagaaguacgucgaggacaccaagaucgaccucugguccuacaacgccgagcuccucgucgcccucgagaaccagcacaccaucgaccucaccgacuccgagaugaacaagcucuucgagcgcaccaagaagcagcuccgcgagaacgccgaggacaugggcaacggcugcuucaagaucuaccacaagugcgacaacgccugcaucggcuccauccgcaacggcaccuacgaccacgacgucuaccgcgacgaggcccucaacaaccgcuuccagaucaagggcgucgagcucaaguccggcuacaaggacuggauccucuggaucuccuucgccaucuccugcuuccuccucugcgucgcccuccucggcuucaucaugugggccugccagaagggcaacauccgcugcaacaucugcaucuga

SEQ ID NO: 104328 - RNA, 1701 nt, Artificial Sequence; identical to SEQ ID NO: 104303
  derived and/or modified CDS sequence (opt2) from hemagglutinin__InfluenzaA__AFD63945

SEQ ID NO: 104329 - RNA, 1701 nt, Artificial Sequence; identical to SEQ ID NO: 104303
  derived and/or modified CDS sequence (opt2) from hemagglutinin__InfluenzaA__AFD63956

SEQ ID NO: 104330 - RNA, 1701 nt, Artificial Sequence; identical to SEQ ID NO: 104303
  derived and/or modified CDS sequence (opt2) from hemagglutinin__InfluenzaA__AFD63967

SEQ ID NO: 104331 - RNA, 1701 nt, Artificial Sequence; identical to SEQ ID NO: 96109
  derived and/or modified CDS sequence (opt2) from hemagglutinin__InfluenzaA__AFD63989

SEQ ID NO: 104332 - RNA, 1701 nt, Artificial Sequence; identical to SEQ ID NO: 96109
  derived and/or modified CDS sequence (opt2) from hemagglutinin__InfluenzaA__AFD64000

SEQ ID NO: 104333 - RNA, 1701 nt, Artificial Sequence
  derived and/or modified CDS sequence (opt2) from hemagglutinin__InfluenzaA__AFD64011
augaagaccaucaucgcccucuccuacauccucugccucgucuucgcccagaagcuccccggcaacgacaacuccaccgccacccucugccucggccaccacgccguccccaacggcaccaucgucaagaccaucaccaacgaccagaucgaggucaccaacgccaccgagcucguccaguccuccuccaccggcggcaucugcgacuccccccaccagauccucgacggcgagaacugcacccucaucgacgcccuccucggcgacccccagugcgacggcuuccagaacaagaagugggaccucuucgucgagcgcuccaaggccuacuccaacugcuaccccuacgacguccccgacuacgccucccuccgcucccucgucgccuccuccggcacccucgaguucaacaacgaguccuucgacuggaccggcgucacccagaacggcaccuccuccgccugcaagcgccgcuccaacaaguccuucuucucccgccucaacuggcucacccaccucaaguacaaguaccccgcccucaacgucaccaugcccaacaacgagaaguucgacaagcucuacaucuggggcguccaccaccccggcaccgacuccgaccagaucucccucuacgcccaggcccccggcaagaucaccgucuccaccaagcgcucccagcagaccgucauccccaacaucggcucccgcccccgcguccgcgacgucuccucccgcaucuccaucuacuggaccaucgucaagcccggcgacauccuccucaucaacuccaccggcaaccucaucgccccccgcggcuacuucaagauccgcuccggcaaguccuccaucaugcgcuccgacgcccccaucggcaagugcaacuccgagugcaucacccccaacggcuccauccccaacgacaagcccuuccagaacgucaaccgcaucaccuacggcgccugcccccgcuacgucaagcagaacacccucaagcucgccaccggcaugcgcaacguccccgagaagcagacccgcggcaucuucggcgccaucgccggcuucaucgagaacggcugggagggcauggucgacggcugguacggcuuccgccaccagaacuccgagggcaccggccaggccgccgaccucaaguccacccaggccgccaucaaccagaucaacggcaagcucaaccgccucaucggcaagaccaacgagaaguuccaccagaucgagaaggaguucuccgaggucgagggccgcauccaggaccucgagaaguacgucgaggacaccaagaucgaccucugguccuacaacgccgagcuccucgucgcccucgagaaccagcacaccaucgaccucaccgacuccgagaugaacaagcucuucgagcgcaccaagaagcagcuccgcgagaacgccgaggacaugggcaacggcugcuucaagaucuaccacaagugcgacaacgccugcaucggcuccauccgcaacggcaccuacgaccacgacgucuaccgcgacgaggcccucaacaaccgcuuccagaucaagggcgucgagcucaaguccggcuacaaggacuggauccucuggaucuccuucgccaucuccugcuuccuccucugcgucgcccuccucggcuucaucaugugggccugccagaagggcaacauccgcugcgacaucugcaucuga

SEQ ID NO: 104334 - RNA, 1701 nt, Artificial Sequence; identical to SEQ ID NO: 96109
  derived and/or modified CDS sequence (opt2) from hemagglutinin__InfluenzaA__AFD64022

SEQ ID NO: 104335 - RNA, 1701 nt, Artificial Sequence; identical to SEQ ID NO: 96109
  derived and/or modified CDS sequence (opt2) from hemagglutinin__InfluenzaA__AFD64033

SEQ ID NO: 104336 - RNA, 1701 nt, Artificial Sequence
  derived and/or modified CDS sequence (opt2) from hemagglutinin__InfluenzaA__AFD64044
augaagaccaucaucgcccucuccuacauccucugccucgucuucgcccagaagcuccccggcaacgagaacuccaccgccacccucugccucggccaccacgccguccccaacggcaccaucgucaagaccaucaccaacgaccagaucgaggucaccaacgccaccgagcucguccaguccuccuccaccggcggcaucugcgacuccccccaccagauccucgacggcgagaacugcacccucaucgacgcccuccucggcgacccccagugcgacggcuuccagaacaagaagugggaccucuucgucgagcgcuccaaggccuacuccaacugcuaccccuacgacguccccgacuacgccucccuccgcucccucgucgccuccuccggcacccucgaguucaacaacgaguccuucgacuggaccggcgucacccagaacggcaccuccuccgccugcaagcgccgcuccaacaaguccuucuucucccgccucaacuggcucacccaccucaaguacaaguaccccgcccucaacgucaccaugcccaacaacgagaaguucgacaagcucuacaucuggggcguccaccaccccggcaccgacuccgaccagaucucccucuacgcccaggccuccggccgcaucaccgucuccaccaagcgcucccagcagaccgucauccccaacaucggcucccgcccccgcguccgcgacgucuccucccgcaucuccaucuacuggaccaucgucaagcccggcgacauccuccucaucaacuccaccggcaaccucaucgccccccgcggcuacuucaagauccgcuccggcaaguccuccaucaugcgcuccgacgcccccaucggcaagugcaacuccgagugcaucacccccaacggcuccauccccaacgacaagcccuuccagaacgucaaccgcaucaccuacggcgccugcccccgcuacgucaagcagaacacccucaagcucgccaccggcaugcgcaacguccccgagaagcagacccgcggcaucuucggcgccaucgccggcuucaucgagaacggcugggagggcauggucgacggcugguacggcuuccgccaccagaacuccgagggcaccggccaggccgccgaccucaaguccacccaggccgccaucaaccagaucaacggcaagcucaaccgccucaucggcaagaccaacgagaaguuccaccagaucgagaaggaguucuccgaggucgagggccgcauccaggaccucgagaaguacgucgaggacaccaagaucgaccucugguccuacaacgccgagcuccucgucgcccucgagaaccagcacaccaucgaccucaccgacuccgagaugaacaagcucuucgagcgcaccaagaagcagcuccgcgagaacgccgaggacaugggcaacggcugcuucaagaucuaccacaagugcgacaacgccugcaucggcuccauccgcaacggcaccuacgaccacgacgucuaccgcgacgaggcccucaacaaccgcuuccagaucaagggcgucgagcucaaguccggcuacaaggacuggauccucuggaucuccuucgccaucuccugcuuccuccucugcgucgcccuccucggcuucaucaugugggccugccagaagggcaacauccgcugcaacaucugcaucuga

SEQ ID NO: 104337 - RNA, 1701 nt, Artificial Sequence; identical to SEQ ID NO: 104313
  derived and/or modified CDS sequence (opt2) from hemagglutinin__InfluenzaA__AFD64055

SEQ ID NO: 104338 - RNA, 1701 nt, Artificial Sequence
  derived and/or modified CDS sequence (opt2) from hemagglutinin__InfluenzaA__AFD64066
augaagaccaucaucgcccucuccuacauccucugccucgucuucgcccagaagcuccccggcaacgacaacuccaccgccacccucugccucggccaccacgccguccccaacggcaccaucgucaagaccaucaccaacgaccagaucgaggucaccaacgccaccgagcucguccaguccuccuccaccggcggcaucugcgacuccccccaccagauccucgacggcgagaacugcacccucaucgacgcccuccucggcgacccccagugcgacggcuuccagaacaagaagugggaccucuucgucgagcgcuccaaggccuacuccaacugcuaccccuacgacguccccgacuacaccucccuccgcucccucgucgccuccuccggcacccucgaguucaacaacgaguccuucaacuggaccggcgucacccagaacggcaccuccuccgccugcaagcgccgcuccaacaaguccuucuucucccgccucaacuggcucacccaccucaaguucaaguaccccgcccucaacgucaccaugcccaacaacgagaaguucgacaagcucuacaucuggggcguccaccaccccggcaccgacaacgaccagaucucccucuacgcccaggccuccggccgcaucaccgucuccaccaagcgcucccagcagaccgucauccccaacaucggcucccgcccccgcguccgcgacguccccucccgcaucuccaucuacuggaccaucgucaagcccggcgacauccuccucaucaacuccaccggcaaccucaucgccccccgcggcuacuucaagauccgcuccggcaaguccuccaucaugcgcuccgacgcccccaucggcaagugcaacuccgagugcaucacccccaacggcuccauccccaacgacaagcccuuccagaacgucaaccgcaucaccuacggcgccugcccccgcuacgucaagcagaacacccucaagcucgccaccggcaugcgcaacguccccgagaagcagacccgcggcaucuucggcgccaucgccggcuucaucgagaacggcugggagggcauggucgacggcugguacggcuuccgccaccagaacgccgagggcaccggccaggccgccgaccucaaguccacccaggccgccaucaaccagaucaacggcaagcucaaccgccucaucggcaagaccaacgagaaguuccaccagaucgagaaggaguucuccgaggucgagggccgcauccaggaccucgagaaguacgucgaggacaccaagaucgaccucugguccuacaacgccgagcuccucgucgcccucgagaaccagcacaccaucgaccucaccgacuccgagaugaacaagcucuucgagcgcaccaagaagcagcuccgcgagaacgccgaggacaugggcaacggcugcuucaagaucuaccacaagugcgacaacgccugcaucggcuccauccgcaacggcaccuacgaccacgacgucuaccgcgacgaggcccucaacaaccgcuuccagaucaagggcgucgagcucaaguccggcuacaagaacuggauccucuggaucuccuucgccaucuccugcuuccuccucugcgucgcccuccucggcuucaucaugugggccugccagaagggcaacauccgcugcaacaucugcaucuga

SEQ ID NO: 104339 - RNA, 1701 nt, Artificial Sequence
  derived and/or modified CDS sequence (opt2) from hemagglutinin__InfluenzaA__AFD64077
augaagaccaucaucgcccucuccuacauccucugccucgucuucgcccagaagcuccccggcaacgacaacuccaccgccacccucugccucggccaccacgccguccccaacggcaccaucgucaagaccaucaccaacgaccagaucgaggucaccaacgccaccgagcucguccagaucuccuccaccggcgagaucugcgacuccccccaccagauccucgacggcgagaacugcacccucaucgacgcccuccucggcgacccccagugcgacggcuuccagaacaagaagugggaccucuucgucgagcgcuccaaggccuacuccaacugcuaccccuacgacguccccgacuacgccucccuccgcucccucgucgccuccuccggcacccucgaguucaacaacgaguccuucgacuggaccggcgucacccagaacggcaccuccuccgccugcaagcgccgcuccaacaaguccuucuucucccgccucaacuggcucacccaccucaaguacaaguaccccgcccucaacgucaccaugcccaacaacgagaaguucgacaagcucuacaucuggggcguccaccaccccggcaccgacuccgaccagaucucccucuacgcccaggccuccggccgcaucaccgucuccaccaagcgcucccagcagaccgucauccccaacaucggcucccgcccccgcauccgcgacgucuccucccgcaucuccaucuacuggaccaucgucaagcccggcgacauccuccucaucaacuccaccggcaaccucaucgccccccgcggcuacuucaagauccgcuccggcaaguccuccaucaugcgcuccgacgcccccaucggcaagugcaacuccgagugcaucacccccaacggcuccauccccaacgacaagcccuuccagaacgucaaccgcaucaccuacggcgccugcccccgcuacgucaagcagaacacccucaagcucgccaccggcaugcgcaacguccccgagaagcagacccgcggcaucuucggcgccaucgccggcuucaucgagaacggcugggagggcauggucgacggcugguacggcuuccgccaccagaacuccgagggcaccggccaggccgccgaccucaaguccacccaggccgccaucaaccagaucaacggcaagcucaaccgccucaucggcaagaccaacgagaaguuccaccagaucgagaaggaguucuccgaggucgagggccgcauccaggaccucgagaaguacgucgaggacaccaagaucgaccucugguccuacaacgccgagcuccucgucgcccucgagaaccagcacaccaucgaccucaccgacuccgagaugaacaagcucuucgagcgcaccaagaagcagcuccgcgagaacgccgaggacaugggcaacggcugcuucaagaucuaccacaagugcgacaacgccugcaucggcuccauccgcaacggcaccuacgaccacgacgucuaccgcgacgaggcccucaacaaccgcuuccagaucaagggcgucgagcucaaguccggcuacaaggacuggauccucuggaucuccuucgccaucuccugcuuccuccucugcgucgcccuccucggcuucaucaugugggccugccagaagggcaacauccgcugcaacaucugcaucuga

SEQ ID NO: 104340 - RNA, 1701 nt, Artificial Sequence; identical to SEQ ID NO: 96109
  derived and/or modified CDS sequence (opt2) from hemagglutinin__InfluenzaA__AFD64088

SEQ ID NO: 104341 - RNA, 1701 nt, Artificial Sequence; identical to SEQ ID NO: 96109
  derived and/or modified CDS sequence (opt2) from hemagglutinin__InfluenzaA__AFD64099

SEQ ID NO: 104342 - RNA, 1701 nt, Artificial Sequence; identical to SEQ ID NO: 104313
  derived and/or modified CDS sequence (opt2) from hemagglutinin__InfluenzaA__AFD64110

SEQ ID NO: 104343 - RNA, 1701 nt, Artificial Sequence
  derived and/or modified CDS sequence (opt2) from hemagglutinin__InfluenzaA__AFD64121
augaagaccaucaucgcccucuccuacauccucugccucgucuucgcccagaagcuccccggcaacgacaacuccaccgccacccucugccucggccaccacgccguccccaacggcaccaucgucaagaccaucaccaacgaccagaucgaggucaccaacgccaccgagcucguccaguccuccuccaccggcggcaucugcgacuccccccaccagauccucgacggcgagaacugcacccucaucgacgcccuccucggcgacccccagugcgacggcuuccagaacaagaagugggaccucuucgucgagcgcucccgcgccuacuccaacugcuaccccuacgacguccccgacuacgccucccuccgcucccucgucgccuccuccggcacccucgaguucaacaacgaguccuucaacuggaccggcgucacccagaacggcaccuccuccgccugcaagcgcaaguccaacaaguccuucuucucccgccucaacuggcucacccaccucaaguacaaguaccccgcccucaacgucaccaugcccaacaacgagaaguucgacaagcucuacaucuggggcguccaccaccccggcaccgacaacgaccagaucucccucuacgcccaggccuccggccgcaucaccgucuccaccaagcgcucccagcagaccgucauccccaacaucggcucccgcccccgcguccgcgacgucuccucccgcaucuccaucuacuggaccaucgucaagcccggcgacauccuccucaucaacuccaccggcaaccucaucgccccccgcggcuacuucaagauccgcuccggcaaguccuccaucaugcgcuccgacgcccccaucggcaagugcaacuccgagugcaucacccccaacggcuccauccccaacgacaagcccuuccagaacgucaaccgcaucaccuacggcgccugcccccgcuacgucaagcagaacacccucaagcucgccaccggcaugcgcaacguccccgagaagcagacccgcggcaucuucggcgccaucgccggcuucaucgagaacggcugggagggcauggucgacggcugguacggcuuccgccaccagaacuccgagggcaccggccaggccgccgaccucaaguccacccaggccgccaucaaccagaucaacggcaagcucaaccgccucaucggcaagaccaacgagaaguuccaccagaucgagaaggaguucuccgaggucgagggccgcauccaggaccucgagaaguacgucgaggacaccaagaucgaccucugguccuacaacgccgagcuccucgucgcccucgagaaccagcacaccaucgaccucaccgacuccgagaugaacaagcucuucgagcgcaccaagaagcagcuccgcgagaacgccgaggacaugggcaacggcugcuucaagaucuaccacaagugcgacaacgccugcaucggcuccauccgcaacggcaccuacgaccacgacgucuaccgcgacgaggcccucaacaaccgcuuccagaucaagggcgucgagcucaaguccggcuacaaggacuggauccucuggaucuccuucgccaucuccugcuuccuccucugcgucgcccuccucggcuucaucaugugggccugccagaagggcaacauccgcugcaacaucugcaucuga

SEQ ID NO: 104344 - RNA, 1701 nt, Artificial Sequence; identical to SEQ ID NO: 96109
  derived and/or modified CDS sequence (opt2) from hemagglutinin__InfluenzaA__AFD64132

SEQ ID NO: 104345 - RNA, 1701 nt, Artificial Sequence; identical to SEQ ID NO: 104303
  derived and/or modified CDS sequence (opt2) from hemagglutinin__InfluenzaA__AFD64143

SEQ ID NO: 104346 - RNA, 1701 nt, Artificial Sequence; identical to SEQ ID NO: 96109
  derived and/or modified CDS sequence (opt2) from hemagglutinin__InfluenzaA__AFD64154

SEQ ID NO: 104347 - RNA, 1701 nt, Artificial Sequence
  derived and/or modified CDS sequence (opt2) from hemagglutinin__InfluenzaA__AFD64179
augaagaccaucaucgcccucuccuacauccucugccucgucuucgcccagaagcuccccggcaacgacaacuccaccgccacccucugccucggccaccacgccguccccaacggcaccaucgucaagaccaucaccaacgaccagaucgaggucaccaacgccaccgagcucguccagaucuccuccaccggcggcaucugcgacuccccccaccagauccucgacggcgagaacugcacccucaucgacgcccuccucggcgacccccagugcgacggcuuccagaacaagaagugggaccucuucgucgagcgcuccaaggccuacuccaacugcuaccccuacgacguccccgacuacgccucccuccgcucccucgucgccuccuccggcacccucgaguucaacaacgaguccuucgacuggaccggcgucacccagaacggcaccuccuccgccugcaagcgccgcuccaacaaguccuucuucucccgccucaacuggcucacccaccucaaguacaaguaccccgcccucaacgucaccaugcccaacaacgagaaguucgacaagcucuacaucuggggcguccaccaccccggcaccgacuccgaccagaucucccucuacgcccaggccuccggccgcaucaccgucuccaccaagcgcucccagcagaccgucauccccaacaucggcucccgcccccgcguccgcgacgucuccucccagaucuccaucuacuggaccaucgucaagcccggcgacauccuccucaucaacuccaccggcaaccucaucgccccccgcggcuacuucaagauccgcuccggcaaguccuccaucaugcgcuccgacgcccccaucggcaagugcaacuccgagugcaucacccccaacggcuccauccccaacgacaagcccuuccagaacgucaaccgcaucaccuacggcgccugcccccgcuacgucaagcagaacacccucaagcucgccaccggcaugcgcaacguccccgagaagcagacccgcggcaucuucggcgccaucgccggcuucaucgagaacggcugggagggcauggucgacggcugguacggcuuccgccaccagaacuccgagggcaccggccaggccgccgaccucaaguccacccaggccgccaucaaccagaucaacggcaagcucaaccgccucaucggcaagaccaacgagaaguuccaccagaucgagaaggaguucuccgaggucgagggccgcauccaggaccucgagaaguacgucgaggacaccaagaucgaccucugguccuacaacgccgagcuccucgucgcccucgagaaccagcacaccaucgaccucaccgacuccgagaugaacaagcucuucgagcgcaccaagaagcagcuccgcgagaacgccgaggacaugggcaacggcugcuucaagaucuaccacaagugcgacaacgccugcaucggcuccauccgcaacggcaccuacgaccacgacgucuaccgcgacgaggcccucaacaaccgcuuccagaucaagggcgucgagcucaaguccggcuacaaggacuggauccucuggaucuccuucgccaucuccugcuuccuccucugcgucgcccuccucggcuucaucaugugggccugccagaagggcaacauccgcugcaacaucugcaucuga

SEQ ID NO: 104348 - RNA, 1701 nt, Artificial Sequence; identical to SEQ ID NO: 104347
  derived and/or modified CDS sequence (opt2) from hemagglutinin__InfluenzaA__AFD64190

SEQ ID NO: 104349 - RNA, 1701 nt, Artificial Sequence; identical to SEQ ID NO: 104303
  derived and/or modified CDS sequence (opt2) from hemagglutinin__InfluenzaA__AFD64201

SEQ ID NO: 104350 - RNA, 1701 nt, Artificial Sequence; identical to SEQ ID NO: 104313
  derived and/or modified CDS sequence (opt2) from hemagglutinin__InfluenzaA__AFD64212

SEQ ID NO: 104351 - RNA, 1701 nt, Artificial Sequence
  derived and/or modified CDS sequence (opt2) from hemagglutinin__InfluenzaA__AFD64223
augaagaccaucaucgcccucuccuacauccucugccucgucuucgcccagaagcuccccggcaacgacaacuccaccgccacccucugccucggccaccacgccguccccaacggcaccaucgucaagaccaucaccaacgaccagaucgaggucaccaacgccaccgagcucguccaguccuccuccaccggcggcaucugcgacuccccccaccagauccucgacggcgagaacugcacccucaucgacgcccuccucggcgacccccagugcgacggcuuccagaacaagaagugggaccucuucgucgagcgcuccaaggccuacuccaacugcuaccccuacgacguccccgacuacgccucccuccgcucccucgucgccuccuccggcacccucgaguucaacaacgaguccuucaacuggaccggcgucacccagaacggcaccuccuccgccugcaagcgccgcuccaacaaguccuucuucucccgccucaacuggcucacccaccucaaguacaaguaccccgcccucaacgucaccaugcccaacaacgagaaguucgacaagcucuacaucuggggcguccuccaccccggcaccgacuccgaccagauccgccucuacgcccaggccuccggccgcaucaccgucuccaccaagcgcucccagcagaccgucauccccaacaucggcucccgcccccgcguccgcgacgucuccucccgcaucuccaucuacuggaccaucgucaagcccggcgacauccuccucaucaacuccaccggcaaccucaucgccccccgcggcuacuucaagauccgcuccggcaaguccuccaucaugcgcuccgacgcccccaucggcaagugcaacuccgagugcaucacccccaacggcuccauccccaacgacaagcccuuccagaacgucaaccgcaucaccuacggcgccugcccccgcuacaucaagcagaacacccucaagcucgccaccggcaugcgcaacguccccgagaagcagacccgcggcaucuucggcgccaucgccggcuucaucgagaacggcugggagggcauggucgacggcugguacggcuuccgccaccagaacuccgagggcaccggccaggccgccgaccucaaguccacccaggccgccaucaaccagaucaacggcaagcucaaccgccucaucggcaagaccaacgagaaguuccaccagaucgagaaggaguucuccgaggucgagggccgcauccaggaccucgagaaguacgucgaggacaccaagaucgaccucugguccuacaacgccgagcuccucgucgcccucgagaaccaguacaccaucgaccucaccgacuccgagaugaacaagcucuucgagcgcaccaagaagcagcuccgcgagaacgccgaggacaugggcaacggcugcuucaagaucuaccacaagugcgacaacgccugcaucggcuccauccgcaacggcaccuacgaccacgacgucuaccgcgacgaggcccucaacaaccgcuuccagaucaagggcgucgagcucaaguccggcuacaaggacuggauccucuggaucuccuucgccaucuccugcuuccuccucugcgucgcccuccucggcuucaucaugugggccugccagaagggcaacauccgcugcaacaucugcaucuga

SEQ ID NO: 104352 - RNA, 1701 nt, Artificial Sequence
  derived and/or modified CDS sequence (opt2) from hemagglutinin__InfluenzaA__AFD64315
augaagaccaucaucgcccucuccuacauccucugccucgucuucgcccagaagcuccccggcaacgacaacuccaccgccacccucugccucggccaccacgccguccccaacggcaccaucgucaagaccaucaccaacgaccagaucgaggucaccaacgccaccgagcucguccagaucuccuccaccggcggcaucugcgacuccccccaccagauccucgacggcgagaacugcacccucaucgacgcccuccucggcgacccccagugcgacggcuuccagaacaagaagugggaccucuucgucgagcgcuccaaggccuacuccaacugcuaccccuacgacguccccgacuacgccucccuccgcucccucgucgccuccuccggcacccucgaguucaacaacgaguccuucgacuggaccggcgucacccagaacggcaccuccuccgccugcaagcgccgcuccaacaaguccuucuucucccgccucaacuggcucacccaccucaaguacaaguaccccgcccucaacgucaccaugcccaacaacgagaaguucgacaagcucuacaucuggggcguccaccaccccggcaccgacuccgaccagaucucccucuacgcccaggccuccggccgcaucaccgucuccaccaagcgcucccagcagaccgucauccccaacaucggcucccgcccccgcguccgcgacgucuccucccgcaucuccaucuacuggaccaucgucaagcccggcgacauccuccucaucaacuccaccggcaaccucaucgccccccgcggcuacuucaagauccgcuccggcaaguccuccaucaugcgcuccgacgcccccaucggcaagugcaacuccgagugcaucacccccaacggcuccauccccaacgacaagcccuuccagaacgucaaccgcaucaccuacggcgccugcccccgcuacgucaagcagaacacccucaagcucgccaccggcaugcgcaacguccccgagaagcagacccgcggcaucuucggcgccaucgccggcuucaucgagaacggcugggagggcauggucgacggcugguacggcuuccgccaccagaacuccgagggcaccggccaggccgccgaccucaaguccacccaggccgccaucaaccagaucaacggcaagcucaaccgccucaucggcaagaccaacgagaaguuccaccagaucgagaaggaguucuccgaggucgagggccgcauccaggaccucgagaaguacgucgaggacaccaagaucgaccucugguccuacaacgccgagcuccucgucgcccucgagaaccagcacaccaucgaccucaccgacuccgagaugaacaagcucuucgagcgcaccaagaaccagcuccgcgagaacgccgaggacaugggcaacggcugcuucaagaucuaccacaagugcgacaacgccugcaucggcuccauccgcaacggcaccuacgaccacgacgucuaccgcgacgaggcccucaacaaccgcuuccagaucaagggcgucgagcucaaguccggcuacaaggacuggauccucuggaucuccuucgccaucuccugcuuccuccucugcgucgcccuccucggcuucaucaugugggccugccagaagggcaacauccgcugcaacaucugcaucuga

SEQ ID NO: 104353 - RNA, 1701 nt, Artificial Sequence; identical to SEQ ID NO: 104343
  derived and/or modified CDS sequence (opt2) from hemagglutinin__InfluenzaA__AFD64326

SEQ ID NO: 104354 - RNA, 1701 nt, Artificial Sequence; identical to SEQ ID NO: 104313
  derived and/or modified CDS sequence (opt2) from hemagglutinin__InfluenzaA__AFD64337

SEQ ID NO: 104355 - RNA, 1701 nt, Artificial Sequence; identical to SEQ ID NO: 96109
  derived and/or modified CDS sequence (opt2) from hemagglutinin__InfluenzaA__AFD64348

SEQ ID NO: 104356 - RNA, 1701 nt, Artificial Sequence; identical to SEQ ID NO: 104313
  derived and/or modified CDS sequence (opt2) from hemagglutinin__InfluenzaA__AFD64359

SEQ ID NO: 104357 - RNA, 1701 nt, Artificial Sequence
  derived and/or modified CDS sequence (opt2) from hemagglutinin__InfluenzaA__AFD64370
augaagaccaucaucgcccucuccuacauccucugccucgucuucgcccagaagcuccccggcaacgacaacuccaccgccacccucugccucggccaccacgccguccccaacggcaccaucgucaagaccaucaccaacgaccagaucgaggucaccaacgccaccgagcucguccaguccuccuccaccggcggcaucugcgacuccccccaccagauccucgacggcgagaacugcacccucaucgacgcccuccucggcgacccccacugcgacggcuuccagaacaagaagugggaccucuucgucgagcgcuccaaggccuacuccaacugcuaccccuacgacguccccgacuacgccucccuccgcucccucgucgccuccuccggcacccucgaguucaacaacgaguccuucaacuggaccggcgucacccagaacggcaccuccuccgccugcaagcgcaaguccaacaaguccuucuucucccgccucaacuggcucacccaccucaaguacaaguaccccgcccucaacgucaccaugcccaacaacgagaaguucgacaagcucuacaucuggggcguccaccaccccggcaccgacaacgaccagaucucccucuacgcccaggccuccggccgcaucaccgucuccaccaagcgcucccagcagaccgucauccccaacaucggcucccgcccccgcguccgcgacaucuccucccgcaucuccaucuacuggaccaucgucaagcccggcgacauccuccucaucaacuccaccggcaaccucaucgccccccgcggcuacuucaagauccgcuccggcaaguccuccaucaugcgcuccgacgcccccaucggcaagugcaacuccgagugcaucacccccaacggcuccauccccaacgacaagcccuuccagaacgucaaccgcaucaccuacggcgccugcccccgcuacgucaagcagaacacccucaagcucgccaccggcaugcgcaacguccccgagaagcagacccgcggcaucuucggcgccaucgccggcuucaucgagaacggcugggagggcauggucgacggcugguacggcuuccgccaccagaacuccgagggcaccggccaggccgccgaccucaaguccacccaggccgccaucaaccagaucaacggcaagcucaaccgccucaucggcaagaccaacgagaaguuccaccagaucgagaaggaguucuccgaggucgagggccgcauccaggaccucgagaaguacgucgaggacaccaagaucgaccucugguccuacaacgccgagcuccucgucgcccucgagaaccagcacaccaucgaccucaccgacuccgagaugaacaagcucuucgagcgcaccaagaagcagcuccgcgagaacgccgaggacaugggcaacggcugcuucaagaucuaccacaagugcgacaacgccugcaucggcuccauccgcaacggcaccuacgaccacgacgucuaccgcgacgaggcccucaacaaccgcuuccagaucaagggcgucgagcucaaguccggcuacaaggacuggauccucuggaucuccuucgccaucuccugcuuccuccucugcgucgcccuccucggcuucaucaugugggccugccagaagggcaacauccgcugcaacaucugcaucuga

SEQ ID NO: 104358 - RNA, 1701 nt, Artificial Sequence; identical to SEQ ID NO: 96109
  derived and/or modified CDS sequence (opt2) from hemagglutinin__InfluenzaA__AFD64381

SEQ ID NO: 104359 - RNA, 1701 nt, Artificial Sequence; identical to SEQ ID NO: 104313
  derived and/or modified CDS sequence (opt2) from hemagglutinin__InfluenzaA__AFD64392

SEQ ID NO: 104360 - RNA, 1701 nt, Artificial Sequence; identical to SEQ ID NO: 104303
  derived and/or modified CDS sequence (opt2) from hemagglutinin__InfluenzaA__AFD64403

SEQ ID NO: 104361 - RNA, 1701 nt, Artificial Sequence; identical to SEQ ID NO: 104303
  derived and/or modified CDS sequence (opt2) from hemagglutinin__InfluenzaA__AFD64414

SEQ ID NO: 104362 - RNA, 1701 nt, Artificial Sequence
  derived and/or modified CDS sequence (opt2) from hemagglutinin__InfluenzaA__AFD64425
augaagaccaucaucgcccucuccuacauccucugccucgucuucgcccagaagcuccccggcaacgacaacuccaccgccacccucugccucggccaccacgccguccccaacggcaccaucgucaagaccaucaccaacgaccagaucgaggucaccaacgccaccgagcucguccagaucuccuccaccggcggcaucugcgacuccccccaccagauccucgacggcgagaacugcacccucaucgacgcccuccucggcgacccccagugcgacggcuuccagaacaagaagugggaccucuucgucgagcgcuccaaggccuacuccaacugcuaccccuacgacguccccaacuacgccucccuccgcucccucgucgccuccuccggcacccucgaguucaacaacgaguccuucgacuggaccggcgucacccagaacggcaccuccuccgccugcaagcgccgcuccaacaaguccuucuucucccgccucaacuggcucacccaccucaaguacaaguaccccgcccucaacgucaccaugcccaacaacgagaaguucgacaagcucuacaucuggggcguccaccaccccggcaccgacuccgaccagaucucccucuacgcccaggccuccggccgcaucaccgucuccaccaagcgcucccagcagaccgucauccccaacaucggcucccgcccccgcguccgcgacgucuccucccgcaucuccaucuacuggaccaucgucaagcccggcgacauccuccucaucaacuccaccggcaaccucaucgccccccgcggcuacuucaagauccgcuccggcaaguccuccaucaugcgcuccgacgcccccaucggcaagugcaacuccgagugcaucacccccaacggcuccauccccaacgacaagcccuuccagaacgucaaccgcaucaccuacggcgccugcccccgcuacgucaagcagaacacccucaagcucgccaccggcaugcgcaacguccccgagaagcagacccgcggcaucuucggcgccaucgccggcuucaucgagaacggcugggagggcauggucgacggcugguacggcuuccgccaccagaacuccgagggcaccggccaggccgccgaccucaaguccacccaggccgccaucaaccagaucaacggcaagcucaaccgccucaucggcaagaccaacgagaaguuccaccagaucgagaaggaguucuccgaggucgagggccgcauccaggaccucgagaaguacgucgaggacaccaagaucgaccucugguccuacaacgccgagcuccucgucgcccucgagaaccagcacaccaucgaccucaccgacuccgagaugaacaagcucuucgagcgcaccaagaagcagcuccgcgagaacgccgaggacaugggcaacggcugcuucaagaucuaccacaagugcgacaacgccugcaucggcuccauccgcaacggcaccuacgaccacaacgucuaccgcgacgaggcccucaacaaccgcuuccagaucaagggcgucgagcucaaguccggcuacaaggacuggauccucuggaucuccuucgccaucuccugcuuccuccucugcgucgcccuccucggcuucaucaugugggccugccagaagggcaacauccgcugcaacaucugcaucuga

SEQ ID NO: 104363 - RNA, 1701 nt, Artificial Sequence; identical to SEQ ID NO: 96109
  derived and/or modified CDS sequence (opt2) from hemagglutinin__InfluenzaA__AFD64436

SEQ ID NO: 104364 - RNA, 1701 nt, Artificial Sequence; identical to SEQ ID NO: 96109
  derived and/or modified CDS sequence (opt2) from hemagglutinin__InfluenzaA__AFD64447

SEQ ID NO: 104365 - RNA, 1701 nt, Artificial Sequence
  derived and/or modified CDS sequence (opt2) from hemagglutinin__InfluenzaA__AFD64458
augaagaccaucaucgcccucuccuacauccucugccucgucuucgcccagaagcuccccggcaacgacaacuccaccgccacccucugccucggccaccacgccguccagaacggcaccaucgucaagaccaucaccaacgaccagaucgaggucaccaacgccaccgagcucguccaguccuccuccaccggcggcaucugcgacuccccccaccagauccucgacggcgagaacugcacccucaucgacgcccuccucggcgacccccagugcgacggcuuccagaacaagaagugggaccucuucgucgagcgcuccaaggccuacuccaacugcuaccccuacgacguccccgacuacgccucccuccgcucccucgucgccuccuccggcacccucgaguucaacaacgaguccuucgacuggaccggcgucacccagaacggcaccuccuccgccugcaagcgccgcuccaacaaguccuucuucucccgccucaacuggcucacccaccucaaguacaaguaccccgcccucaacgucaccaugcccaacaacgagaaguucgacaagcucuacaucuggggcguccaccaccccggcaccgacuccgaccagaucucccucuacgcccaggccuccggccgcaucaccgucuccaccaagcgcucccagcagaccgucauccccaacaucggcucccgcccccgcguccgcgacgucuccucccgcaucuccaucuacuggaccaucgucaagcccggcgacauccuccucaucaacuccaccggcaaccucaucgccccccgcggcuacuucaagauccgcuccggcaaguccuccaucaugcgcuccgacgcccccaucggcaagugcaacuccgagugcaucacccccaacggcuccauccccaacgacaagcccuuccagaacgucaaccgcaucaccuacggcgccugcccccgcuacgucaagcagaacacccucaagcucgccaccggcaugcgcaacguccccgagaagcagacccgcggcaucuucggcgccaucgccggcuucaucgagaacggcugggagggcauggucgacggcugguacggcuuccgccaccagaacuccgagggcaccggccaggccgccgaccucaaguccacccaggccgccaucaaccagaucaacggcaagcucaaccgccucaucggcaagaccaacgagaaguuccaccagaucgagaaggaguucuccgaggucgagggccgcauccaggaccucgagaaguacgucgaggacaccaagaucgaccucugguccuacaacgccgagcuccucgucgcccucgagaaccagcacaccaucgaccucaccgacuccgagaugaacaagcucuucgagcgcaccaagaagcagcuccgcgagaacgccgaggacaugggcaacggcugcuucaagaucuaccacaagugcgacaacgccugcaucggcuccauccgcaacggcaccuacgaccacgacgucuaccgcgacgaggcccucaacaaccgcuuccagaucaagggcgucgagcucaaguccggcuacaaggacuggauccucuggaucuccuucgccaucuccugcuuccuccucugcgucgcccuccucggcuucaucaugugggccugccagaagggcaacauccgcugcaacaucugcaucuga

SEQ ID NO: 104366 - RNA, 1701 nt, Artificial Sequence; identical to SEQ ID NO: 102891
  derived and/or modified CDS sequence (opt2) from hemagglutinin__InfluenzaA__AFD64795

SEQ ID NO: 104367 - RNA, 1701 nt, Artificial Sequence; identical to SEQ ID NO: 103018
  derived and/or modified CDS sequence (opt2) from hemagglutinin__InfluenzaA__AFD64799

SEQ ID NO: 104368 - RNA, 1701 nt, Artificial Sequence
  derived and/or modified CDS sequence (opt2) from hemagglutinin__InfluenzaA__AFD64802
augaagaccaucaucgcccucuccuacauccucugccucgucuucgcccagaagcuccccggcaacgacaacuccaccgccacccucugccucggccaccacgccguccccaacggcaccaucgucaagaccaucaccaacgaccagaucgaggucaccaacgccaccgagcucguccaguccuccuccaccggcgagaucugcaacuccccccaccagauccucgacggcgagaacugcacccucaucgacgcccuccucggcgacccccagugcgacggcuuccagaacaagaagugggaccucuucgucgagcgcuccaaggcccacuccaacugcuaccccuacgacguccccgacuacgccucccuccgcucccucgucgccuccuccggcacccucgaguucaacaacgaguccuucaacuggaccggcgucacccagaacggcaccuccuccgccugcauccgccgcuccaacaacuccuucuucucccgccucaacuggcucacccaccucaacuucaaguaccccgcccucaacgucaccaugcccaacaacgagcaguucgacaagcucuacaucuggggcguccaccaccccggcaccgacaaggaccagaccuuccucuacgcccaggccuccggccgcaucaccgucuccaccaagcgcucccagcaggccgucauccccaacaucggcucccgcccccgcguccgcaacauccccucccgcgucuccaucuacuggaccaucgucaagcccggcgacauccuccucaucaacuccaccggcaaccucaucgccccccgcggcuacuucaagauccgcuccggcaaguccuccaucaugcgcuccgacgcccccaucggcaagugcaacuccgccugcaucacccccaacggcuccauccccaacgacaagcccuuccagaacgucaaccgcaucaccuacggcgccugcccccgcuacgucaagcagaacacccucaagcucgccaccggcaugcgcaacguccccgagaagcagacccgcggcaucuucggcgccaucgccggcuucaucgagaacggcugggagggcauggucgacggcugguacggcuuccgccaccagaacuccgagggccgcggccaggccgccgaccucaaguccacccaggccgccaucgaccagaucaacggcaagcucaaccgccucaucggcaagaccaacgagaaguuccaccagaucgagaaggaguucuccgaggucgagggccgcauccaggaccucgagaaguacgucgaggacaccaagaucgaccucugguccuacaacgccgagcuccucgucgcccucgagaaccagcacaccaucgaccucaccgacuccgagaugaacaagcucuucgagaagaccaagaagcagcuccgcgagaacgccgaggacaugggcaacggcugcuucaagaucuaccacaagugcgacaacgccugcaucggcuccauccgcaacggcaccuacgaccacgacgucuaccgcgacgaggcccucaacaaccgcuuccagaucaagggcgucgagcucaaguccgaguacaaggacuggauccucuggaucuccuucgccaucuccugcuuccuccucugcgucgcccuccucggcuucaucaugugggccugccagaagggcaacauccgcugcaacaucugcaucuga

SEQ ID NO: 104369 - RNA, 1701 nt, Artificial Sequence
  derived and/or modified CDS sequence (opt2) from hemagglutinin__InfluenzaA__AFD64804
augaagaccaucaucgcccucuccuacauccucugccucgucuucgcccagaagcuccccggcaacgacaacuccaccgccacccucugccucggccaccacgccguccccaacggcaccaucgucaagaccaucaccaacgaccagaucgaggucaccaacgccaccgagcucguccaguccuccuccaccggcgagaucugcaacuccccccaccagauccucgacggcgagaacugcacccucaucgacgcccuccucggcgacccccagugcgacggcuuccagaacaagaagugggaccucuucgucgagcgcuccaaggcccacuccaacugcuaccccuacgacguccccgacuacgccucccuccgcucccucgucgccuccuccggcacccucgaguucaacaacgaguccuucaacuggaccggcgucacccagaacggcaccuccuccgccugcauccgccgcuccaacaacuccuucuucucccgccucaacuggcucacccaccucaacuucaaguaccccgcccucaacgucaccaugcccaacaacgagcaguucgacaagcucuacaucuggggcguccaccaccccggcaccgacaaggaccagaucuuccucuacgcccaggccuccggccgcaucaccgucuccaccaagcgcucccagcaggccgucauccccaacaucggcucccgcccccgcguccgcaacauccccucccgcgucuccaucuacuggaccaucgucaagcccggcgacauccuccucaucaacuccaccggcaaccucaucgccccccgcggcuacuucaagauccgcuccggcaaguccuccaucaugcgcuccgacgcccccaucggcaagugcaacuccgccugcaucacccccaacggcuccauccccaacgacaagcccuuccagaacgucaaccgcaucaccuacggcgccugcccccgcuacgucaagcagaacacccucaagcucgccaccggcaugcgcaacguccccgagaagcagacccgcggcaucuucggcgccaucgccggcuucaucgagaacggcugggagggcaugauggacggcugguacggcuuccgccaccagaacuccgagggccgcggccaggccgccgaccucaaguccacccaggccgccaucgaccagaucaacggcaagcucaaccgccucaucggcaagaccaacgagaaguuccaccagaucgagaaggaguucuccgaggucgagggccgcauccaggaccucgagaaguacgucgaggacaccaagaucgaccucugguccuacaacgccgagcuccucgucgcccucgagaaccagcacaccaucgaccucaccgacuccgagaugaacaagcucuucgagaagaccaagaagcagcuccgcgagaacgccgaggacaugggcaacggcugcuucaagaucuaccacaagugcgacaacgccugcaucggcuccauccgcaacggcaccuacgaccacgacgucuaccgcgacgaggcccucaacaaccgcuuccagaucaagggcgucgagcucaaguccggcuacaaggacuggauccucuggaucuccuucgccaucuccugcuuccuccucugcgucgcccuccucggcuucaucaugugggccugccagaagggcaacauccgcugcaacaucugcaucuga

SEQ ID NO: 104370 - RNA, 1701 nt, Artificial Sequence
  derived and/or modified CDS sequence (opt2) from hemagglutinin__InfluenzaA__AFD64806
augaagaccaucaucgcccucuccuacauccucugccucgucuucgcccagaagcuccccggcaacgacaacuccaccgccacccucugccucggccaccacgccguccccaacggcaccaucgucaagaccaucaccaacgaccagaucgaggucaccaacgccaccgagcucguccaguccuccuccaccggcgagaucugcaacuccccccaccagauccucgacggcgagaacugcacccucaucgacgcccuccucggcgacccccagugcgacggcuuccagaacaagaagugggaccucuucgucgagcgcuccaaggcccacuccaacugcuaccccuacgacguccccgacuacgccucccuccgcucccucgucgccuccuccggcacccucgaguucaacaacgaguccuucaacuggaccggcgucacccagaacggcaccuccuccgccugcauccgccgcuccaacaacuccuucuucucccgccucaacuggcucacccaccucaacuucaaguaccccgcccucaacgucaccaugcccaacaacgagcaguucgacaagcucuacaucuggggcguccaccaccccggcaccgacaaggaccagaccuuccucuacgcccaggccuccggccgcaucaccgucuccaccaagcgcucccagcaggccgucauccccaacaucggcucccgcccccgcguccgcaacauccccucccgcgucuccaucuacuggaccaucgucaagcccggcgacauccuccucaucaacuccaccggcaaccucaucgccccccgcggcuacuucaagauccgcuccggcaaguccuccaucaugcgcuccgacgcccccaucggcaagugcaacuccgccugcaucacccccaacggcuccauccccaacgacaagcccuuccagaacgucaaccgcaucaccuacggcgccugcccccgcuacgucaagcagaacacccucaagcucgccaccggcaugcgcaacguccccgagaagcagacccgcggcaucuucggcgccaucgccggcuucaucgagaacggcugggagggcauggucgacggcugguacggcuuccgccaccagaacuccgagggccgcggccaggccgccgaccucaaguccacccaggccgccaucgaccagaucaacggcaagcucaaccgccucaucggcaagaccaacgagaaguuccaccagaucgagaaggaguucuccgaggucgagggccgcauccaggaccucgagaaguacgucgaggacaccaagaucgaccucugguccuacaacgccgagcuccucgucgcccucgagaaccagcacaccaucgaccucaccgacuccgagaugaacaagcucuucgagaagaccaagaagcagcuccgcgagaacgccgaggacaugggcaacggcugcuucaagaucuaccacaagugcgacaacgccugcaucggcuccauccgcaacggcaccuacgaccacgacgucuaccgcgacgaggcccucaacaaccgcuuccagaucaagggcgucgagcucaaguccggcuacaaggacuggauccucuggaucuccuucgccaucuccugcuuccuccucugcgucgcccuccucggcuucaucaugugggccugccagaagggcaacauccgcugcaacaucugcaucuga

SEQ ID NO: 104371 - RNA, 1701 nt, Artificial Sequence
  derived and/or modified CDS sequence (opt2) from hemagglutinin__InfluenzaA__AFD64807
augaagaccaucaucgcccucuccuacauccucugccucgucuucgcccagaagcuccccggcaacgacaacuccaccgccacccucugccucggccaccacgccguccccaacggcaccaucgucaagaccaucaccaacgaccagaucgaggucaccaacgccaccgagcucguccaguccuccuccaccggcgagaucugcaacuccccccaccagauccucgacggcgagaacugcacccucaucgacgcccuccucggcgacccccagugcgacggcuuccagaacaagaagugggaccucuucgucgagcgcuccaaggcccacuccaacugcuaccccuacgacguccccgacuacgccucccuccgcucccucgucgccuccuccggcacccucgaguucaacaacgaguccuucaacuggaccggcgucacccagaacggcaccuccuccgccugcauccgccgcuccaacaacuccuucuucucccgccucaacuggcucacccaccucaacuucaaguaccccgcccucaacgucaccaugcccaacaacgagcaguucgacaagcucuacaucuggggcguccaccaccccggcaccgacaaggaccagaccuuccucuacgcccaggccuccggccgcaucaccgucuccaccaagcgcucccagcaggccgucauccccaacaucggcucccgcccccgcguccgcgacauccccucccgcgucuccaucuacuggaccaucgucaagcccggcgacauccuccucaucaacuccaccggcaaccucaucgccccccgcggcuacuucaagauccgcuccggcaaguccuccaucaugcgcuccgacgccccccucggcaagugccacuccgccugcaucacccccaacggcuccauccccaacgacaagcccuuccagaacgucaaccgcaucaccuacggcgccugcccccgcuacgucaagcagaacacccucaagcucgccaccggcaugcgcaacguccccgagaagcagacccgcggcaucuucggcgccaucgccggcuucaucgagaacggcugggagggcauggucgacggcugguacggcuuccgccaccagaacuccgagggccgcggccaggccgccgaccucaaguccacccaggccgccaucgaccagaucaacggcaagcucaaccgccucaucggcaagaccaacgagaaguuccaccagaucgagaaggaguucuccgaggucgagggccgcauccaggaccucgagaaguacgucgaggacaccaagaucgaccucugguccuacaacgccgagcuccucgucgcccucgagaaccagcacaccaucgaccucaccgacuccgagaugaacaagcucuucgagaagaccaagaagcagcuccgcgagaacgccgaggacaugggcaacggcugcuucaagaucuaccacaagugcgacaacgccugcaucggcuccauccgcaacggcaccuacgaccacgacauguaccgcgacgaggcccucaacaaccgcuuccagaucaagggcgucgagcucaaguccggcuacaaggacuggauccucuggaucuccuucgccaucuccugcuuccuccucugcgucgcccuccucggcuucaucaugugggccugccagaagggcaacauccgcugcaacaucugcaucuga

SEQ ID NO: 104372 - RNA, 1701 nt, Artificial Sequence
  derived and/or modified CDS sequence (opt2) from hemagglutinin__InfluenzaA__AFD64810
augaagaccaucaucgcccucuccuacauccucugccucgucuucgcccagaagcuccccggcaacgacaacuccaccgccacccucugccucggccaccacgccguccccaacggcaccaucgucaagaccaucaccaacgaccagaucgaggucaccaacgccaccgagcucguccaguccuccuccaccggcgagaucugcaacuccccccaccagauccucgacggcgagaacugcacccucaucgacgcccuccucggcgacccccagugcgacggcuuccagaacaagaagugggaccucuucgucgagcgcuccaaggcccacuccaacugcuaccccuacgacguccccgacuacgccucccuccgcucccucgucgccuccuccggcacccucgaguucaacaacgaguccuucaacuggaccggcgucacccagaacggcaccuccuccgccugcauccgccgcuccaacaacuccuucuucucccgccucaacuggcucacccaccucaacuucaaguaccccgcccucaacgucaccaugcccaacaacgagcaguucgacaagcucuacaucuggggcguccaccaccccggcaccgacaaggaccagaucuuccucuacgcccaggccuccggccgcaucaccgucuccaccaagcgcucccagcaggccgucauccccaacaucggcucccgcccccgcguccgcaacauccccucccgcgucuccaucuacuggaccaucgucaagcccggcgacauccuccucaucaacuccaccggcaaccucaucgccccccgcggcuacuucaagauccgcuccggcaaguccuccaucaugcgcuccgacgcccccaucggcaagugcaacuccgccugcaucacccccaacggcuccauccccaacgacaagcccuuccagaacgucaaccgcaucaccuacggcgccugcccccgcuacgucaagcagaacacccucaagcucgccaccggcaugcgcaacguccccgagaagcagacccgcggcaucuucggcgccaucgccggcuucaucgagaacggcugggagggcauggucgacggcugguacggcuuccgccaccagaacuccgagggccgcggccaggccgccgaccucaaguccacccaggccgccaucgaccagaucaacggcaagcucaaccgccucaucggcaagaccaacgagaaguuccaccagaucgagaaggaguucuccgaggucgagggccgcauccaggaccucgagaaguacgucgaggacaccaagaucgaccucugguccuacaacgccgagcuccucgucgcccucgagaaccagcacaccaucgaccucaccgacuccgagaugaacaagcucuucgagaagaccaagaagcagcuccgcgagaacgccgaggacaugggcaacggcugcuucaagaucuaccacaagugcgacaacgccugcaucggcuccauccgcaacggcaccuacgaccccgacgucuaccgcgacgaggcccucaacaaccgcuuccagaucaagggcgucgagcucaaguccggcuacaaggacuggauccucuggaucuccuucgccaucuccugcuuccuccucugcgucgcccuccucggcuucaucaugugggccugccagaagggcaacauccgcugcaacaucugcaucuga

SEQ ID NO: 104373 - RNA, 1701 nt, Artificial Sequence
  derived and/or modified CDS sequence (opt2) from hemagglutinin__InfluenzaA__AFD64812
augaagaccaucaucgcccucuccuacauccucugccucgucuucgcccagaagcuccccggcaacgacaacuccaccgccacccucugccucggccaccacgccguccccaacggcaccaucgucaagaccaucaccaacgaccagaucgaggucaccaacgccaccgagcucguccaguccuccuccaccggcgagaucugcaacuccccccaccagauccucgacggcgagaacugcacccucaucgacgcccuccucggcgacccccagugcgacggcuuccagaacaagaagugggaccucuucgucgagcgcuccaaggcccacuccaacugcuaccccuacgacguccccgacuacgccucccuccgcucccucgucgccuccuccggcacccucgaguucaacaacgaguccuucaacuggaccggcgucacccagaacggcaccuccuccgccugcauccgccgcuccaacaacuccuucuucucccgccucaacuggcucacccaccucaacuucaaguaccccgcccucaacgucaccaugcccaacaacgagcaguucgacaagcucuacaucuggggcguccaccaccccggcaccgacaaggaccagaccuuccucuacgcccaggccuccggccgcaucaccgucuccaccaagcgcucccagcaggccgucauccccaacaucggcucccgcccccgcguccgcaacauccccucccgcgucuccaucuacuggaccaucgucaagcccggcgacauccuccucaucaacuccaccggcaaccucaucgccccccgcggcuacuucaagauccgcuccggcaaguccuccaucaugcgcuccgacgcccccaucggcaagugcaacuccgccugcaucacccccaacggcuccauccccaacgacaagcccuuccagaacgucaaccgcaucaccuacggcgccugcccccgcuacgucaagcagaacacccucaagcucgccaccggcaugcgcaacguccccgagaagcagacccgcggcaucuucggcgccaucgccggcuucaucgagaacggcugggagggcauggucgacggcugguacggcuuccgccaccagaacuccgagggccgcggccaggccgccgaccucaaguccacccaggccgccaccgaccagaucaacggcaagcucaaccgccucaucggcaagaccaacgagaaguuccaccagaucgagaaggaguucuccgaggucgagggccgcauccaggaccucgagaaguacgucgaggacaccaagaucgaccucugguccuacaacgccgagcuccucgucgcccucgagaaccagcacaccaucgaccucaccgacuccgagaugaacaagcucuucgagaagaccaagaagcagcuccgcgagaacgccgaggacaugggcaacggcugcuucaagaucuaccacaagugcgacaacgccugcaucggcuccauccgcaacggcaccuacgaccacgacgucuaccgcgacgaggcccucaacaaccgcuuccagaucaagggcgucgagcucaaguccggcuacaaggacuggauccucuggaucuccuucgccaucuccugcuuccuccucugcgucgcccuccucggcuucaucaugugggccugccagaagggcaacauccgcugcaacaucugcaucuga

SEQ ID NO: 104374 - RNA, 1701 nt, Artificial Sequence
  derived and/or modified CDS sequence (opt2) from hemagglutinin__InfluenzaA__AFD64814
augaagaccaucaucgcccucuccuacauccucugccucgucuucgcccagaagcuccccggcaacgacaacuccaccgccacccucugccucggccaccacgccguccccaacggcaccaucgucaagaccaucaccaacgaccagaucgaggucaccaacgccaccgagcucguccaguccuccuccaccggcgagaucugcaacuccccccaccagauccucgacggcgagaacugcacccucaucgacgcccuccucggcgacccccagugcgacggcuuccagaacaagaagugggaccucuucgucgagcgcuccaaggcccacuccaacugcuaccccuacgacguccccgacuacgccucccuccgcucccucgucgccuccuccggcacccucgaguucaacaacgaguccuucaacuggaccggcgucacccagaacggcaccuccuccgccugcauccgccgcuccaacaacuccuucuucucccgccucaacuggcucacccaccucaacuucaaguaccccgcccucaacgucaccaugcccaacaacgagcaguucgacaagcucuacaucuggggcguccaccaccccggcaccgacaaggaccagaccuuccucuacgcccaggccuccggccgcaucaccgucuccaccaagcgcucccagcaggccgucauccccaacaucggcucccgcccccgcguccgcaacauccccucccgcgucuccaucuacuggaccaucgucaagcccggcgacauccuccucaucaacuccaccggcaaccucaucgccccccgcggcuacuucaagauccgcuccggcaaguccuccaucaugcgcuccgacgcccccaucggcaagugcaacuccgccugcaucacccccaacggcuccauccccaacgacaagcccuuccagaacgucaaccgcaucaccuacggcgccugcccccgcuacgucaagcagaacacccucaagcucgccaccggcaugcgcaacguccccgagaagcagacccgcggcaucuucggcgccaucgccggcuucaucgagaacggcugggagggcauggucgacggcugguacggcuuccgccaccagaacuccgagggccgcggccaggccgccgaccucaaguccacccaggccgccaucgaccagaucaacggcaagcucaaccgccucaucggcaagaccaacgagaaguuccaccagaucgagaaggaguucuccgaggucgagggccgcauccaggaccucgagaaguacgucgaggacaccaagaucgaccucugguccuacaacgccgagcuccucgucgcccucgagaaccagcacaccaucgaccucaccgacuccgagaugaacaagcucuucgagaagaccaagaagcagcuccgcgagaacgccgaggacaugggcaacggcugcuucaagaucuaccacaagugcgacaacgccugcaucggcuccauccgcaacggcaccuacgaccccgacgucuaccgcgacgaggcccucaacaaccgcuuccagaucaagggcgucgagcucaaguccggcuacaaggacuggauccucuggaucuccuucgccaucuccugcuuccuccucugcgucgcccuccucggcuucaucaugugggccugccagaagggcaacauccgcugcaacaucugcaucuga

SEQ ID NO: 104375 - RNA, 1701 nt, Artificial Sequence
  derived and/or modified CDS sequence (opt2) from hemagglutinin__InfluenzaA__AFD64816
augaagaccaucaucgcccucuccuacauccucugccucgucuucgcccagaagcuccccgagaacgacaacuccaccgccacccucugccucggccaccacgccguccccaacggcaccaucgucaagaccaucaccaacgaccagaucgaggucaccaacgccaccgagcucguccaguccuccuccaccggcgagaucugcaacuccccccaccagauccucgacggcgagaacugcacccucaucgacgcccuccucggcgacccccagugcgacggcuuccagaacaagaagugggaccucuucgucgagcgcuccaaggcccacuccaacugcuaccccuacgacguccccgacuacgccucccuccgcucccucgucgccuccuccggcacccucgaguucaacaacgaguccuucaacuggaccggcgucacccagaacggcaccuccuccgccugcaugcgccgcuccaacaacuccuucuucucccgccucaacuggcucacccaccucaacuucaaguaccccgcccucaacgucaccaugcccaacaacgagcaguucgacaagcucuacaucuggggcguccaccaccccggcaccgacaaggaccagaucuuccucuacgcccaggccuccggccgcaucaccgucuccaccaagcgcucccagcaggccgucauccccaacaucggcucccgcccccgcguccgcaacauccccucccgcgucuccaucuacuggaccaucgucaagcccggcgacauccuccucaucaacuccaccggcaaccucaucgccccccgcggcuacuucaagauccgcuccggcaaguccuccaucaugcgcuccgacgcccccaucggcaagugcaacuccgccugcaucacccccaacggcuccauccccaacgacaagcccuuccagaacgucaaccgcaucaccuacggcgccugcccccgcuacgucaagcagaacacccucaagcucgccaccggcaugcgcaacguccccgagaagcagacccgcggcaucuucggcgccaucgccggcuucaucgagaacggcugggagggcauggucgacggcugguacggcuuccgccaccagaacuccgagggccgcggccaggccgccgaccucaaguccacccaggccgccaucgaccagaucaacggcaagcucaaccgccucaucggcaagaccaacgagaaguuccaccagaucgagaaggaguucuccgaggucgagggccgcauccaggaccucgagaaguacgucgaggacaccaagaucgaccucugguccuacaacgccgagcuccucgucgcccucgagaaccagcacaccaucgaccucaccgacuccgagaugaacaagcucuucgagaagaccaagaagcagcuccgcgagaacgccgaggacaugggcaacggcugcuucaagaucuaccacaagugcgacaacgccugcaucggcuccauccgcaacggcaccuacgaccacgacgucuaccgcgacgaggcccucaacaaccgcuuccagaucaagggcgucgagcucaaguccggcuacaaggacuggauccucuggaucuccuucgccaucuccugcuuccuccucugcgucgcccuccucggcuucaucaugugggccugccagaagggcaacauccgcugcaacaucugcaucuga

SEQ ID NO: 104376 - RNA, 1701 nt, Artificial Sequence
  derived and/or modified CDS sequence (opt2) from hemagglutinin__InfluenzaA__AFD64818
augaagaccaucaucgcccucuccuacauccucugccucgucuucgcccagaagcuccccggcaacgacaacuccaccgccacccucugccucggccaccacgccguccccaacggcaccaucgucaagaccaucaccaacgaccagaucgaggucaccaacgccaccgagcucguccaguccuccuccaccggcgagaucugcaacuccccccaccagauccucgacggcgagaacugcacccucaucgacgcccuccucggcgacccccagugcgacggcuuccagaacaagaagugggaccucuucgucgagcgcuccaaggcccacuccaacugcuaccccuacgacguccccgacuacgccucccuccgcucccucgucgccuccuccggcacccucgaguucaacaacgaguccuucaacuggaccggcgucacccagaacggcaccuccuccgccugcauccgccgcuccaacaacuccuucuucucccgccucaacuggcucacccaccucaacuucaaguaccccgcccucaacgucaccaugcccaacaacgagcaguucgacaagcucuacaucuggggcguccaccaccccggcaccgacaaggaccagaccuuccucuacgcccaggccuccggccgcaucaccgucuccaccaagcgcucccagcaggccgucauccccaacaucggcucccgcccccgcguccgcaacauccccucccgcgucuccaucuacuggaccaucgucaagcccggcgacauccuccucaucaacuccaccggcaaccucaucgccccccgcggcuacuucaagauccgcuccggcaaguccuccaucaugcgcuccgacgccccccucggcaagugcaucuccgccugcaucacccccaacggcuccauccccaacgacaagcccuuccagaacgucaaccgcaucaccuacggcgccugcccccgcuacgucaagcagaacacccucaagcucgccaccggcaugcgcaacguccccgagaagcagacccgcggcaucuucggcgccaucgccggcuucaucgagaacggcugggagggcauggucgacggcugguacggcuuccgccaccagaacuccgagggccgcggccaggccgccgaccucaaguccacccaggccgccaucgaccagaucaacggcaagcucaaccgccucaucggcaagaccaacgagaaguuccaccagaucgagaaggaguucuccgaggucgagggccgcauccaggaccucgagaaguacgucgaggacaccaagaucgaccucugguccuacaacgccgagcuccucgucgcccucgagaaccagcacaccaucgaccucaccgacuccgagaugaacaagcucuucgagaagaccaagaagcagcuccgcgagaacgccgaggacaugggcaacggcugcuucaagaucuaccacaagugcgacaacgccugcaucggcuccauccgcaacggcaccuacgaccacgacgucuaccgcgacgaggcccucaacaaccgcuuccagaucaagggcgucgagcucaaguccggcuacaaggacuggauccucuggaucuccuucgccaucuccugcuuccuccucugcgucgcccuccucggcuucaucaugugggccugccagaagggcaacauccgcugcaacaucugcaucuga

SEQ ID NO: 104377 - RNA, 1701 nt, Artificial Sequence
  derived and/or modified CDS sequence (opt2) from hemagglutinin__InfluenzaA__AFD64819
augaagaccaucaucgcccucuccuacauccucugccucgucuucgcccagaagcuccccggcaacgacaacuccaccgccacccucugccucggccaccacgccguccccaacggcaccaucgucaagaccaucaccaacgaccagaucgaggucaccaacgccaccgagcucguccaguccuccuccaccggcgagaucugcaacuccccccaccagauccucgacggcgagaacugcacccucaucgacgcccuccucggcgacccccagugcgacggcuuccagaacaagaagugggaccucuucgucgagcgcuccaaggcccacuccaacugcuaccccuacgacguccccgacuacgccucccuccgcucccucgucgccuccuccggcacccucgaguucaacaacgaguccuucaacuggaccggcgucacccagaacggcaccuccuccgccugcauccgccgcuccaacaacuccuucuucucccgccucaacuggcucacccaccucaacuucaaguaccccgcccucaacgucaccaugcccaacaacgagcaguucgacaagcucuacaucuggggcguccaccaccccggcaccgacaaggaccagaccuuccucuacgcccaggccuccggccgcaucaccgucuccaccaagcgcucccagcaggccgucauccccaacaucggcucccgcccccgcauccgcaacauccccucccgcgucuccaucuacuggaccaucgucaagcccggcgacauccuccucaucaacuccaccggcaaccucaucgccccccgcggcuacuucaagauccgcuccggcaaguccuccaucaugcgcuccgacgcccccaucggcaagugcaucuccgccugcaucacccccaacggcuccauccccaacgacaagcccuuccagaacgucaaccgcaucaccuacggcgccugcccccgcuacgucaagcagaacacccucaagcucgccaccggcaugcgcaacguccccgagaagcagacccgcggcaucuucggcgccaucgccggcuucaucgagaacggcugggagggcauggucgacggcugguacggcuuccgccaccagaacuccgagggccgcggccaggccgccgaccucaaguccacccaggccgccaucgaccagaucaacggcaagcucaaccgccucaucggcaagaccaacgagaaguuccaccagaucgagaaggaguucuccgaggucgagggccgcauccaggaccucgagaaguacgucgaggacaccaagaucgaccucugguccuacaacgccgagcuccucgucgcccucgagaaccagcacaccaucgaccucaccgacuccgagaugaacaagcucuucgagaagaccaagaagcagcuccgcgagaacgccgaggacaugggcaacggcugcuucaagaucuaccacaagugcgacaacgccugcaucggcuccauccgcaacggcaccuacgaccccgacgucuaccgcgacgaggcccucaacaaccgcuuccagaucaagggcgucgagcucaaguccggcuacaaggacuggauccucuggaucuccuucgccaucuccugcuuccuccucugcgucgcccuccucggcuucaucaugugggccugccagaagggcaacauccgcugcaacaucugcaucuga

SEQ ID NO: 104378 - RNA, 1701 nt, Artificial Sequence; identical to SEQ ID NO: 103018
  derived and/or modified CDS sequence (opt2) from hemagglutinin__InfluenzaA__AFD64820

SEQ ID NO: 104379 - RNA, 1701 nt, Artificial Sequence
  derived and/or modified CDS sequence (opt2) from hemagglutinin__InfluenzaA__AFD64822
augaagaccaucaucgcccucuccuacauccucugccucgucuucgcccagaagcuccccggcaacgacaacuccaccgccacccucugccucggccaccacgccguccccaacggcaccaucgucaagaccaucaccaacgaccagaucgaggucaccaacgccaccgagcucguccaguccuccuccaccggcgagaucugcaacuccccccaccagauccucgacggcgagaacugcacccucaucgacgcccuccucggcgacccccagugcgacggcuuccagaacaagaagugggaccucuucgucgagcgcuccaaggcccacuccaacugcuaccccuacgacguccccgacuacgccucccuccgcucccucgucgccuccuccggcacccucgaguucaacaacgaguccuucaacuggaccggcgucacccagaacggcaccuccuccgccugcaugcgccgcuccaacaacuccuucuucucccgccucaacuggcucacccaccucaacuucaaguaccccgcccucaacgucaccaugcccaacaacgagcaguucgacaagcucuacaucuggggcguccaccaccccggcaccgacaaggaccagaucuuccucuacgcccaggccuccggccgcaucaccgucuccaccaagcgcucccagcaggccgucauccccaacaucggcucccgcccccgcguccgcaacauccccucccgcgucuccaucuacuggaccaucgucaagcccggcgacauccuccucaucaacuccaccggcaaccucaucgccccccgcggcuacuucaagauccgcuccggcaaguccuccaucaugcgcuccgacgcccccaucggcaagugcaacuccgccugcaucacccccaacggcuccauccccaacgacaagcccuuccagaacgucaaccgcaucaccuacggcgccugcccccgcuacgucaagcagaacacccucaagcucgccaccggcaugcgcaacguccccgagaagcagacccgcggcaucuucggcgccaucgccggcuucaucgagaacggcugggagggcauggucgacggcugguacggcuuccgccaccagaacuccgagggccgcggccaggccgccgaccucaaguccacccaggccgccaucgaccagaucaacggcaagcucaaccgccucaucggcaagaccaacgagaaguuccaccagaucgagaaggaguucuccgaggucgagggccgcauccaggaccucgagaaguacgucgaggacaccaagaucgaccucugguccuacaacgccgagcuccucgucgcccucgagaaccagcacaccaucgaccucaccgacuccgagaugaacaagcucuucgagaagaccaagaagcagcuccgcgagaacgccgaggacaugggcaacggcugcuucaagaucuaccacaagugcgacaacgccugcaucggcuccauccgcaacggcaccuacgaccacgacgucuaccgcgacgaggcccucaacaaccgcuuccagaucaagggcgucgagcucaaguccggcuacaaggacuggauccucuggaucuccuucgccaucuccugcuuccuccucugcgucgcccuccucggcuucaucaugugggccugccagaagggcaacauccgcugcaacaucugcaucuga

SEQ ID NO: 104380 - RNA, 1701 nt, Artificial Sequence
  derived and/or modified CDS sequence (opt2) from hemagglutinin__InfluenzaA__AFD64823
augaagaccaucaucgcccucuccuacauccucugccucgucuucgcccagaagcuccccggcaacgacaacuccaccgccacccucugccucggccaccacgccguccccaacggcaccaucgucaagaccaucaccaacgaccagaucgaggucaccaacgccaccgagcucguccaguccuccuccaccggcgagaucugcaacuccccccaccagauccucgacggcgagaacugcacccucaucgacgcccuccucggcgacccccagugcgacggcuuccagaacaagaagugggaccucuucgucgagcgcuccaaggcccacuccaacugcuaccccuacgacguccccgacuacgccucccuccgcucccucgucgccuccuccggcacccucgaguucaacaacgaguccuucaacuggaccggcgucacccagaacggcaccuccuccgccugcauccgccgcuccaacaacuccuucuucucccgccucaacuggcucacccaccucaacuucaaguaccccgcccucaacgucaccaugcccaacaacgagcaguucgacaagcucuacaucuggggcguccaccaccccggcaccgacaaggaccagaucuuccucuacgcccaggccgccggccgcaucaccgucuccaccaagcgcucccagcaggccgucauccccaacaucggcucccgcccccgcguccgcaacauccccucccgcgucuccaucuacuggaccaucgucaagcccggcgacauccuccucaucaacuccaccggcaaccucaucgccccccgcggcuacuucaagauccgcuccggcaaguccuccaucaugcgcuccgacgcccccaucggccgcugcaacuccgccugcaucacccccaacggcuccauccccaacgacaagcccuuccagaacgucaaccgcaucaccuacggcgccugcccccgcuacgucaagcagaacacccucaagcucgccaccggcaugcgcaacguccccgagaagcagacccgcggcaucuucggcgccaucgccggcuucaucgagaacggcugggagggcauggucgacggcugguacggcuuccgccaccagaacuccgagggccgcggccaggccgccgaccucaaguccacccaggccgccaucgaccagaucaacggcaagcucaaccgccucaucggcaagaccaacgagaaguuccaccagaucgagaaggaguucuccgaggucgagggccgcauccaggaccucgagaaguacgucgaggacaccaagaucgaccucugguccuacaacgccgagcuccucgucgcccucgagaaccagcacaccaucgaccucaccgacuccgagaugaacaagcucuucgagaagaccaagaagcagcuccgcgagaacgccgaggacaugggcaacggcugcuucaagaucuaccacaagugcgacaacgccugcaucggcuccauccgcaacggcaccuacgaccacgacgucuaccgcgacgaggcccucaacaaccgcuuccagaucaagggcgucgagcucaaguccggcuacaaggacuggauccucuggaucuccuucgccaucuccugcuuccuccucugcgucgcccuccucggcuucaucaugugggccugccagaagggcaacauccgcugcaacaucugcaucuga

SEQ ID NO: 104381 - RNA, 1701 nt, Artificial Sequence
  derived and/or modified CDS sequence (opt2) from hemagglutinin__InfluenzaA__AFD64824
augaagaccaucaucgcccucuccuacauccucugccucgucuucgcccagaagcuccccggcaacgacaacuccaccgccacccucugccucggccaccacgccguccccaacggcaccaucgucaagaccaucaccaacgaccagaucgaggucaccaacgccaccgagcucguccaguccuccuccaccggcgagaucugcaacuccccccaccagauccucgacggcgagaacugcacccucaucgacgcccuccucggcgacccccagugcgacggcuuccagaacaagaagugggaccucuucgucgagcgcuccaaggcccacuccaacugcuaccccuacgacguccccgacuacgccucccuccgcucccucgucgccuccuccggcacccucgaguucaacaacgaguccuucaacuggaccggcgucacccagaacggcaccuccuccgccugcauccgccgcuccaacaacuccuucuucucccgccucaacuggcucacccaccucaacuucaaguaccccgcccucaacgucaccaugcccaacaacgagcaguucgacaagcucuacaucuggggcguccaccaccccggcaccgacaaggaccagaccuuccucuacgcccaggccuccggccgcaucaccgucuccaccaagcgcucccagcaggccgucauccccaacaucggcucccgcccccgcguccgcaacauccccucccgcgucuccaucuacuggaccaucgucaagcccggcgacauccuccucaucaacuccaccggcaaccucaucgccccccgcggcuacuucaagauccgcuccggcaaguccuccaucaugcgcuccgacgcccccaucggcaagugcaacuccgccugcaucacccccaacggcuccauccccaacgacaagcccuuccagaacgucaaccgcaucaccuacggcgccugcccccgcuacgucaagcagaacacccucaagcucgccaccggcaugcgcaacguccccgagaagcagacccgcggcaucuucggcgccaucgccggcuucaucgagaacggcugggagggcauggucgacggcugguacggcuuccgccaccagaacuccgagggccgcggccaggccgccgaccucaaguccacccaggccgccaucgaccagaucaacggcaagcucaaccgccucaucggcaagaccaacgagaaguuccaccagaucgagaaggaguucuccgaggucgagggccgcauccaggaccucgagaaguacgucgaggacaccaagaucgaccucugguccuacaacgccgagcuccucgucgcccucgagaaccagcacaccaucgaccucaccgacuccgagaugaacaagcucuucgagaagaccaagaagcagcuccgcgagaacgccgaggacaugggcaacggcugcuucaagaucuaccacaagugcgacaacgccugcaucggcuccauccgcaacggcaccuacgaccacgacgucuaccgcgacgaggcccucaacaaccgcuuccagaucaagggcgucgagcucaaguccggcuacaaggacuggauccucuggaucuccuucgccaccuccugcuuccuccucugcgucgcccuccucggcuucaucaugugggccugccagaagggcaacauccgcugcaacaucugcaucuga

SEQ ID NO: 104382 - RNA, 1701 nt, Artificial Sequence; identical to SEQ ID NO: 104370
  derived and/or modified CDS sequence (opt2) from hemagglutinin__InfluenzaA__AFD64825

SEQ ID NO: 104383 - RNA, 1701 nt, Artificial Sequence; identical to SEQ ID NO: 104370
  derived and/or modified CDS sequence (opt2) from hemagglutinin__InfluenzaA__AFD64827

SEQ ID NO: 104384 - RNA, 1701 nt, Artificial Sequence
  derived and/or modified CDS sequence (opt2) from hemagglutinin__InfluenzaA__AFD64828
augaagaccaucaucgcccucuccuacauccucugccucgucuucgcccagaagcuccccggcaacgacaacuccaccgccacccucugccucggccaccacgccguccccaacggcaccaucgucaagaccaucaccaacgaccagaucgaggucaccaacgccaccgagcucguccaguccuccuccaccggcgagaucugcaacuccccccaccagauccucgacggcgagaacugcacccucaucgacgcccuccucggcgacccccagugcgacggcuuccagaacaagaagugggaccucuucgucgagcgcuccaaggcccacuccaacugcuaccccuacgacguccccgacuacgccucccuccgcucccucgucgccuccuccggcacccucgaguucaacaacgaguccuucaacuggaccggcgucacccagaacggcaccuccuccgccugcauccgccgcuccaacaacuccuucuucucccgccucaacuggcucacccaccucaacuucaaguaccccgcccucaacgucaccaugcccaacaacgagcaguucgacaagcucuacaucuggggcguccaccaccccggcaccgacaaggaccagaucuuccucuacgcccaggccuccggccgcaucaccgucuccaccaagcgcucccagcaggccgucauccccaacaucggcucccgcccccgcguccgcaacauccccucccgcgucuccaucuacuggaccaucgucaagcccggcgacauccuccucaucaacuccaccggcaaccucaucgccccccgcggcuacuucaagauccgcuccggcaaguccuccaucaugcgcuccgacgcccccaucggcaagugcaacuccgccugcaucacccccaacggcuccauccccaacgacaagcccuuccagaacgucaaccgcaucaccuacggcgccugcccccgcuacgucaagcagaacacccucaagcucgccaccggcaugcgcaacguccccgagaagcagacccgcggcaucuucggcgccaucgccggcuucaucgagaacggcugggagggcaugauggacggcugguacggcuuccgccaccagaacuccgagggccgcggccaggccgccgaccucaaguccacccaggccgccaucgaccagaucaacggcaagcucaaccgccucaucggcaagaccaacgagaaguuccaccagaucgagaaggaguucuccgaggucgagggccgcauccaggaccucgagaaguacgucgaggacaccaagaucgaccucugguccuacaacgccgagcuccucgucgcccucgagaaccagcacaccaucgaccucaccgacuccgagaugaacaagcucuucgagaagaccaagaagcagcuccgcgagaacgccgaggacaugggcaacggcugcuucaagaucuaccacaagugcgacaacgccugcaucggcuccauccgcaacggcaccuacgaccccgacgucuaccgcgacgaggcccucaacaaccgcuuccagaucaagggcgucgagcucaaguccggcuacaaggacuggauccucuggaucuccuucgccaucuccugcuuccuccucugcgucgcccuccucggcuucaucaugugggccugccagaagggcaacauccgcugcaacaucugcaucuga

SEQ ID NO: 104385 - RNA, 1701 nt, Artificial Sequence; identical to SEQ ID NO: 104379
  derived and/or modified CDS sequence (opt2) from hemagglutinin__InfluenzaA__AFD64830

SEQ ID NO: 104386 - RNA, 1701 nt, Artificial Sequence; identical to SEQ ID NO: 103018
  derived and/or modified CDS sequence (opt2) from hemagglutinin__InfluenzaA__AFD98095

SEQ ID NO: 104387 - RNA, 1701 nt, Artificial Sequence
  derived and/or modified CDS sequence (opt2) from hemagglutinin__InfluenzaA__AFD98106
augaagaccaucaucgcccucuccuacauccucugccucgucuucgcccagaagcuccccggcaacgacaacuccaccgccacccucugccucggccaccacgccguccccaacggcaccaucgucaagaccaucaccaacgaccagaucgaggucaccaacgccaccgagcucguccaguccuccuccgccggcgagaucugcgacuccccccaccacauccucgacggcgagaacugcacccucaucgacgcccuccucggcgacccccagugcgacggcuuccagaacaagaagugggaccucuucgucgagcgcucccgcgccuacuccaacugcuaccccuacgacguccccgacuacgccucccuccgcucccucgucgccuccuccggcacccucgaguucaacaacgaguccuucaacuggaccggcgucacccagaacggcaccuccuccgccugcauccgccgcuccaacaacuccuucuucucccgccucaacuggcucacccaccucaacuucaaguaccccgcccucaacgucaccaugcccaacaacgagcaguucgacaagcucuacaucuggggcguccaccaccccggcaccgacaaggaccagaucuuccucuacgcccaggccuccggccgcaucaccgucuccaccaagcgcucccagcaggccgucauccccaacaucggcucccgcccccgcguccgcaacauccccucccgcaucuccaucuacuggaccaucgucaagcccggcgacauccuccucaucaacuccaccggcaaccucaucgccccccgcggcuacuucaagauccgcuccggcaaguccuccaucaugcgcuccgacgcccccaucggcaagugcaacuccgagugcaucacccccaacggcuccauccccaacgacaagcccuuccagaacgucaaccgcaucaccuacggcgccugcccccgcuacgucaagcaguccacccucaagcucgccaccggcaugcgcaacguccccgagaagcagacccgcggcaucuucggcgccaucgccggcuucaucgagaacggcugggagggcaugauggacggcugguacggcuuccgccaccagaacuccgagggccgcggccaggccgccgaccucaaguccacccaggccgccaucgaccagaucaacggcaagcucaaccgccucaucggcaagaccaacgagaaguuccaccagaucgagaaggaguucuccgaggucgagggccgcauccaggaccucgagaaguacgucgaggacaccaagaucgaccucugguccuacaacgccgagcuccucgucgcccucgagaaccagcacaccaucgaccucaccgacuccgagaugaacaagcucuucgagaagaccaagaagcagcuccgcgagaacgccgaggacaugggcaacggcugcuucaagaucuaccacaagugcgacaacgccugcaucggcuccauccgcaacggcaccuacgaccacgacgucuaccgcgacgaggcccucaacaaccgcuuccagaucaagggcgucgagcucaaguccggcuacaaggacuggauccucuggaucuccuucgccaucuccugcuuccuccucugcgucgcccuccucggcuucaucaugugggccugccagaagggcaacauccgcugcaacaucugcaucuga

SEQ ID NO: 104388 - RNA, 1701 nt, Artificial Sequence
  derived and/or modified CDS sequence (opt2) from hemagglutinin__InfluenzaA__AFD98128
augaagaccaucaucgcccucuccuacauccucugccucgucuucgcccagaagcuccccggcaacgacaacuccaccgccacccucugccucggccaccacgccguccccaacggcaccaucgucaagaccaucaccaacgaccagaucgaggucaccaacgccaccgagcucguccagaacuccuccaccggcgagaucugcaacuccccccaccagauccucgacggcgagaacugcacccucaucgacgcccuccucggcgacccccagugcgacggcuuccagaacaagaagugggaccucuucgucgagcgcuccaaggcccacuccaacugcuaccccuacgacguccccgacuacgccucccuccgcucccucgucgccuccuccggcacccucgaguucaacaacgaguccuucaacuggaccggcgucacccagaacggcaccuccuccgccugcauccgcaaguccaacaacuccuucuucucccgccucaacuggcucacccaccucaacuucaaguaccccgcccucaacgucaccaugcccaacaacgagcaguucgacaagcucuacaucuggggcguccaccaccccggcaccgacaaggaccagaucuuccucuacgcccaggccgccggccgcaucaccgucuccaccaagcgcucccagcaggccgucauccccaacaucggcucccgcccccgcguccgcaacauccccucccgcgucuccaucuacuggaccaucgucaagcccggcgacauccuccucaucaacuccaccggcaaccucaucgccccccgcggcuacuucaagauccgcuccggcaaguccuccaucaugcgcuccgacgcccccaucggcaagugcaacuccgccugcaucacccccaacggcuccauccccaacgacaagcccuuccagaacgucaaccgcaucaccuacggcgccugcccccgcuacgucaagcagaacacccucaagcucgccaccggcaugcgcaacguccccgagaagcagacccgcggcaucuucggcgccaucgccggcuucaucgagaacggcugggagggcauggucgacggcugguacggcuuccgccaccagaacuccgagggccgcggccaggccgccgaccucaaguccacccaggccgccaucgaccagaucaacggcaagcucaaccgccucaucggcaagaccaacgagaaguuccaccagaucgagaaggaguucuccgaggucgagggccgcauccaggaccucgagaaguacgucgaggacaccaagaucgaccucugguccuacaacgccgagcuccucgucgcccucgagaaccagcacaccaucgaccucaccgacuccgagaugaacaagcucuucgagaagaccaagaagcagcuccgcgagaacgccgaggacaugggcaacggcugcuucaagaucuaccacaagugcgacaacgccugcaucggcuccauccgcaacggcaccuacgaccacgacgucuaccgcgacgaggcccucaacaaccgcuuccagaucaagggcgucgagcucaaguccggcuacaaggacuggauccucuggaucuccuucgccaucuccugcuuccuccucugcgucgcccuccucggcuucaucaugugggccugccagaagggcaacauccgcugcaacaucugcaucuga

SEQ ID NO: 104389 - RNA, 1701 nt, Artificial Sequence; identical to SEQ ID NO: 103018
  derived and/or modified CDS sequence (opt2) from hemagglutinin__InfluenzaA__AFD98139

SEQ ID NO: 104390 - RNA, 1701 nt, Artificial Sequence
  derived and/or modified CDS sequence (opt2) from hemagglutinin__InfluenzaA__AFD98161
augaagaccaucaucgcccucuccuacauccucugccucgucuucgcccagaagcuccccggcaacgacaacuccaccgccacccucugccucggccaccacgccguccccaacggcaccaucgucaagaccaucaccaacgaccagaucgaggucaccaacgccaccgagcucguccagaacuccuccgccggcgagaucugcgacuccccccaccacauccucgacggcgagaacugcacccucaucgacgcccuccucggcgacccccagugcgacggcuuccagaacaagaagugggaccucuucgucgagcgcucccgcgccuacuccaacugcuaccccuacgacguccccgacuacgccucccuccgcucccucgucgccuccuccggcacccucgaguucaacaacgaguccuucaacuggaccggcgucacccagaacggcaccuccuccgccugcauccgccgcuccaacaacuccuucuucucccgccucaacuggcucacccaccucaacuucaaguaccccgcccucaacgucaccaugcccaacaacgagcaguucgacaagcucuacaucuggggcguccaccaccccggcaccgacaaggaccagaucuuccucuacgcccaggccuccggccgcaucaccgucuccaccaagcgcucccagcaggccgucauccccaacaucggcucccgcccccgcguccgcaacauccccucccgcaucuccaucuacuggaccaucgucaagcccggcgacauccuccucaucaacuccaccggcaaccucaucgccccccgcggcuacuucaagauccgcuccggcaaguccuccaucaugcgcuccgacgcccccaucggcaagugcaacuccgagugcaucacccccaacggcuccauccccaacgacaagcccuuccagaacgucaaccgcaucaccuacggcgccugcccccgcuacgucaagcaguccacccucaagcucgccaccggcaugcgcaacguccccgagaagcagacccgcggcaucuucggcgccaucgccggcuucaucgagaacggcugggagggcaugauggacggcugguacggcuuccgccaccagaacuccgagggccgcggccaggccgccgaccucaaguccacccaggccgccaucgaccagaucaacggcaagcucaaccgccucaucggcaagaccaacgagaaguuccaccagaucgagaaggaguucuccgaggucgagggccgcauccaggaccucgagaaguacgucgaggacaccaagaucgaccucugguccuacaacgccgagcuccucgucgcccucgagaaccagcacaccaucgaccucaccgacuccgagaugaacaagcucuucgagaagaccaagaagcagcuccgcgagaacgccgaggacaugggcaacggcugcuucaagaucuaccacaagugcgacaacgccugcaucggcuccauccgcaacggcaccuacgaccacgacgucuaccgcgacgaggcccucaacaaccgcuuccagaucaagggcgucgagcucaaguccggcuacaaggacuggauccucuggaucuccuucgccaucuccugcuuccuccucugcgucgcccuccucggcuucaucaugugggccugccagaagggcaacauccgcugcaacaucugcaucuga

SEQ ID NO: 104391 - RNA, 1701 nt, Artificial Sequence
  derived and/or modified CDS sequence (opt2) from hemagglutinin__InfluenzaA__AFD98172
augaagaccaucaucgcccucuccuacauccucugccucgucuucgcccagaagcuccccggcaacgacaacuccaccgccacccucugccucggccaccacgccguccccaacggcaccaucgucaagaccaucaccaacgaccagaucgaggucaccaacgccaccgagcucguccaguccuccuccgccggcgagaucugcgacuccccccaccacauccucgacggcgagaacugcacccucaucgacgcccuccucggcgacccccagugcgacggcuuccagaacaagaagugggaccucuucgucgagcgcucccgcgccuacuccaacugcuaccccuacgacguccccgacuacgccucccuccgcucccucgucgccuccuccggcacccucgaguucaacaacgaguccuucaacuggaccggcgucacccagaacggcaccuccuccgccugcauccgccgcuccaacaacuccuucuucucccgccucaacuggcucacccaccucaacuucaaguaccccgcccucaacgucaccaugcccaacaacgagcaguucgacaagcucuacaucuggggcguccaccaccccggcaccgacaaggaccagaucuuccucuacgcccaggccuccggccgcaucaccgucuccaccaagcgcucccagcaggccgucauccccaacaucggcucccgcccccgcguccgcaacauccccucccgcaucuccaucuacuggaccaucgucaagcccggcgacauccuccucaucaacuccaccggcaaccucaucgccccccgcggcuacuucaagauccgcuccggcaaguccuccaucaugcgcuccgacgcccccaucggcaagugcaacuccgagugcaucacccccaacggcuccauccccaacgacaagcccuuccagaacgucaaccgcaucaccuacggcgccugcccccgcuacgucaagcaguccacccucaagcucgccaccggcaugcgcaacguccccgagaagcagacccgcggcaucuucggcgccaucgccggcuucaucgagaacggcugggagggcaugauggacggcugguacggcuuccgccaccagaacuccgagggccgcggccaggccgccgaccucaaguccacccaggccgccaucgaccagaucaacggcaagcucaaccgccucaucggcaagaccaacgagaaguuccaccagaucgagaaggaguucuccgaggucgagggccgcauccaggaccucgagaaguacgucgaggacaccaagaucgaccucugguccuacaacgccgagcuccucgucgcccucgagaaccagcacaccaucgaccucaccgacuccgagaugaacaagcucuucgagaagaccaagaagcagcuccgcgagaacgccgaggacaugggcaacggcugcuucaagaucuaccacaagugcgacaacgccugcaucggcuccauccgcaacggcaccuacgaccacgacgucuaccgcgacgaggcccucaacaaccgcuuccagaucaagggcgucgagcucaaguccggcuacaaggacuggguccucuggaucuccuucgccaucuccugcuuccuccucugcgucgcccuccucggcuucaucaugugggccugccagaagggcaacauccgcugcaacaucugcaucuga

SEQ ID NO: 104392 - RNA, 1701 nt, Artificial Sequence
  derived and/or modified CDS sequence (opt2) from hemagglutinin__InfluenzaA__AFD98183
augaagaccaucaucgcccucuccuacauccucugccucgucuucgcccagaagcuccccggcaacgacaacuccaccgccacccucugccucggccaccacgccguccccaacggcaccaucgucaagaccaucaccaacgaccagaucgaggucaccaacgccaccgagcucguccaguccuccuccaccggcgagaucugcaacuccccccaccagauccucgacggcgagaacugcacccucaucgacgcccuccucggcgacccccagugcgacggcuuccagaacaagaagugggaccucuucgucgagcgcuccaaggcccacuccaacugcuaccccuacgacguccccgacuacgccucccuccgcucccucgucgccuccuccggcacccucgaguucaacaacgaguccuucaacuggaccggcgucacccagaacggcaccuccuccgccugcauccgccgcuccaacaacuccuucuucucccgccucaacuggcucacccaccucaacuucaaguaccccgcccucaacgucaccaugcccaacaacgagcaguucgacaagcucuacaucuggggcguccaccaccccggcaccgacaaggaccagaucuuccucuacgcccaggccuccggccgcaucaccgucuccaccaagcgcucccagcaggccguccuccccaacaucggcucccgcccccgcguccgcaacauccccucccgcgucuccaucuacuggaccaucgucaagcccggcgacauccuccucaucaacuccaccggcaaccucaucgccccccgcggcuacuucaagauccgcuccggcaaguccuccaucaugcgcuccgacgcccccaucggcaagugcaacuccaccugcaucacccccaacggcuccauccccaacgacaagcccuuccagaacgucaaccgcaucaccuacggcgccugcccccgcuacgucaagcagaacacccucaagcucgccaccggcaugcgcaacguccccgagaagcagacccgcggcaucuucggcgccaucgccggcuucaucgagaacggcugggagggcauggucgacggcugguacggcuuccgccaccagaacuccgagggccgcggccaggccgccgaccucaaguccacccaggccgccaucgaccagaucaacggcaagcucaaccgccucaucggcaagaccaacgagaaguuccaccagaucgagaaggaguucuccgaggucgagggccgcauccaggaccucgagaaguacgucgaggacaccaagaucgaccucugguccuacaacgccgagcuccucgucgcccucgagaaccagcacaccaucgaccucaccgacuccgagaugaacaagcucuucgagaagaccaagaagcagcuccgcgagaacgccgaggacaugggcaacggcugcuucaagaucuaccacaagugcgacaacgccugcaucggcuccauccgcaacggcaccuacgaccacgacgucuaccgcgacgaggcccucaacaaccgcuuccagaucaagggcgucgagcucaaguccggcuacaaggacuggauccucuggaucuccuucgccaucuccugcuuccuccucugcgucgcccuccucggcuucaucaugugggccugccagaagggcaacauccgcugcaacaucugcaucuga

SEQ ID NO: 104393 - RNA, 1701 nt, Artificial Sequence; identical to SEQ ID NO: 102891
  derived and/or modified CDS sequence (opt2) from hemagglutinin__InfluenzaA__AFD98194

SEQ ID NO: 104394 - RNA, 1701 nt, Artificial Sequence; identical to SEQ ID NO: 102945
  derived and/or modified CDS sequence (opt2) from hemagglutinin__InfluenzaA__AFD98205

SEQ ID NO: 104395 - RNA, 1701 nt, Artificial Sequence; identical to SEQ ID NO: 104387
  derived and/or modified CDS sequence (opt2) from hemagglutinin__InfluenzaA__AFD98215

SEQ ID NO: 104396 - RNA, 1701 nt, Artificial Sequence; identical to SEQ ID NO: 103018
  derived and/or modified CDS sequence (opt2) from hemagglutinin__InfluenzaA__AFD98226

SEQ ID NO: 104397 - RNA, 1701 nt, Artificial Sequence
  derived and/or modified CDS sequence (opt2) from hemagglutinin__InfluenzaA__AFD98237
augaagaccaucaucgcccucuccuacauccucugccucgucuccgcccagaagcuccccggcaacgacaacuccaccgccacccucugccucggccaccacgccguccccaacggcaccaucgucaagaccaucaccaacgaccagaucgaggucaccaacgccaccgagcucguccaguccuccuccaccggcgagaucugcaacuccccccaccagauccucgacggcgagaacugcacccucaucgacgcccuccucggcgacccccagugcgacggcuuccagaacaagaagugggaccucuucgucgagcgcuccaaggcccacuccaacugcuaccccuacgacguccccgacuacgccucccuccgcucccucgucgccuccuccggcacccucgaguucaacaacgaguccuucaacuggaccggcgucacccagaacggcaccuccuccgccugcauccgccgcuccaacaacuccuucuucucccgccucaacuggcucacccaccucaacuucaaguaccccgcccucaacgucaccaugcccaacaacgagcaguucgacaagcucuacaucuggggcguccaccaccccggcaccgacaaggaccagaucuuccucuacgcccaggccuccggccgcaucaccgucuccaccaagcgcucccagcaggccgucauccccaacaucggcucccgcccccgcguccgcaacauccccucccgcgucuccaucuacuggaccaucgucaagcccggcgacauccuccucaucaacuccaccggcaaccucaucgccccccgcggcuacuucaagauccgcuccggcaaguccuccaucaugcgcuccgacgcccccaucggcaagugcaacuccgccugcaucacccccaacggcuccauccccaacgacaagcccuuccagaacgucaaccgcaucaccuacggcgccugcccccgcuacgucaagcagaacacccucaagcucgccaccggcaugcgcaacguccccgagaagcagacccgcggcaucuucggcgccaucgccggcuucaucgagaacggcugggagggcauggucgacggcugguacggcuuccgccaccagaacuccgagggccgcggccaggccgccgaccucaaguccacccaggccgccaucgaccagaucaacggcaagcucaaccgccucaucggcaagaccaacgagaaguuccaccagaucgagaaggaguucuccgaggucgagggccgcauccaggaccucgagaaguacgucgaggacaccaagaucgaccucugguccuacaacgccgagcuccucgucgcccucgagaaccagcacaccaucgaccucaccgacuccgagaugaacaagcucuucgagaagaccaagaagcagcuccgcgagaacgccgaggacaugggcaacggcugcuucaagaucuaccacaagugcgacaacgccugcaucggcuccauccgcaacggcaccuacgaccacgacgucuaccgcgacgaggcccucaacaaccgcuuccagaucaagggcgucgagcucaaguccggcuacaaggacuggauccucuggaucuccuucgccaucuccugcuuccuccucugcgucgcccuccucggcuucaucaugugggccugccagaagggcaacauccgcugcaacaucugcaucuga

SEQ ID NO: 104398 - RNA, 1701 nt, Artificial Sequence; identical to SEQ ID NO: 104390
  derived and/or modified CDS sequence (opt2) from hemagglutinin__InfluenzaA__AFD98248

SEQ ID NO: 104399 - RNA, 1701 nt, Artificial Sequence
  derived and/or modified CDS sequence (opt2) from hemagglutinin__InfluenzaA__AFD98259
augaagaccaucaucgcccucuccuacauccucugccucgucuucgcccagaagcuccccggcaacgacaacuccaccgccacccucugccucggccaccacgccguccccaacggcaccaucgucaagaccaucaccaacgaccagaucgaggucaccaacgccaccgagcucguccaguccuccuccgccggcgagaucugcgacuccccccaccacauccucgacggcgagaacugcacccucaucgacgcccuccucggcgacccccagugcgacggcuuccagaacaagaagugggaccucuucgucgagcgcuccaaggccuacuccaacugcuaccccuacgacguccaggacuacgccucccuccgcucccucgucgccuccuccggcacccucgaguucaacaacgaguccuucaacuggaccggcgucacccagaacggcaccuccuccgccugcauccgccgcuccaacaacuccuucuucucccgccucaacuggcucacccaccucaacuucaaguaccccgcccucaacgucaccaugcccaacaacgagcaguucgacaagcucuacaucuggggcguccaccaccccggcaccgacaaggaccagaucuuccucuacgcccaggccuccggccgcaucaccgucuccaccaagcgcucccagcaggccgucauccccaacaucggcucccgcccccgcguccgcaacauccccucccgcaucuccaucuacuggaccaucgucaagcccggcgacauccuccucaucaacuccaccggcaaccucaucgccccccgcggcuacuucaagauccgcuccggcaaguccuccaucaugcgcuccgacgcccccaucggcaagugcaacuccgagugcaucacccccaacggcuccauccccaacgacaagcccuuccagaacgucaaccgcaucaccuacggcgccugcccccgcuacgucaagcaguccacccucaagcucgccaccggcaugcgcaacguccccgagaagcagacccgcggcaucuucggcgccaucgccggcuucaucgagaacggcugggagggcaugauggacggcugguacggcuuccgccaccagaacuccgagggccgcggccaggccgccgaccucaaguccacccaggccgccaucgaccagaucaacggcaagcucaaccgccucaucggcaagaccaacgagaaguuccaccagaucgagaaggaguucuccgaggucgagggccgcauccaggaccucgagaaguacgucgaggacaccaagaucgaccucugguccuacaacgccgagcuccucgucgcccucgagaaccagcacaccaucgaccucaccgacuccgagaugaacaagcucuucgagaagaccaagaagcagcuccgcgagaacgccgaggacaugggcaacggcugcuucaagaucuaccacaagugcgacaacgccugcaucggcuccauccgcaacggcaccuacgaccacgacgucuaccgcgacgaggcccucaacaaccgcuuccagaucaagggcgucgagcucaaguccggcuacaaggacuggauccucuggaucuccuucgccaucuccugcuuccuccucugcgucgcccuccucggcuucaucaugugggccugccagaagggcaacauccgcugcaacaucugcaucuga

SEQ ID NO: 104400 - RNA, 1701 nt, Artificial Sequence
  derived and/or modified CDS sequence (opt2) from hemagglutinin__InfluenzaA__AFD98270
augaaggccauccucgucguccuccucuacaccuucgucaccgccaacgccgacacccucugcaucggcuaccacgccaacaacuccaccgacaccgucgacaccguccucgagaagaacgucaccgucacccacuccgucaaccuccucgaggacaagcacaacggcaagcucugcaagcuccgcggcgucaccccccuccaccucggcaagugcaacaucgccggcuggauccucggcaaccccgagugcgagucccucuccaccgccuccuccugguccuacaucgucgagaccuccuccuccgacaacggcaccugcuaccccggcgacuucaucaacuacgaggagcuccgcgagcagcucuccuccgucuccuccuucgagcgcuucgagaucuuccccaacaccuccuccuggcccaaccacgacuccaacaagggcgucaccgccgccugcccccacgccggcgccaaguccuucuacaagaaccucaucuggcucgucaagaagggcaacuccuaccccaagcucuccaaguccuacaucaacgacaagggcaaggagguccucguccucuggggcauccaccaccccuccaccaccgccgaccagcagucccucuaccagaacgccgacgccuacgucuucgucggcaccucccgcuacuccaagaaguucaagcccgagaucgccauccgccccaagguccgcgaccaggagggccgcaugaacuacuacuggacccucgucgagcccggcgacaagaucaccuucgaggccaccggcaaccucgucgucccccgcuacgccuucgccauggagcgcaacgccggcuccggcaucaucaucuccgacacccccguccacgacugcaacaccaccugccagacccccaagggcgccaucaacaccucccuccccuuccagaacauccaccccaucaccaucggcaagugccccaaguacgucaaguccaccaagcuccgccucgccaccggccuccgcaacguccccuccauccagucccgcggccucuucggcgccaucgccggcuucaucgagggcggcuggaccggcauggucgacggcugguacggcuaccaccaccagaacgagcagggcuccggcuacgccgccgaccucaaguccacccagaacgccaucgacaagaucaccaacaaggucaacuccgucaucgagaagaugaacacccaguucaccgccgucggcaaggaguucaaccaccucgagaagcgcaucgagaaccucaacaagaaggucgacgacggcuuccucgacaucuggaccuacaacgccgagcuccucguccuccucgagaacgagcgcacccucgacuaccacgacuccaacgucaagaaccucuacgagaagguccgcaaccagcucaagaacaacgccaaggagaucggcaacggcugcuucgaguucuaccacaagugcgacaacaccugcauggaguccgucaagaacggcaccuacgacuaccccaaguacuccgaggaggccaagcucaaccgcgaggagaucgacggcgucaagcucgaguccacccgcaucuaccagauccucgccaucuacuccaccgucgccuccucccucguccucgucgucucccucggcgccaucuccuucuggaugugcuccaacggcucccuccagugccgcaucugcaucuga

SEQ ID NO: 104401 - RNA, 1701 nt, Artificial Sequence
  derived and/or modified CDS sequence (opt2) from hemagglutinin__InfluenzaA__AFD98280
augaaggccauccucgucguccuccucuacaccuucgccaccgccaacgccgacacccucugcaucggcuaccacgccaacaacuccaccgacaccgucgacaccguccucgagaagaacgucaccgucacccacuccgucaaccuccucgaggacaagcacaacggcaagcucugcaagcuccgcggcgucgccccccuccaccucggcaagugcaacaucgccggcuggauccucggcaaccccgagugcgacucccucuccaccgcccgcuccugguccuacaucgucgagaccuccuccuccgacaacggcaccugcuaccccggcgacuucaucgacuacgaggagcuccgcgagcagcucuccuccgucuccuccuucgagcgcuucgagaucuuccccaagaccuccuccuggcccaaccacgacuccaacaagggcgucaccgccgccugcccccacgccggcgccaagggcuucuacaagaaccucaucuggcucgucaagaagggcaacuccuaccccaagcucuccaaguccuacaucaacgacaagggcaaggagguccucguccucuggggcauccaccaccccuccaccaccgccgaccagcagucccucuaccagaacgccgacaccuacgucuucgucggcaccucccgcuacuccaagaaguucaagcccgagaucgccauccgccccaagguccgcgaccaggagggccgcaugaacuacuacuggacccucgucgagcccggcgacaagaucaccuucgaggccaccggcaaccucgucgucccccgcuacgccuucgccauggagcgcaacgccggcuccggcaucaucaucuccgacacccccguccacgacugcaacaccaccugccagacccccaagggcgccaucaacaccucccuccccuuccagaacauccaccccaucaccaucggcaagugccccaaguacgucaaguccaccaagcuccgccucgccaccggccuccgcaacguccccuccauccagucccgcggccucuucggcgccaucgccggcuucaucgagggcggcuggaccggcauggucgacggcugguacggcuaccaccaccagaacgagcagggcuccggcuacgccgccgaccucaaguccacccagaacgccaucgacaagaucaccaacaaggucaacuccgucaucgagaagaugaacacccaguucaccgccgucggcaaggaguucaaccaccucgagaagcgcaucgagaaccucaacaagaaggucgacgacggcuuccucgacaucuggaccuacaacgccgagcuccucguccuccucgagaacgagcgcacccucgacuaccacgacuccaacgucaagaaccucuacgagaagguccgcaaccagcucaagaacaacgccaaggagaucggcaacggcugcuucgaguucuaccacaagugcgacaacaccugcauggaguccgucaagaacggcaccuacgacuaccccaaguacuccgaggaggccaagcucaaccgcgaggagaucgacggcgucaagcucgaguccacccgcaucuaccagauccucgccaucuacuccaccgucgccuccucccucguccucgucgucucccucggcgccaucuccuucuggaugugcuccaacggcucccuccagugccgcaucugcaucuga

SEQ ID NO: 104402 - RNA, 1701 nt, Artificial Sequence; identical to SEQ ID NO: 104379
  derived and/or modified CDS sequence (opt2) from hemagglutinin__InfluenzaA__AFD98290

SEQ ID NO: 104403 - RNA, 1701 nt, Artificial Sequence; identical to SEQ ID NO: 103122
  derived and/or modified CDS sequence (opt2) from hemagglutinin__InfluenzaA__AFD98310

SEQ ID NO: 104404 - RNA, 1701 nt, Artificial Sequence; identical to SEQ ID NO: 102490
  derived and/or modified CDS sequence (opt2) from hemagglutinin__InfluenzaA__AFD98320

SEQ ID NO: 104405 - RNA, 1701 nt, Artificial Sequence; identical to SEQ ID NO: 104390
  derived and/or modified CDS sequence (opt2) from hemagglutinin__InfluenzaA__AFD98340

SEQ ID NO: 104406 - RNA, 1701 nt, Artificial Sequence
  derived and/or modified CDS sequence (opt2) from hemagglutinin__InfluenzaA__AFD98351
augaagaccaucaucgcccucuccuacauccucugccucgucuucgcccagaagcuccccggcaacgacaacuccaccgccacccucugccucggccaccacgccguccccaacggcaccaucgucaagaccaucaccaacgaccagaucgaggucaccaacgccaccgagcucguccaguccuccuccgccggcgagaucugcgacuccccccaccacauccucgacggcgagaacugcacccucaucgacgcccuccucggcgacccccagugcgacggcuuccagaacaagaagugggaccucuucgucgagcgcucccgcgccuacuccaacugcuaccccuacgacguccccgacuacgccucccuccgcucccucgucgccuccuccggcacccucgaguucaacaacgaguccuucaacuggaccggcgucacccagaacggcaccuccuccgccugcauccgccgcuccaacaacuccuucuucucccgccucaacuggcucacccaccucaacuucaaguaccccgcccucaacgucaccaugcccaacaacgagcaguucgacaagcucuacaucuggggcguccaccaccccggcaccgacaaggaccagaucuuccucuacgcccaggccuccggccgcaucaccgucuccaccaagcgcucccagcaggccgucauccccaacaucggcucccgcccccgcguccgcaacauccccucccgcaucuccaucuacuggaccaucgucaagcccggcgacauccuccucaucaacuccaccggcaaccucaucgccccccgcggcuacuucaagauccgcuccggcaaguccuccaucaugcgcuccgacgcccccaucggcaagugcaacuccgagugcaucacccccaacggcuccauccccaacgacaagcccuuccagaacgucaaccgcaucaccuacggcgccugcccccgcuacgucaagcaguccacccucaagcucgccaccggcaugcgcaacguccccgagaagcagacccgcggcaucuucggcgccaucgccggcuucaucgagaacggcugggagggcaugauggacggcugguacggcuuccgccaccagaacuccgagggccgcggccaggccgccgaccucaaguccacccaggccgccaucgaccagaucaacggcaagcucaaccgccucaucggcaagaccaacgagaaguuccaccagaucgagaaggaguucuccgaggucgagggccgcauccaggaccucgagaaguacgucgaggacaccaagaucgaccucugguccuacaacgccgagcuccucgucgcccucgagaaccagcacaccaucgaccucaccgacuccgagaugaacaagcucuucgagaagaccaagaagcagcuccgcgagaacgccgaggacaugggcaacggcugcuucaagaucuaccacaagugcgacaacgccugcaucggcaccauccgcaacggcaccuacgaccacgacgucuaccgcgacgaggcccucaacaaccgcuuccagaucaagggcgucgagcucaaguccggcuacaaggacuggauccucuggaucuccuucgccaucuccugcuuccuccucugcgucgcccuccucggcuucaucaugugggccugccagaagggcaacauccgcugcaacaucugcaucuga

SEQ ID NO: 104407 - RNA, 1701 nt, Artificial Sequence
  derived and/or modified CDS sequence (opt2) from hemagglutinin__InfluenzaA__AFD98362
augaagaccaucaucgcccucuccuacauccucugccucgucuucgcccagaagcuccccggcaacgacaacuccauggccacccucugccucggccaccacgccguccccaacggcaccaucgucaagaccaucaccaacgaccagaucgaggucaccaacgccaccgagcucguccagaacuccuccaccggcgagaucugcgacuccccccaccagauccucgacggcgagaacugcacccucaucgacgcccuccucggcgacccccagugcgacggcuuccagaacaagaagugggaccucuucgucgagcgcuccaaggccuacuccaacugcuaccccuacgacguccccgacuacgccucccuccgcucccucgucgccuccuccggcacccucgaguucaacaacgaguccuucaacuggaccggcgucacccagaacggcaccuccuccgccugcauccgccgcuccaacaacuccuucuucucccgccucaacuggcucacccaccucaacuucaaguaccccgcccucaacgucaccaugcccaacaacgagcaguucgacaagcucuacaucuggggcguccaccaccccggcaccgacaaggaccagaucuuccucuacgcccaggccuccggccgcaucaccgucuccaccaagcgcggccagcaggccgucauccccaacaucggcucccgcccccgcguccgcaacauccccucccgcaucuccaucuacuggaccaucgucaagcccggcgacauccuccucaucaacuccaccggcaaccucaucgccccccgcggcuacuucaagauccgcuccggcaaguccuccaucaugcgcuccgacgcccccaucggcaagugcaacuccgagugcaucacccccaacggcuccauccccaacgacaagcccuuccagaacgucaaccgcaucaccuacggcgccugcccccgcuacgucaagcagaacacccucaagcucgccaccggcaugcgcaacguccccgagaagcagacccgcggcaucuucggcgccaucgccggcuucaucgagaacggcugggagggcauggucgacggcugguacggcuuccgccaccagaacuccgagggccgcggccaggccgccgaccucaaguccacccaggccgccaucgaccagaucaacggcaagcucaaccgccucgucggcaagaccaacgagaaguuccaccagaucgagaaggaguucuccgaggucgagggccgcauccaggaccucgagaaguacgucgaggacaccaagaucgaccucugguccuacaacgccgagcuccucgucgcccucgagaaccagcacaccaucgaccucaccgacuccgagaugaacaagcucuucgagaagaccaagaagcagcuccgcgagaacgccgaggacaugggcaacggcugcuucaagaucuaccacaagugcgacaacgccugcaucggcuccauccgcaacggcaccuacgaccacgacgucuaccgcgacgaggcccucaacaaccgcuuccagaucaagggcgucgagcucaaguccggcuacaaggacuggauccucuggaucuccuucgccaucuccugcuuccuccucugcgucgcccuccucggcuucaucaugugggccugccagaagggcaacauccgcugcaacaucugcaucuga

SEQ ID NO: 104408 - RNA, 1701 nt, Artificial Sequence; identical to SEQ ID NO: 104387
  derived and/or modified CDS sequence (opt2) from hemagglutinin__InfluenzaA__AFD98373

SEQ ID NO: 104409 - RNA, 1701 nt, Artificial Sequence; identical to SEQ ID NO: 103018
  derived and/or modified CDS sequence (opt2) from hemagglutinin__InfluenzaA__AFD98384

SEQ ID NO: 104410 - RNA, 1701 nt, Artificial Sequence
  derived and/or modified CDS sequence (opt2) from hemagglutinin__InfluenzaA__AFD98395
augaagaccaucaucgcccucuccuacauccucugccucgucuucgcccagaagcuccccggcgacgacaacuccaccgccacccucugccucggccaccacgccguccccaacggcaccaucgucaagaccaucaccaacgaccagaucgaggucaccaacgccaccgagcucguccagaacuccuccgccggcgagaucugcgacuccccccaccacauccucgacggcgagaacugcacccucaucgacgcccuccucggcgacccccagugcgacggcuuccagaacaagaagugggaccucuucgucgagcgcucccgcgccuacuccaacugcuaccccuacgacguccccgacuacgccucccuccgcucccucgucgccuccuccggcacccucgaguucaacaacgaguccuucaacuggaccggcgucacccagaacggcaccuccuccgccugcauccgccgcuccaacaacuccuucuucucccgccucaacuggcucacccaccucaacuucaaguaccccgcccucaacgucaccaugcccaacaacgagcaguucgacaagcucuacaucuggggcguccaccaccccggcaccgacaaggaccagaucuuccucuacgcccaggccuccggccgcaucaccgucuccaccaagcgcucccagcaggccgucauccccaacaucggcucccgcccccgcguccgcaacauccccucccgcaucuccaucuacuggaccaucgucaagcccggcgacauccuccucaucaacuccaccggcaaccucaucgccccccgcggcuacuucaagauccgcuccggcaaguccuccaucaugcgcuccgacgcccccaucggcaagugcaacuccgagugcaucacccccaacggcuccauccccaacgacaagcccuuccagaacgucaaccgcaucaccuacggcgccugcccccgcuacgucaagcaguccacccucaagcucgccaccggcaugcgcaacguccccgagaagcagacccgcggcaucuucggcgccaucgccggcuucaucgagaacggcugggagggcaugauggacggcugguacggcuuccgccaccagaacuccgagggccgcggccaggccgccgaccucaaguccacccaggccgccaucgaccagaucaacggcaagcucaaccgccucaucggcaagaccaacgagaaguuccaccagaucgagaaggaguucuccgaggucgagggccgcauccaggaccucgagaaguacgucgaggacaccaagaucgaccucugguccuacaacgccgagcuccucgucgcccucgagaaccagcacaccaucgaccucaccgacuccgagaugaacaagcucuucgagaagaccaagaagcagcuccgcgagaacgccgaggacaugggcaacggcugcuucaagaucuaccacaagugcgacaacgccugcaucggcuccauccgcaacggcaccuacgaccacgacgucuaccgcgacgaggcccucaacaaccgcuuccagaucaagggcgucgagcucaaguccggcuacaaggacuggauccucuggaucuccuucgccaucuccugcuuccuccucugcgucgcccuccucggcuucaucaugugggccugccagaagggcaacauccgcugcaacaucugcaucuga

SEQ ID NO: 104411 - RNA, 1701 nt, Artificial Sequence; identical to SEQ ID NO: 104387
  derived and/or modified CDS sequence (opt2) from hemagglutinin__InfluenzaA__AFD98406

SEQ ID NO: 104412 - RNA, 1701 nt, Artificial Sequence; identical to SEQ ID NO: 104390
  derived and/or modified CDS sequence (opt2) from hemagglutinin__InfluenzaA__AFD98417

SEQ ID NO: 104413 - RNA, 1701 nt, Artificial Sequence
  derived and/or modified CDS sequence (opt2) from hemagglutinin__InfluenzaA__AFD98428
augaagaccaucaucgcccucuccuacauccucugccucgucuucgcccagaagcuccccggcaacgacaacuccaccgccacccucugccucggccaccacgccguccccaacggcaccaucgucaagaccaucaccaacgaccagaucgaggucaccaacgccaccgagcucguccaguccuccuccaccggcgagaucugcaacuccccccaccagauccucgacggcgagaacugcacccucaucgacgcccuccucggcgacccccagugcgacggcuuccagaacaagaagugggaccucuucgucgagcgcuccaaggcccacuccaacugcuaccccuacgacguccccgacuacgccucccuccgcucccucgucgccuccuccggcacccucgaguucaacaacgaguccuucaacuggaccggcgucacccagaacggcaccuccuccgccugcauccgccgcuccaacaacuccuucuucucccgccucaacuggcucacccaccucaacuucaaguaccccgcccucaacgucaccaugcccaacaacgagcaguucgacaagcucuacaucuggggcguccaccaccccggcaccgacaaggaccagaccuuccucuacgcccaggccuccggccgcaucaccgucuccaccaagcgcucccagcaggccgucauccccaacaucggcucccgcccccgcguccgcaacauccccucccgcgucuccaucuacuggaccaucgucaagcccggcgacauccuccucaucaacuccaccggcaaccucaucgccccccgcggcuacuucaagauccgcuccggcaaguccuccaucaugcgcuccgacgcccccaucggcaagugcaacuccgccugcaucacccccaacggcuccauccccaacgacaagcccuuccagaacgucaaccgcaucaccuacggcgccugcccccgcuacgucaagcagaacacccucaagcucgccaccggcaugcgcaacguccccgagaagcagacccgcggcaucuucggcgccaucgccggcuucaucgagaacggcugggagggcauggucgacggcugguacggcuuccgccaccagaacuccgagggccgcggccaggccgccgaccucaaguccacccaggccgccaucgaccagaucaacggcaagcucaaccgccucaucggcaagaccaacgagaaguuccaccagaucgagaaggaguucuccgaggucgagggccgcauccaggaccucgagaaguacgucgaggacaccaagaucgaccucugguccuacaacgccgagcuccucgucgcccucgagaaccagcacaccaucgaccucaccgacuccgagaugaacaagcucuucgagaagaccaagaagcagcuccgcgagaacgccgaggacaugggcaacggcugcuucaagaucuaccacaagugcgacaacgccugcaucggcuccauccgcaacggcaccuacgaccacgacgucuaccgcgacgaggcccucaacaaccgcuuccagaucaagggcgucgagcucaaguccggcuacaaggacuggauccucuggaucuccuucaccaucuccugcuuccuccucugcgucgcccuccucggcuucaucaugugggccugccagaagggcaacauccgcugcaacaucugcaucuga

SEQ ID NO: 104414 - RNA, 1701 nt, Artificial Sequence; identical to SEQ ID NO: 102903
  derived and/or modified CDS sequence (opt2) from hemagglutinin__InfluenzaA__AFD98439

SEQ ID NO: 104415 - RNA, 1701 nt, Artificial Sequence
  derived and/or modified CDS sequence (opt2) from hemagglutinin__InfluenzaA__AFD98449
augaagaccaucaucgcccucuccuacauccucugccucgucuucgcccagaagcuccccggcaacgacaacuccaccgccacccucugccucggccaccacgccguccccaacggcaccaucgucaagaccaucaccaacgaccagaucgaggucaccaacgccaccgagcucguccaguccuccuccaccggcgagaucugcgacuccccccaccagauccucgacggcaagaacugcacccucaucgacgcccuccucggcgacccccagugcgacggcuuccagaacaagaagugggaccucuucgucgagcgcuccaaggccuacuccaacugcuaccccuacgacguccccgacuacgccucccuccgcucccucgucgccuccuccggcacccucgaguucaacaacgagaacuucaacuggaccggcgucacccagaacggcaccuccuccgccugcauccgccgcuccaagaacuccuucuucucccgccucaacuggcucacccaccucaacuucaaguuccccgcccucaacgucaccaugcccaacaacgagcaguucgacaagcucuacaucuggggcguccaccaccccggcaccgacaaggaccagaucuuccucuacgcccaggccuccggccgcaucaccgucuccaccaagcgcucccagcagaccgccauccccaacaucggcucccgcccccgcguccgcaacauccccucccgcaucuccaucuacuggaccaucgucaagcccggcgacauccuccucaucaacuccaccggcaaccucaucgccccccgcggcuacuucaagauccgcuccggcaaguccuccaucaugcgcuccgacgcccccaucggcaagugcaacuccgagugcaucacccccaacggcuccauccccaacgacaagcccuuccagaacgucaaccgcaucaccuacggcgccugcccccgcuacgucaagcagaacacccucaagcucgccaccggcaugcgcaacguccccgagaagcagacccgcggcaucuucggcgccaucgccggcuucaucgagaacggcugggagggcauggucgacggcugguacggcuuccgccaccagaacuccgagggccgcggccaggccgccgaccucaaguccacccaggccgccaucgaccagaucaacggcaagcucaaccgccucaucggcaagaccaacgagaaguuccaccagaucgagaaggaguucuccgaggucgagggccgcauccaggaccucgagaaguacgucgaggacaccaagaucgaccucugguccuacaacgccgagcuccucgucgcccucgagaaccagcacaccaucgaccucaccgacuccgagaugaacaagcucuucgagaagaccaagaagcagcuccgcgagaacgccgaggacaugggcaacggcugcuucaagaucuaccacaagugcgacaacgccugcaucggcuccauccgcaacggcaccuacaaccacgacgucuaccgcgacgaggcccucaacaaccgcuuccagaucaagggcgucgagcucaaguccggcuacaaggacuggauccucuggaucuccuucgccaucuccugcuuccuccucugcgucgcccuccucggcuucaucaugugggccugccagaagggcaacauccgcugcaacaucugcaucuga

SEQ ID NO: 104416 - RNA, 1701 nt, Artificial Sequence
  derived and/or modified CDS sequence (opt2) from hemagglutinin__InfluenzaA__AFD98460
augaagaccaucaucgcccucuccuacauccucugccucgucuucgcccagaagcuccccggcaacgacaacuccaccgccacccucugccucggccaccacgccguccccaacggcaccaucgucaagaccaucaccaacgaccagaucgaggucaccaacgccaccgagcucguccaguccuccuccgccggcgagaucugcgacuccccccaccacauccucgacggcgagaacugcacccucaucgacgcccuccucggcgacccccagugcgacggcuuccagaacaagaagugggaccucuucgucgagcgcucccgcgccuacuccaacugcuaccccuacgacguccccgacuacgccucccuccgcucccucgucgccuccuccggcacccucgaguucaacaacgaguccuucaacuggaccggcgucacccagaacggcaccuccuccgccugcauccgccgcuccaacaacuccuucuucuccaagcucaacuggcucacccaccucaacuucaaguaccccgcccucaacgucaccaugcccaacaacgagcaguucgacaagcucuacaucuggggcguccaccaccccggcaccgacaaggaccagaucuuccucuacgcccaggccuccggccgcaucaccgucuccaccaagcgcucccagcaggccgucauccccaacaucggcucccgcccccgcguccgcaacauccccucccgcaucuccaucuacuggaccaucgucaagcccggcgacauccuccucaucaacuccaccggcaaccucaucgccccccgcggcuacuucaagauccgcuccggcaaguccuccaucaugcgcuccgacgcccccaucggcaagugcaacuccgagugcaucacccccaacggcuccauccccaacgacaagcccuuccagaacgucaaccgcaucaccuacggcgccugcccccgcuacgucaagcaguccacccucaagcucgccaccggcaugcgcaacguccccgagaagcagacccgcggcaucuucggcgccaucgccggcuucaucgagaacggcugggagggcaugauggacggcugguacggcuuccgccaccagaacuccgagggccgcggccaggccgccgaccucaaguccacccaggccgccaucgaccagaucaacggcaagcucaaccgccucaucggcaagaccaacgagaaguuccaccagaucgagaaggaguucuccgaggucgagggccgcauccaggaccucgagaaguacgucgaggacaccaagaucgaccucugguccuacaacgccgagcuccucgucgcccucgagaaccagcacaccaucgaccucaccgacuccgagaugaacaagcucuucgagaagaccaagaagcagcuccgcgagaacgccgaggacaugggcaacggcugcuucaagaucuaccacaagugcgacaacgccugcaucggcuccauccgcaacggcaccuacgaccacgacgucuaccgcgacgaggcccucuccaaccgcuuccagaucaagggcgucgagcucaaguccggcuacaaggacuggauccucuggaucuccuucgccaucuccugcuuccuccucugcgucgcccuccucggcuucaucaugugggccugccagaagggcaacauccgcugcaacaucugcaucuga

SEQ ID NO: 104417 - RNA, 1701 nt, Artificial Sequence; identical to SEQ ID NO: 102903
  derived and/or modified CDS sequence (opt2) from hemagglutinin__InfluenzaA__AFD98471

SEQ ID NO: 104418 - RNA, 1701 nt, Artificial Sequence
  derived and/or modified CDS sequence (opt2) from hemagglutinin__InfluenzaA__AFD98481
augaagaccaucaucgcccucuccuacauccucugccucgucuucgcccagaagcuccccggcaacgacaacuccaccgccacccucugccucggccaccacgccguccccaacggcaccaucgucaagaccaucaccaacgaccagaucgaggucaccaacgccaccgagcucguccagaacuccuccaccggcgagaucugcaacuccccccaccagauccucgacggcgagaacugcacccucaucgacgcccuccucggcgacccccagugcgacggcuuccagaacaagaagugggaccucuucgucgagcgcuccaaggcccacuccaacugcuaccccuacgacguccccgacuacgccucccuccgcucccucgucgccuccuccggcacccucgaguucaacaacgaguccuucaacuggaccggcgucacccagaacggcaccuccuccgccugcauccgccgcuccaacaacuccuucuucucccgccucaacuggcucacccaccucaacuucaaguaccccgcccucaacgucaccaugcccaacaacgagcaguucgacaagcucuacaucuggggcguccaccaccccggcaccgacaaggaccagaucuuccucuacgcccaggccgccggccgcaucaccgucuccaccaagcgcucccagcaggccgucauccccaacaucggcucccgcccccgcguccgcaacauccccucccgcgucuccaucuacuggaccaucgucaagcccggcgacauccuccucaucaacuccaccggcaaccucaucgccccccgcggcuacuucaagauccgcuccggcaaguccuccgucaugcgcuccgacgcccccaucggcaagugcaacuccgccugcaucacccccaacggcuccauccccaacgacaagcccuuccagaacgucaaccgcaucaccuacggcgccugcccccgcuacgucaagcagaacacccucaagcucgccaccggcaugcgcaacguccccgagaagcagacccgcggcaucuucggcgccaucgccggcuucaucgagaacggcugggagggcauggucgacggcugguacggcuuccgccaccagaacuccgagggccgcggccaggccgccgaccucaaguccacccaggccgccaucgaccagaucaacggcaagcucaaccgccucaucggcaagaccaacgagaaguuccaccagaucgagaaggaguucuccgaggucgagggccgcauccaggaccucgagaaguacgucgaggacaccaagaucgaccucugguccuacaacgccgagcuccucgucgcccucgagaaccagcacaccaucgaccucaccgacuccgagaugaacaagcucuucgagaagaccaagaagcagcuccgcgagaacgccgaggacaugggcaacggcugcuucaagaucuaccacaagugcgacaacgccugcaucggcuccauccgcaacggcaccuacgaccacgacgucuaccgcgacgaggcccucaacaaccgcuuccagaucaagggcgucgagcucaaguccggcuacaaggacuggauccucuggaucuccuucgccaucuccugcuuccuccucugcgucgcccuccucggcuucaucaugugggccugccagaagggcaacauccgcugcaacaucugcaucuga

SEQ ID NO: 104419 - RNA, 1701 nt, Artificial Sequence; identical to SEQ ID NO: 103018
  derived and/or modified CDS sequence (opt2) from hemagglutinin__InfluenzaA__AFD98492

SEQ ID NO: 104420 - RNA, 1701 nt, Artificial Sequence
  derived and/or modified CDS sequence (opt2) from hemagglutinin__InfluenzaA__AFD98503
augaagaccaucaucgcccucuccuacauccucugccucgucuucgcccagaagcuccccggcaacgacaacuccaccgccacccucugccucggccaccacgccguccccaacggcaccaucgucaagaccaucaccaacgaccagaucgaggucaccaacgccaccgagcucguccaguccuccuccgccggcgagaucugcgacuccccccaccacauccucgacggcgagaacugcacccucaucgacgcccuccucggcgacccccagugcgacggcuuccagaacaagaagugggaccucuucgucgagcgcucccgcgccuacuccaacugcuaccccuacgacguccccgacuacgccucccuccgcucccucgucgccuccuccggcacccucgaguucaacaacgaguccuucaacuggaccggcgucacccagaacggcaccuccuccgccugcauccgccgcuccaacaacuccuucuucucccgccucaacuggcucacccaccucaacuucaaguaccccgcccucaacgucaccaugcccaacaacgagcaguucgacaagcucuacaucuggggcguccaccaccccggcaccgacaaggaccagaucuuccucuacgcccaggccuccggccgcaucaccgucuccaccaagcgcucccagcaggccgucauccccaacaucggcucccgcccccgcguccgcaacauccccucccgcaucuccaucuacuggaccaucgucaagcccggcgacauccuccucaucaacuccaccggcaaccucaucgccccccgcggcuacuucaagauccgcuccggcaaguccuccaucaugcgcuccgacgcccccaucggcaagugcaacuccgagugcaucacccccaacggcuccauccccaacgacaagcccuuccagaacgucaaccgcaucaccuacggcgccugcccccgcuacgucaagcaguccacccucaagcucgccaccggcaugcgcaacguccccgagaagcagaccaagggcaucuucggcgccaucgccggcuucaucgagaacggcugggagggcaugauggacggcugguacggcuuccgccaccagaacuccgagggccgcggccaggccgccgaccucaaguccacccaggccgccaucgaccagaucaacggcaagcucaaccgccucaucggcaagaccaacgagaaguuccaccagaucgagaaggaguucuccgaggucgagggccgcauccaggaccucgagaaguacgucgaggacaccaagaucgaccucugguccuacaacgccgagcuccucgucgcccucgagaaccagcacaccaucgaccucaccgacuccgagaugaacaagcucuucgagaagaccaagaagcagcuccgcgagaacgccgaggacaugggcaacggcugcuucaagaucuaccacaagugcgacaacgccugcaucggcuccauccgcaacggcaccuacgaccacgacgucuaccgcgacgaggcccucaacaaccgcuuccagaucaagggcgucgagcucaaguccggcuacaaggacuggauccucuggaucuccuucgccaucuccugcuuccuccucugcgucgcccuccucggcuucaucaugugggccugccagaagggcaacauccgcugcaacaucugcaucuga

SEQ ID NO: 104421 - RNA, 1701 nt, Artificial Sequence; identical to SEQ ID NO: 103018
  derived and/or modified CDS sequence (opt2) from hemagglutinin__InfluenzaA__AFD98514

SEQ ID NO: 104422 - RNA, 1701 nt, Artificial Sequence; identical to SEQ ID NO: 104370
  derived and/or modified CDS sequence (opt2) from hemagglutinin__InfluenzaA__AFD98525

SEQ ID NO: 104423 - RNA, 1701 nt, Artificial Sequence; identical to SEQ ID NO: 102891
  derived and/or modified CDS sequence (opt2) from hemagglutinin__InfluenzaA__AFD98558

SEQ ID NO: 104424 - RNA, 1701 nt, Artificial Sequence
  derived and/or modified CDS sequence (opt2) from hemagglutinin__InfluenzaA__AFD98569
augaagaccaucaucgcccucuccuacauccucugccucgucuucgcccagaagcuccccggcaacgacaacuccaccgccacccucugccucggccaccacgccguccccaacggcaccaucgucaagaccaucaccaacgaccagaucgaggucaccaacgccaccgagcucguccaguccuccuccaccggcgagaucugcaacuccccccaccagauccucgacggcgagaacugcacccucaucgacgcccuccucggcgacccccagugcgacggcuuccagaacaagaagugggaccucuucgucgagcgcuccaaggcccacuccaacugcuaccccuacgacguccccgacuacgccucccuccgcucccucgucgccuccuccggcacccucgaguucaacaacgaguccuucaacuggaccggcgucacccagaacggcaccuccuccgccugcauccgccgcuccaacaacuccuucuucucccgccucaacuggcucacccaccucaacuucaaguaccccgcccucaacgucaccaugcccaacaacgagcaguucgacaagcucuacaucuggggcguccaccaccccggcaccgacaaggaccagaccuuccucuacgcccaggccuccggccgcaucaccgucuccaccaagcgcucccagcaggccgucauccccaacaucggcucccgcccccgcguccgcaacauccccucccgcgucuccaucuacuggaccaucgucaagcccggcgacauccuccucaucaacuccaccggcaaccucaucgccccccgcggcuacuucaagauccgcuccggcaaguccuccaucaugcgcuccgacgcccccaucggcaagugcaacuccgccugcaucacccccaacggcuccauccccaacgacaagcccuuccagaacgucaaccgcaucaccuacggcgccugcccccgcuacgucaagcagaacacccucaagcucgccaccggcaugcgcaacguccccgagaagcagacccgcggcaucuucggcgccaucgccggcuucaucgagaacggcugggagggcauggucgacggcugguacggcuuccgccaccagaacuccgagggccgcggccaggccgccgaccucaaguccacccaggccgccaucgaccagaucaacggcaagcucaaccgccucaucggcaagaccaacgagaaguuccaccagaucgagaaggaguucuccgaggucgagggccgcauccaggaccucgagaaguacgucgaggacaccaagaucgaccucugguccuacaacgccgagcuccucgucgcccucgagaaccagcacaccaucgaccucaccgacuccgagaugaacaagcucuucgagaagaccaagaagcagcuccgcgagaacgccgaggacaugggcaacggcugcuucaagaucuaccacgagugcgacaacgccugcaucggcuccauccgcaacggcaccuacgaccacgacgucuaccgcgacgaggcccucaacaaccgcuuccagaucaagggcgucgagcucaaguccggcuacaaggacuggauccucuggaucuccuucgccaucuccugcuuccuccucugcgucgcccuccucggcuucaucaugugggccugccagaagggcaacauccgcugcaacaucugcaucuga

SEQ ID NO: 104425 - RNA, 1701 nt, Artificial Sequence; identical to SEQ ID NO: 102891
  derived and/or modified CDS sequence (opt2) from hemagglutinin__InfluenzaA__AFD98580

SEQ ID NO: 104426 - RNA, 1701 nt, Artificial Sequence
  derived and/or modified CDS sequence (opt2) from hemagglutinin__InfluenzaA__AFE02942
augaaggccauccucgucguccuccucuacaccuucgccaccgccaacgccgacacccucugcaucggcuaccacgccaacaacuccaccgacaccgucgacacccuccucgagaagaacgucaccgucacccacuccgucaaccuccucgaggacaagcacaacggcaagcucugcaagcuccgcggcgucgccccccuccaccucggcaagugcaacaucgccggcuggauccucggcaaccccgagugcgagucccucuccaccgccuccuccugguccuacaucgucgagaccuccaacuccgacaacggcaccugcuaccccggcgacuucaucgacuacgaggagcuccgcgagcagcucuccuccgucuccuccuucgagcgcuucgagaucuuccccaagaccuccuccuggcccaaccacgacuccaacaagggcgucaccgccgccugcccccacgccggcgccaaguccuucuacaagaaccucaucuggcucgucaagaagggcaacuccuaccccaagcucuccaaguccuacaucaacgacaagggcaaggagguccucguccucuggggcauccaccaccccuccaccuccgccgaccagcagucccucuaccagaacgccgacgccuacgucuucgucuggaccucccgcuacuccaagaaguucaagcccgagaucgccauccgccccaagguccgcgaccaggagggccgcaugaacuacuacuggacccucgucgagcccggcgacaagaucaccuucgaggccaccggcaaccucgucgucccccgcuacgccuucgccauggaccgcaacgccggcuccggcaucaucaucuccgacacccccguccacgacugcaacaccaccugccagacccccaagggcgccaucaacaccucccuccccuuccagaacauccaccccaucaccaucggcaagugccccaaguacgucaaguccaccaagcuccgccucgccaccggccuccgcaacguccccuccauccagucccgcggccucuucggcgccaucgccggcuucaucgagggcggcuggaccggcauggucgacggcugguacggcuaccaccaccagaacgagcagggcuccggcuacgccgccgaccucaaguccacccagaacgccaucgacgagaucaccaacaaggucaacuccgucaucgagaagaugaacacccaguucaccgccgucggcaaggaguucaaccaccucgagaagcgcaucgagaaccucaacaagaaggucgacgacggcuuccucgacaucuggaccuacaacgccgagcuccucguccuccucgagaacgagcgcacccucgacuaccacgacuccaacgucaagaaccucuacgagaagguccgcucccagcucaagaacaacgccaaggagaucggcaacggcugcuucgaguucuaccacaagugcgacaacaccugcauggaguccgucaagaacggcaccuacgacuaccccaaguacuccgaggaggccaagcucaaccgcgaggagaucgacggcgucaagcucgaguccacccgcaucuaccagauccucgccaucuacuccaccgucgccuccucccucguccucgucgucucccucggcgccaucuccuucuggaugugcuccaacggcucccuccagugccgcaucugcaucuga

SEQ ID NO: 104427 - RNA, 1701 nt, Artificial Sequence; identical to SEQ ID NO: 99869
  derived and/or modified CDS sequence (opt2) from hemagglutinin__InfluenzaA__AFE18688

SEQ ID NO: 104428 - RNA, 1701 nt, Artificial Sequence; identical to SEQ ID NO: 96686
  derived and/or modified CDS sequence (opt2) from hemagglutinin__InfluenzaA__AFE47624

SEQ ID NO: 104429 - RNA, 1701 nt, Artificial Sequence; identical to SEQ ID NO: 97436
  derived and/or modified CDS sequence (opt2) from hemagglutinin__InfluenzaA__AFE47635

SEQ ID NO: 104430 - RNA, 1701 nt, Artificial Sequence; identical to SEQ ID NO: 103018
  derived and/or modified CDS sequence (opt2) from hemagglutinin__InfluenzaA__AFF18506

SEQ ID NO: 104431 - RNA, 1701 nt, Artificial Sequence
  derived and/or modified CDS sequence (opt2) from hemagglutinin__InfluenzaA__AFF57124
augaaggccauccucgucguccuccucuacaccuucgccaccgccaacgccgacacccucugcaucggcuaccacgccaacaacuccaccgacaccgucgacaccguccucgagaagaacgucaccgucacccacuccgucaaccuccucgaggacaagcacaacggcaagcucugcaagcuccgcggcgucgccccccuccaccucggcaagugcaacaucgccggcuggauccucggcaaccccgagugcgagucccucuccaccgccuccuccugguccuacaucgucgagaccuccuccuccgacaacggcaccugcuaccccggcgacuucaucaacuacgaggagcuccgcgagcagcucuccuccgucuccuccuucgagcgcuucgagaucuuccccaagaccuccuccuggcccaaccacgacuccaacaagggcgucaccgccgccugcccccacgccggcgccaaguccuucuacaagaaccucaucuggcucgucaagaaggagaacuccuaccccaagcucuccaaguccuacaucaacgacaagggcaaggagguccucguccucuggggcauccaccaccccuccaccaccgccgaccagcagcgccucuaccagaacgccgacgccuacgucuucgucggcaccucccgcuacuccaagaaguucaagcccgagaucgccauccgccccaagguccgcgaccaggagggccgcaugaacuacuacuggacccucgucgagcccggcgacaagaucaccuucgaggccaccggcaaccucgucgucccccgcuacgccuucgccauggagcgcaacgccggcuccggcaucaucaucuccgacacccccguccacgacugcaacaccaccugccagacccccaagggcgccaucaacaccucccuccccuuccagaacauccaccccaucaccaucggcaagugccccaaguacgucaaguccaccaagcuccgccucgccaccggccuccgcaacguccccuccauccagucccgcggccucuucggcgccaucgccggcuucaucgagggcggcuggaccggcauggucgacggcugguacggcuaccaccaccagaacgagcagggcuccggcuacgccgccgaccucaaguccacccagaacgccaucgacaagaucaccaacaaggucaacuccgucaucgagaagaugaacacccaguucaccgccgucggcaaggaguucaaccaccucgagaagcgcaucgagaaccucaacaagaaggucgacgacggcuuccucgacaucuggaccuacaacgccgagcuccucguccuccucgagaacgagcgcacccucgacuaccacgacuccaacgucaagaaccucuacgagaagguccgcaaccagcucaagaacaacgccaaggagaucggcaacggcugcuucgaguucuaccacaagugcgacaacaccugcauggaguccgucaagaacggcaccuacgacuaccccaaguacuccgaggaggccaagcucaaccgcgaggagaucgacggcgucaagcucgaguccacccgcaucuaccagauccucgccaucuacuccaccgucgccuccucccucguccucgucgucucccucggcgccaucuccuucuggaugugcuccaacggcucccuccagugccgcaucugcaucuga

SEQ ID NO: 104432 - RNA, 1701 nt, Artificial Sequence
  derived and/or modified CDS sequence (opt2) from hemagglutinin__InfluenzaA__AFF57128
augaaggccauccucgucguccuccucuacaccuucgccaccgccaacgccgacacccucugcaucggcuaccacgccaacaacuccaccgacaccgucgacaccguccucgagaagaacgucaccgucacccacuccgucaaccuccucgaggacaagcacaacggcaagcucugcaagcuccgcggcgucgccccccuccaccucggcaagugcaacaucgccggcuggauccucggcaaccccgagugcgagucccucuccaccgccuccuccugguccuacaucgucgagaccuccuccuccgacaacggcaccugcuaccccggcgacuucaucaacuacgaggagcuccgcgagcagcucuccuccgucuccuccuucgagcgcuucgagaucuuccccaagaccuccuccuggcccaaccacgacuccaacaagggcgucaccgccgccugcccccacgccggcgccaaguccuucuacaagaaccucaucuggcucgucaagaagggcaacuccuaccccaagcucuccaaguccuacaucaacgacaagggcaaggagguccucguccucuggggcauccaccaccccuccaccaccgccgaccagcaguccaucuaccagaacgccgacgccuacgucuucgucggcaccucccgcuacuccaagaaguucaagcccgagaucgccauccgccccaagguccgcgaccaggagggccgcaugaacuacuacuggacccucgucgagcccggcgacaagaucaccuucgaggccaccggcaaccucgucgucccccgcuacgccuucgccauggagcgcaacgccggcuccggcaucaucaucuccgacacccccguccacgacugcaacaccaccugccagacccccaagggcgccaucaacaccucccuccccuuccagaacauccaccccaucaccaucggcaagugccccaaguacgucaaguccaccaagcuccgccucgccaccggccuccgcaacguccccuccauccagucccgcggccucuucggcgccaucgccggcuucaucgagggcggcuggaccggcauggucgacggcugguacggcuaccaccaccagaacgagcagggcuccggcuacgccgccgaccucaaguccacccagaacgccaucgacaagaucaccaacaaggucaacuccgucaucgagaagaugaacacccaguucaccgccgucggcaaggaguucaaccaccucgagaagcgcaucgagaaccucaacaagaaggucgacgacggcuuccucgacaucuggaccuacaacgccgagcuccucguccuccucgagaacgagcgcacccucgacuaccacgacuccaacgucaagaaccucuacgagaagguccgcaaccagcucaagaacaacgccaaggagaucggcaacggcugcuucgaguucuaccacaagugcgacaacaccugcauggaguccgucaagaacggcaccuacgacuaccccaaguacuccgaggaggccaagcucaaccgcgaggagaucgacggcgucaagcucgaguccacccgcaucuaccagauccucgccaucuacuccaccgucgccuccucccucguccucgucgucucccucggcgccaucuccuucuggaugugcuccaacggcucccuccagugccgcaucugcaucuga

SEQ ID NO: 104433 - RNA, 1701 nt, Artificial Sequence
  derived and/or modified CDS sequence (opt2) from hemagglutinin__InfluenzaA__AFF57132
augaaggccauccucgucguccuccucuacaccuucgccaccgccaacgccgacacccucugcaucggcuaccacgccaacaacuccaccgacaccgucgacaccguccucgagaagaacgucaccgucacccacuccgucaaccuccucgaggacaagcacaacggcaagcucugcaagcuccgcggcgucgccccccuccaccucggcaagugcaacaucgccggcuggauccucggcaaccccgagugcgagucccucuccaccgccuccuccugguccuacaucgucgagaccuccuccuccgacaacggcaccugcuaccccggcgacuucaucgacuacgaggagcuccgcgagcagcucuccuccgucuccuccuucgagcgcuucgagaucuuccccaagaccuccuccuggcccaaccacgacuccaacaagggcgucaccgccgccugcccccacgccggcgccaagggcuucuacaagaaccucaucuggcucgucaagaagggcaacuccuaccccaagcucuccaaguccuacaucaacgacaagggcaaggagguccucguccucuggggcauccaccaccccuccaccaccgccgaccagcaguccaucuaccagaacgccgacaccuacgucuucgucggcaccucccgcuacuccaagaaguucaagcccgagaucgccauccgccccaagguccgcgaccaggagggccgcaugaacuacuacuggacccucgucgagcccggcgacaagaucaccuucgaggccaccggcaaccucgucgucccccgcuacgccuucgccauggagcgcaacgccggcuccggcaucaucaucuccgacacccccguccacgacugcaacaccaccugccagacccccaagggcgccaucaacaccucccuccccuuccagaacauccaccccaucaccaucggcaagugccccaaguacgucaaguccaccaagcuccgccucgccaccggccuccgcaacguccccuccauccagucccgcggccucuucggcgccaucgccggcuucaucgagggcggcuggaccggcauggucgacggcugguacggcuaccaccaccagaacgagcagggcuccggcuacgccgccgaccucaaguccacccagaacgccaucgacaagaucaccaacaaggucaacuccgucaucgagaagaugaacacccaguucaccgccgucggcaaggaguucaaccaccucgagaagcgcaucgagaaccucaacaagaaggucgacgacggcuuccucgacaucuggaccuacaacgccgagcuccucguccuccucgagaacgagcgcacccucgacuaccacgacuccaacgucaagaaccucuacgagaagguccgcaaccagcucaagaacaacgccaaggagaucggcaacggcugcuucgaguucuaccacaagugcgacaacaccugcauggaguccgucaagaacgagaccuacgacuaccccaaguacuccgaggaggccaagcucaaccgcgaggagaucgacggcgucaagcucgaguccacccgcaucuaccagauccucgccaucuacuccaccgucgccuccucccucguccucgucgucucccucggcgccaucuccuucuggaugugcuccaacggcucccuccagugccgcaucugcaucuga

SEQ ID NO: 104434 - RNA, 1701 nt, Artificial Sequence
  derived and/or modified CDS sequence (opt2) from hemagglutinin__InfluenzaA__AFF57136
augaaggccauccucgucguccuccucuacaccuucgccaccgccaacgccgacacccucugcaucggcuaccacgccaacaacuccaccgacaccgucgacaccguccucgagaagaacgucaccgucacccacuccgucaaccuccucgaggacaagcacaacggcaagcucugcaagcuccgcggcgucgccccccuccaccucggcaagugcaacaucgccggcuggauccucggcaaccccgagugcgagucccucuccaccgccuccuccugguccuacaucgucgagaccuccuccuccgacaacggcaccugcuaccccggcgacuucaucgacuacgaggagcuccgcgagcagcucuccuccgucuccuccuucgagcgcuucgagaucuuccccaagaccuccuccuggcccaaccacgacuccaacaagggcgucaccgccgccugcccccacgccggcgccaaguccuucuacaagaaccucaucuggcucgucaagaagggcaacuccuaccccaagcucuccaaguccuacaucaacgacaagggcaaggagguccucguccucuggggcauccaccaccccuccaccuccgccgaccagcagucccucuaccagaacgccgacgccuacgucuucgucggcuccucccgcuacuccaagaaguucaagcccgagaucgccauccgccccaagguccgcgaccgcgagggccgcaugaacuacuacuggacccucgucgagcccggcgacaagaucaccuucgaggccaccggcaaccucgucgucccccgcuacgccuucgccauggagcgcaacgccggcuccggcaucaucaucuccgacacccccgucuacgacugcaacaccaccugccagacccccaagggcgccaucaacaccucccuccccuuccagaacauccaccccaucaccaucggcaagugccccaaguacgucaaguccaccaagcuccgccucgccaccggccuccgcaacguccccuccauccagucccgcggccucuucggcgccaucgccggcuucaucgagggcggcuggaccggcauggucgacggcugguacggcuaccaccaccagaacgagcagggcuccggcuacgccgccgaccucaaguccacccagaacgccaucgacgagaucaccaacaaggucaacuccgucaucgagaagaugaacacccaguucaccgccgucggcaaggaguucaaccaccucgagaagcgcaucgagaaccucaacaagaaggucgacgacggcuuccucgacaucuggaccuacaacgccgagcuccucguccuccucgagaacgagcgcacccucgacuaccacgacuccaacgucaagaaccucuacgagaagguccgcucccagcucaagaacaacgccaaggagaucggcaacggcugcuucgaguucuaccacaagugcgacaacaccugcauggaguccgucaagaacggcaccuacgacuaccccaaguacuccgaggaggccaagcucaaccgcgaggagaucgacggcgucaagcucgaguccacccgcaucuaccagauccucgccaucuacuccaccgucgccuccucccucguccucgucgucucccucggcgccaucuccuucuggaugugcuccaacggcucccuccagugccgcaucugcaucuga

SEQ ID NO: 104435 - RNA, 1701 nt, Artificial Sequence
  derived and/or modified CDS sequence (opt2) from hemagglutinin__InfluenzaA__AFF57144
augaaggccauccucgucguccuccucuacaccuucgccaccgccaacgccgacacccucugcaucggcuaccacgccaacaacuccaccgacaccgucgacaccguccucgagaagaacgucaccgucacccacuccgucaaccuccucgaggacaagcacaacggcaagcucugcaagcuccgcggcgucgccccccuccaccucggcaagugcaacaucgccggcuggauccucggcaaccccgagugcgagucccucuccaccgccuccuccugguccuacaucgucgagaccuccuccuccgacaacggcaccugcuaccccggcgacuucaucgacuacgaggagcuccgcgagcagcucuccuccgucuccuccuucgagcgcuucgagaucuuccccaagaccuccuccuggcccaaccacgacuccaacaagggcgucaccgccgccugcccccacgccggcgccaaguccuucuacaagaaccucaucuggcucgucaagaagggcaacuccuaccccaagcucuccaaguccuacaucaacgacaagggcaaggagguccucguccucuggggcauccaccaccccuccaccuccgacgaccagcagucccucuaccagaacgaggacgccuacgucuucgucggcuccucccgcuacuccaagaaguucaagcccgagaucgccauccgccccaagguccgcgaccgcgagggccgcaugaacuacuacuggacccucgucgagcccggcgacaagaucaccuucgaggccaccggcaaccucgucgucccccgcuacgccuucgccauggagcgcaacgccggcuccggcaucaucaucuccgacacccccguccacgacugcaacaccaccugccagacccccaagggcgccaucaacaccucccuccccuuccagaacauccaccccaucaccaucggcaagugccccaaguacgucaaguccaccaagcuccgccucgccaccggccuccgcaacguccccuccauccagucccgcggccucuucggcgccaucgccggcuucaucgagggcggcuggaccggcauggucgacggcugguacggcuaccaccaccagaacgagcagggcuccggcuacgccgccgaccucaaguccacccagaacgccaucgacgagaucaccaacaaggucaacuccgucaucgagaagaugaacacccaguucaccgccgucggcaaggaguucaaccaccucgagaagcgcaucgagaaccucaacaagaaggucgacgacggcuuccucgacaucuggaccuacaacgccgagcuccucguccuccucgagaacgagcgcacccucgacuaccacgacuccaacgucaagaaccucuacgagaagguccgcucccagcucaagaacaacgccaaggagaucggcaacggcugcuucgaguucuaccacaagugcgacaacaccugcauggaguccgucaagaacggcaccuacgacuaccccaaguacuccgaggaggccaagcucaaccgcgaggagaucgacggcgucaagcucgaguccacccgcaucuaccagauccucgccaucuacuccaccgucgccuccucccucguccucgucgucucccucggcgccaucuccuucuggaugugcuccaacggcucccuccagugccgcaucugcaucuga

SEQ ID NO: 104436 - RNA, 1701 nt, Artificial Sequence
  derived and/or modified CDS sequence (opt2) from hemagglutinin__InfluenzaA__AFF57148
augaaggccauccucgucguccuccucuacaccuucgccaccgccaacgccgacacccucugcaucggcuaccacgccaacaacuccaccgacaccgucgacacccuccucgagaagaacgucaccgucacccacuccgucaaccuccucgaggacaagcacaacggcaagcucugcaagcuccgcggcgucgccccccuccaccucggcaagugcaacaucgccggcuggauccucggcaaccccgagugcgagucccucuccaccgccuccuccugguccuacaucgucgagaccuccuccuccgacaacggcaccugcuaccccggcgacuucaucgacuacgaggagcuccgcgagcagcucuccuccgucuccuccuucgagcgcuucgagaucuuccccaagaccuccuccuggcccaaccacgacuccaacaagggcgucaccgccgccugcccccacgccggcgccaaguccuucuacaagaaccucaucuggcucgucaagaagggcaacuccuaccccaagcucuccaaguccuacaucaacgacaagggcaaggagguccucguccucuggggcauccaccaccccuccaccuccgacgaccagcagucccucuaccagaacgaggacgccuacgucuucgucggcuccucccgcuacuccaagaaguucaagcccgagaucgccauccgccccaagguccgcgaccgcgagggccgcaugaacuacuacuggacccucgucgagcccggcgacaagaucaccuucgaggccaccggcaaccucgucgucccccgcuacgccuucgccauggagcgcaacgccggcuccggcaucaucaucuccgacacccccguccacgacugcaacaccaccugccagacccccaagggcgccaucaacaccucccuccccuuccagaacauccaccccaucaccaucggcaagugccccaaguacgucaaguccaccaagcuccgccucgccaccggccuccgcaacguccccuccauccagucccgcggccucuucggcgccaucgccggcuucaucgagggcggcuggaccggcauggucgacggcugguacggcuaccaccaccagaacgagcagggcuccggcuacgccgccgaccucaaguccacccagaacgccaucgacgagaucaccaacaaggucaacuccgucaucgagaagaugaacacccaguucaccgccgucggcaaggaguucaaccaccucgagaagcgcaucgagaaccucaacaagaaggucgacgacggcuuccucgacaucuggaccuacaacgccgagcuccucguccuccucgagaacgagcgcacccucgacuaccacgacuccaacgucaagaaccucuacgagaagguccgcucccagcucaagaacaacgccaaggagaucggcaacggcugcuucgaguucuaccacaagugcgacaacaccugcauggaguccgucaagaacggcaccuacgacuaccccaaguacuccgaggaggccaagcucaaccgcgaggagaucgacggcgucaagcucgaguccacccgcaucuaccagauccucgccaucuacuccaccgucgccuccucccucguccucgucgucucccucggcgccaucuccuucuggaugugcuccaacggcucccuccagugccgcaucugcaucuga

SEQ ID NO: 104437 - RNA, 1701 nt, Artificial Sequence
  derived and/or modified CDS sequence (opt2) from hemagglutinin__InfluenzaA__AFF57160
augaaggccauccucgucguccuccucuacaccuucgccaccgccaacgccgacacccucugcaucggcuaccacgccaacaacuccaccgacaccgucgacaccguccucgagaagaacgucaccgucacccacuccgucaaccuccucgaggacaagcacaacggcaagcucugcaagcuccgcggcgucgccccccuccaccucggcaagugcaacaucgccggcuggauccucggcaaccccgagugcgagucccucuccaccgccuccuccugguccuacaucgucgagaccuccuccuccgacaacggcaccugcuaccccggcgacuucaucgacuacgaggagcuccgcgagcagcucuccuccgucuccuccuucgagcgcuucgagaucuuccccaagaccuccuccuggcccaaccacgacuccaacaagggcgucaccgccgccugcccccacgccggcgccaaguccuucuacaagaaccucaucuggcucgucaagaagggcaacuccuaccccaagcucuccgaguccuacaucaacgacaagggcaaggagguccucguccucuggggcauccaccaccccuccaccuccgccgaccagcagucccucuaccagaacgaggacgccuacgucuucgucggcuccucccgcuacuccaagaaguucaagcccgagaucgccauccgccccaagguccgcgaccgcgagggccgcaugaacuacuacuggacccucgucgagcccggcgacaagaucaccuucgaggccaccggcaaccucgucgucccccgcuacgccuucgccauggagcgcaacgccggcuccggcaucaucaucuccgacacccccguccacgacugcaacaccaccugccagacccccaagggcgccaucaacaccucccuccccuuccagaacauccaccccaucaccaucggcaagugccccaaguacgucaaguccaccaagcuccgccucgccaccggccuccgcaacguccccuccauccagucccgcggccucuucggcgccaucgccggcuucaucgagggcggcuggaccggcauggucgacggcugguacggcuaccaccaccagaacgagcagggcuccggcuacgccgccgaccucaaguccacccagaacgccaucgacgagaucaccaacaaggucaacuccgucaucgagaagaugaacacccaguucaccgccgucggcaaggaguucaaccaccucgagaagcgcaucgagaaccucaacaagaaggucgacgacggcuuccucgacaucuggaccuacaacgccgagcuccucguccuccucgagaacgagcgcacccucgacuaccacgacuccaacgucaagaaccucuacgagaagguccgcucccagcucaagaacaacgccaaggagaucggcaacggcugcuucgaguucuaccacaagugcgacaacaccugcauggaguccgucaagaacggcaccuacgacuaccccaaguacuccgaggaggccaagcucaaccgcgaggagaucgacggcgucaagcucgaguccacccgcaucuaccagauccucgccaucuacuccaccgucgccuccucccucguccucgucgucucccucggcgccaucuccuucuggaugugcuccaacggcucccuccagugccgcaucugcaucuga

SEQ ID NO: 104438 - RNA, 1701 nt, Artificial Sequence
  derived and/or modified CDS sequence (opt2) from hemagglutinin__InfluenzaA__AFF57164
augaaggccauccucgucguccuccucuacaccuucgccaccgccaacgccgacacccucugcaucggcuaccacgccaacaacuccaccgacaccgucgacaccguccucgagaagaacgucaccgucacccacuccgucaaccuccucgaggacaagcacaacgagaagcucugcaagcuccgcggcgucgccccccuccaccucggcaagugcaacaucgccggcuggauccucggcaaccccgagugcgagucccucuccaccgccuccuccugguccuacaucgucgagaccuccuccuccgacaacggcaccugcuaccccggcgacuucaucgacuacgaggagcuccgcgagcagcucuccuccgucuccuccuucgagcgcuucgagaucuuccccaagaccuccuccuggcccaaccacgacuccaacaagggcgucaccgccgccugcccccacgccggcgccaaguccuucuacaagaaccucaucuggcucgucaagaagggcaacuccuaccccaagcucuccaaguccuacaucaacgacaagggcaaggagguccucguccucuggggcauccaccaccccuccaccuccgccgaccagcagucccucuaccagaacgccgacgccuacgucuucgucggcuccucccgcuacuccaagaaguucaagcccgagaucgccauccgccccaagguccgcgaccgcgagggccgcaugaacuacuacuggacccucgucgagcccggcgacaagaucaccuucgaggccaccggcaaccucgucgucccccgcuacgccuucgccauggagcgcaacgccggcuccggcaucaucaucuccgacacccccguccacgacugcaacaccaccugccagacccccaagggcgccaucaacaccucccuccccuuccagaacauccaccccaucaccaucggcaagugccccaaguacgucaaguccaccaagcuccgccucgccaccggccuccgcaacguccccuccauccagucccgcggccucuucggcgccaucgccggcuucaucgagggcggcuggaccggcauggucgacggcugguacggcuaccaccaccagaacgagcagggcuccggcuacgccgccgaccucaaguccacccagaacgccaucgacgagaucaccaacaaggucaacuccgucaucgagaagaugaacacccaguucaccgccgucggcaaggaguucaaccaccucgagaagcgcaucgagaaccucaacaagaaggucgacgacggcuuccucgacaucuggaccuacaacgccgagcuccucguccuccucgagaacgagcgcacccucgacuaccacgacuccaacgucaagaaccucuacgagaagguccgcucccagcucaagaacaacgccaaggagaucggcaacggcugcuucgaguucuaccacaagugcgacaacaccugcauggaguccgucaagaacggcaccuacgacuaccccaaguacuccgaggaggccaagcucaaccgcgaggagaucgacggcgucaagcucgaguccacccgcaucuaccagauccucgccaucuacuccaccgucgccuccucccucguccucgucgucucccucggcgccaucuccuucuggaugugcuccaacggcucccuccagugccgcaucugcaucuga

SEQ ID NO: 104439 - RNA, 1701 nt, Artificial Sequence; identical to SEQ ID NO: 104438
  derived and/or modified CDS sequence (opt2) from hemagglutinin__InfluenzaA__AFF57168

SEQ ID NO: 104440 - RNA, 1701 nt, Artificial Sequence
  derived and/or modified CDS sequence (opt2) from hemagglutinin__InfluenzaA__AFF57172
augaaggccauccucgucguccuccucuacaccuucgccaccgccaacgccgacacccucugcaucggcuaccacgccaacaacuccaccgacaccgucgacaccguccucgagaagaacgucaccgucacccacuccgucaaccuccucgaggacaagcacaacggcaagcucugcaagcuccgcggcgucgccccccuccaccucggcaagugcaacaucgccggcuggauccucggcaaccccgagugcgagucccucuccaccgccuccuccugguccuacaucgucgagaccuccuccuccgacaacggcaccugcuaccccggcgacuucaucgacuacgaggagcuccgcgagcagcucuccuccgucuccuccuucgagcgcuucgagaucuuccccaagaccuccuccuggcccaaccacgacuccaacaagggcgucaccgccgccugcccccacgccggcgccaaguccuucuacaagaaccucaucuggcucgucaagaagggcaacuccuaccccaagcucuccaaguccuacaucaacgacaagggcaaggagguccucguccucuggggcauccaccaccccuccaccuccgccgaccagcagucccucuaccagaacgaggacgccuacgucuucgucggcuccucccgcuacuccaagaaguucaagcccgagaucgccauccgccccaagguccgcgaccgcgagggccgcaugaacuacuacuggacccucgucgagcccggcgacaagaucaccuucgaggccaccggcaaccucgucgucccccgcuacgccuucgccauggagcgcaacgccggcuccggcaucaucaucuccgacacccccguccacgacugcaacaccaccugccagacccccaagggcgccaucaacaccucccuccccuuccagaacauccaccccaucaccaucggcaagugccccaaguacgucaaguccaccaagcuccgccucgccaccggccuccgcaacguccccuccauccagucccgcggccucuucggcgccaucgccggcuucaucgagggcggcuggaccggcauggucgacggcugguacggcuaccaccaccagaacgagcagggcuccggcuacgccgccgaccucaaguccacccagaacgccaucgacgagaucaccaacaaggucaacuccgucaucgagaagaugaacacccaguucaccgccgucggcaaggaguucaaccaccucgagaagcgcaucgagaaccucaacaagaaggucgacgacggcuuccucgacaucuggaccuacaacgccgagcuccucguccuccucgagaacgagcgcacccucgacuaccacgacuccaacgucaagaaccucuacgagaagguccgcucccagcucaagaacaacgccaaggagaucggcaacggcugcuucgaguucuaccacaagugcgacaacaccugcauggaguccgucaagaacggcaccuacgacuaccccaaguacuccgaggaggccaagcucaaccgcgaggagaucgacggcgucaagcucgaguccacccgcaucuaccagauccucgccaucuacuccaccgucgccuccucccucguccucgucgucucccucggcgccaucuccuucuggaugugcuccaacggcucccuccagugccgcaucugcaucuga

SEQ ID NO: 104441 - RNA, 1701 nt, Artificial Sequence
  derived and/or modified CDS sequence (opt2) from hemagglutinin__InfluenzaA__AFF57176
augaaggccauccucgucguccuccucuacaccuucgccaccgccaacgccgacacccucugcaucggcuaccacgccaacaacuccaccgacaccgucgacaccguccucgagaagaacgucaccgucacccacuccgucaaccuccucgaggacaagcacaacggcaagcucugcaagcuccgcggcgucgccccccuccaccucggcaagugcaacaucgccggcuggauccucggcaaccccgagugcgagucccucuccaccgccuccuccugguccuacaucgucgagaccuccuccuccgacaacggcaccugcuaccccggcgacuucaucgacuacgaggagcuccgcgagcagcucuccuccgucuccuccuucgagcgcuucgagaucuuccccaagaccuccuccuggcccaaccacgacuccaacaagggcgucaccgccgccugcccccacgccggcgccaaguccuucuacaagaaccucaucuggcucgucaagaaggagaacuccuaccccaagcucuccaaguccuacaucaacgacaagggcaaggagguccucguccucuggggcauccaccaccccuccaccuccgccgaccagcagucccucuaccagaacgccgacgccuacgucuucgucggcuccucccgcuacuccaagaaguucaagcccgagaucgccauccgccccaagguccgcgaccgcgagggccgcaugaacuacuacuggacccucgucgagcccggcgacaagaucaccuucgaggccaccggcaaccucgucgucccccgcuacgccuucgccauggagcgcaacgccggcuccggcaucaucaucuccgacacccccguccacgacugcaacaccaccugccagacccccaagggcgccaucaacaccucccuccccuuccagaacauccaccccaucaccaucggcaagugccccaaguacgucaaguccaccaagcuccgccucgccaccggccuccgcaacguccccuccauccagucccgcggccucuucggcgccaucgccggcuucaucgagggcggcuggaccggcauggucgacggcugguacggcuaccaccaccagaacgagcagggcuccggcuacgccgccgaccucaaguccacccagaacgccaucgacgagaucaccaacaaggucaacuccgucaucgagaagaugaacacccaguucaccgccgucggcaaggaguucaaccaccucgagaagcgcaucgagaaccucaacaagaaggucgacgacggcuuccucgacaucuggaccuacaacgccgagcuccucguccuccucgagaacgagcgcacccucgacuaccacgacuccaacgucaagaaccucuacgagaagguccgcucccagcucaagaacaacgccaaggagaucggcaacggcugcuucgaguucuaccacaagugcgacaacaccugcauggaguccgucaagaacggcaccuacgacuaccccaaguacuccgaggaggccaagcucaaccgcgaggagaucgacggcgucaagcucgaguccacccgcaucuaccagauccucgccaucuacuccaccgucgccuccucccucguccucgucgucucccucggcgccaucuccuucuggaugugcuccaacggcucccuccagugccgcaucugcaucuga

SEQ ID NO: 104442 - RNA, 1701 nt, Artificial Sequence
  derived and/or modified CDS sequence (opt2) from hemagglutinin__InfluenzaA__AFF57184
augaaggccauccucgucguccuccucuacaccuucgccaccgccaacgccgacacccucugcaucggcuaccacgccaacaacuccaccgacaccgucgacaccguccucgagaagaacgucaccgucacccacuccgucaaccuccucgaggacaagcacaacggcaagcucugcaagcuccgcggcgucgccccccuccaccucggcaagugcaacaucgccggcuggauccucggcaaccccgagugcgagucccucuccaccgccuccuccugguccuacaucgucgagaccuccuccuccgacaacggcaccugcuaccccggcgacuucaucgacuacgaggagcuccgcgagcagcucuccuccgucuccuccuucgagcgcuucgagaucuuccccaagaccuccuccuggcccaaccacgacuccaacaagggcgucaccgccgccugcccccacgccggcgccaaguccuucuacaagaaccucaucuggcucgucaagaaggagaacuccuaccagaagcucuccaaguccuacaucaacgacaagggcaaggagguccucguccucuggggcauccaccaccccuccaccuccgccgaccagcagucccucuaccagaacgccgacgccuacgucuucgucggcuccucccgcuacuccaagaaguucaagcccgagaucgccauccgccccaagguccgcgaccgcgagggccgcaugaacuacuacuggacccucgucgagcccggcgacaagaucaccuucgaggccaccggcaaccucgucgucccccgcuacgccuucgccauggagcgcaacgccggcuccggcaucaucaucuccgacacccccguccacgacugcaacaccaccugccagacccccaagggcgccaucaacaccucccuccccuuccagaacauccaccccaucaccaucggcaagugccccaaguacgucaaguccaccaagcuccgccucgccaccggccuccgcaacguccccuccauccagucccgcggccucuucggcgccaucgccggcuucaucgagggcggcuggaccggcauggucgacggcugguacggcuaccaccaccagaacgagcagggcuccggcuacgccgccgaccucaaguccacccagaacgccaucgacgagaucaccaacaaggucaacuccgucaucgagaagaugaacacccaguucaccgccgucggcaaggaguucaaccaccucgagaagcgcaucgagaaccucaacaagaaggucgacgacggcuuccucgacaucuggaccuacaacgccgagcuccucguccuccucgagaacgagcgcacccucgacuaccacgacuccaacgucaagaaccucuacgagaagguccgcucccagcucaagaacaacgccaaggagaucggcaacggcugcuucgaguucuaccacaagugcgacaacaccugcauggaguccgucaagaacggcaccuacgacuaccccaaguacuccgaggaggccaagcucaaccgcgaggagaucgacggcgucaagcucgaguccacccgcaucuaccagauccucgccaucuacuccaccgucgccuccucccucguccucgucgucucccucggcgccaucuccuucuggaugugcuccaacggcucccuccagugccgcaucugcaucuga

SEQ ID NO: 104443 - RNA, 1701 nt, Artificial Sequence; identical to SEQ ID NO: 104435
  derived and/or modified CDS sequence (opt2) from hemagglutinin__InfluenzaA__AFF57188

SEQ ID NO: 104444 - RNA, 1707 nt, Artificial Sequence
  derived and/or modified CDS sequence (opt2) from hemagglutinin__InfluenzaA__AFF60787
auggagaagaucguccuccucuucgccaucgucucccucgucaaguccgaccagaucugcaucggcuaccacgccaacaacuccaccgagcaggucgacaccaucauggagaagaacgucaccgucacccacgcccaggacauccucgagaagacccacaacggcaagcucugcgaccucgacggcgucaagccccucauccuccgcgacugcuccgucgccggcuggcuccucggcaaccccaugugcgacgaguucaucaacguccccgagugguccuacaucgucgagaaggccaaccccgucaacgaccucugcuaccccggcgacuucaacgacuacgaggagcucaagcaccuccucucccgcaucaaccacuucgagaagauccagaucauccccaaguccuccugguccucccacgaggccucccucggcgucuccuccgccugccccuaccagggcaaguccuccuucuuccgcaacgucgucuggcucaucaagaagaacuccaccuaccccaccaucaagcgcuccuacaacaacaccaaccaggaggaccuccucguccucuggggcauccaccaccccaacgacgccgccgagcagaccaagcucuaccagaaccccaccaccuacaucuccgucggcaccuccacccucaaccagcgccucgucccccgcaucgccacccgcuccgaggucaacggccaguccggccgcauggaguucuucuggaccauccucaagcccaacgacgccaucaacuucgaguccaacggcaacuucaucgcccccgaguacgccuacaagaucgucaagaagggcgacuccaccaucaugaaguccgagcucgaguacggcaacugcaacaccaagugccagacccccaugggcgccaucaacuccuccaugcccuuccacaacauccacccccucaccaucggcgagugccccaaguacgucaaguccaaccgccucguccucgccaccggccuccgcaacuccccccagcgcgagcgccgccgcaagaagcgcggccucuucggcgccaucgccggcuucaucgagggcggcuggcagggcauggucgacggcugguacggcuaccaccacuccaacgagcagggcuccggcuacgccgccgacaaggaguccacccagaaggccaucgacggcgucaccaacaaggucaacuccaucaucgacaagaugaacacccaguucgaggccgucggccgcgaguucaacaaccucgagcgccgcaucgagaaccucaacaagaagauggaggacggcuuccucgacgucuggaccuacaacgccgagcuccucguccucauggagaacgagcgcacccucgacuuccacgacuccaacgucaagaaccucuacgacaagguccgccuccagcuccgcgacaacgccaaggagcucggcaacggcugcuucgaguucuaccacaagugcgacaacgagugcauggaguccguccgcaacggcaccuacgacuacccccaguacuccgaggaggcccgccucaagcgcgaggagaucuccggcgucaagcucgaguccaucggcaucuaccagauccucuccaucuacuccaccgucgccuccucccucgcccucgccaucauggucgccggccucucccucuggaugugcuccaacggcucccuccagugccgcaucugcaucuga

SEQ ID NO: 104445 - RNA, 1701 nt, Artificial Sequence
  derived and/or modified CDS sequence (opt2) from hemagglutinin__InfluenzaA__AFG29042
augaaggccauccucgucguccuccucuacaccuucgccaccgccaacgccgacacccucugcaucggcuaccacgccaacaacuccaccgacaccgucgacaccguccucgagaagaacgucaccgucacccacuccgucaaccuccucgaggacaagcacaacggcaagcucugcaagcuccgcggcgucgccccccuccaccucggcaagugcaacaucgccggcuggauccucggcaaccccgagugcgagucccucuccaccgccuccuccugguccuacaucgucgagaccuucuccuccgacaacggcaccugcuaccccggcgacuucaucgacuacgaggagcuccgcgagcagcucuccuccgucuccuccuucgagcgcuucgagaucuuccccaagaccuccuccuggcccaaccacgacuccaacaagggcgucaccgccgccugcccccacgccggcgccaaguccuucuacaagaaccucaucuggcucgucaagaagggcaacuccuaccccaagcucuccaaguccuacaucaacgacaagggcaaggagguccucguccucuggggcauccaccaccccuccaccuccgccgaccagcagucccucuaccagaacgccgacgccuacgucuucgucggcaccucccgcuacuccaagaaguucaagcccgagaucgccauccgccccaagguccgcgaccaggagggccgcaugaacuacuacuggacccucaucgagcccggcgacaagaucaccuucgaggccaccggcaaccucgucgucccccgcuacgccuucgccauggagcgcaacgccggcuccggcaucaucaucuccgacacccccguccacgacugcaacaccaccugccagacccccaagggcgccaucaacaccucccuccccuuccagaacauccaccccaucaccaucggcaagugccccaaguacgucaaguccaccaagcuccgccucgccaccggccuccgcaacguccccuccauccagucccgcggccucuucggcgccaucgccggcuucaucgagggcggcuggaccggcauggucgacggcugguacggcuaccaccaccagaacgagcagggcuccggcuacgccgccgaccucaaguccacccagaacgccaucgacgagaucaccaacaaggucaacuccgucaucgagaagaugaacacccaguucaccgccgucggcaaggaguucaaccaccucgagaagcgcaucgagaaccucaacaagaaggucgacgacggcuuccucgacaucuggaccuacaacgccgagcuccucguccuccucgagaacgagcgcacccucgacuaccacgacuccaacgucaagaaccucuacgagaagguccgcucccagcucaagaacaacgccaaggagaucggcaacggcugcuucgaguucuaccacaagugcgacaacaccugcauggaguccgucaagaacggcaccuacgacuaccccaaguacuccgaggaggccaagcucaaccgcgaggagaucgacggcgucaagcucgaguccacccgcaucuaccagauccucgccaucuacuccaccgucgccuccucccucguccucgucgucucccucggcgccaucuccuucuggaugugcuccaacggcucccuccagugccgcaucugcaucuga

SEQ ID NO: 104446 - RNA, 1701 nt, Artificial Sequence
  derived and/or modified CDS sequence (opt2) from hemagglutinin__InfluenzaA__AFG29044
augaaggccauccucgucguccuccucuacaccuucgccaccgccaacgccgacacccucugcaucggcuaccacgccaacaacuccaccgacaccgucgacaccguccucgagaagaacgucaccgucacccacuccgucaaccuccucgaggacaagcacaacggcaagcucugcaagcuccgcggcgucgccccccuccaccucggcaagugcaacaucgccggcuggauccucggcaaccccgagugcgagucccucuccaccgccuccuccugguccuacaucgucgagacccccaacuccgacaacggcaccugcuaccccggcgacuucaucgacuacgaggagcuccgcgagcagcucuccuccgucuccuccuucgagcgcuucgagaucuuccccaagaccuccuccuggcccaaccacgacuccaacaagggcgucaccgccgccugcccccacgccggcgccaaguccuucuacaagaaccucaucuggcucgucaagaagggcaacuccuaccccaagcucuccaaguccuacaucaacgacaagggcaaggagguccucguccucuggggcauccaccacccccccaccuccaccgaccagcagucccucuaccagaacgccgacgccuacgucuucgucggcaccucccgcuacuccaagaaguucaagcccgagaucgccauccgccccaagguccgcggccaggagggccgcaugaacuacuacuggacccucgucgagcccggcgacaagaucaccuucgaggccaccggcaaccucgucgucccccgcuacgccuucgccauggagcgcaacgccggcuccggcaucaucaucuccgacacccccguccacgacugcaacaccaccugccagacccccaagggcgccaucaacaccucccuccccuuccagaacauccaccccaucaccaucggcaagugccccaaguacgucaaguccaccaagcuccgccucgccaccggccuccgcaacguccccuccauccagucccgcggccucuucggcgccaucgccggcuucaucgagggcggcuggaccggcauggucgacggcugguacggcuaccaccaccagaacgagcagggcuccggcuacgccgccgaccucaaguccacccagaacgccaucgacaagaucaccaacaaggucaacuccgucaucgagaagaugaacacccaguucaccgccgucggcaaggaguucaaccaccucgagaagcgcaucgagaaccucaacaagaaggucgacgacggcuuccucgacaucuggaccuacaacgccgagcuccucguccuccucgagaacgagcgcacccucgacuaccacgacuccaacgucaagaaccucuacgagaagguccgcucccagcucaagaacaacgccaaggagaucggcaacggcugcuucgaguucuaccacaagugcgacaacaccugcauggaguccgucaagaacggcaccuacgacuaccccaaguacuccgaggaggccaagcucaaccgcgaggagaucgacggcgucaagcucgaguccacccgcaucuaccagauccucgccaucuacuccaccgucgccuccucccucguccucgucgucucccucggcgccaucuccuucuggaugugcuccaacggcucccuccagugccgcaucugcaucuga

SEQ ID NO: 104447 - RNA, 1701 nt, Artificial Sequence; identical to SEQ ID NO: 98705
  derived and/or modified CDS sequence (opt2) from hemagglutinin__InfluenzaA__AFG31060

SEQ ID NO: 104448 - RNA, 1701 nt, Artificial Sequence; identical to SEQ ID NO: 101260
  derived and/or modified CDS sequence (opt2) from hemagglutinin__InfluenzaA__AFG31070

SEQ ID NO: 104449 - RNA, 1701 nt, Artificial Sequence; identical to SEQ ID NO: 98692
  derived and/or modified CDS sequence (opt2) from hemagglutinin__InfluenzaA__AFG31080

SEQ ID NO: 104450 - RNA, 1701 nt, Artificial Sequence
  derived and/or modified CDS sequence (opt2) from hemagglutinin__InfluenzaA__AFG31100
augaaggccauccucgucguccuccucuacaccuucgccaccgccaacgccgacacccucugcaucggcuaccacgccaacaacuccaccgacaccgucgacaccguccucgagaagaacgucaccgucacccacuccgucaaccuccucgaggacaagcacaacggcaagcucugcaagcuccgcggcgucgccccccuccaccucggcaagugcaacaucgccggcuggauccucggcaaccccgagugcgagucccucuccaccgccuccuccugguccuacaucgucgagaccuccuccuccgacaacggcaccugcuaccccggcgacuucaucgacuacgaggagcuccgcgagcagcucuccuccgucuccuccuucgagcgcuucgagaucuuccccaagaccuccuccuggcccaaccacgaccucaacaagggcgucaccgccgccugcccccacgccggcgccaaguccuucuacaagaaccucaucuggcucgucaagaagggcaacuccuaccccaagcucuccaaguccuacaucaacgacaagggcaaggagguccucguccucuggggcauccaccaccccuccaccuccgccgaccagcagucccucuaccagaacgccgacgccuacgucuucgucggcaccucccgcuacuccaagaaguucaagcccgagaucgccauccgccccaagguccgcgaccaggagggccgcaugaacuacuacuggacccucgucgagcccggcgacaagaucaccuucgaggccaccggcaaccucgucgucccccgcuacgccuucgccauggagcgcaacgccggcuccggcaucaucaucuccgacacccccguccacgacugcaacaccaccugccagacccccaagggcgccaucaacaccucccuccccuuccagaacauccaccccaucaccaucggcaagugccccaaguacgucaaguccaccaagcuccgccucgccaccggccuccgcaacguccccuccauccagucccgcggccucuucggcgccaucgccggcuucaucgagggcggcuggaccggcauggucgacggcugguacggcuaccaccaccagaacgagcagggcuccggcuacgccgccgaccucaaguccacccagaacgccaucgacgagaucaccaacaaggucaacuccgucaucgagaagaugaacacccaguucaccgccgucggcaaggaguucaaccaccucgagaagcgcaucgagaaccucaacaagaaggucgacgacggcuuccucgacaucuggaccuacaacgccgagcuccucguccuccucgagaacgagcgcacccucgacuaccacgacuccaacgucaagaaccucuacgagaagguccgcucccagcucaagaacaacgccaaggagaucggcaacggcugcuucgaguucuaccacaagugcgacaacaccugcauggaguccgucaagaacggcaccuacgacuaccccaaguacuccgaggaggccaagcucaaccgcgaggagaucgacggcgucaagcucgaguccacccgcaucuaccagauccucgccaucuacuccaccgucgccuccucccucguccucaucgucucccucggcgccaucuccuucuggaugugcuccaacggcucccuccagugccgcaucugcaucuga

SEQ ID NO: 104451 - RNA, 1701 nt, Artificial Sequence; identical to SEQ ID NO: 98705
  derived and/or modified CDS sequence (opt2) from hemagglutinin__InfluenzaA__AFG31110

SEQ ID NO: 104452 - RNA, 1701 nt, Artificial Sequence; identical to SEQ ID NO: 98947
  derived and/or modified CDS sequence (opt2) from hemagglutinin__InfluenzaA__AFG31120

SEQ ID NO: 104453 - RNA, 1701 nt, Artificial Sequence; identical to SEQ ID NO: 98947
  derived and/or modified CDS sequence (opt2) from hemagglutinin__InfluenzaA__AFG31130

SEQ ID NO: 104454 - RNA, 1701 nt, Artificial Sequence; identical to SEQ ID NO: 98947
  derived and/or modified CDS sequence (opt2) from hemagglutinin__InfluenzaA__AFG31140

SEQ ID NO: 104455 - RNA, 1701 nt, Artificial Sequence; identical to SEQ ID NO: 99807
  derived and/or modified CDS sequence (opt2) from hemagglutinin__InfluenzaA__AFG31150

SEQ ID NO: 104456 - RNA, 1701 nt, Artificial Sequence; identical to SEQ ID NO: 99807
  derived and/or modified CDS sequence (opt2) from hemagglutinin__InfluenzaA__AFG31160

SEQ ID NO: 104457 - RNA, 1701 nt, Artificial Sequence; identical to SEQ ID NO: 98705
  derived and/or modified CDS sequence (opt2) from hemagglutinin__InfluenzaA__AFG31170

SEQ ID NO: 104458 - RNA, 1701 nt, Artificial Sequence; identical to SEQ ID NO: 98705
  derived and/or modified CDS sequence (opt2) from hemagglutinin__InfluenzaA__AFG31180

SEQ ID NO: 104459 - RNA, 1701 nt, Artificial Sequence; identical to SEQ ID NO: 98705
  derived and/or modified CDS sequence (opt2) from hemagglutinin__InfluenzaA__AFG31190

SEQ ID NO: 104460 - RNA, 1701 nt, Artificial Sequence; identical to SEQ ID NO: 98705
  derived and/or modified CDS sequence (opt2) from hemagglutinin__InfluenzaA__AFG31200

SEQ ID NO: 104461 - RNA, 1701 nt, Artificial Sequence; identical to SEQ ID NO: 98705
  derived and/or modified CDS sequence (opt2) from hemagglutinin__InfluenzaA__AFG31210

SEQ ID NO: 104462 - RNA, 1701 nt, Artificial Sequence; identical to SEQ ID NO: 98705
  derived and/or modified CDS sequence (opt2) from hemagglutinin__InfluenzaA__AFG31220

SEQ ID NO: 104463 - RNA, 1701 nt, Artificial Sequence; identical to SEQ ID NO: 101260
  derived and/or modified CDS sequence (opt2) from hemagglutinin__InfluenzaA__AFG31230

SEQ ID NO: 104464 - RNA, 1701 nt, Artificial Sequence; identical to SEQ ID NO: 98705
  derived and/or modified CDS sequence (opt2) from hemagglutinin__InfluenzaA__AFG31240

SEQ ID NO: 104465 - RNA, 1701 nt, Artificial Sequence; identical to SEQ ID NO: 98705
  derived and/or modified CDS sequence (opt2) from hemagglutinin__InfluenzaA__AFG31250

SEQ ID NO: 104466 - RNA, 1701 nt, Artificial Sequence; identical to SEQ ID NO: 98705
  derived and/or modified CDS sequence (opt2) from hemagglutinin__InfluenzaA__AFG31260

SEQ ID NO: 104467 - RNA, 1701 nt, Artificial Sequence; identical to SEQ ID NO: 98705
  derived and/or modified CDS sequence (opt2) from hemagglutinin__InfluenzaA__AFG31270

SEQ ID NO: 104468 - RNA, 1701 nt, Artificial Sequence; identical to SEQ ID NO: 98705
  derived and/or modified CDS sequence (opt2) from hemagglutinin__InfluenzaA__AFG31280

SEQ ID NO: 104469 - RNA, 1701 nt, Artificial Sequence; identical to SEQ ID NO: 98705
  derived and/or modified CDS sequence (opt2) from hemagglutinin__InfluenzaA__AFG31290

SEQ ID NO: 104470 - RNA, 1701 nt, Artificial Sequence
  derived and/or modified CDS sequence (opt2) from hemagglutinin__InfluenzaA__AFG31300
augaaggccauccucgucguccuccucuacaccuucgccaccgccaacgccgacacccucugcaucggcuaccacgccaacaacuccaccgacaccgucgacaccguccucgagaagaacgucaccgucacccacuccgucaaccuccucgaggacaagcacaacggcaagcucugcaagcuccgcggcgucgccccccuccaccucggcaagugcaacaucgccggcuggauccucggcaaccccgagugcgagucccucuccaccgccuccuccugguccuacaucgucgagaccuccuccuccgacaacggcaccugcuaccccggcgacuucaucgacuacgaggagcuccgcgagcagcucuccuccgucuccuccuucgagcgcuucgagaucuuccccaagaccuccuccuggcccaaccacgacuccaacaagggcgucaccgccgccugcccccacgccggcgccaaguccuucuacaagaaccucaucuggcucgucaagaagggcaacuccuaccccaagcucuccaaguccuacaucaacgacaagggcaaggagguccucguccucuggggcauccaccaccccuccaccuccgccgaccagcagucccucuaccagaacgccgacgccuacgucuucgucggcaccucccgcuacuccaagaaguucaagcccgagaucgccauccgccccaagguccgcgaccaggagggccgcaugaacuacuacuggacccucgucgagcccggcgacaagaucaccuucgaggccaccggcaaccucgucgucccccgcuacgccuucgccauggagcgcaacgccggcuccggcaucaucaucuccgacacccccguccacgacugcaacaccaccugccagacccccaagggcgccaucaacaccucccuccccuuccagaacaucaaccccaucaccaucggcaagugccccaaguacgucaaguccaccaagcuccgccucgccaccggccuccgcaacguccccuccauccagucccgcggccucuucggcgccaucgccggcuucaucgagggcggcuggaccggcauggucgacggcugguacggcuaccaccaccagaacgagcagggcuccggcuacgccgccgaccucaaguccacccagaacgccaucgacgagaucaccaacaaggucaacuccgucaucgagaagaugaacacccaguucaccgccgucggcaaggaguucaaccaccucgagaagcgcaucgagaaccucaacaagaaggucgacgacggcuuccucgacaucuggaccuacaacgccgagcuccucguccuccucgagaacgagcgcacccucgacuaccacgacuccaacgucaagaaccucuacgagaagguccgcucccagcucaagaacaacgccaaggagaucggcaacggcugcuucgaguucuaccacaagugcgacaacaccugcauggaguccgucaagaacggcaccuacgacuaccccaaguacuccgaggaggccaagcucaaccgcgaggagaucgacggcgucaagcucgaguccacccgcaucuaccagauccucgccaucuacuccaccgucgccuccucccucguccucgucgucucccucggcgccaucuccuucuggaugugcuccaacggcucccuccagugccgcaucugcaucuga

SEQ ID NO: 104471 - RNA, 1701 nt, Artificial Sequence; identical to SEQ ID NO: 101260
  derived and/or modified CDS sequence (opt2) from hemagglutinin__InfluenzaA__AFG31310

SEQ ID NO: 104472 - RNA, 1701 nt, Artificial Sequence; identical to SEQ ID NO: 98705
  derived and/or modified CDS sequence (opt2) from hemagglutinin__InfluenzaA__AFG31323

SEQ ID NO: 104473 - RNA, 1701 nt, Artificial Sequence; identical to SEQ ID NO: 98705
  derived and/or modified CDS sequence (opt2) from hemagglutinin__InfluenzaA__AFG31333

SEQ ID NO: 104474 - RNA, 1701 nt, Artificial Sequence; identical to SEQ ID NO: 98705
  derived and/or modified CDS sequence (opt2) from hemagglutinin__InfluenzaA__AFG31343

SEQ ID NO: 104475 - RNA, 1701 nt, Artificial Sequence; identical to SEQ ID NO: 98705
  derived and/or modified CDS sequence (opt2) from hemagglutinin__InfluenzaA__AFG31353

SEQ ID NO: 104476 - RNA, 1701 nt, Artificial Sequence; identical to SEQ ID NO: 98705
  derived and/or modified CDS sequence (opt2) from hemagglutinin__InfluenzaA__AFG31363

SEQ ID NO: 104477 - RNA, 1701 nt, Artificial Sequence; identical to SEQ ID NO: 98705
  derived and/or modified CDS sequence (opt2) from hemagglutinin__InfluenzaA__AFG31376

SEQ ID NO: 104478 - RNA, 1701 nt, Artificial Sequence; identical to SEQ ID NO: 98705
  derived and/or modified CDS sequence (opt2) from hemagglutinin__InfluenzaA__AFG31386

SEQ ID NO: 104479 - RNA, 1701 nt, Artificial Sequence; identical to SEQ ID NO: 98705
  derived and/or modified CDS sequence (opt2) from hemagglutinin__InfluenzaA__AFG31396

SEQ ID NO: 104480 - RNA, 1701 nt, Artificial Sequence; identical to SEQ ID NO: 98705
  derived and/or modified CDS sequence (opt2) from hemagglutinin__InfluenzaA__AFG31406

SEQ ID NO: 104481 - RNA, 1701 nt, Artificial Sequence; identical to SEQ ID NO: 98705
  derived and/or modified CDS sequence (opt2) from hemagglutinin__InfluenzaA__AFG31416

SEQ ID NO: 104482 - RNA, 1701 nt, Artificial Sequence; identical to SEQ ID NO: 98705
  derived and/or modified CDS sequence (opt2) from hemagglutinin__InfluenzaA__AFG31426

SEQ ID NO: 104483 - RNA, 1701 nt, Artificial Sequence; identical to SEQ ID NO: 98705
  derived and/or modified CDS sequence (opt2) from hemagglutinin__InfluenzaA__AFG31436

SEQ ID NO: 104484 - RNA, 1701 nt, Artificial Sequence; identical to SEQ ID NO: 98705
  derived and/or modified CDS sequence (opt2) from hemagglutinin__InfluenzaA__AFG31446

SEQ ID NO: 104485 - RNA, 1701 nt, Artificial Sequence; identical to SEQ ID NO: 98705
  derived and/or modified CDS sequence (opt2) from hemagglutinin__InfluenzaA__AFG31456

SEQ ID NO: 104486 - RNA, 1701 nt, Artificial Sequence; identical to SEQ ID NO: 98705
  derived and/or modified CDS sequence (opt2) from hemagglutinin__InfluenzaA__AFG31466

SEQ ID NO: 104487 - RNA, 1701 nt, Artificial Sequence; identical to SEQ ID NO: 99807
  derived and/or modified CDS sequence (opt2) from hemagglutinin__InfluenzaA__AFG31486

SEQ ID NO: 104488 - RNA, 1701 nt, Artificial Sequence; identical to SEQ ID NO: 98705
  derived and/or modified CDS sequence (opt2) from hemagglutinin__InfluenzaA__AFG31496

SEQ ID NO: 104489 - RNA, 1701 nt, Artificial Sequence; identical to SEQ ID NO: 98705
  derived and/or modified CDS sequence (opt2) from hemagglutinin__InfluenzaA__AFG31506

SEQ ID NO: 104490 - RNA, 1701 nt, Artificial Sequence; identical to SEQ ID NO: 98705
  derived and/or modified CDS sequence (opt2) from hemagglutinin__InfluenzaA__AFG31516

SEQ ID NO: 104491 - RNA, 1701 nt, Artificial Sequence; identical to SEQ ID NO: 98796
  derived and/or modified CDS sequence (opt2) from hemagglutinin__InfluenzaA__AFG31526

SEQ ID NO: 104492 - RNA, 1701 nt, Artificial Sequence; identical to SEQ ID NO: 98705
  derived and/or modified CDS sequence (opt2) from hemagglutinin__InfluenzaA__AFG31536

SEQ ID NO: 104493 - RNA, 1701 nt, Artificial Sequence; identical to SEQ ID NO: 101260
  derived and/or modified CDS sequence (opt2) from hemagglutinin__InfluenzaA__AFG31546

SEQ ID NO: 104494 - RNA, 1701 nt, Artificial Sequence; identical to SEQ ID NO: 101260
  derived and/or modified CDS sequence (opt2) from hemagglutinin__InfluenzaA__AFG31556

SEQ ID NO: 104495 - RNA, 1701 nt, Artificial Sequence; identical to SEQ ID NO: 98705
  derived and/or modified CDS sequence (opt2) from hemagglutinin__InfluenzaA__AFG31566

SEQ ID NO: 104496 - RNA, 1701 nt, Artificial Sequence; identical to SEQ ID NO: 98947
  derived and/or modified CDS sequence (opt2) from hemagglutinin__InfluenzaA__AFG31586

SEQ ID NO: 104497 - RNA, 1701 nt, Artificial Sequence; identical to SEQ ID NO: 98947
  derived and/or modified CDS sequence (opt2) from hemagglutinin__InfluenzaA__AFG31596

SEQ ID NO: 104498 - RNA, 1701 nt, Artificial Sequence; identical to SEQ ID NO: 98947
  derived and/or modified CDS sequence (opt2) from hemagglutinin__InfluenzaA__AFG31606

SEQ ID NO: 104499 - RNA, 1701 nt, Artificial Sequence; identical to SEQ ID NO: 98947
  derived and/or modified CDS sequence (opt2) from hemagglutinin__InfluenzaA__AFG31616

SEQ ID NO: 104500 - RNA, 1701 nt, Artificial Sequence; identical to SEQ ID NO: 98947
  derived and/or modified CDS sequence (opt2) from hemagglutinin__InfluenzaA__AFG31626

SEQ ID NO: 104501 - RNA, 1701 nt, Artificial Sequence; identical to SEQ ID NO: 98705
  derived and/or modified CDS sequence (opt2) from hemagglutinin__InfluenzaA__AFG31636

SEQ ID NO: 104502 - RNA, 1701 nt, Artificial Sequence; identical to SEQ ID NO: 98705
  derived and/or modified CDS sequence (opt2) from hemagglutinin__InfluenzaA__AFG31646

SEQ ID NO: 104503 - RNA, 1701 nt, Artificial Sequence; identical to SEQ ID NO: 99869
  derived and/or modified CDS sequence (opt2) from hemagglutinin__InfluenzaA__AFG31656

SEQ ID NO: 104504 - RNA, 1701 nt, Artificial Sequence; identical to SEQ ID NO: 99869
  derived and/or modified CDS sequence (opt2) from hemagglutinin__InfluenzaA__AFG31666

SEQ ID NO: 104505 - RNA, 1701 nt, Artificial Sequence
  derived and/or modified CDS sequence (opt2) from hemagglutinin__InfluenzaA__AFG71865
augaagaccaucaucgcccucuccuacaucuucugccucgcccucggccaggaccuccccggcaacgacaacuccaccgccacccucugccucggccaccacgccguccccaacggcacccucgucaagaccaucaccaacgaccagaucgaggucaccaacgccaccgagcucguccaguccuccuccaccggcaagaucugcaacaacccccaccgcauccucgacggcaucgacugcacccucaucgacgcccuccucggcgacccccacugcgacgucuuccagaacgagaccugggaccucuucgucgagcgcuccaaggccuucuccaacugcuaccccuacgacguccccgacuacgccucccuccgcucccucgucgccuccuccggcacccucgaguucaucaccgagggcuucaccuggaccggcgucacccagaacggcggcuccaacgccugcaagcgcggccccggcaucggcuucuucucccgccucaacuggcucaccaaguccggcuccaccuaccccguccucaacgucaccaugcccaacaacgacaacuucgacaagcucuacaucuggggcguccaccaccccuccaccaaccaggagcagaccucccucuacguccaggccuccggccgcgucaccgucuccacccgccgcucccagcagaccaucauccccaacaucggcucccgccccuggguccgcggccucuccucccgcaucuccaucuacuggaccaucgucaagcccggcgacguccucgucaucaacuccaacggcaaccucaucgccccccgcggcuacuucaagaugcgcaccggcaaguccuccaucaugcgcuccgacgcccccaucgacaccugcaucuccgagugcaucacccccaacggcuccauccccaacgacaagcccuuccagaacgucaacaagaucaccuacggcgccugccccaaguacgucaagcagaacacccucaagcucgccaccggcaugcgcaacguccccgagaagcagacccgcggccucuucggcgccaucgccggcuucaucgagaacggcugggagggcaugaucgacggcugguacggcuuccgccaccagaacuccgagggcaccggccaggccgccgaccucaaguccacccaggccgccaucgaccagaucaacggcaagcucaaccgcgucaucgagaagaccaacgagaaguuccaccagaucgagaaggaguucuccgaggucgagggccgcauccaggaccucgagaaguacgucgaggacaccaagaucgaccucugguccuacaacgccgagcuccucgucgcccucgagaaccagcacaccaucgaccucaccgacuccgagaugaacaagcucuucgagaagacccgccgccagcuccgcgagaacgccgaggacaugggcaacggcugcuucaagaucuaccacaagugcgacaacgccugcaucgaguccauccgcaacggcaccuacgaccacgacgucuaccgcgacgaggcccucaacaaccgcuuccagaucaagggcgucgagcucaaguccggcuacaaggacuggauccucuggaucuccuucgccaucuccugcuuccuccucugcgucguccuccucggcuucaucaugugggccugccagcgcggcaacauccgcugcaacaucugcaucuga

SEQ ID NO: 104506 - RNA, 1701 nt, Artificial Sequence; identical to SEQ ID NO: 97592
  derived and/or modified CDS sequence (opt2) from hemagglutinin__InfluenzaA__AFG71876

SEQ ID NO: 104507 - RNA, 1701 nt, Artificial Sequence
  derived and/or modified CDS sequence (opt2) from hemagglutinin__InfluenzaA__AFG71898
augaagaccaucaucgcccucuccuaccucuucugccucgccuucggccaggaccuccccggcaacgacaacuccaccgccacccucugccucggccaccacgccguccccaacggcacccucgucaagaccaucaccgacgaccagaucgaggucaccaacgccaccgagcucguccaguccuccuccaccggcaagaucugcaacaacccccaccgcauccucgacggcaucgacugcacccucaucgacgcccuccucggcgacccccacugcgacgucuuccagaacgagaccugggaccucuucgucgagcgcuccaaggccuucuccaacugcuaccccuacgacguccccgacuacgccucccuccgcucccucgucgccuccuccggcacccucgaguucaccaccgagggcuucaccuggaccggcgucacccagaacggcggcuccaacgccugcaagcgcggccccggcuccggcuucuucucccgccucaacuggcucaccaaguccggcuccaccuaccccguccucaacgucaccauguccaacaacgacaacuucgacaagcucuacaucuggggcguccaccaccccuccaccaaccaggagcagaccucccucuacguccaggccuccggccgcgucaccgucuccacccgccgcucccagcagaccaucauccccaacaucggcucccgccccuggguccgcggccucuccucccgcaucuccaucuacuggaccaucgucaagcccggcgacguccucgucaucaacuccaacggcaaccucaucgccccccgcggcuacuucaagaugcgcaccggcaaguccuccaucaugcgcuccgacgcccccaucgacaccugcgucuccgagugcaucacccccaacggcuccauccccaacgacaagcccuuccagaacgucaacaagaucaccuacggcgccugccccaaguacgucaagcagaacacccucaagcucgccaccggcaugcgcaacguccccgagaagcagacccgcggccucuucggcgccaucgccggcuucaucgagaacggcugggagggcaugaucgacggcugguacggcuuccgccaccagaacuccgagggcaccggccaggccgccgaccucaaguccacccaggccgccaucgaccagaucaacggcaagcucaaccgcgucaucgagaagaccaacgagaaguuccaccagaucgagaaggaguucuccgaggucgagggccgcauccaggaccucgagaaguacgucgaggacaccaagaucgaccucugguccuacaacgccgagcuccucgucgcccucgagaaccagcacaccaucgaccucaccgacuccgagaugaacaagcucuucgagaagacccgccgccagcuccgcgagaacgccgaggacaugggcaacggcugcuucaagaucuaccacaagugcgacaacgccugcaucgaguccauccgcaacggcaccuacgaccacgacgucuaccgcgacgaggcccucaacaaccgcuuccagaucaagggcgucgagcucaaguccggcuacaaggacuggauccucuggaucuccuucgccaucuccugcuuccuccucugcgucguccuccucggcuucaucaugugggccugccagcgcggcaacauccgcugcaacaucugcaucuga

SEQ ID NO: 104508 - RNA, 1701 nt, Artificial Sequence
  derived and/or modified CDS sequence (opt2) from hemagglutinin__InfluenzaA__AFG71920
augaagaccaucaucgcccucuccuacaucuucugccucgcccucggccaggaccuccccggcaacgacaacuccaccgccacccucugccucggccaccacgccguccccaacggcacccucgucaagaccaucaccaacgaccagaucgaggucaccaacgccaccgagcucguccaguccuccuccaccggcaagaucugcaacaacccccaccgcauccucgacggcaucaacugcacccucaucgacgcccuccucggcgacccccacugcgacgucuuccaggacgagaccugggaccucuucgucgagcgcuccaaggccuucuccaacugcuaccccuacgacguccccgacuacgccucccuccgcucccucaucgccuccuccggcacccucgaguucaucaccgagggcuucaccuggaccggcgucacccagaacggcggcuccaacgccugcaagcgcggccccggcuccggcuucuucucccgccucaacuggcucaccaaguccggcuccaccuaccccguccucaacgucaccaugcccaacaacgacaacuucgacaagcucuacaucuggggcguccaccaccccuccaccaaccaggagcagaccucccucuacguccaggccuccggccgcgucaccgucuccacccgccgcucccagcagaccaucauccccaacaucggcucccgccccuggguccgcggccucuccucccgcaucuccaucuacuggaccaucgucaagcccggcgacguccucgucaucaacuccaacggcaaccucaucgccccccgcggcuacuucaagaugcgcaccggcaaguccuccaucaugcgcuccgacgcccccaucgacaccugcaucuccgagugcaucacccccaacggcuccauccccaacgacaagcccuuccagaacgucaacaagaucaccuacggcgccugccccaaguacgucaagcagaacacccucaagcucgccaccggcaugcgcaacguccccgagaagcagacccgcggccucuucggcgccaucgccggcuucaucgagaacggcugggagggcaugaucgacggcugguacggcuuccgccaccagaacuccgagggcaccggccaggccgccgaccucaaguccacccaggccgccaucgaccagaucaacggcaagcucaaccgcgucaucgagaagaccaacgagaaguuccaccagaucgagaaggaguucuccgaggucgagggccgcauccaggaccucgagaaguacgucgaggacaccaagaucgaccucugguccuacaacgccgagcuccucgucgcccucgagaaccagcacaccaucgaccucaccgacuccgagaugaacaagcucuucgagaagacccgccgccagcuccgcgagaacgccgaggacaugggcaacggcugcuucaagaucuaccacaagugcgacaacgccugcaucgaguccauccgcaacggcaccuacgaccacgacgucuaccgcgacgaggcccucaacaaccgcuuccagaucaagggcgucgagcucaaguccggcuacaaggacuggauccucuggaucuccuucgccaucuccugcuuccuccucugcgucguccuccucggcuucaucaugugggccugccagcgcggcaacauccgcugcaacaucugcaucuga

SEQ ID NO: 104509 - RNA, 1701 nt, Artificial Sequence
  derived and/or modified CDS sequence (opt2) from hemagglutinin__InfluenzaA__AFG71931
augaagaccaucaucgcccucuccuacaucuucugccucgucaucggccaggaccuccccggcaacgagaacuccaccgccacccucugccucggccaccacgccguccccaacggcacccucgucaagaccaucaccaacgaccagaucgaggucaccaacgccaccgagcucguccaguccuccuccaccggcaagaucugcaacaacccccaccgcauccucgacggcaucgacugcacccucaucgacgcccuccucggcgacccccacugcgacggcuuccagaacgagaccugggaccucuucgucgagcgcuccaaggccuucuccaacugcuaccccuacgacguccccgacuacgccucccuccgcucccucgucgccuccuccggcacccucgaguucaucaccgagggcuucaccuggaccggcgucacccagaacggcggcuccaacgccugcaagcgcggccccggcaucggcuucuucucccgccucaacuggcucaccaaguccggcuccaccuaccccguccucaacgucaccaugcccaacaacgacaacuucgacaagcucuacaucuggggcguccaccaccccuccaccaaccaggagcagaccucccucuacguccaggccuccggccgcgucaccgucuccacccgccgcucccagcagaccaucauccccaacaucggcucccgccccuggguccgcggccucuccucccgcaucuccaucuacuggaccaucgucaagcccggcgacguccucgucaucaacuccaacggcaaccucaucgccccccgcggcuacuucaagaugcgcaccggcaaguccuccaucaugcgcuccgacgcccccaucgacaccugcaucuccgagugcaucacccccaacggcuccauccccaacgacaagcccuuccagaacgucaacaagaucaccuacggcgccugccccaaguacgucaagcagaacacccucaagcucgccaccggcaugcgcaacguccccgagaagcagacccgcggccucuucggcgccaucgccggcuucaucgagaacggcugggagggcaugaucgacggcugguacggcuuccgccaccagaacuccgagggcaccggccaggccgccgaccucaaguccacccaggccgccaucgaccagaucaacggcaagcucaaccgcgucaucgagaagaccaacgagaaguuccaccagaucgagaaggaguucuccgaggucgagggccgcauccaggaccucgagaaguacgucgaggacaccaagaucgaccucugguccuacaacgccgagcuccucgucgcccucgagaaccagcacaccaucgaccucaccgacuccgagaugaacaagcucuucgagaagacccgccgccagcuccgcgagaacgccgaggacaugggcaacggcugcuucaagaucuaccacaagugcgacaacgccugcaucgaguccauccgcaacggcaccuacgaccacgacgucuaccgcgacgaggcccucaacaaccgcuuccagaucaagggcgucgagcucaaguccggcuacaaggacuggauccucuggaucuccuucgccaucuccugcuuccuccucugcgucguccuccucggcuucaucaugugggccugccagcgcggcaacauccgcugcaacaucugcaucuga

SEQ ID NO: 104510 - RNA, 1701 nt, Artificial Sequence
  derived and/or modified CDS sequence (opt2) from hemagglutinin__InfluenzaA__AFG71942
augaagaccaucaucgcccucuccuacaucuucuaccucgcccucucccaggaccuccccggcaacgacaacuccaaggccacccucugccucggccaccacgccguccccaacggcacccucgucaagaccaucaccgacgaccagaccgaggucaccaacgccaccgagcucguccaguccuccuccaccggcaagaucugcaacaacccccaccgcauccucgacggcauggacugcacccucaucgacgcccuccucggcgacccccacugcgacgucuuccagaacgagaccugggaccucuucgucgagcgcuccaaggccuucuccaacugcuaccccuacgacguccccgacuacgccucccuccgcucccucgucgccuccuccggcacccucgaguucaucaccgagggcuucaccuggaccgaggucacccagaacggcggcuccaucgccugcaagcgcggccccgacuccggcuucuucucccgccucaacuggcucaccaaguccggccgcaccuaccccguccucaacgucaccaugcccaacaacgacaacuucgacaagcucuacaucuggggcguccaccaccccuccaccgaccaggagcagaccaaccucuacguccagaccuccggccgcgucaccgucuccacccgccgcucccagcagaccaucauccccaacaucggcucccgccccuggguccgcggccucuccucccgcaucuccaucuacuggaccaucgucaagcccggcgacguccucgucaucaacuccaacggcaaccucaucgccccccgcggcuacuucaagaugcgcaccggcaaguccuccaucaugcgcuccgacgcccccaucgacaccugcaucuccgagugcaucacccccaacggcuccauccccaacgacaagcccuuccagaacgucaacaagaucaccuacggcgccugccccaaguacgucaagcagaacacccucaagcucgccaccggcaugcgcaacguccccgagaagcagacccgcggccucuucggcgccaucgccggcuucaucgagaacggcugggagggcaugaucgacggcugguacggcuuccgccaccagaacuccgagggcaccggccaggccgccgaccucaaguccacccaggccgccaucgaccagaucaacggcaagcucaaccgcaucaucgagaagaccaacgagaaguuccaccagaucgagaaggaguucuccgaggucgagggccgcauccaggaccucgagaaguacgucgaggacaccaagaucgaccucugguccuacaacgccgagcuccucgucgcccucgagaaccagcacaccaucgaccucaccgacuccgagaugaacaagcucuucgagaagacccgccgccagcuccgcgagaacgccgaggacaugggcaacggcugcuucaagaucuaccacaagugcgacaacgccugcaucgaguccauccgcaacggcaccuacgaccacgacgucuaccgcgacgaggcccucaacaaccgcuuccagaucaagggcgucgagcucaaguccggcuacaaggacuggauccucuggaucuccuucgccaucuccugcuuccuccucugcgucguccuccucggcuucaucaugugggccugccagcgcggcaacauccgcugcaacaucugcaucuga

SEQ ID NO: 104511 - RNA, 1701 nt, Artificial Sequence
  derived and/or modified CDS sequence (opt2) from hemagglutinin__InfluenzaA__AFG71953
augaagaccaucaucgcccucuccuacaucuucugccucguccucggccaggaccuccccggcaacgacaaguccaccgccacccucugccucggccaccacgccguccccaacggcacccucgucaagaccaucaccaacgaccagaucgaggucaccaacgccaccgagcucguccaguccuccuccaccggcaagaucugcaacaacccccaccgcauccucgacggcaucgacugcacccucaucgacgcccuccucggcgacccccacugcgacggcuuccagaacgagaccugggaccucuucgucgagcgcuccaaggccuucuccaacugcuaccccuacgacguccccgacuacgccucccuccgcucccucgucgccuccuccggcacccucgaguucaucaccgagggcuucaccuggaccggcgucacccagaacggcggcuccaacgccugcaagcgcggccccggcuccggcuucuucucccgccucaacuggcucaccaaguccggcuccaccuaccccguccucaacgucaccaugcccaacaacgacaacuucgacaagcucuacaucuggggcguccaccaccccuccaccaaccaggagcagaccucccucuacguccaggccuccggccgcgucaccgucuccaccaagcgcucccagcagaccaucauccccaacaucggcucccgccccuggguccgcggccccuccucccgcaucuccaucuacuggaccaccgucaagcccggcgacauccucaucaucaacuccaacggcaaccucaucgccccccgcggcuacuucaagaugcgcaccggcaaguccuccaucaugcgcuccgacgcccccaucggcgccugcaucuccgagugcaucacccccaacggcuccauccccaacgacaagcccuuccagaacgucaacaagaucaccuacggcgccugccccaaguacgucaagcagaacacccucaagcucgccaccggcaugcgcaacguccccgagaagcagacccgcggccucuucggcgccaucgccggcuucaucgagaacggcugggagggcaugaucgacggcugguacggcuuccgccaccagaacuccgagggcaccggccaggccgccgaccucaaguccacccaggccgccaucgaccagaucaacggcaagcucaaccgcgucaucgagaagaccaacgagaaguuccaccagaucgagaaggaguucuccgaggucgagggccgcauccaggaccucgagaaguacgucgaggacaccaagaucgaccucugguccuacaacgccgagcuccucgucgcccucgagaaccagcacaccaucgaccucaccgacuccgagaugaacaagcucuucgagaagacccgccgccagcuccgcgagaacgccgaggacaugggcaacggcugcuucaagaucuaccacaagugcgacaacgccugcaucggcuccauccgcaacggcaccuacgaccacgacgucuaccgcgacgaggcccucaacaaccgcuuccagaucaagggcgucgagcucaaguccggcuacaaggacuggauccucuggaucuccuucgccaucuccugcuuccuccucugcgucguccuccucggcgucaucaugugggccugccagaagggcaacauccgcugcaacaucugcaucuga

SEQ ID NO: 104512 - RNA, 1701 nt, Artificial Sequence; identical to SEQ ID NO: 96341
  derived and/or modified CDS sequence (opt2) from hemagglutinin__InfluenzaA__AFG71975

SEQ ID NO: 104513 - RNA, 1701 nt, Artificial Sequence
  derived and/or modified CDS sequence (opt2) from hemagglutinin__InfluenzaA__AFG71996
augaagaccaucaucgcccucuccuacaucuucugccucguccucggccagaacuuccccggcaacgacaacuccaccgccacccucugccucggccaccacgccguccccaacggcacccucgucaagaccaucaccaacgaccagaucgaggucaccaacgccaccgagcucguccaguccuccuccaccggcaagaucugcaacaacccccaccgcauccucgacggcaucgacugcacccucaucgacgcccuccucggcgacccccacugcgacggcuuccagaacgagaccugggaccucuucgucgagcgcuccaaggccuucuccaacugcuaccccuacgacguccccgacuacgccucccuccgcucccucgucgccuccuccggcacccucgaguucaucaacgagggcuucaccuggaccggcgucacccagaacggcggcuccaacgccugcaagcgcggccccgacaucggcuucuucucccgccucaacuggcucuacaaguccggcaacaccuaccccguccucaacgucuccaugcccaacaacgacaacuucgacaagcucuacaucuggggcguccaccaccccuccaccgaccaggagcagaccucccucuacguccaggccuccggccgcgucaccgucuccaccaagcgcucccagcagaccaucauccccaacaucggcucccgccccuggguccgcggccucuccucccgcaucuccaucuacuggaccaucgucaagcccggcgacauccucgucaucaacuccaacggcaaccucaucgccccccgcggcuacuucaagaugcgcaccggcaaguccuccaucaugcgcuccgacgccuccaucggcaccugcaucuccgagugcaucacccccaacggcuccauccccaacgacaagcccuuccagaacgucaacaagaucaccuacggcgccugccccaaguacgucaagcagaacacccucaagcucgccaccggcaugcgcaacguccccgagaagcagacccgcggcaucuucggcgccaucgccggcuucaucgagaacggcugggagggcaugaucgacggcugguacggcuuccgccaccagaacuccgagggcaccggccaggccgccgaccucaaguccacccaggccgccaucgaccagaucaacggcaagcucaaccgcaucaucgagaagaccaacgagaaguuccaccagaucgagaaggaguucuccgaggucgagggccgcauccaggaccucgagaaguacgucgaggacaccaagaucgaccucugguccuacaacgccgagcuccucgucgcccucgagaaccagcacaccaucgaccucaccgacuccgagaugaacaagcucuucgagaagacccgccgccagcuccgcgagaacgccgaggacaugggcaacggcugcuucaagaucuaccacaagugcgacaacgccugcaucggcuccauccgcaacggcaccuacgaccacgacgucuaccgcgacgaggcccucaacaaccgcuuccagaucaagggcgucgagcucaaguccggcuacaaggacuggauccucuggaucuccuucgccaucuccugcuuccuccucugcgucguccuccucggcuucaucaugugggccugccagaagggcaacauccgcugcaacaucugcaucuga

SEQ ID NO: 104514 - RNA, 1701 nt, Artificial Sequence
  derived and/or modified CDS sequence (opt2) from hemagglutinin__InfluenzaA__AFG72007
augaagaccaucaucgcccucuccuacaucuucugccucguccucggccgcgacuucccccgcaacgacaacuccaccgccacccucugccucggccaccacgccguccccaacggcacccucgucaagaccaucaccaacgaccagaucgaggucaccaacgccaccgagcucguccaguccuccuccaccggcaagaucugcaacaacccccaccgcauccucgacggcauggacugcacccucaucgacgcccuccucggcgacccccacugcgacggccuccagaacggcaccugggaccucuucgucgagcgcuccaaggccuucuccaacugcuaccccuacgacguccccgacuacgccucccuccgcucccucgucgccuccuccggcacccucgaguucaucaacgagggcuucaccuggaccggcgucacccagaacggcggcuccaacgccugcaagcgcggccccgacuccggcuucuucucccgccucaacuggcucuacaaguccggcaacaccuaccccguccucaacgucaccaugcccaacaacgacaacuucgacaagcucuacaucuggggcguccaccaccccuccaccgaccaggaccagaccucccucuacguccaggccuccggccgcgucaccgucuccaccaagcgcucccagcagaccgucauccccaacaucggcccccgccccuggguccgcggccucuccucccgcaucuccaucuacuggaccaucgucaagcccggcgacauccuccucaucaacuccaacggcaaccucaucgccccccgcggcuacuucaagaugcgcaccggcaaguccuccaucaugcgcuccgacgcccccaucggcaccugcaucuccgagugcaucacccccaacggcuccauccccaacgacaagcccuuccagaacgucaacaagaucaccuacggcgccugccccaaguacgucaagcagaacacccucaagcucgccaccggcaugcgcaacguccccgagaagcagacccgcggcaucuucggcgccaucgccggcuucaucgagaacggcugggagggcaugaucgacggcugguacggcuuccgccaccagaacuccgagggcaccggccaggccgccgaccucaaguccacccaggccgccaucgaccagaucaacggcaagcucaaccgcgucaucgagaagaccaacgagaaguuccaccagaucgagaaggaguucuccgaggucgagggccgcauccaggaccucgagaaguacgucgaggacaccaagaucgaccucugguccuacaacgccgagcuccucgucgcccucgagaaccagcacaccaucgaccucaccgacuccgagaugaacaagcucuucgagaagacccgccgccagcuccgcgagaacgccgaggacaugggcaacggcugcuucaagaucuaccaccgcugcgacaacgccugcaucggcuccauccgcaacggcaccuacgaccacgacgucuaccgcgacgaggcccucaacaaccgcuuccagaucaagggcgucgagcucaaguccggcuacaaggacuggauccucuggaucuccuucgccaucuccugcuuccuccucugcgucguccuccucggcuucaucaugugggccugccagaagggcaacauccgcugcaacaucugcaucuga

SEQ ID NO: 104515 - RNA, 1701 nt, Artificial Sequence
  derived and/or modified CDS sequence (opt2) from hemagglutinin__InfluenzaA__AFG72029
augaagaccaucaucgcccucuccuacaucuucugccucgucuucggccagaaccuccccggcaacgacaacuccaccgccacccucugccucggccaccacgccguccccaacggcacccucgucaagaccaucaccaacgaccagaucgaggucaccaacgccaccgagcucguccaguccuccuccaccggccgcaucugcgacuccccccaccgcauccucgacggcaagaacugcacccucaucgacgcccuccucggcgacccccacugcgacggcuuccagaacgagaagugggaccucuucgucgagcgcuccaaggccuucuccaacugcuaccccuacgacguccccgacuacgccucccuccgcucccucaucgccuccuccggcacccucgaguucaucaacgagggcuucaacuggaccggcgucacccaguccggcggcuccuacgccugcaagcgcggcuccgacaacuccuucuucucccgccucaacuggcucuacgaguccgaguccaaguaccccguccucaacgucaccaugcccaacaacggcaacuucgacaagcucuacaucuggggcguccaccaccccuccaccgacaaggagcagaccaaccucuacguccgcgccuccggccgcgucaccgucuccaccaagcgcucccagcagaccaucauccccaacaucggcucccgccccuggguccgcggccucuccucccgcaucuccaucuacuggaccaucgucaagcccggcgacauccuccucaucaacuccaacggcaaccucaucgccccccgcggcuacuucaagauccgcaccggcaaguccuccaucaugcgcuccgacgcccccaucggcaccugcuccuccgagugcaucacccccaacggcuccauccccaacgacaagcccuuccagaacgucaacaagaucaccuacggcgccugccccaaguacgucaagcagaacacccucaagcucgccaccggcaugcgcaacguccccgagaagcagacccgcggcaucuucggcgccaucgccggcuucaucgagaacggcugggagggcauggucgacggcugguacggcuuccgccaccagaacuccgagggcaccggccaggccgccgaccucaaguccacccaggccgccaucgaccagaucaacggcaagcucaaccgcgucaucgagaagaccaacgagaaguuccaccagaucgagaaggaguucuccgaggucgagggccgcauccaggaccucgagaaguacgucgaggacaccaagaucgaccucugguccuacaacgccgagcuccucgucgcccucgagaaccagcacaccaucgaccucaccgacuccgagaugaacaagcucuucgagaagacccgccgccagcuccgcgagaacgccgaggacaugggcaacggcugcuucaagaucuaccacaagugcgacaacgccugcaucggcuccauccgcaacggcaccuacgaccacgacgucuaccgcgacgaggcccucaacaaccgcuuccagaucaagggcgucgagcucaaguccggcuacaaggacuggauccucuggaucuccuucgccaucuccugcuuccuccucugcgucguccuccucggcuucaucaugugggccugccagaagggcaacauccgcugcaacaucugcaucuga

SEQ ID NO: 104516 - RNA, 1701 nt, Artificial Sequence
  derived and/or modified CDS sequence (opt2) from hemagglutinin__InfluenzaA__AFG72040
augaagaccaucaucgcccucuccuacaucuucugccucgucuucgcccagaaccuccccggcaacgacaacuccaccgccacccucugccucggccaccacgccguccccaacggcacccucgucaagaccaucaccaacgaccagaucgaggucaccaacgccaccgagcucguccaguccuccuccaccggccgcaucugcgacuccccccaccgcauccucgacggcaagaacugcacccucgucgacgcccuccucggcgacccccacugcgacggcuuccagaacgagaagugggaccucuucgucgagcgcuccaaggccuucuccaacugcuaccccuacgacguccccgacuacgccucccuccgcucccucgucgccuccuccggcacccucgaguucaucaacgaguccuucaacuggaccggcgucacccaguccggcggcuccuacgccugcaagcgcggcuccgacaacuccuucuucucccgccucaacuggcucuacgaguccgaguccaaguaccccguccucaacgucaccaugcccaacaacggcaacuucgacaagcucuacaucuggggcguccaccaccccuccaccgacaaggagcagaccaaccucuacguccgcgccuccggccgcgucaccgucuccaccaagcgcucccagcagaccaucauccccaacaucggcucccgccccuggguccgcggccucuccucccgcaucuccaucuacuggaccaucgucaagcccggcgacauccuccucaucaacuccaacggcaaccucaucgccccccgcggcuacuucaagauccgcaccggcaaguccuccaucaugcgcuccgacgcccccaucggcaccugcuccuccgagugcaucacccccaacggcuccauccccaacgacaagcccuuccagaacgucaacaagaucaccuacggcgccugccccaaguacgucaagcagaacacccucaagcucgccaccggcaugcgcaacguccccgagaagcagacccgcggcaucuucggcgccaucgccggcuucaucgagaacggcugggagggcauggucgacggcugguacggcuuccgccaccagaacuccgagggcaccggccaggccgccgaccucaaguccacccaggccgccaucgaccagaucaacggcaagcucaaccgcgucaucgagaagaccaacgagaaguuccaccagaucgagaaggaguucuccgaggucgagggccgcauccaggaccucgagaaguacgucgagaacaccaagaucgaccucugguccuacaacgccgagcuccucgucgcccucgagaaccagcacaccaucgaccucaccgacuccgagaugaacaagcucuucgagaagacccgccgccagcuccgcgagaacgccgaggacaugggcaacggcugcuucaagaucuaccacaagugcgacaacgccugcaucggcuccauccgcaacggcaccuacgaccacgacgucuaccgcgacgaggcccucaacaaccgcuuccagaucaagggcgucgagcucaaguccggcuacaaggacuggauccucuggaucuccuucgccaucuccugcuuccuccucugcgucguccuccucggcuucaucaugugggccugccagaagggcaacauccgcugcaacaucugcaucuga

SEQ ID NO: 104517 - RNA, 1701 nt, Artificial Sequence
  derived and/or modified CDS sequence (opt2) from hemagglutinin__InfluenzaA__AFG72051
augaagaccaucaucgcccucuccuacaucuucugccucgucuucgcccagaaccuccccggcaacgacaacuccaccgccacccucugccucggccaccacgccguccccaacggcacccucgucaagaccaucaccaacgaccagaucgaggucaccaacgccaccgagcucguccaguccuccuccaccggccgcaucugcgacuccccccaccgcauccucgacggcaagaacugcacccucgucgacgcccuccucggcgacccccacugcgacggcuuccagaacgagaagugggaccucuucgucgagcgcuccaaggccuucuccaacugcuaccccuacgacguccccgacuacgccucccuccgcucccucgucgccuccuccggcacccucgaguucaucaacgaguccuucaacuggaccggcgucacccaguccggcggcuccuacgccugcaagcgcggcuccgacaacuccuucuucucccgccucaacuggcucuacgaguccgaguccaaguaccccguccucaacgucaccaugcccaacaacggcaacuucgacaagcucuacaucuggggcguccaccaccccuccaccgacaaggagcagaccaaccucuacguccgcgccuccggccgcgucaccgucuccaccaagcgcaaccagcagaccgucauccccaacaucggcucccgccccuggguccgcggccucuccucccgcaucuccaucuacuggaccaucgucaagcccggcgacauccuccucaucaacuccaacggcaaccucaucgccccccgcggcuacuucaagauccacaacggcaaguccuccaucaugcgcuccgacgcccccaucggcaccugcuccuccgagugcaucacccccaacggcuccauccccaacgacaagcccuuccagaacgucaacaagaucaccuacggcgccugccccaaguacgucaagcagaacacccucaagcucgccaccggcaugcgcaacguccccgagaagcagacccgcggcaucuucggcgccaucgccggcuucaucgagaacggcugggagggcauggucgacggcugguacggcuuccgccaccgcaacuccgagggcaccggccaggccgccgaccucaaguccacccaggccgccaucgaccagaucaacggcaagcucaaccgcgucaucgagaagaccaacgagaaguuccaccagaucgagaaggaguucuccgaggucgagggccgcauccaggaccucgagaaguacgucgaggacaccaagaucgaccucugguccuacaacgccgagcuccucgucgcccucgagaaccagcacaccaucgaccucaccgacuccgagaugaacaagcucuucgagaagacccgccgccagcuccgcgagaacgccgaggacaugggcaacggcugcuucaagaucuaccacaagugcgacaacgccugcaucggcuccauccgcaacggcaccuacgaccacgacgucuaccgcgacgaggcccucaacaaccgcuuccagaucaagggcgucgagcucaaguccggcuacaaggacuggauccucuggaucuccuucgccaucuccugcuuccuccucugcgucguccuccucggcuucaucaugugggccugccagaagggcaacauccgcugcaacaucugcaucuga

SEQ ID NO: 104518 - RNA, 1701 nt, Artificial Sequence
  derived and/or modified CDS sequence (opt2) from hemagglutinin__InfluenzaA__AFG72085
augaagaccaucaucgcccucuccuacaucuucugccucgucuucgcccagaagcuccccggcaacgacaacuccaccgccacccucugccucggccaccacgccguccccaacggcacccucgucaagaccaucaccaacgaccagaucgaggucaccaacgccaccgagcucguccaguccuccuccaccggccgcaucugcgacuccccccaccgcauccucgacggcaagaacugcacccucaucgacgcccuccucggcgacccccacugcgacggcuuccagaacgagaagugggaccucuucgucgagcgcuccaaggccuacuccaacugcuaccccuacgacguccccgacuacgccucccuccgcucccucgucgccuccuccggcacccucgaguucaucaacgaggacuucaacuggaucggcgucacccaguccggcggcuccugcgccugcaagcgcggcuccgucaacuccuucuucucccgccucaacuggcuccacgaguccgagcagaaguaccccgcccucaacgucaccaugcccaacaacggcaaguucgacaagcucuacaucuggggcguccaccaccccuccaccgaccgcgagcagaccaaccucuacguccgcgccuccggccgcgucaccgucuccaccaagcgcucccagcagaccgucauccccaacaucggcucccgccccuggguccgcggccucuccucccgcaucuccaucuacuggaccaucgucaagcccggcgacauccuccucaucaacuccaucggcaaccucaucgccccccgcggcuacuucaagauccgcaccggcaaguccuccaucaugcgcuccgacgcccccaucggcaccugcuccuccgagugcaucacccccaacggcuccauccccaacgacaagcccuuccagaacgucaacaagaucaccuacggcgccugcccccgcuacgucaagcagaacacccucaagcucgccaccggcaugcgcaacguccccgagaagcagacccgcggcaucuucggcgccaucgccggcuucaucgagaacggcugggagggcauggucgacggcugguacggcuuccgccaccagaacuccgagggcaccggccaggccgccgaccucaaguccacccaggccgccaucgaccagaucaacggcaagcucaaccgccucaucgagaagaccaacgagaaguuccaccagaucgagaaggaguucuccgaggucgagggccgcauccaggaccucgagaaguacgucgaggacaccaagaucgaccucugguccuacaacgccgagcuccucgucgcccucgagaaccagcacaccaucgaccucaccgacuccgagaugaacaagcucuucgagaagacccgcaagcagcuccgcgagaacgccgaggacaugggcaacggcugcuucaagaucuaccacaagugcgacaacgccugcaucggcuccauccgcaacggcaccuacgaccacgacgucuaccgcgacgaggcccucaacaaccgcuuccagaucaagggcgucgagcucaaguccggcuacaaggacuggauccucuggaucuccuucgccaucuccugcuuccuccucugcgucguccuccucggcuucaucaugugggccugccagaagggcaacauccgcugcaacaucugcaucuga

SEQ ID NO: 104519 - RNA, 1701 nt, Artificial Sequence
  derived and/or modified CDS sequence (opt2) from hemagglutinin__InfluenzaA__AFG72107
augaagaccaucaucgcccucuccuacaucuucugccucgucuucgcccagaagcuccccggcaacgacaacuccaccgccacccucugccucggccaccacgccguccccaacggcacccucgucaagaccaucaccaacgaccagaucgaggucaccaacgccaccgagcucguccaguccuccuccaccggccgcaucugcgacuccccccaccgcauccucgacggcaagaacugcacccucaucgacgcccuccucggcgacccccacugcgacggcuuccagaacgagaagugggaccucuucgucgagcgcuccaaggccuucuccaacugcuaccccuacgacguccccgacuacgccucccuccgcucccucaucgccuccuccggcacccucgaguucaucaacgaggaguucaacuggaccggcgucacccagaacggcggcuccuacgccugcaagcgcggcuccgucaacuccuucuucucccgccucaacuggcuccacgaguccgaguacaaguaccccgcccucaacgucaccaugcccaacaacggccgcuucgacaagcucuacaucuggggcguccaccaccccuccaccgaccgcgagcagaccaaccucuacguccgcgccuccggccgcgucaccgucuccaccaagcgcucccagcagaccgucauccccaacaucggcccccgccccuggguccgcggccucuccucccgcaucuccaucuacuggaccaucgucaagcccggcgacauccuccucaucaacuccaccggcaaccucaucgccccccgcggcuacuucaagauccacaccggcaaguccuccaucaugcgcuccgacgcccccaucggcaccugcuccuccgagugcaucacccccaacggcuccauccccaacgacaagcccuuccagaacgucaacaagaucaccuacggcgccugcccccgcuacgucaagcagaacacccucaagcucgccaccggcaugcgcaacguccccgagaagcagacccgcggcaucuucggcgccaucgccggcuucaucgagaacggcugggagggcauggucgacggcugguacggcuuccgccaccagaacuccgagggcaccggccaggccgccgaccucaaguccacccaggccgccaucgaccagaucaacggcaagcucaaccgccucaucgagaagaccaacgagaaguuccaccagaucgagaaggaguucuccgaggucgagggccgcauccaggaccucgagaaguacgucgaggacaccaagaucgaccucugguccuacaacgccgagcuccucgucgcccucgagaaccagcacaccaucgaccucaccgacuccgagaugaacaagcucuucgagaagacccgcaagcagcuccgcgagaacgccgaggacaugggcaacggcugcuucaagaucuaccacaagugcgacaacgccugcaucggcuccauccgcaacggcaccuacgaccacgacgucuaccgcgacgaggccgucaacaaccgcuuccagaucaagggcgucgagcucaaguccggcuacaaggacuggauccucuggaucuccuucgccaucuccugcuuccuccucugcgucauccuccucggcuucaucaugugggccugccagaagggcaacauccgcugcaacaucugcaucuga

SEQ ID NO: 104520 - RNA, 1701 nt, Artificial Sequence
  derived and/or modified CDS sequence (opt2) from hemagglutinin__InfluenzaA__AFG72118
augaagaccaucaucgcccucuccuacaucuucugccucgucuucgcccagaagcuccccggcaacgacaacuccaccgccacccucugccucggccaccacgccguccccaacggcacccucgucaagaccaucaccaacgaccagaucgaggucaccaacgccaccgagcucguccagaacuccuccaccggccgcaucugcaacuccccccaccgcauccucgacggcaagaacugcacccucaucgacgcccuccucggcgacccccacugcgacggcuuccagaacaaggagugggaccucuucgucgagcgcuccaaggccuacuccaacugcuaccccuacgacguccccgacuacgccucccuccgcucccucgucgccuccuccggcacccucgaguucaucaacgaggacuucaacuggaccggcgucgcccaguccggcggcuccuacgccugcaagcgcggcuccgucaacuccuucuucucccgccucaacuggcuccacgaguccgaguacaaguaccccgcccucaacgucaccaugcccaacaacggcaaguucgacaagcucuacaucuggggcguccaccaccccuccaccgaccgcgagcagaccaaccucuacguccgcgccuccggccgcgucaccgucuccaccaagcgcucccagcagaccgucauccccaacaucggcucccgccccuggguccgcggccucuccucccgcaucuccaucuacuggaccaucgucaagcccggcgacauccuccucaucaacuccaccggcaaccucaucgccccccgcggcuacuucaagauccgcaccggcaaguccuccaucaugcgcuccgacgcccccaucggcaccugcuccuccgagugcaucacccccaacggcuccauccccaacgacaagcccuuccagaacgucaaccgcaucaccuacggcgccugcccccgcuacgucaagcagaacacccucaagcucgccaccggcaugcgcaacguccccgagcgccagacccgcggcaucuucggcgccaucgccggcuucaucgagaacggcugggagggcauggucgacggcugguacggcuuccgccaccagaacuccgagggcaccggccaggccgccgaccucaaguccacccaggccgccaucgaccagaucaacggcaagcucaaccgccucaucgagaagaccaacgagaaguuccaccagaucgagaaggaguucuccgaggucgagggccgcauccaggaccucgagaaguacgucgaggacaccaagaucgaccucugguccuacaacgccgagcuccucgucgcccucgagaaccagcacaccaucgaccucaccgacuccgagaugaacaagcucuucgagaagacccgcaagcagcuccgcgagaacgccgaggacaugggcaacggcugcuucaagaucuaccacaagugcgacaacgccugcaucggcuccauccgcaacggcaccuacaaccacgacgucuaccgcgacgaggcccucaacaaccgcuuccagaucaagggcgucgagcucaaguccggcuacaaggacuggauccucuggaucuccuucgccaucuccugcuuccuccucugcgucguccuccucggcuucaucaugugggccugccagaagggcaacauccgcugcaacaucugcaucuga

SEQ ID NO: 104521 - RNA, 1701 nt, Artificial Sequence
  derived and/or modified CDS sequence (opt2) from hemagglutinin__InfluenzaA__AFG72129
augaagaccaucaucgcccucuccuacaucuucugccucgucuucgcccagaagcuccccggcaacgacaacuccaccgccacccucugccucggccaccacgccguccccaacggcacccucgucaagaccaucaccaacgaccagaucgaggucaccaacgccaccgagcucguccaguccuccuccaccggccgcaucugcgacuccccccaccgcauccucgacggcaagaacugcacccucaucgacgcccuccucggcgacccccacugcgacggcuuccagaacaaggagugggaccucuucgucgagcgcuccaaggccuacuccaacugcuaccccuacgacguccccgacuacgccucccuccgcucccucgucgccuccuccggcacccucgaguucaucaacgaggacuucaacuggaccggcgucgcccaguccggcggcuccuacgccugcaagcgcggcuccgucaacuccuucuucucccgccucaacuggcuccacgaguccgaguacaaguaccccgcccucaacgucaccaugcccaacaacggcaaguucgacaagcucuacaucuggggcguccaccaccccuccaccgaccgcgagcagaccaaccucuacguccgcgccuccggccgcgucaccgucuccaccaagcgcucccagcagaccgucauccccaacaucggcucccgccccuggguccgcggccucuccuccggcaucuccaucuacuggaccaucgucaagcccggcgacauccuccucaucaacuccaccggcaaccucaucgccccccgcggcuacuucaagauccgcaccggcaaguccuccaucaugcgcuccgacgcccccaucggcaccugcuccuccgagugcaucacccccaacggcuccauccccaacgacaagcccuuccagaacgucaaccgcaucaccuacggcgccugcccccgcuacgucaagcagaacacccucaagcucgccaccggcaugcgcaacguccccgagaagcagacccgcggcaucuucggcgccaucgccggcuucaucgagaacggcugggagggcauggucgacggcugguacggcuuccgccaccagaacuccgagggcaccggccaggccgccgaccucaaguccacccaggccgccaucaaccagaucaacggcaagcucaaccgccucaucgagaagaccaacgagaaguuccaccagaucgagaaggaguucuccgaggucgagggccgcauccaggaccucgagaaguacgucgaggacaccaagaucgaccucugguccuacaacgccgagcuccucgucgcccucgagaaccagcacaccaucgaccucaccgacuccgagaugaacaagcucuucgagaagacccgcaagcagcuccgcgagaacgccgaggacaugggcaacggcugcuucaagaucuaccacaagugcgacaacgccugcaucggcuccauccgcaacggcaccuacgaccacgacgucuaccgcgacgaggcccucaacaaccgcuuccagaucaagggcgucgagcucaaguccggcuacaaggacuggauccucuggaucuccuucgccaucuccugcuuccuccucugcgucguccuccucggcuucaucaugugggccugccagaagggcaacauccgcugcaacaucugcaucuga

SEQ ID NO: 104522 - RNA, 1701 nt, Artificial Sequence
  derived and/or modified CDS sequence (opt2) from hemagglutinin__InfluenzaA__AFG72140
augaagaccaucaucgcccucuccuacaucuucugccucgucuucgcccagaagcuccccggcaacgacaacuccaccgccacccucugccucggccaccacgccguccccaacggcacccucgucaagaccaucaccaacgaccagaucgaggucaccaacgccaccgagcucguccaguccuccuccaccggccgcaucugcgacuccccccaccgcauccucgacggcaagaacugcacccucaucgacgcccuccucggcgacccccacugcgacggcuuccagaacaaggagugggaccucuucgucgagcgcuccaaggccuacuccaacugcuaccccuacgacguccccgacuacgccucccuccgcucccucgucgccuccuccggcacccucgaguucaucaacgaggacuucaacuggaccggcgucgcccaguccggcggcuccuacgccugcaagcgcggcuccgucaacuccuucuucucccgccucaacuggcuccacgaguccgaguacaaguaccccgcccucaacgucaccaugcccaacaacggcaaguucgacaagcucuacaucuggggcguccaccaccccuccaccgaccgcgagcagaccaaccucuacguccgcgcccucggccgcgucaccgucuccaccaagcgcucccagcagaccgucauccccaacaucggcucccgccccuggguccgcggccucuccucccgcaucuccaucuacuggaccaucgucaagcccggcgacauccuccucaucaacuccaccggcaaccucaucgccccccgcggcuacuucaagauccgcaccggcaaguccuccaucaugcgcuccgacgcccccaucggcaccugcuccuccgagugcaucacccccaacggcuccauccccaacaacaagcccuuccagaacgucaaccgcaucaccuacggcgccugcccccgcuacgucaagcagaacacccucaagcucgccaccggcaugcgcaacguccccgagaagcagacccgcggcaucuucggcgccaucgccggcuucaucgagaacggcugggagggcauggucgacggcugguacggcuuccgccaccagaacuccgagggcaccggccaggccgccgaccucaaguccacccaggccgccaucgaccagaucaacggcaagcucaaccgccucaucgagaagaccaacgagaaguuccaccagaucgagaaggaguucuccgaggucgagggccgcauccaggaccucgagaaguacgucgaggacaccaagaucgaccucugguccuacaacgccgagcuccucgucgcccucgagaaccagcacaccaucgaccucaccgacuccgagaugaacaagcucuucgagaagacccgcaagcagcuccgcgagaacgccgaggacaugggcaacggcugcuucaagaucuaccacaagugcgacaacgccugcaucggcuccauccgcaacggcaccuacgaccacgacgucuaccgcgacgaggcccucaacaaccgcuuccagaucaagggcgucgagcucaaguccggcuacaaggacuggauccucuggaucuccuucgccaucuccugcuuccuccucugcgucguccuccucggcuucaucaugugggccugccagaagggcaacauccgcugcaacaucugcaucuga

SEQ ID NO: 104523 - RNA, 1701 nt, Artificial Sequence
  derived and/or modified CDS sequence (opt2) from hemagglutinin__InfluenzaA__AFG72151
augaagaccaucaucgcccucuccuacauccucugccucgucuucgcccagaagcuccccggcaacgacaacuccaccgccacccucugccucggccaccacgccguccccaacggcacccucgucaagaccaucaccaacgaccagaucgaggucaccaacgccaccgagcucguccaguccuccuccaccggccgcaucugcgacuccccccaccgcauccucgacggcaagaacugcacccucaucgacgcccuccucggcgacccccacugcgacggcuuccagaacaaggagugggaccucuucgucgagcgcuccaaggccuacuccaacugcuaccccuacgacguccccgacuacgccucccuccgcucccucgucgccuccuccggcacccucgaguucaccaacgaggacuucaacuggaccggcgucgcccaguccggcgaguccuacgccugcaagcgcggcuccgucaaguccuucuucucccgccucaacuggcuccacgaguccgacuacaaguaccccgcccucaacgucaccaugcccaacaacggcaaguucgacaagcucuacaucuggggcguccaccaccccuccaccgaccgcgagcagaccucccucuacguccgcgccuccggccgcgucaccgucuccaccaagcgcucccagcagaccgucauccccaacaucggcucccgccccuggguccgcggccucuccucccgcaucuccaucuacuggaccaucgucaagcccggcgacauccuccucaucaacuccaccggcaaccucaucgccccccgcggcuacuucaagauccgcaccggcaaguccuccaucaugcgcuccgacgcccccaucggcaccugcuccuccgagugcaucacccccaacggcuccauccccaacgacaagcccuuccagaacgucaaccgcaucaccuacggcgccugcccccgcuacgucaagcagaacacccucaagcucgccaccggcaugcgcaacguccccgagaagcagacccgcggcaucuucggcgccaucgccggcuucaucgagaacggcugggagggcauggucgacggcugguacggcuuccgccaccagaacuccgagggcaccggccaggccgccgaccucaaguccacccaggccgccaucgaccagaucaacggcaagcucaaccgccucaucgagaagaccaacgagaaguuccaccagaucgagaaggaguucuccgaggucgagggccgcauccaggaccucgagaaguacgucgaggacaccaagaucgaccucugguccuacaacgccgagcuccucgucgcccucgagaaccagcacaccaucgaccucaccgacuccgagaugaacaagcucuucgagaagacccgcaagcagcuccgcgagaacgccgaggacaugggcaacggcugcuucaagaucuaccacaagugcgacaacgccugcaucggcuccauccgcaacggcaccuacgaccacgacgucuaccgcgacgaggcccucaacaaccgcuuccagaucaagggcgucgagcucaaguccggcuacaaggacuggauccucuggaucuccuucgccaucuccugcuuccuccucugcgucguccuccucggcuucaucaugugggccugccagaagggcaacauccgcugcaacaucugcaucuga

SEQ ID NO: 104524 - RNA, 1701 nt, Artificial Sequence
  derived and/or modified CDS sequence (opt2) from hemagglutinin__InfluenzaA__AFG72184
augaagaccaucaucgcccucuccuacauccucugccucgucuucgcccagaagcuccccggcaacgacaacuccaccgccacccucugccucggccaccacgccguccccaacggcacccucgucaagaccaucaccaacgaccagaucgaggucaccaacgccaccgagcucguccaguccuccuccaccggccgcaucugcgacuccccccaccgcauccucgacggcaagaacugcacccucaucgacgcccuccucggcgacccccacugcgacgacuuccagaacaaggagugggaccucuucgucgagcgcuccaaggccuacuccaacugcuaccccuacgacguccccgacuacgccucccuccgcucccucgucgccuccuccggcacccucgaguucaucaacgaggacuucaacuggaccggcgucgcccaguccggcgaguccuacgccugcaagcgcggcuccgucaaguccuucuucucccgccucaacuggcuccacgaguccgaguacaaguaccccgcccucaacgucaccaugcccaacaacgacaaguucgacaagcucuacaucuggggcguccaccaccccuccaccgagcgcgagcagaccucccucuacauccgcgccuccggccgcgucaccgucuccaccaagcgcucccagcagaccgucauccccaacaucggcucccgccccuggguccgcggccucuccucccgcaucuccaucuacuggaccaucgucaagcccggcgacauccuccucaucaacuccaccggcaaccucaucgccccccgcggcuacuucaagauccgcaccggcaaguccuccaucaugcgcuccgacgcccccaucggcaccugcuccuccgagugcaucacccccaacggcuccauccccaacgacaagcccuuccagaacgucaaccgcaucaccuacggcgccugcccccgcuacgucaagcagaacacccucaagcucgccaccggcaugcgcaacguccccgagaagcagacccgcggcaucuucggcgccaucgccggcuucaucgagaacggcugggagggcauggucgacggcugguacggcuuccgccaccagaacuccgagggcaccggccaggccgccgaccucaaguccacccaggccgccaucgaccagaucaacggcaagcucaaccgccucaucgagaagaccaacgagaaguuccaccagaucgagaaggaguucuccgaggucgagggccgcauccaggaccucgagaaguacgucgaggacaccaagaucgaccucugguccuacaacgccgagcuccucgucgcccucgagaaccagcacaccaucgaccucaccgacuccgagaugaacaagcucuucgagaagacccgcaagcagcuccgcgagaacgccgaggacaugggcaacggcugcuucaagaucuaccacaagugcgacaacgccugcaucggcuccauccgcaacggcaccuacgaccacgacgucuaccgcgacgaggcccucaacaaccgcuuccagaucaagggcgucgagcucaaguccggcuacaaggacuggauccucuggaucuccuucgccaucuccugcuuccuccucugcgucguccuccucggcuucaucaugugggccugccagaagggcaacauccgcugcaacaucugcaucuga

SEQ ID NO: 104525 - RNA, 1701 nt, Artificial Sequence; identical to SEQ ID NO: 104523
  derived and/or modified CDS sequence (opt2) from hemagglutinin__InfluenzaA__AFG72195

SEQ ID NO: 104526 - RNA, 1701 nt, Artificial Sequence
  derived and/or modified CDS sequence (opt2) from hemagglutinin__InfluenzaA__AFG72206
augaagaccaucaucgcccucuccuacauccucugccucgucuucgcccagaagcuccccggcaacgacaacuccaccgccacccucugccucggccaccacgccguccccaacggcacccucgucaagaccaucaccaacgaccagaucgaggucaccaacgccaccgagcucguccaguccuccuccaccggcaagaucugcgacuccccccaccgcauccucgacggcaagaacugcacccucaucgacgcccuccucggcgacccccacugcgacggcuuccagaacaaggagugggaccucuucgucgagcgcuccaaggccuacuccaacugcuaccccuacgacguccccgacuacgccucccuccgcucccucgucgccuccuccggcacccucgaguucaucaacgaggacuucaacuggaccggcgucgcccaguccggcgaguccuacgccugcaagcgcggcuccgucaaguccuucuucucccgccucaacuggcuccacgaguccgacuacaaguaccccgcccucaacgucaccaugcccaacaacggcaaguucgacaagcucuacaucuggggcguccaccaccccuccaccgaccgcgagcagaccucccucuacauccgcgccuccggccgcgucaccgucuccaccaagcgcucccagcagaccgucauccccaacaucggcucccgccccuggguccgcggccucuccucccgcaucuccaucuacuggaccaucgucaagcccggcgacauccuccucaucaacuccaccggcaaccucaucgccccccgcggcuacuucaagauccgcaccggcaaguccuccaucaugcgcuccgacgcccccaucggcaccugcuccuccgagugcaucacccccaacggcuccauccccaacgacaagcccuuccagaacgucaaccgcaucaccuacggcgccugcccccgcuacgucaagcagaacacccucaagcucgccaccggcaugcgcaacguccccgagaagcagacccgcggcaucuucggcgccaucgccggcuucaucgagaacggcugggagggcauggucgacggcugguacggcuuccgccaccagaacuccgagggcaccggccaggccgccgaccucaaguccacccaggccgccaucgaccagaucaacggcaagcucaaccgccucaucgagaagaccaacgagaaguuccaccagaucgagaaggaguucuccgaggucgagggccgcauccaggaccucgagaaguacgucgaggacaccaagaucgaccucugguccuacaacgccgagcuccucgucgcccucgagaaccagcacaccaucgaccucaccgacuccgagaugaacaagcucuucgagaagacccgcaagcagcuccgcgagaacgccgaggacaugggcaacggcugcuucaagaucuaccacaagugcgacaacgccugcaucggcuccauccgcaacggcaccuacgaccacgacgucuaccgcgacgaggcccucaacaaccgcuuccagaucaagggcgucgagcucaaguccggcuacaaggacuggauccucuggaucuccuucgccaucuccugcuuccuccucugcgucguccuccucggcuucaucaugugggccugccagaagggcaacauccgcugcaacaucugcaucuga

SEQ ID NO: 104527 - RNA, 1701 nt, Artificial Sequence
  derived and/or modified CDS sequence (opt2) from hemagglutinin__InfluenzaA__AFG72217
augaagaccaucaucgcccucuccuacauccucugccucgucuucgcccagaagcuccccggcaacgacaacuccaccgccacccucugccucggccaccacgccguccccaacggcacccucgucaagaccaucaccaacgaccagaucgaggucaccaacgccaccgagcucguccaguccuccuccaccggccgcaucugcgacuccccccaccgcauccucgacggcaagaacugcacccucaucgacgcccuccucggcgacccccacugcgacggcuuccagaacaaggagugggaccucuucgucgagcgcuccaaggccuacuccaacugcuaccccuacgacguccccgacuacgccucccuccgcucccucgucgccuccuccggcacccucgaguucaucaacgaggacuucaacuggaccggcgucgcccaggacggcggcuccuacgccugcaagcgcggcuccgucaacuccuucuucucccgccucaacuggcuccacaagcucgaguacaaguaccccgcccucaacgucaccaugcccaacaacggcaaguucgacaagcucuacaucuggggcguccaccaccccuccaccgacuccgaccagaccucccucuacguccgcgccuccggccgcgucaccgucuccaccaagcgcucccagcagaccgucacccccaacaucggcucccgccccuggguccgcggccucuccucccgcaucuccaucuacuggaccaucgucaagcccggcgacauccuccucaucuccuccaccggcaaccucaucgccccccgcggcuacuucaagauccgcaacggcaaguccuccaucaugcgcuccgacgcccccaucggcaacugcuccuccgagugcaucacccccaacggcuccauccccaacgacaagcccuuccagaacgucaaccgcaucaccuacggcgccugcccccgcuacgucaagcagaacacccucaagcucgccaccggcaugcgcaacguccccgagaagcagacccgcggcaucuucggcgccaucgccggcuucaucgagaacggcugggagggcauggucgacggcugguacggcuuccgccaccagaacuccgagggcaccggccaggccgccgacaucaaguccacccaggccgccaucgaccagaucaacggcaagcucaaccgccucaucgagaagaccaacgagaaguuccaccagaucgagaaggaguucuccgaggucgagggccgcauccaggaccucgagaaguacgucgaggacaccaagaucgaccucugguccuacaacgccgagcuccucgucgcccucgagaaccagcacaccaucgaccucaccgacuccgagaugaacaagcucuucgagaagacccgcaagcagcuccgcgagaacgccgaggacaugggcaacggcugcuucaagaucuaccacaagugcgacaacgccugcaucggcuccauccgcaacggcaccuacgaccacgacgucuaccgcgacgaggcccucaacaaccgcuuccagaucaagggcgucgagcucaaguccggcuacaaggaccucauccucuggaucuccuucgccaucuccugcuuccuccucugcgucguccuccucggcuucaucaugugggccugccagaagggcaacauccgcugcaacaucugcaucuga

SEQ ID NO: 104528 - RNA, 1701 nt, Artificial Sequence
  derived and/or modified CDS sequence (opt2) from hemagglutinin__InfluenzaA__AFG72228
augaagaccaucaucgcccucuccuacauccucugccucgucuucgcccagaagcuccccggcaacgacaacuccaccgccacccucugccucggccaccacgccguccccaacggcacccucgucaagaccaucaccaacgaccagaucgaggucaccaacgccaccgagcucguccaguccuccuccaccggccgcaucugcgacuccccccaccgcauccucgacggcaagaacugcacccucaucgacgcccuccucggcgacccccacugcgacggcuuccagaacaaggagugggaccucuucgucgagcgcuccaaggccuacuccaacugcuaccccuacgacguccccgacuacgccucccuccgcucccucgucgccuccuccggcacccucgaguucaccaacgaggacuucaacuggaccggcgucgcccaguccggcgaguccuacgccugcaagcgcggcuccgucaaguccuucuucucccgccucaacuggcuccacgaguccgacuacaaguaccccgagcucaacgucaccaugcccaacaacggcaaguucgacaagcucuacaucuggggcguccaccaccccuccaccgaccgcgagcagaccucccucuacguccgcgccuccggccgcgucaccgucuccaccaagcgcucccagcagaccgucauccccaacaucggcucccgccccuggguccgcggccucuccucccgcaucuccaucuacuggaccaucgucaagcccggcgacauccuccucaucaacuccaccggcaaccucaucgccccccgcggcuacuucaagauccgcaccggcaaguccuccaucaugcgcuccgacgcccccaucggcaccugcuccuccgagugcaucacccccaacggcuccauccccaacgacaagcccuuccagaacgucaaccgcaucaccuacggcgccugcccccgcuacgucaagcagaacacccucaagcucgccaccggcaugcgcaacguccccgagaagcagacccgcggcaucuucggcgccaucgccggcuucaucgagaacggcugggagggcauggucgacggcugguacggcuuccgccaccagaacuccgagggcaccggccaggccgccgaccucaaguccacccaggccgccaucgaccagaucaacggcaagcucaaccgccucaucgagaagaccaacgagaaguuccaccagaucgagaaggaguucuccgaggucgagggccgcauccaggaccucgagaaguacgucgaggacaccaagaucgaccucugguccuacaacgccgagcuccucgucgcccucgagaaccagcacaccaucgaccucaccgacuccgagaugaacaagcucuucgagaagacccgcaagcagcuccgcgagaacgccgaggacaugggcaacggcugcuucaagaucuaccacaagugcgacaacgccugcaucggcuccauccgcaacggcaccuacgaccacgacgucuaccgcgacgaggcccucaacaaccgcuuccagaucaagggcgucgagcucaaguccggcuacaaggacuggauccucuggaucuccuucgccaucuccugcuuccuccucugcgucguccuccucggcuucaucaugugggccugccagaagggcaacauccgcugcaacaucugcaucuga

SEQ ID NO: 104529 - RNA, 1701 nt, Artificial Sequence
  derived and/or modified CDS sequence (opt2) from hemagglutinin__InfluenzaA__AFG72239
augaagaccaucaucgcccucuccuacauccucugccucguccucgcccagaagcuccccggcuccgacaacuccaccgccacccucugccucggccaccacgccguccccaacggcacccucgucaagaccaucaccaacgaccagaucgaggucaccaacgccaccgagcucguccaguccuccaccaccggccgcaucugcgacuccccccaccgcauccucgacggcaagaacugcacccucaucgacgcccuccucggcgacccccacugcgacggcuuccagaacaaggagugggaccucuucgucgagcgcuccaaggccuacuccaacugcuaccccuacgacguccccgacuacgccucccuccgcucccucgucgccuccuccggcacccucgaguucaccaacgaggacuucaacuggaccggcgucgcccaguccggcgaguccuacgccugcaagcgcggcuccgucaaguccuucuucucccgccucaacuggcuccacgaguccgacuacaaguaccccgcccucaacgucaccaugcccaacaacggcaaguucgacaagcucuacaucuggggcguccaccaccccuccaccgaccgcgagcagaccucccucuacguccgcgccuccggccgcgucaccgucuccaccaagcgcucccagcagaccgucauccccaacaucggcucccgccccuggguccgcggccucuccucccgcaucuccaucuacuggaccaucgucaagcccggcgacauccuccucaucaacuccaccggcaaccucaucgccccccgcggcuacuucaagauccgcaccggcaaguccuccaucaugcgcuccgacgcccccaucggcaccugcuccuccgagugcaucacccccaacggcuccauccccaacgacaagcccuuccagaacgucaaccgcaucaccuacggcgccugcccccgcuacgucaagcagaacacccucaagcucgccaccggcaugcgcaacguccccgagaagcagacccgcggcaucuucggcgccaucgccggcuucaucgagaacggcugggagggcauggucgacggcugguacggcuuccgccaccagaacuccgagggcaccggccaggccgccgaccucaaguccacccaggccgccaucgaccagaucaacggcaagcucaaccgccucaucgagaagaccaacgagaaguuccaccagaucgagaaggaguucuccgaggucgagggccgcauccaggaccucgagaaguacgucgaggacaccaagaucgaccucugguccuacaacgccgagcuccucgucgcccucgagaaccagcacaccaucgaccucaccgacuccgagaugaacaagcucuucgagaagacccgcaagcagcuccgcgagaacgccgaggacaugggcaacggcugcuucaagaucuaccacaagugcgacaacgccugcaucggcuccauccgcaacggcaccuacgaccacgacgucuaccgcgacgaggcccucaacaaccgcuuccagaucaagggcgucgagcucaaguccggcuacaaggacuggauccucuggaucuccuucgccaucuccugcuuccuccucugcgucguccuccucggcuucaucaugugggccugccagaagggcaacauccgcugcaacaucugcaucuga

SEQ ID NO: 104530 - RNA, 1701 nt, Artificial Sequence; identical to SEQ ID NO: 104523
  derived and/or modified CDS sequence (opt2) from hemagglutinin__InfluenzaA__AFG72272

SEQ ID NO: 104531 - RNA, 1701 nt, Artificial Sequence
  derived and/or modified CDS sequence (opt2) from hemagglutinin__InfluenzaA__AFG72316
augaagaccaucaucgcccucucccacauccucugccucgucuucgcccagaagcuccccggcaacgacaacuccaccgccacccucugccucggccaccacgccguccccaacggcacccucgucaagaccaucaccaacgaccagaucgaggucaccaacgccaccgagcucguccaguccuccuccaccggccgcaucugcgacuccccccaccgcauccucgacggcaagaacugcacccucaucgacgcccuccucggcgacccccacugcgacggcuuccagaacaaggagugggaccucuucgucgagcgcuccaaggccuacuccaacugcuaccccuacgacguccccgacuacgccucccuccgcucccucgucgccuccuccggcacccucgaguucaucaacgaggacuucaacuggaccggcgucgcccaggacggcggcuccuacgccugcaagcgcggcuccgucaacuccuucuucucccgccucaacuggcuccacaagcucgaguacaaguaccccgcccucaacgucaccaugcccaacaacggcaaguucgacaagcucuacaucuggggcguccaccaccccuccaccgacuccgaccagaccucccucuacguccgcgccuccggccgcgucaccgucuccaccaagcgcucccagcagaccgucacccccaacaucggcucccgccccuggguccgcggccucuccucccgcaucuccaucuacuggaccaucgucaagcccggcgacauccuccucaucaacuccaccggcaaccucaucgccccccgcggcuacuucaagauccgcaacggcaaguccuccaucaugcgcuccgacguccccaucggcaacugcuccuccgagugcaucacccccaacggcuccauccccaacgacaagcccuuccagaacgucaaccgcaucaccuacggcgccugcccccgcuacgucaagcagaacacccucaagcucgccaccggcaugcgcaacguccccgagaagcagacccgcggcaucuucggcgccaucgccggcuucaucgagaacggcugggagggcauggucgacggcugguacggcuuccgccaccagaacuccgagggcaccggccaggccgccgaccucaaguccacccaggccgccaucgaccagaucaacggcaagcucaaccgccucaucgagaagaccaacgagaaguuccaccagaucgagaaggaguucuccgaggucgagggccgcauccaggaccucgagaaguacgucgaggacaccaagaucgaccucugguccuacaacgccgagcuccucgucgcccucgagaaccagcacaccaucgaccucaccgacuccgagaugaacaagcucuucgagaagacccgcaagcagcuccgcgagaacgccgaggacaugggcaacggcugcuucaagaucuaccacaagugcgacaacgccugcaucggcuccauccgcaacggcaccuacgaccacgacgucuaccgcgacgaggcccucaacaaccgcuuccagaucaagggcgucgagcucaaguccggcuacaaggacuggauccucuggaucuccuucgccaucuccugcuuccuccucugcgucguccuccucggcuucaucaugugggccugccagaagggcaacauccgcugcaacaucugcaucuga

SEQ ID NO: 104532 - RNA, 1701 nt, Artificial Sequence
  derived and/or modified CDS sequence (opt2) from hemagglutinin__InfluenzaA__AFG72339
augaagaccaucaucgcccucuccuacauccucugccucgucuucgcccagaagcuccccggcaacgacaacuccaccgccacccucugccucggccaccacgccguccccaacggcacccucgucaagaccaucaccaacgaccagaucgaggucaccaacgccaccgagcucguccaguccuccuccaccggccgcaucugcgacuccccccaccgcauccucgacggcaagaacugcacccucaucgacgcccuccucggcgacccccacugcgacggcuuccagaacaaggagugggaccucuucgucgagcgcuccaaggccuacuccaacugcuaccccuacgacguccccgacuacgucucccuccgcucccucgucgccuccuccggcacccucgaguucaucaacgaggacuucaacuggaccggcgucgcccaggacggcggcuccuacaccugcaagcgcggcuccgucaacuccuucuucucccgccucaacuggcuccacaaguccgaguacaaguaccccgcccucaacgucaccaugcccaacaacggcaaguucgacaagcucuacaucuggggcguccaccaccccuccaccgacuccgaccagaccucccucuacguccgcgccuccggccgcgucaccgucuccaccaagcgcucccagcagaccgucacccccaacaucggcucccgccccuggguccgcggccucuccucccgcaucuccaucuacuggaccaucgucaagcccggcgacauccuccucaucaacuccaccggcaaccucaucgccccccgcggcuacuucaagauccgcaacggcaaguccuccaucaugcgcuccgacgcccccaucggcaccugcuccuccgagugcaucacccccaacggcuccauccccaacgacaagcccuuccagaacgucaaccgcaucaccuacggcgccugcccccgcuacgucaagcagaacacccucaagcucgccaccggcaugcgcaacguccccgagaagcagacccgcggcaucuucggcgccaucgccggcuucaucgagaacggcugggagggcauggucgacggcugguacggcuuccgccaccagaacuccgagggcaccggccaggccgccgaccucaaguccacccaggccgccaucgaccagaucaacggcaagcucaaccgccucaucgagaagaccaacgagaaguuccaccagaucgagaaggaguucuccgaggucgagggccgcauccaggaccucgagaaguacgucgaggacaccaagaucgaccucugguccuacaacgccgagcuccucgucgcccucgagaaccagcacaccaucgaccucaccgacuccgagaugaacaagcucuucgagaagacccgcaagcagcuccgcgagaacgccgaggacaugggcaacggcugcuucaagaucuaccacaagugcgacaacgccugcaucggcuccauccgcaacggcaccuacgaccacgacgucuaccgcgacgaggcccucaacaaccgcuuccagaucaagggcgucgagcucaaguccggcuacaaggacuggauccucuggaucuccuucgccaucuccugcuuccuccucugcgucguccuccucggcuucaucaugugggccugccagaagggcaacauccgcugcaacaucugcaucuga

SEQ ID NO: 104533 - RNA, 1701 nt, Artificial Sequence
  derived and/or modified CDS sequence (opt2) from hemagglutinin__InfluenzaA__AFG72350
augaagaccaucaucgcccucuccuacauccucugccucgucuucgcccagaagcuccccggcaacgacaacuccaccgccacccucugccucggccaccacgccguccccaacggcacccucgucaagaccaucaccaacgaccagaucgaggucaccaacgccaccgagcucguccaguccuccuccaccggccgcaucugcgacuccccccaccgcauccucgacggcaagaacugcacccucaucgacgcccuccucggcgacccccacugcgacggcuuccagaacaaggagugggaccucuucgucgagcgcuccaaggccuacuccaacugcuaccccuacgacguccccgacuacgucucccuccgcucccucgucgccuccuccggcacccucgaguucaucaacgaggacuucaacuggaccggcgucgcccaggacggccgcuccuacgccugcaagcgcggcuccgucaacuccuucuucucccgccucaacuggcuccacaaguccgaguacaaguaccccgcccucaacgucaccaugcccaacaacggcaaguucgacaagcucuacaucuggggcguccaccaccccuccaccgacuccgaccagaccucccucuacguccgcgccuccggccgcgucaccgucuccaccaagcgcucccagcagaccgucacccccaacaucggcucccgccccuggguccgcggccucuccucccgcaucuccaucuacuggaccaucgucaagcccggcgacauccuccucaucaacuccaccggcaaccucaucgccccccgcggcuacuucaagauccgcaacggcaaguccuccaucaugcgcuccgacgcccccaucggcaucugcuccuccgagugcaucacccccaacggcuccauccccaacgacaagcccuuccagaacgucaaccgcaucaccuacggcgccugcccccgcuacgucaagcagaacacccucaagcucgccaccggcaugcgcaacguccccgagaagcagacccgcggcaucuucggcgccaucgccggcuucaucgagaacggcugggagggcauggucgacggcugguacggcuuccgccaccagaacuccgagggcaccggccaggccgccgaccucaaguccacccaggccgccaucgaccagaucaacggcaagcucaaccgccucaucgagaagaccaacgagaaguuccaccagaucgagaaggaguucuccgaggucgagggccgcauccaggaccucgagaaguacgucgaggacaccaagaucgaccucugguccuacaacgccgagcuccucgucgcccucgagaaccagcacaccaucgaccucaccgacuccgagaugaacaagcucuucgagaagacccgcaagcagcuccgcgagaacgccgaggacaugggcaacggcugcuucaagaucuaccacaagugcgacaacgccugcaucggcuccauccgcaacggcaccuacgaccacgacgucuaccgcgacgaggcccucaacaaccgcuuccagaucaagggcgucgagcucaaguccggcuacaaggacuggauccucuggaucuccuucgccaucuccugcuuccuccucugcgucguccuccucggcuucaucaugugggccugccagaagggcaacauccgcugcaacaucugcaucuga

SEQ ID NO: 104534 - RNA, 1701 nt, Artificial Sequence
  derived and/or modified CDS sequence (opt2) from hemagglutinin__InfluenzaA__AFG72372
augaagaccaucaucgcccucuccuacauccucugccucgucuucgcccagaagcuccccggcaacgacaacuccaccgccacccucugccucggccaccacgccguccccaacggcacccucgucaagaccaucaccaacgaccagaucgaggucaccaacgccaccgagcucguccaguccuccuccaccggccgcaucugcgacuccccccaccgcauccucgacggcaagaacugcacccucaucgacgcccuccucggcgacccccacugcgacggcuuccagaacaaggagugggaccucuucgucgagcgcuccaaggccuacuccaacugcuaccccuacgacguccccgacuacgccucccuccgcucccucgucgccuccuccggcacccucgaguucaucaacgaggacuucaacuggaccggcgucgcccaggacggcaaguccuacaccugcaagcgcggcuccgucaacuccuucuucucccgccucaacuggcuccacaagcucgaguacaaguaccccgcccucaacgucaccaugcccaacaacggcaaguucgacaagcucuacaucuggggcguccaccaccccuccaccgacuccgaccagaccucccucuacguccgcgccuccggccgcgucaccgucuccaccaagcgcucccagcagaccgucauccccaacaucggcucccgccccuggguccgcggccucuccucccgcaucuccaucuacuggaccaucgucaagcccggcgacauccuccucaucaacuccaccggcaaccucaucgccccccgcggcuacuucaagauccgcaacggcaaguccuccaucaugcgcuccgacgcccccaucggcaacugcuccuccgagugcaucacccccaacggcuccauccccaacgacaagcccuuccagaacgucaaccgcaucaccuacggcgccugcccccgcuacgucaagcagaacacccucaagcucgccaccggcaugcgcaacguccccgagaagcagacccgcggcaucuucggcgccaucgccggcuucaucgagaacggcugggagggcauggucgacggcugguacggcuuccgccaccagaacuccgagggcaccggccaggccgccgaccucaaguccacccaggccgccaucgaccagaucaacggcaagcucaaccgccucaucgagaagaccaacgagaaguuccaccagaucgagaaggaguucuccgaggucgagggccgcauccaggaccucgagaaguacgucgaggacaccaagaucgaccucugguccuacaacgccgagcuccucgucgcccucgagaaccagcacaccaucgaccucaccgacuccgagaugaacaagcucuucgagcgcacccgcaagcagcuccgcgagaacgccgaggacaugggcaacggcugcuucaagaucuaccacaagugcgacaacgccugcaucggcuccauccgcaacggcaccuacgaccacgacgucuaccgcgacgaggcccucaacaaccgcuuccagaucaagggcgucgagcucaaguccggcuacaaggacuggauccucuggaucuccuucgccaucuccugcuuccuccucugcgucguccuccucggcuucaucaugugggccugccagaagggcaacauccgcugcaacaucugcaucuga

SEQ ID NO: 104535 - RNA, 1701 nt, Artificial Sequence; identical to SEQ ID NO: 97060
  derived and/or modified CDS sequence (opt2) from hemagglutinin__InfluenzaA__AFG72383

SEQ ID NO: 104536 - RNA, 1701 nt, Artificial Sequence
  derived and/or modified CDS sequence (opt2) from hemagglutinin__InfluenzaA__AFG72394
augaagaccaucaucgcccucuccuacauccucugccucgucuucgcccagaagcuccccggcaacgacaacuccaccgccacccucugccucggccaccacgccguccccaacggcacccucgucaagaccaucaccaacgaccagaucgaggucaccaacgccaccgagcucguccaguccuccuccaccggccgcaucugcgacuccccccaccgcauccucgacggcaagaacugcacccucaucgacgcccuccucggcgacccccacugcgacggcuuccagaacaaggagugggaccucuucgucgagcgcuccaaggccuacuccaacugcuaccccuacgacguccccgacuacgccucccuccgcucccucgucgccuccuccggcacccucgaguucaucaacgaggacuucaacuggaccggcgucgcccaggacggcaaguccuacgccugcaagcgcggcuccgucaacuccuucuucucccgccucaacuggcuccacaagcucgaguacaaguaccccgcccucaacgucaccaugcccaacaacggcaaguucgacaagcucuacaucuggggcguccaccaccccuccaccgacuccgaccagaccucccucuacguccgcgccuccggccgcgucaccgucgccaccaagcgcucccagcagaccgucauccccaacaucggcuuccgccccuggguccgcggccaguccuccggcaucuccaucuacuggaccaucgucaagcccggcgacauccuccucaucaacuccaccggcaaccucaucgccccccgcggcuacuucaagauccgcaacggcaaguccuccaucaugcgcuccgacgcccccaucggcaacugcuccuccgagugcaucacccccaacggcuccauccccaacgacaagcccuuccagaacgucaaccgcaucaccuacggcgccugcccccgcuacgucaagcagaacacccucaagcucgccaccggcaugcgcaacguccccgagaagcagacccgcggcaucuucggcgccaucgccggcuucaucgagaacggcugggagggcauggucgacggcugguacggcuuccgccaccagaacuccgagggcaccggccaggccgccgaccucaaguccacccaggccgccaucgaccagaucaacggcaagcucaaccgccucaucgagaagaccaacgagaaguuccaccagaucgagaaggaguucuccgaggucgagggccgcauccaggaccucgagaaguacgucgaggacaccaagaucgaccucugguccuacaacgccggccuccucgucgcccucgagaaccagcacaccaucgaccucaccgacuccgagaugaacaagcucuucgagcgcacccgcaagcagcuccgcgagaacgccgaggacaugggcaacggcugcuucaagaucuaccacaagugcgacaacgccugcaucggcuccauccgcaacggcaccuacgaccacgacgucuaccgcgacgaggcccucaacaaccgcuuccagaucaagggcgucgagcucaaguccggcuacaaggacuggauccucuggaucuccuucgccaucuccugcuuccuccucugcgucguccuccucggcuucaucaugugggccugccagaagggcaacauccgcugcaacaucugcaucuga

SEQ ID NO: 104537 - RNA, 1701 nt, Artificial Sequence
  derived and/or modified CDS sequence (opt2) from hemagglutinin__InfluenzaA__AFG72405
augaagaccaucaucgcccucuccuacauccucugccucgucuucgcccagaagcuccccggcaacgacaacuccaccgccacccucugccucggccaccacgccguccccaacggcacccucgucaagaccaucaccaacgaccagaucgaggucaccaacgccaccgagcucguccaguccuccuccaccggccgcaucugcgacuccccccaccgcauccucgacggcaagaacugcacccucaucgacgcccuccucggcgaccccaacugcgacggcuuccagaacaaggagugggaccucuucgucgagcgcuccaaggccuacuccaacugcuaccccuacgacguccccgacuacgccucccuccgcucccucgucgccuccuccggcacccucgaguucaccaacgaggacuucaacuggaccggcgucgcccaggacggcggcuccuacgccugcaagcgcggcuccgucaaguccuucuucucccgccucaacuggcuccacaagcucgaguacaaguaccccgcccucaacgucaccaugcccaacaacggcaaguucgacaagcucuacaucuggggcguccaccaccccuccaccgacuccgaccagaccucccucuacguccgcgccuccggccgcgucaccgucuccaccaagcgcucccagcagaccgucacccccaacaucggcucccgccccuggguccgcggccucuccucccgcaucuccaucuacuggaccaucgucaagcccggcgacauccuccucaucaacuccaccggcaaccucaucgccccccgcggcuacuucaagauccgcaacggcaaguccuccaucaugcgcuccgacgcccccaucggcaccugcuccuccgagugcaucacccccaacggcuccauccccaacgacaagcccuuccagaacgucaaccgcaucaccuacggcgccugcccccgcuacgucaagcagaacacccucaagcucgccaccggcaugcgcaacguccccgagaagcagacccgcggcaucuucggcgccaucgccggcuucaucgagaacggcugggagggcauggucgacggcugguacggcuuccgccaccagaacuccgagggcaccggccaggccgccgaccucaaguccacccaggccgccaucaaccagaucaacggcaagcucaaccgccucaucgagaagaccaacgagaaguuccaccagaucgagaaggaguucuccgaggucgagggccgcauccaggaccucgagaaguacgucgaggacaccaagaucgaccucugguccuacaacgccgagcuccucgucgcccucgagaaccagcacaccaucgaccucaccgacuccgagaugaacaagcucuucgagaagacccgcaagcagcuccgcgagaacgccgaggacaugggcaacggcugcuucaagaucuaccacaagugcgacaacgccugcaucggcuccauccgcaacggcaccuacgaccacgacgucuaccgcgacgaggcccucaacaaccgcuuccagaucaagggcgucgagcucaaguccggcuacaaggacuggauccucuggaucuccuucgccaucuccugcuuccuccucugcgucguccuccucggcuucaucaugugggccugccagaagggcaacauccgcugcaacaucugcaucuga

SEQ ID NO: 104538 - RNA, 1701 nt, Artificial Sequence
  derived and/or modified CDS sequence (opt2) from hemagglutinin__InfluenzaA__AFG72449
augaagaccaucaucgcccucuccuacauccucugccucgucuucgcccagaagcuccccggcaacgacaacuccaccgccacccucugccucggccaccacgccguccccaacggcacccucgucaagaccaucaccaacgaccagaucgaggucaccaacgccaccgagcucguccaguccuccuccaccggccgcaucugcuacuccccccaccgcauccucgacggcaacaacugcacccucaucgacgcccuccucggcgacccccacugcgacggcuuccagaacaaggagugggaccucuucgucgagcgcuccaaggccuacuccaacugcuaccccuacgacguccccgacuacgccucccuccgcucccucgucgccuccuccggcacccucgaguucaucaacgaggacuucaacuggaccggcgucgcccaggacggcaaguccuacgccugcaagcgcggcuccgucaagggcuucuucucccgccucaacuggcuccacaagcucgaguacaaguaccccgcccucaacgucaccaugcccaacaacggcaaguucgacaagcucuacaucuggggcguccaccaccccuccaccgacuccgaccagaccucccucuacguccgcgccuccggcggcgucaccgucuccaccaagcgcucccagcagaccgucauccccuccaucggcucccgccccuggguccgcggccucuccucccgcaucuccaucuacuggaccaucgucaagcccggcgacauccuccucaucaacuccaccggcaaccucaucgccccccgcggcuacuucaagauccgcaacggcaaguccuccaucaugcgcuccgacgcccccaucggcaacugcuccuccgagugcaucacccccaacggcuccauccccaacgacaagcccuuccagaacgucaaccgcaucaccuacggcgccugcccccgcuacgucaagcagaacacccucaagcucgccaccggcaugcgcaacguccccgagaagcagacccgcggcaucuucggcgccaucgccggcuucaucgagaacggcugggagggcauggucgacggcugguacggcuuccgccaccagaacuccgagggcaccggccaggccgccgaccucaaguccacccaggccgccaucgaccagaucaacggcaagcucaaccgccucaucgagaagaccaacgagaaguuccaccagaucgagaaggaguucuccgaggucgagggccgcauccaggaccucgagaaguacgucgaggacaccaagaucgaccucugguccuacaacgccgagcuccucgucgcccucgagaaccagcacaccaucgaccucaccgacuccgagaugaacaagcucuucgagcgcacccgcaagcagcuccgcgagaacgccgaggacaugggcaacggcugcuucaagaucuaccacaagugcgacaacgccugcaucggcuccauccgcaacggcaccuacgaccacgacgucuaccgcgacgaggcccucaacaaccgcuuccagaucaagggcgucgagcucaaguccggcuacaaggacuggauccucuggaucuccuucgccaucuccugcuuccuccucugcgucguccuccucggcuucaucaugugggccugccagaagggcaacauccgcugcaacaucugcaucuga

SEQ ID NO: 104539 - RNA, 1701 nt, Artificial Sequence; identical to SEQ ID NO: 97089
  derived and/or modified CDS sequence (opt2) from hemagglutinin__InfluenzaA__AFG72460

SEQ ID NO: 104540 - RNA, 1701 nt, Artificial Sequence
  derived and/or modified CDS sequence (opt2) from hemagglutinin__InfluenzaA__AFG72504
augaagaccaucaucgcccucuccuacauccucugccucgucuucgcccagaagcuccccggcaacgacaacuccaccgccacccucugccucggccaccacgccguccccaacggcacccucgucaagaccaucaccaacgaccagaucgaggucaccaacgccaccgagcucguccaguccuccuccaccggccgcaucugcgacuccccccaccgcauccucgacggcaagaacugcacccucaucgacgcccuccucggcgacccccacugcgacggcuuccagaacaaggagugggaccucuucgucgagcgcuccaaggccuacuccaacugcuaccccuacgacguccccgacuacgccucccuccgcucccucgucgccuccuccggcacccucgaguucaucaacgaggacuucaacuggaccggcgucgcccaggacggcaaguccuacgccugcaagcgcggcuccgucaaguccuucuucucccgccucaacuggcuccacaagcucgaguacaaguaccccgcccucaacgucaccaugcccaacaacggcaaguucgacaagcucuacaucuggggcguccaccaccccuccaccgacuccgaccagaccucccucuacguccgcgccuccggccgcgucaccgucuccaccaagcgcucccagcagaccgucauccccaacaucggcuuccgccccuggguccgcggccucuccucccgcaucuccaucuacuggaccaucgucaagcccggcgacauccuccucaucaacuccaccggcaaccucaucgccccccgcggcuacuucaagauccgcaacggcaaguccuccaucauccgcuccgacgcccccaucggcaacugcuccuccgagugcaucacccccaacggcuccauccccaacgacaagcccuuccagaacgucaaccgcaucaccuacggcgccugcccccgcuacgucaagcagaacacccucaagcucgccaccggcaugcgcaacguccccgagaagcagacccgcggcaucuucggcgccaucgccggcuucaucgagaacggcugggagggcauggucgacggcugguacggcuuccgccaccagaacuccgagggcaccggccaggccgccgaccucaaguccacccaggccgccaucgaccagaucaacggcaagcucaaccgccucaucgagaagaccaacgagaaguuccaccagaucgagaaggaguucuccgaggucgagggccgcauccaggaccucgagaaguacgucgaggacaccaagaucgaccucugguccuacaacgccggccuccucgucgcccucgagaaccagcacaccaucgaccucaccgacuccgagaugaacaagcucuucgagcgcacccgcaagcagcuccgcgagaacgccgaggacaugggcaacggcugcuucaagaucuaccacaagugcgacaacgccugcaucggcuccauccgcaacggcaccuacgaccacgacgucuaccgcgacgaggcccucaacaaccgcuuccagaucaagggcgucgagcucaaguccggcuacaaggacuggauccucuggaucuccuucgccaucuccugcuuccuccucugcgucguccuccucggcuucaucaugugggccugccagaagggcaacauccgcugcaacaucugcaucuga

SEQ ID NO: 104541 - RNA, 1701 nt, Artificial Sequence
  derived and/or modified CDS sequence (opt2) from hemagglutinin__InfluenzaA__AFG72515
augaagaccaucaucgcccucuccuacauccucugccucgucuucgcccagaagcuccccggcaacgacaacuccaccgccacccucugccucggccaccacgccguccccaacggcacccucgucaagaccaucaccaacgaccagaucgaggucaccaacgccaccgagcucguccaguccucccccaccggccgcaucugcgacuccccccaccgcauccucgacggcaagaacugcacccucaucgacgcccuccucggcgacccccacugcgacggcuuccagaacaaggagugggaccucuucgucgagcgcuccaaggccuacuccaacugcuaccccuacgacguccccgacuacgccucccuccgcucccucgucgccuccuccggcacccucgaguucaucaacgagaacuucaacuggaccggcgucgcccaggacggcaaguccuacgccugcaagcgcggcuccgucaacuccuucuucucccgccucaacuggcuccacaagcucgaguacaaguaccccgcccucaacgucaccaugcccaacaacggcaaguucgacaagcucuacaucuggggcguccaccaccccuccaccgacuccgaccagaccucccucuacguccgcgccuccggccgcgucaccgucuccaccaagcgcucccagcagaccgucauccccgacaucggcuaccgccccuggguccgcggccucuccucccgcaucuccaucuacuggaccaucgucaagcccggcgacauccuccucaucaacuccaccggcaaccucaucgccccccgcggcuacuucaagauccgcaacggcaaguccuccaucaugcgcuccgacgcccccaucggcaacugcuccuccgagugcaucacccccaacggcuccauccccaacgacaagcccuuccagaacgucaaccgcaucaccuacggcgccugcccccgcuacgucaagcagaacacccucaagcucgccaccggcaugcgcaacguccccgagaagcagacccgcggcaucuucggcgccaucgccggcuucaucgagaacggcugggagggcauggucgacggcugguacggcuuccgccaccagaacuccgagggcaccggccaggccgccgaccucaaguccacccaggccgccaucgaccagaucaacggcaagcucaaccgccucgucgagaagaccaacgagaaguuccaccagaucgagaaggaguucuccgaggucgagggccgcauccaggaccucgagaaguacgucgaggacaccaagaucgaccucugguccuacaacgccgagcuccucgucgcccucgagaaccagcacaccaucgaccucaccgacuccgagaugaacaagcucuucgagcgcacccgcaagcagcuccgcgagaacgccgaggacaugggcaacggcugcuucaagaucuaccacaagugcgacaacgccugcaucggcuccauccgcaacggcaccuacgaccacgacgucuaccgcgacgaggcccucaacaaccgcuuccagaucaagggcgucgagcucaaguccggcuacaaggacuggauccucuggaucuccuucgccaucuccugcuuccuccucugcgucguccuccucggcuucaucaugugggccugccagaagggcaacauccgcugcaacaucugcaucuga

SEQ ID NO: 104542 - RNA, 1701 nt, Artificial Sequence
  derived and/or modified CDS sequence (opt2) from hemagglutinin__InfluenzaA__AFG72526
augaagaccaucaucgcccucuccuacauccucugccucgucuucgcccagaagcuccccggcaacgacaacuccaccgccacccucugccucggccaccacgccguccccaacggcacccucgucaagaccaucaccaacgaccagaucgaggucaccaacgccaccgagcucguccaguccuccuccaccggccgcaucugcgacuccccccaccgcauccucgacggcaagaacugcacccucaucgacgcccuccucggcgacccccacugcgacggcuuccagaacaaggagugggaccucuucgucgagcgcuccaaggccuacuccuccugcuaccccuacgacguccccgacuacgccucccuccgcucccucgucgccuccuccggcacccucgaguucaucaacgaggacuucaacuggaccggcgucgcccaggacggcaaguccuacgccugcaagcgcggcuccgucaacuccuucuucucccgccucaacuggcuccacaagcucgaguacaaguaccccgcccucaacgucaccaugcccaacaacggcaaguucgacaagcucuacaucuggggcguccaccaccccuccaccgacuccgaccagaccucccucuacguccgcgccuccggccgcgucaucgucuccaccaagcgcucccagcagaccgucauccccaacaucggcucccgccccuggguccgcggccucuccucccgcaucuccaucuacuggaccaucgucaagcccggcgacauccuccucaucaacuccaccggcaaccucaucgccccccgcggcuacuucaagauccgcaccggcaaguccuccaucaugcgcuccgacgcccccaucggcaacugcuccuccgagugcaucacccccaacggcuccauccccaacgacaagcccuuccagaacgucaaccgcaucaccuacggcgccugcccccgcuacgucaagcagaacacccucaagcucgccaccggcaugcgcaacguccccgagaagcagacccgcggcaucuucggcgccaucgccggcuucaucgagaacggcugggagggcauggucgacggcugguacggcuuccgccaccagaacuccgagggcaccggccaggccgccgaccucaaguccacccagaccgccaucaaccagaucaacggcaagcucaaccgccucaucgagaagaccaacgagaaguuccaccagaucgagaaggaguucuccgaggucgagggccgcauccaggaccucgagaaguacgucgaggacaccaagaucgaccucugguccuacaacgccgagcuccucgucgcccucgagaaccagcacaccaucgaccucaccgacuccgagaugaacaagcucuucgagcgcacccgcaagcagcuccgcgagaacgccgaggacaugggcaacggcugcuucaagaucuaccacaagugcgacaacgccugcaucggcuccauccgcaacggcaccuacgaccacgacgucuaccgcgacgaggcccucaacaaccgcuuccagaucaagggcgucgagcucaaguccggcuacaaggacuggauccucuggaucuccuucgccaucuccugcuuccuccucugcgucguccuccucggcuucaucaugugggccugccagaagggcaacauccgcugcaacaucugcaucuga

SEQ ID NO: 104543 - RNA, 1701 nt, Artificial Sequence
  derived and/or modified CDS sequence (opt2) from hemagglutinin__InfluenzaA__AFG72581
augaagaccaucaucgcccucuccuacauccucugccucgucuucgcccagaagcuccccggcaacgacaacuccaccgccacccucugccucggccaccacgccguccccaacggcacccucgucaagaccaucaccaacgaccagaucgaggucaccaacgccaccgagcucguccaguccuccuccaccggccgcaucugcgacuccccccaccgcauccucgacggcaagaacugcacccucaucgacgcccuccucggcgacccccacugcgacggcuuccagaacaaggagugggaccucuucgucgagcgcuccaaggccuacuccaacugcuaccccuacgacguccccgacuacgccucccuccgcucccucgucgccuccuccggcacccucgaguucaucaacgaggacuucaacuggaccggcgucgcccaggacggcaaguccuacgccugcaagcgcggcuccgucaacuccuucuucucccgccucaacuggcuccacaagcucgaguacaaguaccccgcccucaacgucaccaugcccaacaacggcaaguucgacaagcucuacaucuggggcguccaccaccccuccaccgacuccgaccagaccucccucuacguccgcgccuccggcggcgucaccgucuccaccaagcgcucccagcagaccgucauccccaacaucggcuaccgccccuggguccgcggccucuccucccgcaucuccaucuacuggaccaucgucaagcccggcgacauccuccucaucaacuccaccggcaaccucaucgccccccgcggcuacuucaagauccgcaacggcaaguccuccaucaugcgcuccgacgcccccaucggcaacugcuccuccgagugcaucacccccaacggcuccaucuccaacgacaagcccuuccagaacgucaaccgcaucaccuacggcgccugcccccgcuacgucaagcagaacacccucaagcucgccaccggcaugcgcaacguccccgagaagcagacccgcggcaucuucggcgccaucgccggcuucaucgagaacggcugggagggcauggucgacggcugguacggcuuccgccaccagaacuccgagggcaccggccaggccgccgaccucaaguccacccaggccgccaucgaccagaucaacggcaagcucaaccgccucaucgagaagaccaacgagaaguuccaccagaucgagaaggaguucuccgaggucgagggccgcauccaggaccucgagaaguacgucgaggacaccaagaucgaccucugguccuacaacgccgagcuccucgucgcccucgagaaccagcacaccaucgaccucaccgacuccgagaugaacaagcucuucgagcgcacccgcaagcagcuccgcgagaacgccgaggacaugggcaacggcugcuucaagaucuaccacaagugcgacaacgccugcaucggcuccauccgcaacggcaccuacgaccacgacgucuaccgcgacgaggcccucaacaaccgcuuccagaucaagggcgucgagcucaaguccggcuacaaggacuggauccucuggaucuccuucgccaucuccugcuuccuccucugcgucguccuccucggcuucaucaugugggccugccagaagggcaacauccgcugcaacaucugcaucuga

SEQ ID NO: 104544 - RNA, 1701 nt, Artificial Sequence
  derived and/or modified CDS sequence (opt2) from hemagglutinin__InfluenzaA__AFG72603
augaagaccaucaucgcccucuccuacauccucugccucgucuucgcccagaagcuccccggcaacgacaacuccaccgccacccucugccucggccaccacgccguccccaacggcacccucgucaagaccaucaccaacgaccagaucgaggucaccaacgccaccgagcucguccaguccuccuccaccggccgcaucugcgacuccccccaccgcauccucgacggcaagaacugcacccucaucgacgcccuccucggcgacccccacugcgacggcuuccagaacaaggagugggaccucuucgucgagcgcuccaaggccuacuccaacugcuaccccuacgacguccccgacuacgccucccuccgcucccucgucgccuccuccggcacccucgaguucaccaaggagggcuucaacuggaccggcgucgcccaggacggcaaguccuacgccugcaagcgcggcuccgucaacuccuucuucucccgccucaacuggcuccacaagcucgaguacaaguaccccgcccucaacgucaccaugcccaacaacgacaaguucgacaagcucuacaucuggggcguccaccaccccuccaccgacuccgaccagaccucccucuacguccaggccuccggccgcgucaccgucuccaccaagcgcucccagcagaccgucauccccaacaucggcucccgccccuggguccgcggcaucuccucccgcaucuccaucuacuggaccaucgucaagcccggcgacauccuccucaucaacuccaccggcaaccucaucgccccccgcggcuacuucaagauccgcaacggcaaguccuccaucaugcgcuccgacgcccccaucggcaacugcaaguccgagugcaucacccccaacggcuccauccccaacgacaagcccuuccagaacgucaaccgcaucaccuacggcgccugcccccgcuacgucaagcagaacacccucaagcucgccaccggcaugcgcaacguccccgagaagcagacccgcggcaucuucggcgccaucgccggcuucaucgagaacggcugggagggcauggucgacggcugguacggcuuccgccaccagaacuccgagggcaccggccaggccgccgaccucaaguccacccaggccgccaccgaccagaucaacggcaagcucaaccgccucaucgagaagaccaacgagaaguuccaccagaucgagaaggaguucuccgaggucgagggccgcauccaggaccucgagaaguacgucgaggacaccaagaucgaccucugguccuacaacgccgagcuccucgucgcccucgagaaccagcacaccaucgaccucaccgacuccgagaugaacaagcucuucgagcgcacccgcaagcagcuccgcgagaacgccgaggacaugggcaacggcugcuucaagaucuaccacaagugcgacaacgccugcaucggcuccauccgcaacggcaccuacgaccacgacgucuaccgcgacgaggcccucaacaaccgcuuccagaucaagggcgucgagcucaaguccggcuacaaggacuggauccucuggaucuccuucgccaucuccugcuuccuccucugcgucguccuccucggcuucaucaugugggccugccagaagggcaacauccgcugcaacaucugcaucuga

SEQ ID NO: 104545 - RNA, 1701 nt, Artificial Sequence
  derived and/or modified CDS sequence (opt2) from hemagglutinin__InfluenzaA__AFG72614
augaagaccaucaucgcccucuccuacauccucugccucgucuucgcccagaagcuccccggcaacgacaacuccaccgccacccucugccucggccaccacgccguccccaacggcacccucgucaagaccaucaccaacgaccagaucgaggucaccaacgccaccgagcucguccaguccuccuccaccggccgcaucugcgacuccccccaccgcauccucgacggcaagaacugcacccucaucgacgcccuccucggcgacccccacugcgacggcuuccagaacaaggagugggaccucuucgucgagcgcuccaaggccuacuccaacugcuaccccuacgacguccccgacuacgccucccuccgcucccucgucgccuccuccggcacccucgaguucaccaacgagggcuucaacuggaccggcgucgcccaggacggcaccuccuacuccugcaagcgcggcuccgucaaguccuucuucucccgccucaacuggcuccacaagcucgaguacaaguaccccgcccucaacgucgccaugcccaacaacgacaaguucgacaagcucuacaucuggggcguccaccaccccuccaccgacuccgaccagaccucccucuacguccaggccuccggccgcgucaccgucuccaccaagcgcucccagcagaccgucauccccaacaucggcucccgccccuggguccgcggcgucuccucccgcaucuccaucuacuggaccaucgucaagcccggcgacauccuccucaucaacuccaccggcaaccucaucgccccccgcggcuacuucaagauccgcuccggcaaguccuccaucaugcgcuccgacgcccccaucggcaacugcaacuccgagugcaucacccccaacggcuccauccccaacgacaagcccuuccagaacgucaaccgcaucaccuacggcgccugcccccgcuacgucaagcagaacacccucaagcucgccaccggcaugcgcaacguccccgagaagcagacccgcggcaucuucggcgccaucgccggcuucaucgagaacggcugggagggcauggucgacggcugguacggcuuccgccaccagaacuccgagggcaccggccaggccgccgaccucaaguccacccaggccgccaucaaccagaucaacggcaagcucaaccgccucaucgagaagaccaacgagaaguuccaccagaucgagaaggaguucuccgaggucgagggccgcauccaggaccucgagaaguacgucgaggacaccaagaucgaccucugguccuacaacgccgagcuccucgucgcccucgagaaccagcacaccaucgaccucaccgacuccgagaugaacaagcucuucgagcgcacccgcaagcagcuccgcgagaacgccgaggacaugggcaacggcugcuucaagaucuaccacaagugcgacaacgccugcaucggcuccauccgcaacggcaccuacgaccacgacgucuaccgcgacgaggcccucaacaaccgcuuccagaucaagggcgucgagcucaaguccggcuacaaggacuggauccucuggaucuccuucgccaucuccugcuuccuccucugcgucguccuccucggcuucaucaugugggccugccagaagggcaacauccgcugcaacaucugcaucuga

SEQ ID NO: 104546 - RNA, 1701 nt, Artificial Sequence
  derived and/or modified CDS sequence (opt2) from hemagglutinin__InfluenzaA__AFG72625
augaagaccaucaucgcccucuccuacauccucugccucgucuucgcccagaagcuccccggcaacgacaacuccaccgccacccucugccucggccaccacgccguccccaacggcacccucgucaagaccaucaccaacgaccagaucgaggucaccaacgccaccgagcucguccaguccuccuccaccggccgcaucugcgacuccccccaccgcauccucgacggcaagaacugcacccucaucgacgcccuccucggcgacccccacugcgacggcuuccagaacaaggagugggaccucuucgucgagcgcuccaaggccuacuccaacugcuaccccuacgacguccccgacuacgccucccuccgcucccucgucgccuccuccggcacccucgaguucaccaacgagggcuucaacuggaccggcgucgcccaggacggcaccuccuacgccugcaagcgcggcuccgucaaguccuucuucucccgccucaacuggcuccacaagcucgaguacaaguaccccgcccucaacgucaccaugcccaacaacgacaaguucgacaagcucuacaucuggggcguccaccaccccuccaccgacuccgaccagaccucccucuacguccaggccuccggccgcgucaccgucuccaccaagcgcucccagcagaccgucauccccaacaucggcucccgccccuggguccgcggcaucuccucccgcaucuccaucuacuggaccaucgucaagcccggcgacauccuccucaucaaguccaccggcaaccucaucgccccccgcggcuacuucaagauccgcuccggcaaguccuccaucaugcgcuccgacgcccccaucggcaacugcaacuccgagugcaucacccccaacggcuccauccccaacgacaagcccuuccagaacgucaaccgcaucaccuacggcgccugcccccgcuacgucaagcagaacacccucaagcucgccaccggcaugcgcaacguccccgagaagcagacccgcggcaucuucggcgccaucgccggcuucaucgagaacggcugggagggcauggucgacggcugguacggcuuccgccaccagaacuccgagggcaccggccaggccgccgaccucaaguccacccaggccgccaucaaccagaucaacggcaagcucaaccgccucaucgagaagaccaacgagaaguuccaccagaucgagaaggaguucuccgaggucgagggccgcauccaggaccucgagaaguacgucgaggacaccaagaucgaccucugguccuacaacgccgagcuccucgucgcccucgagaaccagcacaccaucgaccucaccgacuccgagaugaacaagcucuucgagcgcacccgcaagcagcuccgcgagaacgccgaggacaugggcaacggcugcuucaagaucuaccacaagugcgacaacgccugcaucggcuccauccgcaacggcaccuacgaccacgacgucuaccgcgacgaggcccucaacaaccgcuuccagaucaagggcgucgagcucaaguccggcuacaaggacuggauccucuggaucuccuucgccaucuccugcuuccuccucugcgucguccuccucggcuucaucaugugggccugccagaagggcaacauccgcugcaacaucugcaucuga

SEQ ID NO: 104547 - RNA, 1701 nt, Artificial Sequence
  derived and/or modified CDS sequence (opt2) from hemagglutinin__InfluenzaA__AFG72636
augaagaccaucaucgcccucuccuacauccucugccucgucuucgcccagaagcuccccggcaacgacaacuccaccgccacccucugccucggccaccacgccguccccaacggcacccucgucaagaccaucaccaacgaccagaucgaggucaccaacgccaccgagcucguccaguccuccuccaccggccgcaucugcgacuccccccaccgcauccucgacggcaagaacugcacccucaucgacgcccuccucggcgacccccacugcgacggcuuccagaacaaggagugggaccucuucgucgagcgcuccaaggccuacuccaacugcuaccccuacgacguccccgacuacgccucccuccgcucccucgucgccuccuccggcacccucgaguucaccaacgagggcuucaacuggaccggcgucgcccaggacggcaaguccuacgccugcaagcgcggcuccgucaaguccuucuucucccgccucaacuggcuccacaagcucgaguucaaguaccccgcccucaacgucaccaugcccaacaacgacaaguucgacaagcucuacaucuggggcguccaccaccccuccaccgacuccgaccagaccucccucuacguccaggccuccggccgcgucaccgucuccaccaagcgcucccagcagaccgucauccccaacaucggcucccgccccuggguccgcggcaucuccucccgcaucuccaucuacuggaccaucgucaagcccggcgacauccuccucaucaacuccaccggcaaccucaucgccccccgcggcuacuucaagauccgcaacggcaaguccuccaucaugcgcuccgacgcccccaucgacaacugcaacuccgagugcaucacccccaacggcuccauccccaacgacaagcccuuccagaacgucaaccgcaucaccuacggcgccugcccccgcuacgucaagcagaacacccucaagcucgccaccggcaugcgcaacguccccgagaagcagacccgcggcaucuucggcgccaucgccggcuucaucgagaacggcugggagggcauggucgacggcugguacggcuuccgccaccagaacuccgagggcaccggccaggccgccgaccucaaguccacccaggccgccaucgaccagaucaacggcaagcucaaccgccucaucgagaagaccaacgagaaguuccaccagaucgagaaggaguucuccgaggucgagggccgcauccaggaccucgagaaguacgucgaggacaccaagaucgaccucugguccuacaacgccgagcuccucgucgcccucgagaaccagcacaccaucgaccucaccgacuccgagaugaacaagcucuucgagcgcacccgcaagcagcuccgcgagaacgccgaggacaugggcaacggcugcuucaagaucuaccacaagugcgacaacgccugcaucggcuccauccgcaacggcaccuacgaccacgacgucuaccgcgacgaggcccucaacaaccgcuuccagaucaagggcgucgagcucaaguccggcuacaaggacuggauccucuggaucuccuucgccaucuccugcuuccuccucugcgucguccuccucggcuucaucaugugggccugccagaagggcaacauccgcugcaacaucugcaucuga

SEQ ID NO: 104548 - RNA, 1701 nt, Artificial Sequence
  derived and/or modified CDS sequence (opt2) from hemagglutinin__InfluenzaA__AFG72658
augaagaccaucaucgcccucuccuacauccucugccucgccuucgcccagaagcuccccggcaacgacaacuccaccgccacccucugccucggccaccacgccguccccaacggcacccucgucaagaccaucaccaacgaccagaucgaggucaccaacgccaccgagcucguccaguccuccuccaccggccgcaucugcgacuccccccaccgcauccucgacggcaagaacugcacccucaucgacgcccuccucggcgacccccacugcgacggcuuccagaacaaggagugggaccucuucgucgagcgcuccaaggccuacuccaacugcuaccccuacgacguccccgacuacgccucccuccgcucccucgucgccuccuccggcacccucgaguucaccaacgagggcuucaacuggaccggcgucgcccaggacggcaaguccuacgccugcaagcgcggcuccgucaacuccuucuucucccgccucaacuggcuccacaagcucgaguacaaguaccccgcccucaacgucaccaugcccaacaacgacaaguucgacaagcucuacaucuggggcguccaccaccccuccaccgacuccgaccagaccucccucuacguccaggccuccggccgcgucaccgucuccaccaagcgcucccagcagaccgucauccccaacaucggcucccgccccuggguccgcggcaucuccucccgcaucuccaucuacuggaccaucgucaagcccggcgacauccuccucaucaacuccaccggcaaccucaucgccccccgcggcuacuucaagauccgcaacggcaaguccuccaucaugcgcuccgacgcccccaucgacaacugcaacuccgagugcaucacccccaacggcuccauccccaacgacaagcccuuccagaacgucaaccgcaucaccuacggcgccugcccccgcuacgucaagcagaacacccucaagcucgccaccggcaugcgcaacguccccgagaagcagacccgcggcaucuucggcgccaucgccggcuucaucgagaacggcugggagggcauggucgacggcugguacggcuuccgccaccagaacuccgagggcaccggccaggccgccgaccucaaguccacccaggccgccaucgaccagaucaacggcaagcucaaccgccucaucgagaagaccaacgagaaguuccaccagaucgagaaggaguucuccgaggucgagggccgcauccaggaccucgagaaguacgucgaggacaccaagaucgaccucugguccuacaacgccgagcuccucgucgcccucgagaaccagcacaccaucgaccucaccgacuccgagaugaacaagcucuucgagcgcacccgcaagcagcuccgcgagaacgccgaggacaugggcaacggcugcuucaagaucuaccacaagugcgacaacgccugcaucggcuccauccgcaacggcaccuacgaccacgacgucuaccgcgacgaggcccucaacaaccgcuuccagaucaagggcgucgagcucaaguccggcuacaaggacuggauccucuggaucuccuucgccaucuccugcuuccuccucugcgucguccuccucggcuucaucaugugggccugccagaagggcaacauccgcugcaacaucugcaucuga

SEQ ID NO: 104549 - RNA, 1701 nt, Artificial Sequence
  derived and/or modified CDS sequence (opt2) from hemagglutinin__InfluenzaA__AFG72680
augaagaccaucaucgcccucuccuacauccucugccucgucuucgcccagaagcuccccggcaacgacaacuccaccgccacccucugccucggccaccacgccguccccaacggcacccucgucaagaccaucaccaacgaccagaucgaggucaccaacgccaccgagcucguccaguccuccuccaccggcaucaucugcgacuccccccaccgcauccucgacggcaagaacugcacccucaucgacgcccuccucggcgacccccacugcgacggcuuccagaacaaggagugggaccucuucgucgagcgcuccaaggccuacuccaacugcuaccccuacgacguccccgacuacgccucccuccgcucccucgucgccuccuccggcacccucgaguucaccaacgagggcuucaacuggaccggcgucgcccaggacggcaccuccuacgccugcaagcgcggcuccgucaaguccuucuucucccgccucaacuggcuccacaagcucgaguacaaguaccccgcccucaacgucaccaugcccaacaacgacaaguucgacaagcucuacaucuggggcguccaccaccccuccaccgacuccgaccagaccucccucuacguccaggccuccggccgcgucaccgucuccacccgccgcucccagcagaccgucauccccaacaucggcucccgccccuggguccgcggcgucuccucccgcaucuccaucuacuggaccaucgucaagcccggcgacauccuccucaucaacuccaccggcaaccucaucgccccccgcggcuacuucaagauccgcuccggcaaguccuccaucaugcgcuccgacgcccccaucggcaacugcaacuccgagugcaucacccccaacggcuccauccccaacgacaagcccuuccagaacgucaaccgcaucaccuacggcgccugcccccgcuacgucaagcagaacacccucaagcucgccaccggcaugcgcaacguccccgagaagcagacccgcggcaucuucggcgccaucgccggcuucaucgagaacggcugggagggcauggucgacggcugguacggcuuccgccaccagaacuccgagggcaccggccaggccgccgaccucaaguccacccaggccgccaucaaccagaucaaccgcaagcucaaccgccucaucgagaagaccaacgagaaguuccaccagaucgagaaggaguucuccgaggucgagggccgcauccaggaccucgagaaguacgucgaggacaccaagaucgaccucugguccuacaacgccgagcuccucgucgcccucgagaaccagcacaccaucgaccucaccgacuccgagaugaacaagcucuucgagcgcacccgcaagcagcuccgcgagaacgccgaggacaugggcaacggcugcuucaagaucuaccacaagugcgacaacgccugcaucggcuccauccgcaacggcaccuacgaccacgacgucuaccgcgacgaggcccucaacaaccgcuuccagaucaagggcgucgagcucaaguccggcuacaaggacuggauccucuggaucuccuucgccaucuccugcuuccuccucugcgucguccuccucggcuucaucaugugggccugccagaagggcaacauccgcugcaacaucugcaucuga

SEQ ID NO: 104550 - RNA, 1701 nt, Artificial Sequence
  derived and/or modified CDS sequence (opt2) from hemagglutinin__InfluenzaA__AFG72691
augaagaccaucaucgcccucuccuacauccucugccucgucuucgcccagaagcuccccggcaacgacaacuccaccgccacccucugccucggccaccacgccguccccaacggcacccucgucaagaccaucaccaacgaccagaucgaggucaccaacgccaccgagcucguccaguccuccuccaccggccgcaucugcgacuccccccaccgcauccucgacggcaagaacugcacccucaucgacgcccuccucggcgacccccacugcgacggcuucaagaacaaggagugggaccucuucgucgagcgcuccaccgccuacuccaacugcuaccccuacgacguccccgacuacgccucccuccgcucccucgucgccuccuccggcacccucgaguucaccaacgagggcuucaacuggaccggcgucgcccaggacggcaccuccuacgccugcaagcgcggcuccgucaaguccuucuucucccgccucaacuggcuccacaagcucgaguacaaguaccccgcccucaacgucaccaugcccaacaacgacaaguucgacaagcucuacaucuggggcguccaccaccccuccaccgacuccgaccagaccucccucuacguccaggccuccggccgcgucaccgucuccaccaagcgcucccagcagaccgucauccccaacaucggcucccgccccuggguccgcggcgucuccucccgcaucuccaucuacuggaccaucgucaagcccggcgacauccuccucaucaacuccaccggcaaccucaucgccccccgcggcuacuucaagauccgcuccggcaaguccuccaucaugcgcuccgacgcccccaucgacaacugcaacuccgagugcaucacccccaacggcuccauccccaacggcaagcccuuccagaacgucaaccgcaucaccuacggcgccugcccccgcuacgucaagcagaacacccucaagcucgccaccggcaugcgcaacguccccgagaagcagacccgcggcaucuucggcgccaucgccggcuucaucgagaacggcugggagggcauggucgacggcugguacggcuuccgccaccagaacuccgagggcaccggccaggccgccgaccucaaguccacccaggccgccaucaaccagaucaacggcaagcucaaccgccucaucgagaagaccaacgagaaguuccaccagaucgagaaggaguucuccgaggucgagggccgcauccaggaccucgagaaguacgucgaggacaccaagaucgaccucugguccuacaacgccgagcuccucgucgcccucgagaaccagcacaccaucgaccucaccgacuccgagaugaacaagcucuucgagcgcacccgcaagcagcuccgcgagaacgccgaggacaugggcaacggcugcuucaagaucuaccacaagugcgacaacgccugcaucggcuccauccgcaacggcaccuacgaccacgacgucuaccgcgacgaggcccucaacaaccgcuuccagaucaagggcgucgagcucaaguccggcuacaaggacuggauccucuggaucuccuucgccaucuccugcuuccuccucugcgucguccuccucggcuucaucaugugggccugccagaagggcaacauccgcugcaacaucugcaucuga

SEQ ID NO: 104551 - RNA, 1701 nt, Artificial Sequence
  derived and/or modified CDS sequence (opt2) from hemagglutinin__InfluenzaA__AFG72713
augaagaucaucaucgcccucuccuacauccucugccucgucuucgcccagaagcuccccggcaacgacaacuccaccgccacccucugccucggccaccacgccguccccaacggcacccucgucaagaccaucaccaacgaccagaucgaggucaccaacgccaccgagcucguccaguccuccuccaccggccgcaucugcgacuccccccaccagauccucgacggcaagaacugcacccucaucgacgcccuccucggcgacccccacugcgacggcuucaagaacaaggagugggaccucuucgucgagcgcuccaccgccuacuccaacugcuaccccuacgacguccccgacuacgccucccuccgcucccucgucgccuccuccggcacccucgaguucaccaacgagggcuucaacuggaccggcgucgcccaggacggcaccuccuacgccugcaagcgcggcuccgucaaguccuucuucucccgccucaacuggcuccacaagcucgaguacaaguaccccgcccucaacgucaccaugcccaacaacgacaaguucgacaagcucuacaucuggggcguccaccaccccuccaccgacuccgaccagaccucccucuacguccaggccuccggccgcgucaccgucuccaccaagcgcucccagcagaccgucauccccaacaucggcucccgccccuggguccgcggcaucuccucccgcaucuccaucuacuggaccaucgucaagcccggcgacauccuccucaucuccuccaccggcaaccucaucgccccccgcggcuacuucaagauccgcuccggcaaguccuccaucauccgcuccgacgcccccaucgacaacugcaacuccgagugcaucacccccaacggcuccauccccaacgacaagcccuuccagaacgucaaccgcaucaccuacggcgccugcccccgcuacgucaagcagaacacccucaagcucgccaccggcaugcgcaacguccccgagaagcagacccgcggcaucuucggcgccaucgccggcuucaucgagaacggcugggagggcauggucgacggcugguacggcuuccgccaccagaacuccgagggcaccggccaggccgccgaccucaaguccacccaggccgccaucaaccagaucaacggcaagcucaaccgccucaucgagaagaccaacgagaaguuccaccagaucgagaaggaguucuccgaggucgagggccgcauccaggaccucgagaaguacgucgaggacaccaagaucgaccucugguccuacaacgccgagcuccucgucgcccucgagaaccagcacaccaucgaccucaccgacuccgagaugaacaagcucuucgagcgcacccgcaagcagcuccgcgagaacgccgaggacaugggcaacggcugcuucaagaucuaccacaagugcgacaacgccugcaucggcuccauccgcaacggcaccuacgaccacgacgucuaccgcgacgaggcccucaacaaccgcuuccagaucaagggcgucgagcucaaguccggcuacaaggacuggauccucuggaucuccuucgccaucuccugcuuccuccucugcgucguccuccucggcuucaucaugugggccugccagaagggcaacauccgcugcaacaucugcaucuga

SEQ ID NO: 104552 - RNA, 1701 nt, Artificial Sequence
  derived and/or modified CDS sequence (opt2) from hemagglutinin__InfluenzaA__AFG72724
augaagaccaucaucgcccucuccuacauccucugccucgucuucgcccagaagcuccccggcaacgacaacuccaccgccacccucugccucggccaccacgccguccccaacggcacccucgucaagaccaucaccaacgaccagaucgaggucaccaacgccaccgagcucguccaguccuccuccaccggccgcaucugcgacuccccccaccgcauccucgacggcaagaacugcacccucaucgacgcccuccucggcgacccccacugcgacggcuuccagaacaaggagugggaccucuucgucgagcgcuccaaggccuacuccaacugcuaccccuacgacguccccgacuacgccucccuccgcucccucgucgccuccuccggcacccucgaguucaccaacgagggcuucaacuggaccggcgucgcccaggacggcaccuccuacgccugcaagcgcggcuccgucaaguccuucuucucccgccucaacuggcuccacaagcucgaguacaaguaccccgcccucaacgucaccaugcccaacaacgacaaguucgacaagcucuacaucuggggcguccaccaccccuccaccgacuccgaccagaccucccucuacguccaggccuccggccgcgucaccgucuccaccaagcgcucccagcagaccgucauccccaacaucggcucccgccccuggguccgcggcgucuccucccgcaucuccaucuacuggaccaucgucaagcccggcgacauccuccucaucaacuccaccggcaaccucaucgccccccgcggcuacuucaagauccgcuccggcaaguccuccaucaugcgcuccgacgcccccaucgacaacugcaacuccgagugcaucacccccaacggcuccauccccaacgacaagcccuuccagaacgucaaccgcaucaccuacggcgccugcccccgcuacgucaagcagaacacccucaagcucgccaccggcaugcgcaacguccccgagaagcagacccgcggcaucuucggcgccaucgccggcuucaucgagaacggcugggagggcauggucgacggcugguacggcuuccgccaccagaacuccgagggcaccggccaggccgccgaccucaaguccacccaggccgccaucaaccagaucaacggcaagcucaaccgccucaucgagaagaccaacgagaaguuccaccagaucgagaaggaguucuccgaggucgagggccgcauccaggaccucgagaaguacgucgaggacaccaagaucgaccucugguccuacaacgccgagcuccucgucgcccucgagaaccagcacaccaucgaccucaccgacuccgagaugaacaagcucuucgagcgcacccgcaagcagcuccgcgagaacgccgaggacaugggcaacggcugcuucaagaucuaccacaagugcgacaacgucugcaucggcuccauccgcaacggcaccuacgaccacgacgucuaccgcgacgaggcccucaacaaccgcuuccagaucaagggcgucgagcucaaguccggcuacaaggacuggauccucuggaucuccuucgccaucuccugcuuccuccucugcgucguccuccucggcuucaucaugugggccugccagaagggcaacauccgcugcaacaucugcaucuga

SEQ ID NO: 104553 - RNA, 1701 nt, Artificial Sequence
  derived and/or modified CDS sequence (opt2) from hemagglutinin__InfluenzaA__AFG72735
augaagaccaucaucgcccucuccuacauccucugccucgucuucgcccagaagcuccccggcaacgacaacuccaccgccacccucugccucggccaccacgccguccccaacggcacccucgucaagaccaucaccaacgaccagaucgaggucaccaacgccaccgagcucguccaguccuccuccaccggccgcaucugcgacuccccccaccgcauccucgacggcaagaacugcacccucaucgacgcccuccucggcgacccccacugcgacggcuucaagaacaaggagugggaccucuucgucgagcgcuccaccgccuacuccaacugcuaccccuacgacguccccgacuacgccucccuccgcucccucgucgccuccuccggcacccucgaguucaccaacgagggcuucaacuggaccggcgucgcccaggacggcaccuccuacgccugcaagcgcggcuccgucaaguccuucuucucccgccucaacuggcuccacaagcucgaguacaaguaccccgcccucaccgucaccaugcccaacaacgacaaguucgacaagcucuacaucuggggcguccaccaccccuccaccgacuccgaccagaccuccaucuacguccaggccuccggccgcgucaccgucuccaccaagcgcucccagcagaccgucauccccaacaucggcucccgccccuggguccgcggcgucuccucccgcaucuccaucuacuggaccaucgucaagcccggcgacauccuccucaucaacuccaccggcaaccucaucgccccccgcggcuacuucaagauccgcuccggcaaguccuccaucaugcgcuccgacgcccccaucgacaacugcaacuccgagugcaucacccccaacggcuccauccccaacgacaagcccuuccagaacgucaaccgcaucaccuacggcgccugcccccgcuacgucaagcagaacacccucaagcucgccaccggcaugcgcaacguccccgagaagcagacccgcggcaucuucggcgccaucgccggcuucaucgagaacggcugggagggcauggucgacggcugguacggcuuccgccaccagaacuccgagggcaccggccaggccgccgaccucaaguccacccaggccgccaucaaccagaucaacggcaagcucaaccgccucaucgagaagaccaacgagaaguuccaccagaucgagaaggaguucuccgaggucgagggccgcauccaggaccucgagaaguacgucgaggacaccaagaucgacaucugguccuacaacgccgagcuccucgucgcccucgagaaccagcacaccaucgaccucaccgacuccgagaugaacaagcucuucgagcgcacccgcaagcagcuccgcgagaacgccgaggacaugggcaacggcugcuucaagaucuaccacaagugcgacaacgccugcaucggcuccauccgcaacggcaccuacgaccacgacgucuaccgcgacgaggcccucaacaaccgcuuccagaucaagggcgucgagcucaaguccggcuacaaggacuggauccucuggaucuccuucgccaucuccugcuuccuccucugcgucguccuccucggcuucaucaugugggccugccagaagggcaacauccgcugcaacaucugcaucuga

SEQ ID NO: 104554 - RNA, 1701 nt, Artificial Sequence
  derived and/or modified CDS sequence (opt2) from hemagglutinin__InfluenzaA__AFG72757
augaagaccaucaucgcccucuccuacauccucugccucgucuucgcccagaagauccccggcaacgacaacuccaccgccacccucugccucggccaccacgccguccccaacggcacccucgucaagaccaucaccaacgaccagaucgaggucaccaacgccaccgagcucguccaguccuccuccaccggccgcaucugcgacuccccccaccgcauccucgacggcgagaacugcacccucaucgacgcccuccucggcgacccccacugcgacggcuuccagaacaaggagugggaccucuucgucgagcgcuccaaggccuacuccaacugcuaccccuacgacguccccgacuacgccucccuccgcucccucgucgccuccuccggcacccucgaguucaacaacgaguccuucaacuggaccggcgucgcccagaacggcaccuccuacgccugcaagcgcuccuccaucaaguccuucuucucccgccucaacuggcuccaccagcucaaguacaaguaccccgcccucaacgucaccaugcccaacaacgacaaguucgacaagcucuacaucuggggcguccaccaccccuccaccgacuccgaccagaccuccaucuacgcccaggccuccggccgcgucaccgucuccaccaagcgcucccagcagaccgucauccccaacaucggcucccgccccuggguccgcggcaucuccucccgcaucuccauccacuggaccaucgucaagcccggcgacauccuccucaucaacuccaccggcaaccucaucgccccccgcggcuacuucaagauccgcuccggcaaguccuccaucaugcgcuccgacgcccccaucggcaagugcaacuccgagugcaucacccccaacggcuccauccccaacgacaagcccuuccagaacgucaaccgcaucaccuacggcgccugcccccgcuacgucaagcagaacacccucaagcucgccaccggcaugcgcaacguccccgagaagcagacccgcggcaucuucggcgccaucgccggcuucaucgagaacggcugggagggcauggucgacggcugguacggcuuccgccaccagaacuccgagggcaccggccaggccgccgaccucaaguccacccaggccgccaucaaccagaucaacggcaagcucaaccgccucaucgagaagaccaacgagaaguuccaccagaucgagaaggaguucuccgaggucgagggccgcauccaggaccucgagaaguacgucgaggacaccaagaucgaccucugguccuacaacgccgagcuccucgucgcccucgagaaccagcacaccaucgaccucaccgacuccgagaugaacaagcucuucgagcgcacccgcaagcagcuccgcgagaacgccgaggacaugggcaacggcugcuucaagaucuaccacaagugcgacaacgccugcaucggcuccauccgcaacggcaccuacgaccacgacgucuaccgcgacgaggcccucaacaaccgcuuccagaucaagggcgucgagcucaaguccggcuacaaggacuggauccucuggaucuccuucgccaucuccugcuuccuccucugcgucguccuccucggcuucaucaugugggccugccagaagggcaacauccgcugcaacaucugcaucuga

SEQ ID NO: 104555 - RNA, 1701 nt, Artificial Sequence
  derived and/or modified CDS sequence (opt2) from hemagglutinin__InfluenzaA__AFG72779
augaagaccaucaucgcccucuccuacauccucugccucgucuucgcccagaagcuccccggcaacgacaacuccaccgccacccucugccucggccaccacgccguccccaacggcacccucgucaagaccaucaccaacgaccagaucgaggucaccaacgccaccgagcucguccaguccuccuccaccggccgcaucugcgacuccccccaccgcauccucgacggcgagaacugcacccucaucgacgcccuccucggcgacccccacugcgacggcuuccagaacaaggagugggaccucuucgucgagcgcuccaaggccuacuccaacugcuaccccuacgacguccccgacuacgccucccuccgcucccucgucgccuccuccggcacccucgaguucaacaacgaguccuucaacuggaccggcgucgcccagaacggcaccuccuccgccugcaagcgccgcuccaucaaguccuucuucucccgccucaacuggcuccaccagcucaaguacaaguaccccgcccucaacgucaccaugcccaacaacgacaaguucgacaagcucuacaucuggggcguccaccaccccuccaccgacuccgaccagaccucccucuacgcccaggccuccggccgcgucaccgucuccacccgccgcucccagcagaccgucauccccaacaucggcucccgccccuggguccgcggcgucuccuccggcaucuccaucuacuggaccaucgucaagcccggcgacauccuccucaucaacuccaccggcaaccucaucgccccccgcggcuacuucaagauccgcuccggcaaguccuccaucaugcgcuccgacgcccccaucggcaagugcaacuccgagugcaucacccccaacggcuccauccccaacgacaagcccuuccagaacgucaaccgcaucaccuacggcgccugcccccgcuacgucaagcagaacacccucaagcucgccaccggcaugcgcaacguccccgagaagcagacccgcggcaucuucggcgccaucgccggcuucaucgagaacggcugggagggcauggucgacggcugguacggcuuccgccaccagaacuccgagggcaccggccaggccgccgaccucaaguccacccaggccgccaucaaccagaucaacggcaagcucaaccgccucaucgagaagaccaacgagaaguuccaccagaucgagaaggaguucuccgaggucgagggccgcauccaggaccucgagaaguacgucgaggacaccaagaucgaccucugguccuacaacgccgagcuccucgucgcccucgagaaccagcacaccaucgaccucaccgacuccgagaugaacaagcucuucgagcgcacccgcaagcagcuccgcgagaacgccgaggacaugggcaacggcugcuucaagaucuaccacaagugcgacaacgccugcaucggcuccauccgcaacggcaccuacgaccacgacgucuaccgcgacgaggcccucaacaaccgcuuccagaucaagggcgucgagcucaaguccggcuacaaggacuggauccucuggaucuccuucgccaucuccugcuuccuccucugcgucguccuccucggcuucaucaugugggccugccagaagggcaacauccgcugcaacaucugcaucuga

SEQ ID NO: 104556 - RNA, 1701 nt, Artificial Sequence
  derived and/or modified CDS sequence (opt2) from hemagglutinin__InfluenzaA__AFG72801
augaagaccaucaucgcccucuccuacauccucugccucgucuucgcccagaagcuccccggcaacgacaacuccaccgccacccucugccucggccaccacgccgucuccaacggcacccucgucaagaccaucaccaacgaccagaucgaggucaccaacgccaccgagcucguccaguccuccuccaccggccgcaucugcgacuccccccaccagauccucgacggcgagaacugcacccucaucgacgcccuccucggcgacccccacugcgacggcuuccagaacaaggagugggaccucuucgucgagcgcuccaaggccuacuccaacugcuaccccuacgacguccccgacuacgccucccuccgcucccucgucgccuccuccggcacccucgaguucaacaacgaguccuucaacuggaccggcgucgcccagaacggcaccuccuccgccugcaagcgccgcuccaacaaguccuucuucucccgccucaacuggcuccaccagcucaaguacaaguaccccgcccucaacgucaccaugcccaacaacgagaaguucgacaagcucuacaucuggggcguccaccaccccuccaccgacuccgaccagaucuccaucuacgcccaguccuccggccgcgucaccgucuccaccaagcgcucccagcagaccgucauccccaacaucggcuccucccccuggguccgcggcgucuccucccgcaucuccaucuacuggaccaucgucaagcccggcgacauccuccucaucaacuccaccggcaaccucaucgccccccgcggcuacuucaagauccgcuccggcaaguccuccaucaugcgcuccgacgcccccaucggcaagugcaacuccgagugcaucacccccaacggcuccauccccaacgacaagcccuuccagaacgucaaccgcaucaccuacggcgccugcccccgcuacgucaagcagaacacccucaagcucgccaccggcaugcgcaacguccccgagaagcagacccgcggcaucuucggcgccaucgccggcuucaucgagaacggcugggagggcauggucgacggcugguacggcuuccgccaccagaacuccgagggcaccggccaggccgccgaccucaaguccacccaggccgccaucaaccagaucaacggcaagcucaaccgccucaucgagaagaccaacgagaaguuccaccagaucgagaaggaguucuccgaggucgagggccgcauccaggaccucgagaaguacgucgaggacaccaagaucgaccucugguccuacaacgccgagcuccucgucgcccucgagaaccagcacaccaucgaccucaccgacuccgagaugaacaagcucuucgagcgcaccaagaagcagcuccgcgagaacgccgaggacaugggcaacggcugcuucaagaucuaccacaagugcgacaacgccugcaucggcuccauccgcaacggcaccuacgaccacgacgucuaccgcgacgaggcccucaacaaccgcuuccagaucaagggcgucgagcucaaguccggcuacaaggacuggauccucuggaucuccuucgccaucuccugcuuccuccucugcgucguccuccucggcuucaucaugugggccugccagaagggcaacauccgcugcaacaucugcaucuga

SEQ ID NO: 104557 - RNA, 1701 nt, Artificial Sequence
  derived and/or modified CDS sequence (opt2) from hemagglutinin__InfluenzaA__AFG72812
augaagaccaucaucgcccucuccuacauccucugccucgucuucgcccagaagcuccccggcaacgacaacuccaccgccacccucugccucggccaccacgccguccccaacggcacccucgucaagaccaucaccaacgaccagaucgaggucaccaacgccaccgagcucguccaguccuccuccaccggccgcaucugcgacuccccccaccagauccucgacggcgagaacugcacccucaucgacgcccuccucggcgacccccacugcgacggcuuccagaacaaggagugggaccucuucgucgagcgcuccaaggccuacuccaacugcuaccccuacgacguccccgacuacgucucccuccgcucccucgucgccuccuccggcacccucgaguucaacaacgaguccuucaacuggaccggcgucgcccagaacggcaccuccuccgccugcaagcgccgcuccaacaaguccuucuucucccgccucaacuggcuccaccagcucaaguacaaguaccccgcccucaacgucaccaugcccaacaacgagaaguucgacaagcucuacaucuggggcguccaccaccccggcaccgacuccgaccagaucucccucuacgcccaggccuccggccgcgucaccgucuccaccaagcgcucccagcagaccgucauccccaacaucggcucccgccccuggguccgcggcgucuccucccgcaucuccaucuacuggaccaucgucaagcccggcgacauccuccucaucaacuccaccggcaaccucaucgccccccgcggcuacuucaagauccgcuccggcaaguccuccaucaugcgcuccgacgcccccaucggcaagugcaacuccgagugcaucacccccaacggcuccauccccaacgacaagcccuuccagaacgucaaccgcaucaccuacggcgccugcccccgcuacgucaagcagaacacccucaagcucgccaccggcaugcgcaacguccccgagaagcagacccgcggcaucuucggcgccaucgccggcuucaucgagaacggcugggagggcaugauggacggcugguacggcuuccgccaccucaacuccgagggcaccggccaggccgccgaccucaaguccacccaggccgccaucaaccagaucaacggcaagcucaaccgccucaucgagaagaccaacgagaaguuccaccagaucgagaaggaguucuccgaggucgagggccgcauccaggaccucgagaaguacgucgaggacaccaagaucgaccucugguccuacaacgccgagcuccucgucgcccucgagaaccagcacaccaucgaccucaccgacuccgagaugaacaagcucuucgagcgcaccaagaagcagcuccgcgagaacgccgaggacaugggcaacggcugcuucaagaucuaccacaagugcgacaacgccugcaucggcuccauccgcaacggcaccuacgaccacgacgucuaccgcgacgaggcccucaacaaccgcuuccagaucaagggcgucgagcucaaguccggcuacaaggacuggauccucuggaucuccuucgccaucuccugcuuccuccucugcaucguccuccucggcuucaucaugugggccugccagaagggcaacauccgcugcaacaucugcaucuga

SEQ ID NO: 104558 - RNA, 1701 nt, Artificial Sequence
  derived and/or modified CDS sequence (opt2) from hemagglutinin__InfluenzaA__AFG72823
augaagaccaucaucgcccucuccuacauccucugccucgucuucgcccagaagcuccccggcaacgacaacuccaccgccacccucugccucggccaccacgccguccccaacggcaccaucgucaagaccaucaccaacgaccagaucgaggucaccaacgccaccgagcucguccaguccuccuccaccggcggcaucugcgacuccccccaccagauccucgacggcgagaacugcacccucaucgacgcccuccucggcgacccccagugcgacggcuuccagaacaagaagugggaccucuucgucgagcgcuccaaggccuacuccaacugcuaccccuacgacguccccgacuacgccucccuccgcucccucgucgccuccuccggcacccucgaguucaacaacgaguccuucaacuggaccggcgucacccagaacggcaccuccuccgccugcaagcgccgcuccaacaaguccuucuucucccgccucaacuggcucacccaccucaaguacaaguaccccgcccucaacgucaccaugcccaacaacgagaaguucgacaagcucuacaucuggggcguccuccaccccggcaccgacuccgaccagaucucccucuacgcccaggccuccggccgcaucaccgucuccaccaagcgcucccagcagaccgucauccccaacaucggcucccgcccccgcguccgcggcgucuccucccgcaucuccaucuacuggaccaucgucaagcccggcgacauccuccucaucaacuccaccggcaaccucaucgccccccgcggcuacuucaagauccgcuccggcaaguccuccaucaugcgcuccgacgcccccaucggcaagugcaacuccgagugcaucacccccaacggcuccauccccaacgacaagcccuuccagaacgucaaccgcaucaccuacggcgccugcccccgcuacaucaagcagaacacccucaagcucgccaccggcaugcgcaacguccccgagaagcagacccgcggcaucuucggcgccaucgccggcuucaucgagaacggcugggagggcauggucgacggcugguacggcuuccgccaccagaacuccgagggcaccggccaggccgccgaccucaaguccacccaggccgccaucaaccagaucaacggcaagcucaaccgccucaucggcaagaccaacgagaaguuccaccagaucgagaaggaguucuccgaggucgagggccgcauccaggaccucgagaaguacgucgaggacaccaagaucgaccucugguccuacaacgccgagcuccucgucgcccucgagaaccagcacaccaucgaccucaccgacuccgagaugaacaagcucuucgagcgcaccaagaagcagcuccgcgagaacgccgaggacaugggcaacggcugcuucaagaucuaccacaagugcgacaacgccugcaucggcuccauccgcaacggcaccuacgaccacgacgucuaccgcgacgaggcccucaacaaccgcuuccagaucaagggcgucgagcucaaguccggcuacaaggacuggauccucuggaucuccuucgccaucuccugcuuccuccucugcgucgcccuccucggcuucaucaugugggccugccagaagggcaacauccgcugcaacaucugcaucuga

SEQ ID NO: 104559 - RNA, 1701 nt, Artificial Sequence
  derived and/or modified CDS sequence (opt2) from hemagglutinin__InfluenzaA__AFG72834
augaagaccaucaucgcccucuccuacauccucugccucgucuucgcccagaagcuccccggcaacgacaacuccaccgccacccucugccucggccaccacgccguccccaacggcacccucgucaagaccaucaccaacgaccagaucgaggucaccaacgccaccgagcucguccaguccuccuccaccggccgcaucugcgacuccccccaccagauccucgacggcgagaacugcacccucaucgacgcccuccucggcgacccccacugcgacggcuuccagaacaaggagugggaccucuucgucgagcgcuccaaggccuacuccaacugcuaccccuacgacguccccgacuacgucucccuccgcucccucgucgccuccuccggcacccucgaguucaacaacgaguccuucaacuggaccggcgucgcccagaacggcaccuccuccgccugcaagcgccgcuccaacaaguccuucuucucccgccucaacuggcuccaccagcucaaguacaaguaccccgcccucaacgucaccaugcccaacaacgagaaguucgacaagcucuacaucuggggcguccaccaccccggcaccgacuccgaccagaucucccucuacgcccaggccuccggccgcgucaccgucuccaccaagcgcucccagcagaccgucauccccaacaucggcucccgccccuggguccgcggcgucuccucccgcaucuccaucuacuggaccaucgucaagcccggcgacauccuccucaucaacuccaccggcaaccucaucgccccccgcggcuacuucaagauccaguccggcaaguccuccaucaugcgcuccgacgcccccaucggcaagugcaacuccgagugcaucacccccaacggcuccauccccaacgacaagcccuuccagaacgucaaccgcaucaccuacggcgccugcccccgcuacgucaagcagaacacccucaagcucgccaccggcaugcgcaacguccccgagaagcagacccgcggcaucuucggcgccaucgccggcuucaucgagaacggcugggagggcaugauggacggcugguacggcuuccgccaccagaacuccgagggcaccggccaggccgccgaccucaaguccacccaggccgccaucaaccagaucaacggcaagcucaaccgccucaucgagaagaccaacgagaaguuccaccagaucgagaaggaguucuccgaggucgagggccgcauccaggaccucgagaaguacgucgaggacaccaagaucgaccucugguccuacaacgccgagcuccucgucgcccucgagaaccagcacaccaucgaccucaccgacuccgagaugaacaagcucuucgagcgcaccaagaagcagcuccgcgagaacgccgaggacaugggcaacggcugcuucaagaucuaccacaagugcgacaacgccugcaucggcuccauccgcaacggcaccuacgaccacgacgucuaccgcgacgaggcccucaacaaccgcuuccagaucaagggcgucgagcucaaguccggcuacaaggacuggauccucuggaucuccuucgccaucuccugcuuccuccucugcaucguccuccucggcuucaucaugugggccugccagaagggcaacauccgcugcaacaucugcaucuga

SEQ ID NO: 104560 - RNA, 1701 nt, Artificial Sequence
  derived and/or modified CDS sequence (opt2) from hemagglutinin__InfluenzaA__AFG72845
augaagaccaucaucgcccucuccuacauccucugccucgucuucgcccagaagcuccccggcaacgacaacuccaccgccacccucugccucggccaccacgccguccccaacggcacccucgucaagaccaucaccaacgaccagaucgaggucaccaacgccaccgagcucguccaguccuccuccaccucccgcaucugcgacuccccccaccagauccucgacggcgagaacugcacccucaucgacgcccuccucggcgacccccacugcgacggcuuccagaacaaggagugggaccucuucgucgagcgcuccaaggccuacuccaacugcuaccccuacgacguccccgacuacgucucccuccgcucccucgucgccuccuccggcacccucgaguucaacaacgaguccuucaacuggaccggcgucgcccagaacggcaccuccuccgccugcaagcgccgcuccgacaaguccuucuucucccgccucaacuggcuccaccagcuccgcuacaaguaccccgcccucaacgucaccaugcccaacaacgagaaguucgacaagcucuacaucuggggcguccaccaccccggcaccgacuccgaccagaucucccucuacgcccaggccuccggccgcgucaccaucuccaccaagcgcucccagcagaccgucauccccaacaucggcucccgccccuggguccgcggcgucuccucccgcaucuccauccacuggaccaucgucaagcccggcgacauccuccucaucaacuccaccggcaaccucaucgccccccgcggcuacuucaagauccgcuccggcaaguccuccaucaugcgcuccgacgcccccaucggcaagugcaacuccgagugcaucacccccaacggcuccauccccaacgacaagcccuuccagaacgucaaccgcaucaccuacggcgccugcccccgcuacgucaagcagaagacccucaagcucgccaccggcaugcgcaacguccccgagaagcagacccgcggcaucuucggcgccaucgccggcuucaucgagaacggcugggagggcaugauggacggcugguacggcuuccgccaccagaacuccgagggcaccggccaggccgccgaccucaaguccacccaggccgccaucaaccagaucaacggcaagcucaaccgccucaucgagaagaccaacgagaaguuccaccagaucgagaaggaguucuccgaggucgagggccgcauccaggaccucgagaaguacgucgaggacaccaagaucgaccucugguccuacaacgccgagcuccucgucgcccucgagaaccagcacaccaucgaccucaccgacuccgagaugaacaagcucuucgagcgcaccaagaagcagcuccgcgagaacgccgaggacaugggcaacggcugcuucaagaucuaccacaagugcgacaacgccugcaucggcuccauccgcaacggcaccuacgaccacgacgucuaccgcgacgaggcccucaacaaccgcuuccagaucaagggcgucgagcucaaguccggcuacaaggacuggauccucuggaucuccuucgccaucuccugcuuccuccucugcaucguccuccucggcuucaucaugugggccugccagaagggcaacauccgcugcaacaucugcaucuga

SEQ ID NO: 104561 - RNA, 1701 nt, Artificial Sequence
  derived and/or modified CDS sequence (opt2) from hemagglutinin__InfluenzaA__AFG72856
augaagaccaucaucgcccucuccuacauccucugccucgucuucgcccagaagcuccccggcaacgacaacuccaccgccacccucugccucggccaccacgccguccccaacggcaccaucgucaagaccaucaccaacgaccagaucgaggucaccaacgccaccgagcucguccaguccuccuccaccggcggcaucugcgacuccccccaccagauccucgacggcgagaacugcacccucaucgacgcccuccucggcgacccccagugcgacggcuuccagaacaagaagugggaccucuucgucgagcgcuccaaggccuacuccaacugcuaccccuacgacguccccgacuacgccucccuccgcucccucaucgccuccuccggcacccucgaguucaccaacgaguccuucaacuggaccggcgucacccagaacggcaccuccuccgccugcaagcgccgcuccaacaaguccuucuucucccgccucaacuggcucacccaccucaaguacaaguaccccgcccucaacgucaccaugcccaacaacgagaaguucgacaagcucuacaucuggggcguccaccaccccggcaccgacuccgaccagaucucccucuacgcccaggccuccggccgcaucaccgucuccaccaagcgcucccagcagaccgucauccccaacaucggcucccgcccccgcguccgcgacaucuccucccgcaucuccaucuacuggaccaucgucaagcccggcgacauccuccucaucaacuccaccggcaaccucaucgccccccgcggcuacuucaagauccgcuccggcaaguccuccaucaugcgcuccgacgcccccaucggcaagugcaacuccgagugcaucacccccaacggcuccauccccaacgacaagcccuuccagaacgucaaccgcaucaccuacggcgccugcccccgcuacgucaagcagaacacccucaagcucgccaccggcaugcgcaacguccccgagaagcagacccgcggcaucuucggcgccaucgccggcuucaucgagaacggcugggagggcauggucgacggcugguacggcuuccgccaccagaacuccgagggcaccggccaggccgccgaccucaaguccacccaggccgccaucaaccagaucaacggcaagcucaacaagcucaucggcaagaccaacgagaaguuccaccagaucgagaaggaguucuccgaggucgagggccgcauccaggaccucgagaaguacgucgaggacaccaagaucgaccucugguccuacaacgccgagcuccucgucgcccucgagaaccagcacaccaucgaccucaccgacuccgagaugaacaagcucuucgagcgcaccaagaagcagcuccgcgagaacgccgaggacaugggcaacggcugcuucaagaucuaccacaagugcgacaacgccugcaucggcuccauccgcaacggcaccuacgaccacgacgucuaccgcgacgaggcccucaacaaccgcuuccagaucaagggcgucgagcucaaguccggcuacaaggacuggauccucuggaucuccuucgccaucuccugcuuccuccucugcgucguccuccucggcuucaucaugugggccugccagaagggcaacauccgcugcaacaucugcaucuga

SEQ ID NO: 104562 - RNA, 1701 nt, Artificial Sequence
  derived and/or modified CDS sequence (opt2) from hemagglutinin__InfluenzaA__AFG72867
augaagaccaucaucgcccucuccuacauccucugccucgucuucgcccagaagcuccccggcaacgacaacuccaccgccacccucugccucggccaccacgccguccccaacggcacccucgucaagaccaucaccaacgaccagaucgaggucaccaacgccaccgagcucguccaguccuccuccaccggccgcaucugcgacuccccccaccagauccucgacggcgagaacugcacccucaucgacgcccuccucggcgacccccacugcgacggcuuccagaacaaggagugggaccucuucgucgagcgcuccaaggccuacuccaacugcuaccccuacgacguccccgacuacgucucccuccgcucccucgucgccuccuccggcacccucgaguucaacaacgaguccuucaacuggaccggcgucgcccagaacggcaccuccuccgccugcaagcgccgcuccaacaaguccuucuucucccgccucaacuggcuccaccagcucaagaacaaguaccccgcccucaacgucaccaugcccaacaacgagaaguucgacaagcucuacaucuggggcguccaccaccccggcaccgacuccgaccagaucucccucuacgcccaggccuccggccgcgucaccgucuccaccaagcgcucccagcagaccgucauccccaacaucggcucccgcccccgcguccgcgacaucuccucccgcaucuccaucuacuggaccaucgucaagcccggcgacauccuccucaucaacuccaccggcaaccucaucgccccccgcggcuacuucaagauccgcuccggcaaguccuccaucaugcgcuccgacgcccccaucggcaagugcaacuccgagugcaucacccccaacggcuccauccccaacgacaagcccuuccagaacgucaaccgcaucaccuacggcgccugcccccgcuacgucaagcagaacacccucaagcucgccaccggcaugcgcaacguccccgagaagcagacccgcggcaucuucggcgccaucgccggcuucaucgagaacggcugggagggcaugauggacggcugguacggcuuccgccaccagaacuccgagggcaccggccaggccgccgaccucaaguccacccaggccgccaucaaccagaucaacggcaagcucaaccgccucaucgagaagaccaacgagaaguuccaccagaucgagaaggaguucuccgaggucgagggccgcauccaggaccucgagaaguacgucgaggacaccaagaucgaccucugguccuacaacgccgagcuccucgucgcccucgagaaccagcacaccaucgaccucaccgacuccgagaugaacaagcucuucgagcgcaccaagaagcagcuccgcgagaacgccgaggacaugggcaacggcugcuucaagaucuaccacaagugcgacaacgccugcaucggcuccauccgcaacggcaccuacgaccacgacgucuaccgcgacgaggcccucaacaaccgcuuccagaucaagggcgucgagcucaaguccggcuacaaggacuggauccucuggaucuccuucgccaucuccugcuuccuccucugcaucguccuccucggcuucaucaugugggccugccagaagggcaacauccgcugcaacaucugcaucuga

SEQ ID NO: 104563 - RNA, 1701 nt, Artificial Sequence
  derived and/or modified CDS sequence (opt2) from hemagglutinin__InfluenzaA__AFG72922
augaagaccaucaucgcccucuccuacauccucugccucgucuucgcccagaagcuccccggcgacgacaacuccaccgccacccucugccucggccaccacgccguccccaacggcaccaucgucaagaccaucaccaacgaccagaucgaggucaccaacgccaccgagcucguccaguccuccuccaccggcgagaucugcgacuccccccaccagauccucgacggcgagaacugcacccucaucgacgcccuccucggcgacccccagugcgacggcuuccagaacaagaagugggaccucuucgucgagcgcuccaaggccuacuccaacugcuaccccuacgacguccccgacuacgccucccuccgcucccucgucgccuccuccggcacccucgaguucaacaacgaguccuucaacuggaccggcgucacccagaacggcaccuccuccuccugcauccgcaaguccaacaacuccuucuucucccgccucaacuggcucacccaccucaaguucaaguaccccgcccucaacgucaccaugcccaacaacgagcaguucgacaagcucuacaucuggggcguccaccaccccggcaccgacaacgaccagaucuuccucuacgcccaggccuccggccgcaucaccgucuccaccaagcgcucccagcagaccgucauccccaacaucggcucccgcccccgcguccgcaacauccccucccgcaucuccaucuacuggaccaucgucaagcccggcgacauccuccucaucaacuccaccggcaaccucaucgccccccgcggcuacuucaagauccgcuccggcaaguccuccaucaugcgcuccgacgcccccaucggcaagugcaacuccgagugcaucacccccaacggcuccauccccaacgacaagcccuuccagaacgucaaccgcaucaccuacggcgccugcccccgcuacgucaagcagaacacccucaagcucgccaccggcaugcgcaacguccccgagaagcagacccgcggcaucuucggcgccaucgccggcuucaucgagaacggcugggagggcauggucgacggcugguacggcuuccgccaccagaacuccgagggccgcggccaggccgccgaccucaaguccacccaggccgccaucgaccagaucaacggcaagcucaaccgccucaucggcaagaccaacgagaaguuccaccagaucgagaaggaguucuccgaggucgagggccgcauccaggaccucgagaaguacgucgaggacaccaagaucgaccucugguccuacaacgccgagcuccucgucgcccucgagaaccagcacaccaucgaccucaccgacuccgagaugaacaagcucuucgagaagaccaagaagcagcuccgcgagaacgccgaggacaugggcaacggcugcuucaagaucuaccacaagugcgacaacgccugcaucggcuccauccgcaacggcaccuacgaccacgacgucuaccgcgacgaggcccucaacaaccgcuuccagaucaagggcgucgagcucaaguccggcuacaaggacuggauccucuggaucuccuucgccaucuccugcuuccuccucugcgucgcccuccucggcuucaucaugugggccugccagaagggcaacauccgcugcaacaucugcaucuga

SEQ ID NO: 104564 - RNA, 1701 nt, Artificial Sequence
  derived and/or modified CDS sequence (opt2) from hemagglutinin__InfluenzaA__AFG72933
augaagaccaucaucgcccucuccuacauccucugccucgucuucgcccagaagcuccccggcaacgacaacuccaccgccacccucugccucggccaccacgccguccccaacggcaccaucgucaagaccaucaccaacgaccagaucgaggucaccaacgccaccgagcucguccaguccuccuccaccggcgagaucugcgacuccccccaccagauccucgacggcgagaacugcacccucaucgacgcccuccucggcgacccccagugcgacggcuuccagaacaagaagugggaccucuucgucgagcgcuccaaggccuacuccaacugcuaccccuacgacguccccgacuacgccucccuccgcucccucgucgccuccuccggcacccucgaguucaacaacgaguccuucaacuggaccggcgucacccagaacggcaccuccuccgccugcguccgccgcuccaacaacuccuucuucucccgccucaacuggcucacccaccucaaguucaaguaccccgcccucaacgucaccaugcccaacaacgagcaguucgacaagcucuacaucuggggcguccaccaccccggcaccgacaacgaccagaucuuccucuacgcccaggccuccggccgcaucaccgucuccaccaagcgcucccagcagaccgucauccccaacaucggcucccgcccccgcguccgcaacauccccucccgcaucuccaucuacuggaccaucgucaagcccggcgacauccuccucaucaacuccaccggcaaccucaucgccccccgcggcuacuucaagauccgcuccggcaaguccuccaucaugcgcuccgacgcccccaucggcaagugcaacuccgagugcaucacccccaacggcuccauccccaacgacaagcccuuccagaacgucaaccgcaucaccuacggcgccugcccccgcuacgucaagcagaacacccucaagcucgccaccggcaugcgcaacguccccgagaagcagacccgcggcaucuucggcgccaucgccggcuucaucgagaacggcugggagggcauggucgacggcugguacggcuuccgccaccagaacuccgagggccgcggccaggccgccgaccucaaguccacccaggccgccaucgaccagaucaacggcaagcucaaccgccucaucggcaagaccaacgagaaguuccaccagaucgagaaggaguucuccgaggucgagggccgcauccaggaccucgagaaguacgucgaggacaccaagaucgaccucugguccuacaacgccgagcuccucgucgcccucgagaaccagcacaccaucgaccucaccgacuccgagaugaacaagcucuucgagaagaccaagaagcagcuccgcgagaacgccgaggacaugggcaacggcugcuucaagaucuaccacaagugcgacaacgccugcaucggcuccauccgcaacggcaccuacgaccacgacgucuaccgcgacgaggcccucaacaaccgcuuccagaucaagggcgucgagcucaaguccggcuacaaggacuggauccucuggaucuccuucgccaucuccugcuuccuccucugcgucgcccuccucggcuucaucaugugggccugccagaagggcaacauccgcugcaacaucugcaucuga

SEQ ID NO: 104565 - RNA, 1701 nt, Artificial Sequence
  derived and/or modified CDS sequence (opt2) from hemagglutinin__InfluenzaA__AFG72955
augaagaccaucaucgcccucuccuacauccucugccucgucuucgcccagaagcuccccggcaacgacaacuccaccgccacccucugccucggccaccacgccguccccaacggcaccaucgucaagaccaucaccaacgaccagaucgaggucaccaacgccaccgagcucguccaguccuccuccaccggcgagaucugcgacuccccccaccagauccucgacggcgagaacugcacccucaucgacgcccuccucggcgacccccagugcgacggcuuccagaacaagaagugggaccucuucgucgagcgcuccaaggccuacuccaacugcuaccccuacgacguccccgacuacgccucccuccgcucccucaucgccuccuccggcacccucgaguucaacaacgaguccuucaacuggaccggcgucacccagaacggcaccuccuccgccugcauccgccgcuccaacaacuccuucuucucccgccucaacuggcucacccaccuccgcuucaaguaccccgcccucaacgucaccaugcccaacaacgagcaguucgacaagcucuacaucuggggcguccaccaccccggcaccgacaacgaccagaucuuccucuacgcccaggccuccggccgcaucaccgucuccaccaagcgcucccagcagaccgucauccccaacaucggcucccgcccccgcguccgcaacauccccucccgcaucuccaucuacuggaccaucgucaagcccggcgacauccuccucaucaacuccaccggcaaccucaucgccccccgcggcuacuucaagauccgcuccggcaaguccuccaucaugcgcuccgacgcccccaucggcaagugcaacuccgagugcaucacccccaacggcuccauccccaacgacaagcccuuccagaacgucaaccgcaucaccuacggcgccugcccccgcuacgucaagcagaacacccucaagcucgccaccggcaugcgcaacguccccgagaagcagacccgcggcaucuucggcgccaucgccggcuucaucgagaacggcugggagggcauggucgacggcugguacggcuuccgccaccagaacuccgagggccgcggccaggccgccgaccucaaguccacccaggccgccaucgaccagaucaacggcaagcucaaccgccucaucggcaagaccaacgagaaguuccaccagaucgagaaggaguucuccgaggucgagggccgcauccaggaccucgagaaguacgucgaggacaccaagaucgaccucugguccuacaacgccgagcuccucgucgcccucgagaaccagcacaccaucgaccucaccgacuccgagaugaacaagcucuucgagaagaccaagaagcagcuccgcgagaacgccgaggacaugggcaacggcugcuucaagaucuaccacaagugcgacaacgccugcaucggcuccauccgcaacggcaccuacgaccacgacgucuaccgcgacgaggcccucaacaaccgcuuccagaucaagggcgucgagcucaaguccggcuacaaggacuggauccucuggaucuccuucgccaucuccugcuuccuccucugcgucgcccuccucggcuucaucaugugggccugccagaagggcaacauccgcugcaacaucugcaucuga

SEQ ID NO: 104566 - RNA, 1701 nt, Artificial Sequence; identical to SEQ ID NO: 97676
  derived and/or modified CDS sequence (opt2) from hemagglutinin__InfluenzaA__AFG98808

SEQ ID NO: 104567 - RNA, 1701 nt, Artificial Sequence; identical to SEQ ID NO: 97676
  derived and/or modified CDS sequence (opt2) from hemagglutinin__InfluenzaA__AFG98819

SEQ ID NO: 104568 - RNA, 1701 nt, Artificial Sequence
  derived and/or modified CDS sequence (opt2) from hemagglutinin__InfluenzaA__AFG98830
augaagaccaucaucgcccucuccuacaucuucugccucguccucggccaggaccuccccggcaacgacaaguccaccgccacccucugccucggccaccacgccguccccaacggcacccucgucaagaccaucaccaacgaccagaucgaggucaccaacgccaccgagcucguccaguccuccuccaccggcaagaucugcaacaacccccaccgcauccucgacggcaucgacugcacccucaucgacgcccuccucggcgacccccacugcgacggcuuccagaacgagaccugggaccucuucgucgagcgcuccaaggccuucuccaacugcuaccccuacgacguccccgacuacgccucccuccgcucccucgucgccuccuccggcacccucgaguucaucaccgagggcuucaccuggaccggcgucacccagaacggcggcuccuccgccugcaagcgcggccccggcuccggcuucuucucccgccucaacuggcucaccaaguccggcuccaccuaccccguccucaacgucaccaugcccaacaacgacaacuucgacaagcucuacaucuggggcguccaccaccccuccaccaaccaggagcagaccucccucuacguccaggccuccggccgcgucaccgucuccacccgccgcucccagcagaccaucauccccaacaucggcucccgccccuggguccgcggccucuccucccgcaucuccaucuacuggaccaucgucaagcccggcgacauccucaucaucaacuccaacggcaaccucaucgccccccgcggcuacuucaagaugcgcaccggcaaguccuccaucaugcgcuccgacgcccccaucgacaccugcaucuccgagugcaucacccccaacggcuccauccccaacgacaagcccuuccagaacgucaacaagaucaccuacggcgccugccccaaguacgucaagcagaacacccucaagcucgccaccggcaugcgcaacguccccgagaagcagacccgcggccucuucggcgccaucgccggcuucaucgagaacggcugggagggcaugaucgacggcugguacggcuuccgccaccagaacuccgagggcaccggccaggccgccgaccucaaguccacccaggccgccaucgaccagaucaacggcaagcucaaccgcgucaucgagaagaccaacgagaaguuccaccagaucgagaaggaguucuccgaggucgagggccgcauccaggaccucgagaaguacgucgaggacaccaagaucgaccucugguccuacaacgccgagcuccucgucgcccucgagaaccagcacaccaucgaccucaccgacuccgagaugaacaagcucuucgagaagacccgccgccagcuccgcgagaacgccgaggacaugggcaacggcugcuucaagaucuaccacaagugcgacaacgccugcaucggcuccauccgcaacggcaccuacgaccacgacgucuaccgcgacgaggcccucaacaaccgcuuccagaucaagggcgucgagcucaaguccggcuacaaggacuggauccucuggaucuccuucgccaucuccugcuuccuccucugcgucguccuccucggcuucaucaugugggccugccagaagggcaacauccgcugcaacaucugcaucuga

SEQ ID NO: 104569 - RNA, 1701 nt, Artificial Sequence
  derived and/or modified CDS sequence (opt2) from hemagglutinin__InfluenzaA__AFG98841
augaagaccaucaucgcccucuccuacaucuucugccucguccucggccaggaccuccccggcaacgacaaguccaccgccacccucugccucggccaccacgccguccccaacggcacccucgucaagaccaucaccaacgaccagaucgaggucaccaacgccaccgagcucguccaguccuccuccaccggcaagaucugcaacaacccccaccgcauccucgacggcaucgacugcacccucaucgacgcccuccucggcgacccccacugcgacggcuuccagaacgagaccugggaccucuucgucgagcgcuccaaggccuucuccaacugcuaccccuacgacguccccgacuacgccucccuccgcucccucgucgccuccuccggcacccucgaguucaucaccgagggcuucaccuggaccggcgucacccagaacggcggcuccaacgccugcaagcgcggccccggcuccggcuucuucucccgccucaacuggcucaccaaguccggcuccaccuaccccguccucaacgucaccaugcccaacaacgacaacuucgacaagcucuacaucuggggcguccaccaccccuccaccaaccaggagcagaccucccucuacguccaggccuccggccgcgucaccgucuccacccgccgcucccagcagaccaucauccccaacaucggcucccgccccuggguccgcggccucuccucccgcaucuccaucuacuggaccaucgucaagcccggcgacauccucaucaucaacuccaacggcaaccucaucgccccccgcggcuacuucaagaugcgcaccggcaaguccuccaucaugcgcuccgacgcccccaucggcaccugcaucuccgagugcaucacccccaacggcuccauccccaacgacaagcccuuccagaacgucaacaagaucaccuacggcgccugccccaaguacgucaagcagaacacccucaagcucgccaccggcaugcgcaacguccccgagaagcagacccgcggccucuucggcgccaucgccggcuucaucgagaacggcugggagggcaugaucgacggcugguacggcuuccgccaccagaacuccgagggcaccggccaggccgccgaccucaaguccacccaggccgccaucgaccagaucaacggcaagcucaaccgcgucaucgagaagaccaacgagaaguuccaccagaucgagaaggaguucuccgaggucgagggccgcauccaggaccucgagaaguacgucgaggacaccaagaucgaccucugguccuacaacgccgagcuccucgucgcccucgagaaccagcacaccaucgaccucaccgacuccgagaugaacaagcucuucgagaagacccgccgccagcuccgcgagaacgccgaggacaugggcaacggcugcuucaagaucuaccacaagugcgacaacgccugcaucggcuccauccgcaacggcaccuacgaccacgacgucuaccgcgacgaggcccucaacaaccgcuuccagaucaagggcgucgagcucaaguccggcuacaaggacuggauccucuggaucuccuucgccaucuccugcuuccuccucugcgucguccuccucggcuucaucaugugggccugccagaagggcaacauccgcugcaacaucugcaucuga

SEQ ID NO: 104570 - RNA, 1701 nt, Artificial Sequence; identical to SEQ ID NO: 96341
  derived and/or modified CDS sequence (opt2) from hemagglutinin__InfluenzaA__AFG98852

SEQ ID NO: 104571 - RNA, 1701 nt, Artificial Sequence
  derived and/or modified CDS sequence (opt2) from hemagglutinin__InfluenzaA__AFG98863
augaagaccaucaucgcccucuccuacaucuucugccucguccucggccaggaccuccccggcaacgacaacuccaccgccacccucugccucggccaccacgccguccccaacggcacccucgucaagaccaucaccaacgaccagaucgaggucaccaacgccaccgagcucguccaguccuccuccaccggcaagaucugcaacaacccccaccgcauccucgacggcaucgacugcacccucaucgacgcccuccucggcgacccccacugcgacggcuuccagaacgagaccugggaccucuucgucgagcgcuccaaggccuucuccaacugcuaccccuacgacguccccgacuacgccucccuccgcucccucgucgccuccuccggcacccucgaguucaucaacgagggcuucaccuggaccggcgucacccagaacggcggcuccuccgccugcaagcgcggccccgacuccggcuucuucucccgccucaacuggcucuacaaguccggcuccaccuaccccguccucaacgucaccaugcccaacaacgacaacuucgacaagcucuacaucuggggcguccaccaccccuccaccaaccaggagcagaccucccucuacguccaggccuccggccgcgucaccgucuccaccaagcgcucccagcagaccaucauccccaacaucggcucccgccccuggguccgcggccucuccucccgcaucuccaucuacuggaccaucgucaagcccggcgacauccucgucaucaacuccaacggcaaccucaucgccccccgcggcuacuucaagaugcgcaccggcaaguccuccaucaugcgcuccgacgcccccaucggcaccugcaucuccgagugcaucacccccaacggcuccauccccaacgacaagcccuuccagaacgucaacaagaucaccuacggcgccugccccaaguacgucaagcagaacacccucaagcucgccaccggcaugcgcaacguccccgagaagcagacccgcggccucuucggcgccaucgccggcuucaucgagaacggcugggagggcaugaucgacggcugguacggcuuccgccaccagaacuccgagggcaccggccaggccgccgaccucaaguccacccaggccgccaucgaccagaucaacggcaagcucaaccgcgucaucgagaagaccaacgagaaguuccaccagaucgagaaggaguucuccgaggucgagggccgcauccaggaccucgagaaguacgucgaggacaccaagaucgaccucugguccuacaacgccgagcuccucgucgcccucgagaaccagcacaccaucgaccucaccgacuccgagaugaacaagcucuucgagaagacccgccgccagcuccgcgagaacgccgaggacaugggcaacggcugcuuccgcaucuaccacaagugcgacaacgccugcaucggcuccauccgcaacggcaccuacgaccacgacgucuaccgcgacgaggcccucaacaaccgcuuccagaucaagggcgucgagcucaaguccggcuacaaggacuggauccucuggaucuccuucgccaucuccugcuuccuccucugcgucguccuccucggcuucaucaugugggccugccagaagggcaacauccgcugcaacaucugcaucuga

SEQ ID NO: 104572 - RNA, 1701 nt, Artificial Sequence
  derived and/or modified CDS sequence (opt2) from hemagglutinin__InfluenzaA__AFG98874
augaagaccaucaucgcccucuccuacaucuucugccucguccucggccaggacuuccccggcaacgacaacuccaccgccacccucugccucggccaccacgccguccccaacggcacccucgucaagaccaucaccaacgaccagaucgaggucaccaacgccaccgagcucguccaguccuccuccaccggcaagaucugcaacaacccccaccgcauccucgacggcaucgacugcacccucaucgacgcccuccucggcgacccccacugcgacggcuuccagaacgagaccugggaccucuucgucgagcgcuccaaggccuucuccaacugcuaccccuacgacguccccgacuacgccucccuccgcucccucgucgccuccuccggcacccucgaguucaucaacgagggcuucaccuggaccggcgucacccagaacggcggcuccaacgccugcaagcgcggccccgacaacggcuucuucucccgccucaacuggcucuacaaguccggcuccaccuaccccguccucaacgucaccaugcccaacaacgacaacuucgacaagcucuacaucuggggcguccaccaccccuccaccgaccaggagcagaccucccucuacguccaggccuccggccgcgucaccgucuccaccaagcgcucccagcagaccaucauccccaacaucggcucccgccccuggguccgcggccucuccucccgcaucuccaucuacuggaccaucgucaagcccggcgacauccucgucaucaacuccaacggcaaccucaucgccccccgcggcuacuucaagaugcgcaccggcaaguccuccaucaugcgcuccgacgcccccaucggcaccugcaucuccgagugcaucacccccaacggcuccauccccaacgacaagcccuuccagaacgucaacaagaucaccuacggcgccugccccaaguacgucaagcagaacacccucaagcucgccaccggcaugcgcaacguccccgagaagcagacccgcggccucuucggcgccaucgccggcuucaucgagaacggcugggagggcaugaucgacggcugguacggcuuccgccaccagaacuccgagggcaccggccaggccgccgaccucaaguccacccaggccgccaucgaccagaucaacggcaagcucaaccgcgucaucgagaagaccaacgagaaguuccaccagaucgagaaggaguucuccgaggucgagggccgcauccaggaccucgagaaguacgucgaggacaccaagaucgaccucugguccuacaacgccgagcuccucgucgcccucgagaaccagcacaccaucgaccucaccgacuccgagaugaacaagcucuucgagaagacccgccgccagcuccgcgagaacgccgaggacaugggcaacggcugcuucaagaucuaccacaagugcgacaacgccugcaucggcuccauccgcaacggcaccuacgaccacgacgucuaccgcgacgaggcccucaacaaccgcuuccagaucaagggcgucgagcucaaguccggcuacaaggacuggauccucuggaucuccuucgccaucuccugcuuccuccucugcgucguccuccucggcuucaucaugugggccugccagaagggcaacauccgcugcaacaucugcaucuga

SEQ ID NO: 104573 - RNA, 1701 nt, Artificial Sequence
  derived and/or modified CDS sequence (opt2) from hemagglutinin__InfluenzaA__AFG98885
augaagaccaucaucgcccucuccuacaucuucugccucguccucggccaggacuuccccggcaacgacaacuccaccgccacccucugccucggccaccacgccguccccaacggcacccucgucaagaccaucaccaacgaccagaucgaggucaccaacgccaccgagcucguccaguccuccuccaccggcaagaucugcaacaacccccaccgcauccucgacggcaucgacugcacccucaucgacgcccuccucggcgacccccacugcgacggcuuccagaacgagaccugggaccucuucgucgagcgcuccaaggccuucuccaacugcuaccccuacgacguccccgacuacgccucccuccgcucccucgucgccuccuccggcacccucgaguucaucaacgagggcuucaccuggaccggcgucacccagaacggcggcuccaacgccugcaagcgcggcaccgacuccggcuucuucucccgccucaacuggcucuacaaguccggcuccaccuaccccguccucaacgucaccaugcccaacaacgacaacuucgacaagcucuacaucuggggcguccaccaccccuccaccgaccaggagcagaccucccucuacguccaggccuccggccgcgucaccgucuccaccaagcgcucccagcagaccaucauccccaacaucggcucccgccccuggguccgcggccucuccucccgcaucuccaucuacuggaccaucgucaagcccggcgacauccucgucaucaacuccaacggcaaccucaucgccccccgcggcuacuucaagaugcgcaccggcaaguccuccaucaugcgcuccgacgcccccaucggcaccugcaucuccgagugcaucacccccaacggcuccauccccaacgacaagcccuuccagaacgucaacaagaucaccuacggcgccugccccaaguacgucaagcagaacacccucaagcucgccaccggcaugcgcaacguccccgagaagcagacccgcggccucuucggcgccaucgccggcuucaucgagaacggcugggagggcaugaucgacggcugguacggcuuccgccaccagaacuccgagggcaccggccaggccgccgaccucaaguccacccaggccgccaucgaccagaucaacggcaagcucaaccgcgucaucgagaagaccaacgagaaguuccaccagaucgagaaggaguucuccgaggucgagggccgcauccaggaccucgagaaguacgucgaggacaccaagaucgaccucugguccuacaacgccgagcuccucgucgcccucgagaaccagcacaccaucgaccucaccgacuccgagaugaacaagcucuucgagaagacccgccgccagcuccgcgagaacgccgaggacaugggcaacggcugcuucaagaucuaccacaagugcgacaacgccugcaucggcuccauccgcaacggcaccuacgaccacgacgucuaccgcgacgaggcccucaacaaccgcuuccagaucaagggcgucgagcucaaguccggcuacaaggacuggauccucuggaucuccuucgccaucuccugcuuccuccucugcgucguccuccucggcuucaucaugugggccugccagaagggcaacauccgcugcaacaucugcaucuga

SEQ ID NO: 104574 - RNA, 1701 nt, Artificial Sequence
  derived and/or modified CDS sequence (opt2) from hemagglutinin__InfluenzaA__AFG98896
augaagaccaucaucgcccucuccuacaucuucugccucguccucggccaggacuuccccggcaacgacaacuccaccgccacccucugccucggccaccacgccguccccaacggcacccucgucaagaccaucaccaacgaccagaucgaggucaccaacgccaccgagcucguccaguccuccuccaccggcaagaucugcaacaacccccaccgcauccucgacggcaucaacugcacccucaucgacgcccuccucggcgacccccacugcgacggcuuccagaacgagaccugggaccucuucgucgagcgcuccaaggccuucuccaacugcuaccccuacgacguccccgacuacgccucccuccgcucccucgucgccuccuccggcacccucgaguucaucaacgagggcuucaccuggaccggcgucacccagaacggcggcuccaacgccugcaagcgcggccccgacuccggcuucuucucccgccucaacuggcucuacaaguccggcuccgccuaccccguccucaacgucaccaugcccaacaacgacaacuucgacaagcucuacaucuggggcguccaccaccccuccaccgaccaggagcagaccaaccucuacguccagaccuccggccgcgucaccgucuccaccaagcgcucccagcagaccaucauccccaacaucggcucccgccccuggguccgcggccucuccucccgcaucuccaucuacuggaccaucgucaagcccggcgacauccucgucaucaacuccaacggcaaccucaucgccccccgcggcuacuucaagaugcgcaccggcaaguccuccaucaugcgcuccgacgcccccaucggcaccugcaucuccgagugcaucacccccaacggcuccauccccaacgacaagcccuuccagaacgucaacaagaucaccuacggcgccugccccaaguacgucaagcagaacacccucaagcucgccaccggcaugcgcaacguccccgagaagcagacccgcggcaucuucggcgccaucgccggcuucaucgagaacggcugggagggcaugaucgacggcugguacggcuuccgccaccagaacuccgagggcaccggccaggccgccgaccucaaguccacccaggccgccaucgaccagaucaacggcaagcucaaccgcgucaucgagaagaccaacgagaaguuccaccagaucgagaaggaguucuccgaggucgagggccgcauccaggaccucgagaaguacgucgaggacaccaagaucgaccucugguccuacaacgccgagcuccucgucgcccucgagaaccagcacaccaucgaccucaccgacuccgagaugaacaagcucuucgagaagacccgccgccagcuccgcgagaacgccgaggacaugggcaacggcugcuucaagaucuaccacaagugcgacaacgccugcaucggcuccauccgcaacggcaccuacgaccacgacgucuaccgcgacgaggcccucaacaaccgcuuccagaucaagggcgucgagcucaaguccggcuacaaggacuggauccucuggaucuccuucgccaucuccugcuuccuccucugcgucguccuccucggcuucaucaugugggccugccagaagggcaacauccgcugcaacaucugcaucuga

SEQ ID NO: 104575 - RNA, 1701 nt, Artificial Sequence
  derived and/or modified CDS sequence (opt2) from hemagglutinin__InfluenzaA__AFG98907
augaagaccaucaucgcccucuccuacaucuucugccucguccucggccaggaccuccccggcaacgacaacuccaccgccacccucugccucggccaccacgccguccccaacggcacccucgucaagaccaucaccaacgaccagaucgaggucaccaacgccaccgagcucguccaguccuccuccaccggcaagaucugcaacaacccccaccgcauccucgacggcaucaacugcacccucaucgacgcccuccucggcgacccccacugcgacggcuuccagaacgagaagugggaccucuucgucgagcgcuccaaggccuucuccaacugcuaccccuacgacguccccgacuacgccucccuccgcucccucgucgccuccuccggcacccucgaguucaucaacgagggcuucaacuggaccggcgucacccagaacggcggcuccaacgccugcaagcgcggccccgacugcggcuucuucucccgccucaacuggcucuacaaguccggcuccaccuaccccguccucaacgucaccaugcccaacaacgacaacuucgacaagcucuacaucuggggcguccaccaccccuccaccgaccaggagcagaccaaccucuacguccaggccuccggccgcgucaccgucuccaccaagcgcucccagcagaccaucauccccaacaucggcucccgccccuggguccgcggccucuccucccgcaucuccaucuacuggaccaucgucaagcccggcgacauccucgucaucaacuccaacggcaaccucaucgccccccgcggcuacuucaagaugcgcaccggcaaguccuccaucaugcgcuccgacgcccccaucggcaccugcaucuccgagugcaucacccccaacggcuccauccccaacgacaagcccuuccagaacgucaacaagaucaccuacggcgccugccccaaguacgucaagcagaacacccucaagcucgccaccggcaugcgcaacguccccgagaagcagacccgcggcaucuucggcgccaucgccggcuucaucgagaacggcugggagggcaugaucgacggcugguacggcuuccgccaccagaacuccgagggcaccggccaggccgccgaccucaaguccacccaggccgccaucgaccagaucaacggcaagcucaaccgcgucaucgagaagaccaacgagaaguuccaccagaucgagaaggaguucuccgaggucgagggccgcauccaggaccucgagaaguacgucgaggacaccaagaucgaccucugguccuacaacgccgagcuccucgucgcccucgagaaccagcacaccaucgaccucaccgacuccgagaugaacaagcucuucgagaagacccgccgccagcuccgcgagaacgccgaggacaugggcaacggcugcuucaagaucuaccacaagugcgacaacgccugcaucggcuccauccgcaacggcaccuacaaccacgacgucuaccgcgacgaggcccucaacaaccgcuuccagaucaagggcgucgagcucaaguccggcuacaaggacuggauccucuggaucuccuucgccaucuccugcuuccuccucugcgucguccuccucggcuucaucaugugggccugccagaagggcaacauccgcugcaacaucugcaucuga

SEQ ID NO: 104576 - RNA, 1701 nt, Artificial Sequence
  derived and/or modified CDS sequence (opt2) from hemagglutinin__InfluenzaA__AFG98918
augaagaccaucaucgcccucuccuacaucuucugccucguccucggccaggaccuccccggcaacgacaacuccaccgccacccucugccucggccaccacgccguccccaacggcacccucgucaagaccaucaccaacgaccagaucgaggucaccaacgccaccgagcucguccaguccuccuccaccggcaagaucugcaacaacccccaccgcauccucgacggcaucaacugcacccucaucgacgcccuccucggcgacccccacugcgacggcuuccagaacgagaagugggaccucuucgucgagcgcuccaaggccuucuccaacugcuaccccuacgacguccccgacuacgccucccuccgcucccucgucgccuccuccggcacccucgaguucaucaacgagggcuucaacuggaccggcgucacccagaacggcggcuccaacgccugcaagcgcggccccgaccgcggcuucuucucccgccucaacuggcucuacaaguccggcuccaccuaccccguccucaacgucaccaugcccaacaacgacaacuucgacaagcucuacaucuggggcguccaccaccccuccaccgaccaggagcagaccaaccucuacguccaggccuccggccgcgucaccgucuccaccaagcgcucccagcagaccaucauccccaacaucggcucccgccccuggguccgcggccucuccucccgcaucuccaucuacuggaccaucgucaagcccggcgacauccucgucaucaacuccaacggcaaccucaucgccccccgcggcuacuucaagaugcgcaccggcaaguccuccaucaugcgcuccgacgcccccaucggcaccugcaucuccgagugcaucacccccaacggcuccauccccaacgacaagcccuuccagaacgucaacaagaucaccuacggcgccugccccaaguacgucaagcagaacacccucaagcucgccaccggcaugcgcaacguccccgagaagcagacccgcggcaucuucggcgccaucgccggcuucaucgagaacggcugggagggcaugaucgacggcugguacggcuuccgccaccagaacuccgagggcaccggccaggccgccgaccucaaguccacccaggccgccaucgaccagaucaacggcaagcucaaccgcgucaucgagaagaccaacgagaaguuccaccagaucgagaaggaguucuccgaggucgagggccgcauccaggaccucgagaaguacgucgaggacaccaagaucgaccucugguccuacaacgccgagcuccucgucgcccucgagaaccagcacaccaucgaccucaccgacuccgagaugaacaagcucuucgagaagacccgccgccagcuccgcgagaacgccgaggacaugggcaacggcugcuucaagaucuaccacaagugcgacaacgccugcaucggcuccauccgcaacggcaccuacaaccacgacgucuaccgcgacgaggcccucaacaaccgcuuccagaucaagggcgucgagcucaaguccggcuacaaggacuggauccucuggaucuccuucgccaucuccugcuuccuccucugcgucguccuccucggcuucaucaugugggccugccagaagggcaacauccgcugcaacaucugcaucuga

SEQ ID NO: 104577 - RNA, 1701 nt, Artificial Sequence
  derived and/or modified CDS sequence (opt2) from hemagglutinin__InfluenzaA__AFG98929
augaagaccgucaucgcccucuccuacaucuucugccucguccucggccaggaccuccccggcaacgacaacuccaccgccacccucugccucggccaccacgccguccccaacggcacccucgucaagaccaucaccaacgaccagaucgaggucaccaacgccaccgagcucguccaguccuccuccaccggcaagaucugcaacaacccccaccgcauccucgacggcaucaacugcacccucaucgacgcccuccucggcgacccccacugcgacggcuuccagaacgagaagugggaccucuucgucgagcgcuccaaggccuucuccaacugcuaccccuacgacguccccgacuacgccucccuccgcucccucgucgccuccuccggcacccucgaguucaucaacgagggcuucaacuggaccggcgucacccagaacggcggcuccaacgccugcaagcgcggccccgacaucggcuucuucucccgccucaacuggcucuacaaguccggcuccaccuaccccguccucaacgucaccaugcccaacaacgacaacuucgacaagcucuacaucuggggcguccaccaccccuccaccgaccaggagcagaccaaccucuacguccaggccuccggccgcgucaccgucuccaccaagcgcucccagcagaccaucauccccaacaucggcucccgccccuggguccgcggccucuccucccgcaucuccaucuacuggaccaucgucaagcccggcgacauccucgucaucaacuccaacggcaaccucaucgccccccgcggcuacuucaagaugcgcaccggcaaguccuccaucaugcgcuccgacgcccccaucggcaccugcaucuccgagugcaucacccccaacggcuccauccccaacgacaagcccuuccagaacgucaacaagaucaccuacggcgccugccccaaguacgucaagcagaacacccucaagcucgccaccggcaugcgcaacguccccgagaagcagacccgcggcaucuucggcgccaucgccggcuucaucgagaacggcugggagggcaugaucgacggcugguacggcuuccgccaccagaacuccgagggcaccggccaggccgccgaccucaaguccacccaggccgccaucgaccagaucaacggcaagcucaaccgcgucaucgagaagaccaacgagaaguuccaccagaucgagaaggaguucuccgaggucgagggccgcauccaggaccucgagaaguacgucgaggacaccaagaucgaccucugguccuacaacgccgagcuccucgucgcccucgagaaccagcacaccaucgaccucaccgacuccgagaugaacaagcucuucgagaagacccgccgccagcuccgcgagaacgccgaggacaugggcaacggcugcuucaagaucuaccacaagugcgacaacgccugcaucggcuccauccgcaacggcaccuacaaccacgacgucuaccgcgacgaggcccucaacaaccgcuuccagaucaagggcgucgagcucaaguccggcuacaaggacuggauccucuggaucuccuucgccaucuccugcuuccuccucugcgucguccuccucggcuucaucaugugggccugccagaagggcaacauccgcugcaacaucugcaucuga

SEQ ID NO: 104578 - RNA, 1701 nt, Artificial Sequence
  derived and/or modified CDS sequence (opt2) from hemagglutinin__InfluenzaA__AFG98940
augaagaccaucaucgcccucuccuacaucuucugccucguccucggccaggaccuccccggcaacgacaacuccaccgccacccucugccucggccaccacgccguccccaacggcacccucgucaagaccaucaccaacgaccagaucgaggucaccaacgccaccgagcucguccaguccuccuccaccggcaagaucugcaacaacccccaccgcauccucgacggcaucaacugcacccucaucgacgcccuccucggcgacccccacugcgacggcuuccagaacgagaagugggaccucuucgucgagcgcuccaaggccuucuccaacugcuaccccuacgacguccccgacuacgccucccuccgcucccucgucgccuccuccggcacccucgaguucaucaacgagggcuucaacuggaccggcgucacccagaacggcggcuccaacgccugcaagcgcggccccgacuccggcuucuucucccgccucaacuggcucuacaaguccggcuccaccuaccccguccucaacgucaccaugcccaacaaggacaacuucgacaagcucuacaucuggggcguccaccaccccuccaccgaccaggagcagaccaaccucuacguccaggccuccggccgcgucaccgucuccaccaagcgcucccagcagaccaucauccccaacaucggcucccgccccuggguccgcggcauguccucccgcaucuccaucuacuggaccaucgucaagcccggcgacauccucgucaucaacuccaacggcaaccucaucgccccccgcggcuacuucaagaugcgcaccggccgcuccuccaucaugcgcuccgacgcccccaucggcaccugcaucuccgagugcaucacccccaacggcuccauccccaacgaccgccccuuccagaacgucaacaagaucaccuacggcgccugccccaaguacgucaagcagaacacccucaagcucgccaccggcaugcgcaacguccccgagaagcagacccgcggcaucuucggcgccaucgccggcuucaucgagaacggcugggagggcaugaucgacggcugguacggcuuccgccaccagaacuccgagggcaccggccaggccgccgaccucaaguccacccaggccgccaucgaccagaucaacggcaagcucaaccgcgucaucgagaagaccaacgagaaguuccaccagaucgagaaggaguucuccgaggucgagggccgcauccaggaccucgagaaguacgucgaggacaccaagaucgaccucugguccuacaacgccgagcuccucgucgcccucgagaaccagcacaccaucgaccucaccgacuccgagaugaacaagcucuucgagaagacccgccgccagcuccgcgagaacgccgaggacaugggcaacggcugcuucaagaucuaccacaagugcgacaacgccugcaucgaguccauccgcaacggcaccuacaaccacgacgucuaccgcgacgaggcccucaacaaccgcuuccagaucaagggcgucgagcucaaguccggcuacaaggacuggauccucuggaucuccuucgccaucuccugcuuccuccucugcgucguccuccucggcuucaucaugugggccugccagaagggcaacauccgcugcaacaucugcaucuga

SEQ ID NO: 104579 - RNA, 1701 nt, Artificial Sequence
  derived and/or modified CDS sequence (opt2) from hemagglutinin__InfluenzaA__AFG98962
augaagaccaucaucgcccucuccuacaucuucugccucguccucgcccaggaccuccccggcaacgacaacuccaccgccacccucugccucggccaccacgccguccccaacggcacccucgucaagaccaucaccaacgaccagaucgaggucaccaacgccaccgagcucguccaguccuccuccaccggcaagaucugcaacaacccccaccgcauccucgacggcaucaacugcacccucaucgacgcccuccucggcgacccccacugcgacggcuuccagaacgagaagugggaccucuucgucgagcgcuccaaggccuucuccaacugcuaccccuacgacguccccgacuacgccucccuccgcucccucgucgccuccuccggcacccucgaguucaucaacgagggcuucaacuggaccggcgucacccagaacggcggcuccaacgccugcaagcgcggccccgacuccggcuucuucucccgccucaacuggcucuacaaguccggcuccaccuaccccguccucaacgucaccaugcccaacaacgacaacuucgacaagcucuacaucuggggcguccaccaccccuccaccgaccaggagcagaccaaccucuacguccaggccuccggccgcgucaccgucuccaccaagcgcucccagcagaccaucauccccaacgucggcucccgccccuggguccgcggccucuccucccgcaucuccaucuacuggaccaucgucaagcccggcgacauccucgucaucaacuccaacggcaaccucaucgccccccgcggcuacuucaagaugcgcaccggcaaguccuccaucaugcgcuccgacgcccccaucggcaccugcuccuccgagugcaucacccccaacggcuccauccccaacgacaagcccuuccagaacgucaacaagaucaccuacggcgccugccccaaguacgucaagcagaacacccucaagcucgccaccggcaugcgcaacguccccgagaagcagacccgcggcaucuucggcgccaucgccggcuucaucgagaacggcugggagggcaugaucgacggcugguacggcuuccgccaccagaacuccgagggcaccggccaggccgccgaccucaaguccacccaggccgccaucgaccagaucaacggcaagcucaaccgcgucaucgagaagaccaacgagaaguuccaccagaucgagaaggaguucuccgaggucgagggccgcauccaggaccucgagaaguacgucgaggacaccaagaucgaccucugguccuacaacgccgagcuccucgucgcccucgagaaccagcacaccaucgaccucaccgacuccgagaugaacaagcucuucgagaagacccgccgccagcuccgcgagaacgccgaggacaugggcaacggcugcuucaagaucuaccacaagugcgacaacgccugcaucggcuccauccgcaacggcaccuacgaccacgacgucuaccgcgacgaggcccucaacaaccgcuuccagaucaagggcgucgagcucaaguccggcuacaaggacuggauccucuggaucuccuucgccaucuccugcuuccuccucugcgucguccuccucggcuucaucaugugggccugccagaagggcaacauccgcugcaacaucugcaucuga

SEQ ID NO: 104580 - RNA, 1701 nt, Artificial Sequence
  derived and/or modified CDS sequence (opt2) from hemagglutinin__InfluenzaA__AFG98973
augaagaccaucaucgcccucuccuacaucuucugccucguccucggccaggacuucccccgcaacgacaacuccaccgccacccucugccucggccaccacgccguccccaacggcacccucgucaagaccaucaccaacgaccagaucgaggucaccaacgccaacgagcucguccaguccuccuccaccggcaagaucugcaacaacccccaccgcauccucgacggcauggacugcacccucaucgacgcccuccucggcgacccccacugcgacggccuccagaacgagaccugggaccucuucgucgagcgcuccaaggccuucuccaacugcuaccccuacgacguccccgacuacgccucccuccgcucccucgucgccuccuccggcacccucgaguucaucaacgagggcuucaccuggaccggcgucacccagaacggcggcuccaacgccugcaagcgcggccccgaccgcggcuucuucucccgccucaacuggcucuacaaguccggcaacaccuaccccguccucaacgucaccaugcccaacaacgacaacuucgacaagcucuacaucuggggcguccaccaccccuccaccgaccaggaccagaccucccucuacguccaggccuccggccgcgucaccgucuccaccaagcgcucccagcagaccgucauccccaacaucggcccccgccccuggguccgcggccucuccuccggcaucuccaucuacuggaccaucgucaagcccggcgacauccuccucaucaacuccaacggcaaccucaucgccccccgcggcuacuucaagaugcgcaccggcaaguccuccaucaugcgcuccgacgcccccaucggcaccugcaucuccgagugcaucacccccaacggcuccauccccaacgacaagcccuuccagaacgucaacaagaucaccuacggcgccugccccaaguacgucaagcagaacacccucaagcucgccaccggcaugcgcaacguccccgagaagcagacccgcggcaucuucggcgccaucgccggcuucaucgagaacggcugggagggcaugaucgacggcugguacggcuuccgccaccagaacuccgagggcaccggccaggccgccgaccucaaguccacccaggccgccaucgaccagaucaacggcaagcucaaccgcgucaucgagaagaccaacgagaaguuccaccagaucgagaaggaguucuccgaggucgagggccgcauccaggaccucgagaaguacgucgaggacaccaagaucgaccucugguccuacaacgccgagcuccucgucgcccucgagaaccagcacaccaucgaccucaccgacuccgagaugaacaagcucuucgagaagacccgccgccagcuccgcgagaacgccgaggacaugggcaacggcugcuucaagaucuaccaccgcugcgacaacgccugcaucggcuccauccgcaacggcaccuacgaccacgacgucuaccgcgacgaggcccucaacaaccgcuuccagaucaagggcgucgagcucaaguccggcuacaaggacuggauccucuggaucuccuucgccaucuccugcuuccuccucugcgucguccuccucggcuucaucaugugggccugccagaagggcaacauccgcugcaacaucugcaucuga

SEQ ID NO: 104581 - RNA, 1701 nt, Artificial Sequence
  derived and/or modified CDS sequence (opt2) from hemagglutinin__InfluenzaA__AFG98984
augaagaccaucaucgcccucuccuacaucuucugccucguccucggccaggacuucccccgcaacgacaacuccaccgccacccucugccucggccaccacgccguccccaacggcacccucgucaagaccaucaccaacgaccagaucgaggucaccaacgccaccgagcucguccaguccuccuccaccggcaagaucugcaacaacccccaccgcauccucgacggcauggacugcacccucaucgacgcccuccucggcgacccccacugcgacggccuccagaacgagaccugggaccucuucgucgagcgcuccaaggccuucuccaacugcuaccccuacgacguccccgacuacgccucccuccgcucccucgucgccuccuccggcacccucgaguucaucaacgagggcuucaccuggaccggcgucacccagaacggcggcuccaacgccugcaagcgcggccccgaccgcggcuucuucucccgccucaacuggcucuacaaguccggcaacaccuaccccguccucaacgucaccaugcccaacaacgacaacuucgacaagcucuacaucuggggcguccaccaccccuccaccgaccaggaccagaccucccucuacguccaggccuccggccgcgucaccgucuccaccaagcgcucccagcagaccgucauccccaacaucggcccccgccccuggguccgcggccucuccuccggcaucuccaucuacuggaccaucgucaagcccggcgacauccuccucaucaacuccaacggcaaccucaucgccccccgcggcuacuucaagaugcgcaccggcaaguccuccaucaugcgcuccgacgcccccaucggcaccugcaucuccgagugcaucacccccaacggcuccauccccaacgacaagcccuuccagaacgucaacaagaucaccuacggcgccugccccaaguacgucaagcagaacacccucaagcucgccaccggcaugcgcaacguccccgagaagcagacccgcggcaucuucggcgccaucgccggcuucaucgagaacggcugggagggcaugaucgacggcugguacggcuuccgccaccagaacuccgagggcaccggccaggccgccgaccucaaguccacccaggccgccaucgaccagaucaacggcaagcucaaccgcgucaucgagaagaccaacgagaaguuccaccagaucgagaaggaguucuccgaggucgagggccgcauccaggaccucgagaaguacgucgaggacaccaagaucgaccucugguccuacaacgccgagcuccucgucgcccucgagaaccagcacaccaucgaccucaccgacuccgagaugaacaagcucuucgagaagacccgccgccagcuccgcgagaacgccgaggacaugggcaacggcugcuucaagaucuaccaccgcugcgacaacgccugcaucggcuccauccgcaacggcaccuacgaccacgacgucuaccgcgacgaggcccucaacaaccgcuuccagaucaagggcgucgagcucaaguccggcuacaaggacuggauccucuggaucuccuucgccaucuccugcuuccuccucugcgucguccuccucggcuucaucaugugggccugccagaagggcaacauccgcugcaacaucugcaucuga

SEQ ID NO: 104582 - RNA, 1704 nt, Artificial Sequence
  derived and/or modified CDS sequence (opt2) from hemagglutinin__InfluenzaA__AFG98995
augaagaccaucaucgcccucuccuacaucuucugccucgucuucgcccaggaccuccccggcaacgacaacaacuccaccgccacccucugccucggccaccacgccguccccaacggcacccucgucaagaccaucaccaacgaccagaucgaggucaccaacgccaccgagcucguccaguccuccuccaccggcaagaucugcaacaacccccaccgcauccucgacggcaucaacugcacccucaucgacgcccuccucggcgacccccacugcgacggcuuccagaacgagaagugggaccucuucgucgagcgcuccaaggccuucuccaacugcuaccccuacgacguccccgacuacgccucccuccgcucccucgucgccuccuccggcacccucgaguucaucaacgagggcuucaacuggaccggcgucacccagaacggcggcuccaacgccugcaagcgcggccccgacaucggcuucuucucccgccucaacuggcucuacaaguccggcuccaccuaccccguccagaacgucaccaugcccaacaacgacaacuccgacaagcucuacaucuggggcguccaccaccccuccaccgacaaggagcagaccgaccucuacguccaggccuccggcaaggucaccgucuccaccaagcgcucccagcagaccaucauccccaacgucggcucccgccccuggguccgcggccucuccucccgcaucuccaucuacuggaccaucgucaagcccggcgacauccucgucaucaacuccaacggcaaccucaucgccccccgcggcuacuucaagaugcgcaccggcaaguccuccaucaugcgcuccgacgcccccaucggcaccugcuccuccgagugcaucacccccaacggcuccauccccaacgacaagcccuuccagaacgucaacaagaucaccuacggcgccugccccaaguacgucaagcagaacacccucaagcucgccaccggcaugcgcaacguccccgagaagcagacccgcggcaucuucggcgccaucgccggcuucaucgagaacggcugggagggcaugaucgacggcugguacggcuuccgccaccagaacuccgagggcaccggccaggccgccgaccucaaguccacccaggccgccaucgaccagaucaacggcaagcucaaccgcgucaucgagaagaccaacgagaaguuccaccagaucgagaaggaguucuccgaggucgagggccgcauccaggaccucgagaaguacgucgaggacaccaagaucgaccucugguccuacaacgccgagcuccucgucgcccucgagaaccagcacaccaucgaccucaccgacuccgagaugaacaagcucuucgagaagacccgccgccagcuccgcgagaacgccgaggacaugggcaacggcugcuucaagaucuaccacaagugcgacaacgccugcaucggcuccauccgcaacggcaccuacgaccacgacgucuaccgcgacgaggcccucaacaaccgcuuccagaucaagggcgucgagcucaaguccggcuacaaggacuggauccucuggaucuccuucgccaucuccugcuuccuccucugcgucguccuccucggcuucaucaugugggccugccagaagggcaacauccgcugcaacaucugcaucuga

SEQ ID NO: 104583 - RNA, 1701 nt, Artificial Sequence
  derived and/or modified CDS sequence (opt2) from hemagglutinin__InfluenzaA__AFG99006
augaagaccaucaucgcccucuccuacaucuucugccucguccucggccaggacuucccccgcaacgacaacuccaccgccacccucugccucggccaccacgccguccccaacggcacccucgucaagaccaucaccaacgaccagaucgaggucaccaacgccaccgagcucguccaguccuccuccaccggcaagaucugcaacaacccccaccgcauccucgacggcauggacugcacccucaucgacgcccuccucggcgacccccacugcgacggccuccagaacgagaccugggaccucuucgucgagcgcuccaaggccuucuccaacugcuaccccuacgacguccccgacuacgccucccuccgcucccucgucgccuccuccggcacccucgaguucaucaacgagggcuucaccuggaccggcgucacccagaacggcggcuccaacgccugcaagcgcggccccgaccgcggcuucuucucccgccucaacuggcucuacaaguccggcaacaccuaccccguccucaacgucaccaugcccaacaacgacaacuucgacaagcucuacaucuggggcguccaccaccccuccaccgaccaggaccagaccucccucuacguccaggccuccggccgcgucaccgucuccaccaagcgcucccagcagaccgucauccccaacaucggcccccgccccuggguccgcggccucuccucccgcaucuccaucuacuggaccaucgucaagcccggcgacauccuccucaucaacuccaacggcaaccucaucgccccccgcggcuacuucaagaugcgcaccggcaaguccuccaucaugcgcuccgacgcccccaucggcaccugcaucuccgagugcaucacccccaacggcuccauccccaacgacaagcccuuccagaacgucaacaagaucaccuacggcgccugccccaaguacgucaagcagaacacccucaagcucgccaccggcaugcgcaacguccccgagaagcagacccgcggcaucuucggcgccaucgccggcuucaucgagaacggcugggagggcaugaucgacggcugguacggcuuccgccaccagaacuccgagggcaccggccaggccgccgaccucaaguccacccaggccgccaucgaccagaucaacggcaagcucaaccgcgucaucgagaagaccaacgagaaguuccaccagaucgagaaggaguucuccgaggucgagggccgcauccaggaccucgagaaguacgucgaggacaccaagaucgaccucugguccuacaacgccgagcuccucgucgcccucgagaaccagcacaccaucgaccucaccgacuccgagaugaacaagcucuucgagaagacccgccgccagcuccgcgagaacgccgaggacaugggcaacggcugcuucaagaucuaccaccgcugcgacaacgccugcaucggcuccauccgcaacggcaccuacgaccacgacgucuaccgcgacgaggcccucaacaaccgcuuccagaucaagggcgucgagcucaaguccggcuacaaggacuggauccucuggaucuccuucgccaucuccugcuuccuccucugcgucguccuccucggcuucaucaugugggccugccagaagggcaacauccgcugcaacaucugcaucuga

SEQ ID NO: 104584 - RNA, 1701 nt, Artificial Sequence; identical to SEQ ID NO: 96800
  derived and/or modified CDS sequence (opt2) from hemagglutinin__InfluenzaA__AFG99017

SEQ ID NO: 104585 - RNA, 1701 nt, Artificial Sequence
  derived and/or modified CDS sequence (opt2) from hemagglutinin__InfluenzaA__AFG99028
augaagaccaucaucgcccucuccuacaucuucugccucgucuucgcccaggaccuccccggcaacgacaacuccaccgccacccucugccucggccaccacgccguccccaacggcacccucgucaagaccaucaccaacgaccagaucgaggucaccaacgccaccgagcucguccaguccuccuccaccggcaagaucugcggcaacccccaccgcauccucgacggcaucaacugcacccucaucgacgcccuccucggcgacccccacugcgacggcuuccagaacgagaagugggaccucuucgucgagcgcuccaaggccuucuccaacugcuaccccuacgacguccccgacuacgccucccuccgcucccucgucgccuccuccggcacccucgaguucaucaacgagggcuucaacuggaccggcgucacccagaacggcggcuccuccgccugcaagcgcggccccgacaacggcuucuucucccgccucaacuggcucuacaaguccggcuccaccuaccccguccagaacgucaccaugcccaacaacgacaacuccgacaagcucuacaucuggggcguccaccaccccuccaccgacaaggagcagaccgaccucuacguccaggccuccggcaaggucaccgucuccaccaagcgcucccagcagaccgucauccccaacgucggcucccgccccuggguccgcggccucuccucccgcgucuccaucuacuggaccaucgucaagcccggcgacauccucgucaucaacuccaacggcaaccucaucgccccccgcggcuacuucaagaugcgcaccggcaaguccuccaucaugcgcuccgacgcccccaucggcaccugcuccuccgagugcaucacccccaacggcuccauccccaacgacaagcccuuccagaacgucaacaagaucaccuacggcgccugccccaaguacgucaagcagaacacccucaagcucgccaccggcaugcgcaacguccccgagaagcagacccgcggcaucuucggcgccaucgccggcuucaucgagaacggcugggagggcaugaucgacggcugguacggcuuccgccaccagaacuccgagggcaccggccaggccgccgaccucaaguccacccaggccgccaucgaccagaucaacggcaagcucaaccgcgucaucgagaagaccaacgagaaguuccaccagaucgagaaggaguucuccgaggucgagggccgcauccaggaccucgagaaguacgucgaggacaccaagaucgaccucugguccuacaacgccgagcuccucgucgcccucgagaaccagcacaccaucgaccucaccgacuccgagaugaacaagcucuucgagaagacccgccgccagcuccgcgagaacgccgaggacaugggcaacggcugcuucaagaucuaccacaagugcgacaacgccugcaucggcuccauccgcaacggcaccuacgaccacgacgucuaccgcgacgaggcccucaacaaccgcuuccagaucaagggcgucgagcucaaguccggcuacaaggacuggauccucuggaucuccuucgccaucuccugcuuccuccucugcgucguccuccucggcuucaucaugugggccugccagaagggcaacauccgcugcaacaucugcaucuga

SEQ ID NO: 104586 - RNA, 1701 nt, Artificial Sequence
  derived and/or modified CDS sequence (opt2) from hemagglutinin__InfluenzaA__AFG99039
augaagaccaucaucgcccucuccuacaucuucugccucgucuucgcccaggaccuccccggcaacgacaacuccaccgccacccucugccucggccaccacgccguccccaacggcacccucgucaagaccaucaccaacgaccagaucgaggucaccaacgccaccgagcucguccaguccuccuccaccggcaagaucugcgacaacccccaccgcauccucgacggcaucaacugcacccucaucgacgcccuccucggcgacccccacugcgacggcuuccagaacgagaagugggaccucuucgucgagcgcuccaaggccuucuccaacugcuaccccuacgacguccccgacuacgccucccuccgcucccucgucgccuccuccggcacccucgaguucaucaacgagggcuucaacuggaccggcgucacccagaacggcggcuccuccgccugcaagcgcggccccgacaacggcuucuucucccgccucaacuggcucuacaaguccggcuccaccuaccccguccagaacgucgccaugcccaacaacgacaacuccgacaagcucuacaucuggggcguccaccaccccuccaccgacaaggagcagaccgaccucuacguccaggccuccggcaaggucaccgucuccaccaagcgcucccagcagaccgucauccccaacgucggcucccgccccuggguccgcggccucuccucccgcgucuccaucuacuggaccaucgucaagcccggcgacauccucgucaucaacuccaacggcaaccucaucgccccccgcggcuacuucaagaugcgcaccggcaaguccuccaucaugcgcuccgacgcccccaucggcaccugcuccuccgagugcaucacccccaacggcuccauccccaacgacaagcccuuccagaacgucaacaagaucaccuacggcgccugccccaaguacgucaagcagaacacccucaagcucgccaccggcaugcgcaacguccccgagaagcagacccgcggcaucuucggcgccaucgccggcuucaucgagaacggcugggagggcaugaucgacggcugguacggcuuccgccaccagaacuccgagggcaccggccaggccgccgaccucaaguccacccaggccgccaucgaccagaucaacggcaagcucaaccgcgucaucgagaagaccaacgagaaguuccaccagaucgagaaggaguucuccgaggucgagggccgcauccaggaccucgagaaguacgucgaggacaccaagaucgaccucugguccuacaacgccgagcuccucgucgcccucgagaaccagcacaccaucgaccucaccgacuccgagaugaacaagcucuucgagaagacccgccgccagcuccgcgagaacgccgaggacaugggcaacggcugcuucaagaucuaccacaagugcgacaacgccugcaucggcuccauccgcaacggcaccuacgaccacgacgucuaccgcgacgaggcccucaacaaccgcuuccagaucaagggcgucgagcucaaguccggcuacaaggacuggauccucuggaucuccuucgccaucuccugcuuccuccucugcgucguccuccucggcuucaucaugugggccugccagaagggcaacauccgcugcaacaucugcaucuga

SEQ ID NO: 104587 - RNA, 1701 nt, Artificial Sequence; identical to SEQ ID NO: 96800
  derived and/or modified CDS sequence (opt2) from hemagglutinin__InfluenzaA__AFG99050

SEQ ID NO: 104588 - RNA, 1701 nt, Artificial Sequence
  derived and/or modified CDS sequence (opt2) from hemagglutinin__InfluenzaA__AFG99061
augaagaccaucaucgcccucuccuacaucuucugccucgucuucgcccaggaccuccccggcaacgacaacuccaccgccacccucugccucggccaccacgccguccccaacggcacccucgucaagaccaucaccaacgaccagaucgaggucaccaacgccaccgagcucguccaguccuccuccaccggcaagaucugcgacaacccccaccgcauccucgacggcaucaacugcacccucaucgacgcccuccucggcgacccccacugcgacggcuuccagaacgagaagugggaccucuucgucgagcgcuccaaggccuucuccaacugcuaccccuacgacguccccgacuacgccucccuccgcucccucgucgccuccuccggcacccucgaguucaucaacgagggcuucaacuggaccggcgucacccagaacggcggcuccuccgccugcaagcgcggccccgacaacggcuucuucucccgccucaacuggcucuacaaguccggcuccaccuaccccguccagaacgucaccaugcccaacaacgacaacuccgacaagcucuacaucuggggcguccaccaccccuccaccgacaaggagcagaccgaccucuacguccaggccuccggcaaggucaccgucuccaccaagcgcucccagcagaccgucauccccaacgucggcucccgccccuggguccgcggccucuccucccgcgucuccaucuacuggaccaucgucaagcccggcgacauccucgucaucaacuccaacggcaaccucaucgccccccgcggcuacuucaagaugcgcaccggcaaguccuccaucaugcgcuccgacgcccccaucggcaccugcuccuccgagugcaucacccccaacggcuccauccccaacgacaagcccuuccagaacgucaacaagaucaccuacggcgccugccccaaguacaucaagcagaacacccucaagcucgccaccggcaugcgcaacguccccgagaagcagacccgcggcaucuucggcgccaucgccggcuucaucgagaacggcugggagggcaugaucgacggcugguacggcuuccgccaccagaacuccgagggcaccggccaggccgccgaccucaaguccacccaggccgccaucgaccagaucaacggcaagcucaacaaggucaucgagaagaccaacgagaaguuccaccagaucgagaaggaguucuccgaggucgagggccgcauccaggaccucgagaaguacgucgaggacaccaagaucgaccucugguccuacaacgccgagcuccucgucgcccucgagaaccagcacaccaucgaccucaccgacuccgagaugaacaagcucuucgagaagacccgccgccagcuccgcgagaacgccgaggacaugggcaacggcugcuucaagaucuaccacaagugcgacaacgccugcaucggcuccauccgcaacggcaccuacgaccacgacgucuaccgcgacgaggcccucaacaaccgcuuccagaucaagggcgucgagcucaaguccggcuacaaggacuggauccucuggaucuccuucgccaucuccugcuuccuccucugcgucguccuccucggcuucaucaugugggccugccagaagggcaacauccgcugcaacaucugcaucuga

SEQ ID NO: 104589 - RNA, 1701 nt, Artificial Sequence
  derived and/or modified CDS sequence (opt2) from hemagglutinin__InfluenzaA__AFG99072
augaagaccaucaucgcccucuccuacaucuucugccucgucuucgcccaggaccuccccggcaacgacaacuccaccgccacccucugccucggccaccacgccguccccaacggcacccucgucaagaccaucaccaacgaccagaucgaggucaccaacgccaccgagcucguccaguccuccuccaccggcaagaucugcgacaacccccaccgcauccucgacggcaagaacugcacccucaucgacgcccuccucggcgacccccacugcgacggcuuccagaacgagaagugggaccucuucgucgagcgcuccaaggccuucuccaacugcuaccccuacgacguccccgacuacgccucccuccgcucccucgucgccuccuccggcacccucgaguucaucaacgagggcuucaacuggaccggcgucacccagaacggcggcuccuccgccugcaagcgcggccccgacaacggcuucuucucccgccucaacuggcucuacaaguccggcuccaccuaccccguccagaacgucaccaugcccaacaacgacaacuccgaccgccucuacaucuggggcguccaccaccccuccaccgacaaggagcagaccgaccucuacguccaggccuccggcaaggucaccgucuccaccaagcgcucccagcagaccgucauccccaacgucggcucccgccccuggguccgcggccucuccucccgcgucuccaucuacuggaccaucgucaagcccggcgacauccucgucaucaacuccaacggcaaccucaucgccccccgcggcuacuucaagaugcgcaccggcaaguccuccaucaugcgcuccgacgcccccaucggcaccugcuccuccgagugcaucacccccaacggcuccauccccaacgacaagcccuuccagaacgucaacaagaucaccuacggcgccugccccaaguacgucaagcagaacacccucaagcucgccaccggcaugcgcaacguccccgagaagcagacccgcggcaucuucggcgccaucgccggcuucaucgagaacggcugggagggcaugaucgacggcugguacggcuuccgccaccagaacuccgagggcaccggccaggccgccgaccucaaguccacccaggccgccaucgaccagaucaacggcaagcucaaccgcgucaucgagaagaccaacgagaaguuccaccagaucgagaaggaguucuccgaggucgagggccgcauccaggaccucgagaaguacgucgaggacaccaagaucgaccucugguccuacaacgccgagcuccucgucgcccucgagaaccagcacaccaucgaccucaccgacuccgagaugaacaagcucuucgagaagacccgccgccagcuccgcgagaacgccgaggacaugggcaacggcugcuucaagaucuaccacaagugcgacaacgccugcaucggcuccauccgcaacggcaccuacaaccacgacgucuaccgcgacgaggcccucaacaaccgcuuccagaucaagggcgucgagcucaaguccggcuacaaggacuggauccucuggaucuccuucgccaucuccugcuuccuccucugcgucguccuccucggcuucaucaugugggccugccagaagggcaacauccgcugcaacaucugcaucuga

SEQ ID NO: 104590 - RNA, 1701 nt, Artificial Sequence
  derived and/or modified CDS sequence (opt2) from hemagglutinin__InfluenzaA__AFG99083
augaagaccaucaucgcccucuccuacaucuucugccucgucuucgcccaggaccuccccggcaacgacaacuccaccgccacccucugccucggccaccacgccguccccaacggcacccucgucaagaccaucaccaacgaccagaucgaggucaccaacgccaccgagcucguccaguccuccuccaccggcaagaucugcgacaacccccaccgcauccucgacggcaucaacugcacccucaucgacgcccuccucggcgacccccacugcgacggcuuccagaacgagaagugggaccucuucgucgagcgcuccaaggccuucuccaacugcuaccccuacgacguccccgacuacgccucccuccgcucccucgucgccuccuccggcacccucgaguucaucaacgagggcuucaacuggaccggcgucacccagaacggcggcuccuccgccugcaagcgcggccccgacaagggcuucuucucccgccucaacuggcucuacaaguccggcuccaccuaccccguccagaacgucaccaugcccaacaacgacaacuccgacaagcucuacaucuggggcguccaccaccccuccaccgacaaggagcagaccgaccucuacguccaggccuccggcaaggucaccgucuccaccaagcgcucccagcagaccgucauccccaacgucggcucccgccccuggguccgcggccucuccucccgcgucuccaucuacuggaccaucgucaagcccggcgacauccucgucaucaacuccaacggcaaccucaucgccccccgcggcuacuucaagaugcucaccggcaaguccuccaucaugcgcuccgacgcccccaucggcaccugcuccuccgagugcaucacccccaacggcuccauccccaacgacaagcccuuccagaacgucaacaagaucaccuacggcgccugccccaaguacgucaagcagaacacccucaagcucgccaccggcaugcgcaacguccccgagaagcagacccgcggcaucuucggcgccaucgccggcuucaucgagaacggcugggagggcaugaucgacggcugguacggcuuccgccaccagaacuccgagggcaccggccaggccgccgaccucaaguccacccaggccgccaucgaccagaucaacggcaagcucaaccgcgucaucgagaagaccaacgagaaguuccaccagaucgagaaggaguucuccgaggucgagggccgcauccacgaccucgagaaguacgucgaggacaccaagaucgaccucugguccuacaacgccgagcuccucgucgcccucgagaaccagcacaccaucgaccucaccgacuccgagaugaacaagcucuucgagaagacccgccgccagcuccgcgagaacgccgaggacaugggcaacggcugcuucaagaucuaccacaagugcgacaacgccugcaucggcuccauccgcaacggcaccuacgaccacgacgucuaccgcgacgaggcccucaacaaccgcuuccagaucaagggcgucgagcucaaguccggcuacaaggacuggauccucuggaucuccuucgccaucuccugcuuccuccucugcgucguccuccucggcuucaucaugugggccugccagaagggcaacauccgcugcaacaucugcaucuga

SEQ ID NO: 104591 - RNA, 1701 nt, Artificial Sequence
  derived and/or modified CDS sequence (opt2) from hemagglutinin__InfluenzaA__AFG99094
augaagaccaucaucgcccucuccuacaucuucugccucgucuucgcccaggaccuccccggcaacgacaacuccaccgccacccucugccucggccaccacgccguccccaacggcacccucgucaagaccaucaccaacgaccagaucgaggucaccaacgccaccgagcucguccaguccuccuccaccggcaagaucugcgacaacccccaccgcauccucgacggcaucaacugcacccucaucgacgcccuccucggcgacccccacugcgacggcuuccagaacgagaagugggaccucuucgucgagcgcuccaaggccuucuccaacugcuaccccuacgacguccccgacuacgccucccuccgcucccucgucgccuccuccggcacccucgaguucaucaacgagggcuucaacuggaccggcgucacccagaacggcggcuccggcgccugcaagcgcggccccgacaacggcuucuucucccgccucaacuggcucuacaaguccggcuccaccuaccccguccagaacgucaccaugcccaacaacgacaacuccgacaagcucuacaucuggggcguccaccaccccuccaccgacaaggagcagaccgaccucuacguccaggccuccggcaaggucaccgucuccaccaagcgcucccagcagaccgucauccccaacgucggcucccgccccuggguccgcggccucuccucccgcgucuccaucuacuggaccaucgucaagcccggcgacauccucgucaucaacuccaacggcaaccucaucgccccccgcggcuacuucaagaugcgcaccggcaaguccuccaucaugcgcuccgacgcccccaucggcaccugcuccuccgagugcaucacccccaacggcuccauccccaacgacaagcccuuccagaacgucaacaagaucaccuacggcgccugccccaaguacgucaagcagaacacccucaagcucgccaccggcaugcgcaacguccccgagaagcagacccgcggcaucuucggcgccaucgccggcuucaucgagaacggcugggagggcaugaucgacggcugguacggcuuccgccaccagaacuccgagggcaccggccaggccgccgaccucaaguccacccaggccgccaucgaccagaucaacggcaagcucaaccgcgucaucgagaagaccaacgagaaguuccaccagaucgagaaggaguucuccgaggucgagggccgcauccaggaccucgagaaguacgucgaggacaccaagaucgaccucugguccuacaacgccgagcuccucgucgcccucgagaaccagcacaccaucgaccucaccgacuccgagaugaacaagcucuucgagaagacccgccgccagcuccgcgagaacgccgaggacaugggcaacggcugcuucaagaucuaccacaagugcgacaacgccugcaucggcuccauccgcaacggcaccuacgaccacgacgucuaccgcgacgaggcccucaacaaccgcuuccagaucaagggcgucgagcucaaguccggcuacaaggacuggauccucuggaucuccuucgccaucuccugcuuccuccucugcgucguccuccucggcuucaucaugugggccugccagaagggcaacauccgcugcaacaucugcaucuga

SEQ ID NO: 104592 - RNA, 1701 nt, Artificial Sequence
  derived and/or modified CDS sequence (opt2) from hemagglutinin__InfluenzaA__AFG99116
augaagaccaucaucgcccucuccuacaucuucugccucgucuucgcccagaaccuccccggcaacgacaacuccaccgccacccucugccucggccaccacgccguccccaacggcacccucgucaagaccaucaccaacgaccagaucgaggucaccaacgccaccgagcucguccaguccuccuccaccggccgcaucugcgacuccccccaccgcauccucgacggcaagaacugcacccucgucgacgcccuccucggcgacccccacugcgacggcuuccagaacgagaagugggaccucuucgucgagcgcuccaaggccuucuccaacugcuaccccuacgacguccccgacuacgccucccuccgcucccucgucgccuccuccggcacccucgaguucaucaacgaguccuucaacuggaccggcgucacccaguccggcggcuccuacgccugcaagcgcggcuccgacaacuccuucuucucccgccucaacuggcucuacgaguccgaguccaaguaccccguccucaacgucaccaugcccaacaacggcaacuucgacaagcucuacaucuggggcguccaccaccccuccaccgacaaggagcagaccaaccucuacguccgcgccuccggccgcgucaccgucuccaccaagcgcucccagcagaccaucauccccaacaucggcucccgccccuggguccgcggccucuccucccgcaucuccaucuacuggaccaucgucaagcccggcgacauccuccucaucaacuccaacggcaaccucaucgccccccgcggcuacuucaagauccgcaccggcaaguccuccaucaugcgcuccgacgcccccaucggcaccugcuccuccgagugcaucacccccaacggcuccauccccaacgacaagcccuuccagaacgucaacaagaucaccuacggcgccugccccaaguacgucaagcagaacacccucaagcucgccaccggcaugcgcaacguccccgagaagcagacccgcggcaucuucggcgccaucgccggcuucaucgagaacggcugggagggcauggucgacggcugguacggcuuccgccaccagaacuccgagggcaccggccaggccgccgaccucaaguccacccaggccgccaucgaccagaucaacggcaagcucaaccgcgucaucgagaagaccaacgagaaguuccaccagaucgagaaggaguucuccgaggucgagggccgcauccaggaccucgagaaguacgucgaggacaccaagaucgaccucugguccuacaacgccgagcuccucgucgcccucgagaaccagcacaccaucgaccucaccgacuccgagaugaacaagcucuucgagaagacccgccgccagcuccgcgagaacgccgaggacaugggcaacggcugcuucaagaucuaccacaagugcgacaacgccugcaucggcuccauccgcaacggcaccuacgaccacgacgucuaccgcgacgaggcccucaacaaccgcuuccagaucaagggcgucgagcucaaguccggcuacaaggacuggauccucuggaucuccuucgccaucuccugcuuccuccucugcgucguccuccucggcuucaucaugugggccugccagaagggcaacauccgcugcaacaucugcaucuga

SEQ ID NO: 104593 - RNA, 1701 nt, Artificial Sequence
  derived and/or modified CDS sequence (opt2) from hemagglutinin__InfluenzaA__AFG99127
augaagaccaucaucgcccucuccuacauccucugccucgucuucgcccagaaccuccccggcaacgacaacuccaccgccacccucugccucggccaccacgccguccccaacggcacccucgucaagaccaucaccaacgaccagaucgaggucaccaacgccaccgagcucguccaguccuccuccaccggccgcaucugcgacuccccccaccgcauccucgacggcaagaacugcacccucgucgacgcccuccucggcgacccccacugcgacggcuuccagaacgagaagugggaccucuucgucgagcgcuccaaggccuucuccaacugcuaccccuacgacguccccgacuacgccucccuccgcucccucgucgccuccuccggcacccucgaguucaucaacgaguccuucaacuggaccggcgucacccaguccggcggcuccuacgccugcaagcgcggcuccgacaacuccuucuucucccgccucaacuggcucuacgaguccgaguccaaguaccccguccucaacgucaccaugcccaacaacggcaacuucgacaagcucuacaucuggggcguccaccaccccuccaccgacaaggagcagaccaaccucuacguccgcgccuccggccgcgucaccgucuccaccaagcgcucccagcagaccaucauccccaacaucggcucccgccccuggguccgcggccucuccucccgcaucuccaucuacuggaccaucgucaagcccggcgacauccuccucaucaacuccaacggcaaccucaucgccccccgcggcuacuucaagauccgcaccggcaaguccuccaucaugcgcuccgacgcccccaucggcaccugcuccuccgagugcaucacccccaacggcuccauccccaacgacaagcccuuccagaacgucaacaagaucaccuacggcgccugccccaaguacgucaagcagaacacccucaagcucgccaccggcaugcgcaacguccccgagaagcagacccgcggcaucuucggcgccaucgccggcuucaucgagaacggcugggagggcauggucgacggcugguacggcuuccgccaccagaacuccgagggcaccggccaggccgccgaccucaaguccacccaggccgccaucgaccagaucaacggcaagcucaaccgcgucaucgagaagaccaacgagaaguuccaccagaucgagaaggaguucuccgaggucgagggccgcauccaggaccucgagaaguacgucgaggacaccaagaucgaccucugguccuacaacgccgagcuccucgucgcccucgagaaccagcacaccaucgaccucaccgacuccgagaugaacaagcucuucgagaagacccgccgccagcuccgcgagaacgccgaggacaugggcaacggcugcuucaagaucuaccacaagugcgacaacgccugcaucggcuccauccgcaacggcaccuacgaccacgacgucuaccgcgacgaggcccucaacaaccgcuuccagaucaagggcgucgagcucaaguccggcuacaaggacuggauccucuggaucuccuucgccaucuccugcuuccuccucugcgucguccuccucggcuucaucaugugggccugccagaagggcaacauccgcugcaacaucugcaucuga

SEQ ID NO: 104594 - RNA, 1701 nt, Artificial Sequence
  derived and/or modified CDS sequence (opt2) from hemagglutinin__InfluenzaA__AFG99138
augaagaccaucaucgcccucuccuacaucuucugccucgucuucgcccagaaccuccccggcaacgacaacuccaccgccacccucugccucggccaccacgccguccccaacggcacccucgucaagaccaucaccaacgaccagaucgaggucaccaacgccaccgagcucguccaguccuccuccaccggccgcaucugcgacuccccccaccgcauccucgacggcaagaacugcacccucgucgacgcccuccucggcgacccccacugcgacggcuuccagaacgagaagugggaccucuucgucgagcgcuccaaggccuucuccaacugcuaccccuacgacguccccgacuacgccucccuccgcucccucgucgccuccuccggcacccucgaguucaucaacgaguccuucaacuggaccggcgucacccaguccggcggcuccuccgccugcaagcgcggcuccgacaacuccuucuucucccgccucaacuggcucuacgaguccgaguccaaguaccccguccucaacgucaccaugcccaacaacggcaacuucgacaagcucuacaucuggggcguccaccaccccuccaccgacaaggagcagaccaaccucuacguccgcgccuccggccgcgucaccgucuccaccaagcgcaaccagcagaccgucauccccaacaucggcucccgccccuggguccgcggccucuccucccgcaucuccaucuacuggaccaucgucaagcccggcgacauccuccucaucaacuccaacggcaaccucaucgccccccgcggcuacuucaagauccgcaacggcaaguccuccaucaugcgcuccgacgcccccaucggcaccugcuccuccgagugcaucacccccaacggcuccauccccaacgacaagcccuuccagaacgucaacaagaucaccuacggcgccugccccaaguacgucaagcagaacacccucaagcucgccaccggcaugcgcaacguccccgagaagcagacccgcggcaucuucggcgccaucgccggcuucaucgagaacggcugggagggcauggucgacggcugguacggcuuccgccaccgcaacuccgagggcaccggccaggccgccgaccucaaguccacccaggccgccaucgaccagaucaacggcaagcucaaccgcgucaucgagaagaccaacgagaaguuccaccagaucgagaaggaguucuccgaggucgagggccgcauccaggaccucgagaaguacgucgaggacaccaagaucgaccucugguccuacaacgccgagcuccucgucgcccucgagaaccagcacaccaucgaccucaccgacuccgagaugaacaagcucuucgagaagacccgccgccagcuccgcgagaacgccgaggacaugggcaacggcugcuucaagaucuaccacaagugcgacaacgccugcaucggcuccauccgcaacggcaccuacgaccacgacgucuaccgcgacgaggcccucaacaaccgcuuccagaucaagggcgucgagcucaaguccggcuacaaggacuggauccucuggaucuccuucgccaucuccugcuuccuccucugcgucguccuccucggcuucaucaugugggccugccagaagggcaacauccgcugcaacaucugcaucuga

SEQ ID NO: 104595 - RNA, 1701 nt, Artificial Sequence
  derived and/or modified CDS sequence (opt2) from hemagglutinin__InfluenzaA__AFG99149
augaagaccaucaucgcccucuccuacauccucugccucgucuucgcccagaaccuccccggcaacgacaacuccaccgccacccucugccucggccaccacgccguccccaacggcacccucgucaagaccaucaccaacgaccagaucgaggucaccaacgccaccgagcucguccaguccuccuccaccggccgcaucugcgacuccccccaccgcauccucgacggcaagaacugcacccucaucgacgcccuccucggcgacccccacugcgacggcuuccagaacgagaagugggaccucuucgucgagcgcucccgcgccuucuccaacugcuaccccuacgacguccccgacuacgccucccuccgcucccucgucgccuccuccggcacccucgaguucaucaacgagggcuucaacuggaccggcgucacccaguccggcggcuccuacgccugcaagcgcggcuccgacaacuccuucuucucccgccucaacuggcucuacgaguccgaguccaaguaccccguccucaacgucaccaugcccaacaacggcaaguucgacaagcucuacaucuggggcguccaccaccccuccaccgacaaggagcagaccaaccucuacguccgcgccuccggccgcgucaccgucuccaccaagcgcucccagcagaccgucauccccaacaucggcucccgccccuggguccgcggccucuccucccgcaucuccaucuacuggaccaucgucaagcccggcgacauccuccucaucaacuccaccggcaaccucaucgccccccgcggcuacuucaagauccgcaccggcaaguccuccaucaugcgcuccgacgcccccaucggcaccugcuccuccgagugcaucacccccaacggcuccauccccaacgacaagcccuuccagaacgucaacaagaucaccuacggcgccugcccccgcuacgucaagcagaacacccucaagcucgccaccggcaugcgcaacguccccgagaagcagacccgcggcaucuucggcgccaucgccggcuucaucgagaacggcugggagggcauggucgacggcugguacggcuuccgccaccagaacuccgagggcaccggccaggccgccgaccucaaguccacccaggccgccaucgaccagaucaacggcaagcucaaccgcgucaucgagaagaccaacgagaaguuccaccagaucgagaaggaguucuccgaggucgagggccgcauccaggaccucgagaaguacgucgaggacaccaagaucgaccucugguccuacaacgccgagcuccucgucgcccucgagaaccagcacaccaucgaccucaccgacgccgagaugaacaagcucuucgagaagacccgcaagcagcuccgcgagaacgccgaggacaugggcaacggcugcuucaagaucuaccacaagugcgacaacgccugcaucggcuccauccgcaacggcaccuacgaccacgacgucuaccgcgacgaggcccucaacaaccgcuuccagaucaagggcgucgagcucaaguccggcuacaaggacuggauccucuggaucuccuucgccaucuccugcuuccuccucugcgucguccuccucggcuucaucaugugggccugccagaagggcaacauccgcugcaacaucugcaucuga

SEQ ID NO: 104596 - RNA, 1701 nt, Artificial Sequence
  derived and/or modified CDS sequence (opt2) from hemagglutinin__InfluenzaA__AFG99171
augaagaccaucaucgcccucuccuacaucuucugccucgucuucgcccagaaccuccccggcaacgacaacuccaccgccacccucugccucggccaccacgccguccccaacggcacccucgucaagaccaucaccaacgaccagaucgaggucaccaacgccaccgagcucguccaguccuccuccaccggccgcaucugcgacuccccccaccgcauccucgacggcaagaacugcacccucgucgacgcccuccucggcgacccccacugcgacggcuuccagaacgagaagugggaccucuucgucgagcgcuccaaggccuucuccaacugcuaccccuacgacguccccgacuacgccucccuccgcucccucgucgccuccuccggcacccucgaguucaccaacgaguccuucaacuggaccggcgucacccaguccggcggcuccuacgccugcaagcgcggcuccgacaacuccuucuucucccgccucaacuggcucuacgaguccgaguccaaguaccccguccucaacgucaccaugcccaacaacggcaacuucgacaagcucuacaucuggggcguccaccaccccuccaccgacaaggagcagaccaaccucuacguccgcgccuccggccgcgucaccgucuccaccaagcgcaaccagcagaccgucauccccaacaucggcucccgccccuggguccgcggccucuccucccgcaucuccaucuacuggaccaucgucaagcccggcgacauccuccucaucaacuccaacggcaaccucaucgccccccgcggcuacuucaagauccgcaacggcaaguccuccaucaugcgcuccgacgcccccaucggcaccugcuccuccgagugcaucacccccaacggcuccauccccaacgacaagcccuuccagaacgucaacaagaucaccuacggcgccugccccaaguacgucaagcagaacacccucaagcucgccaccggcaugcgcaacguccccgagaagcagacccgcggcaucuucggcgccaucgccggcuucaucgagaacggcugggagggcauggucgacggcugguacggcuuccgccaccgcaacuccgagggcaccggccaggccgccgaccucaaguccacccaggccgccaucgaccagaucaacggcaagcucaaccgcgucaucgagaagaccaacgagaaguuccaccagaucgagaaggaguucuccgaggucgagggccgcauccaggaccucgagaaguacgucgaggacaccaagaucgaccucugguccuacaacgccgagcuccucgucgcccucgagaaccagcacaccaucgaccucaccgacuccgagaugaacaagcucuucgagaagacccgccgccagcuccgcgagaacgccgaggacaugggcaacggcugcuucaagaucuaccacaagugcgacaacgccugcaucggcuccauccgcaacggcaccuacgaccacgacgucuaccgcgacgaggcccucaacaaccgcuuccagaucaagggcgucgagcucaaguccggcuacaaggacuggauccucuggaucuccuucgccaucuccugcuuccuccucugcgucguccuccucggcuucaucaugugggccugccagaagggcaacauccgcugcaacaucugcaucuga

SEQ ID NO: 104597 - RNA, 1701 nt, Artificial Sequence
  derived and/or modified CDS sequence (opt2) from hemagglutinin__InfluenzaA__AFG99182
augaagaccaucaucgcccucuccuacaucuucugccucgucuucgcccagaagcuccccggcaacgacaacuccaccgccacccucugccucggccaccacgccguccccaacggcacccucgucaagaccaucaccaacgaccagaucgaggucaccaacgccaccgagcucguccaguccuccuccaccggccgcaucugcgacuccccccaccgcauccucgacggcaagaacugcacccucaucgacgcccuccucggcgacccccacugcgacggcuuccagaacgagaagugggaccucuucgucgagcgcuccaaggccuucuccaacugcuaccccuacgacguccccgacuacgccucccuccgcucccucgucgccuccuccggcacccucgaguucaucaacgagggcuucaacuggaccggcgucacccaguccggcggcuccuacgccugcaagcgcggcuccgucaacuccuucuucucccgccucaacuggcucuacgaguccgaguacaaguaccccgcccucaacgucaccaugcccaacaacggcaaguucgacaagcucuacaucuggggcguccaccaccccuccaccgacaaggagcagaccaaccucuacguccgcgccuccggccgcgucaccgucuccaccaagcgcucccagcagaccgucauccccaacaucggcucccgccccuggguccgcggccucuccucccgcaucuccaucuacuggaccaucgucaagcccggcgacauccuccucaucaacuccaccggcaaccucaucgccccccgcggcuacuucaagauccgcaccggcaaguccuccaucaugcgcuccgacgcccccaucggcaccugcuccuccgagugcaucacccccaacggcuccauccccaacgacaagcccuuccagaacgucaacaagaucaccuacggcgccugcccccgcuacgucaagcagaacacccucaagcucgccaccggcaugcgcaacguccccgagaagcagacccgcggcaucuucggcgccaucgccggcuucaucgagaacggcugggagggcauggucgacggcugguacggcuuccgccaccagaacuccgagggcaccggccaggccgccgaccucaaguccacccaggccgccaucgaccagaucaacggcaagcucaaccgccucaucgagaagaccaacgagaaguuccaccagaucgagaaggaguucuccgaggucgagggccgcauccaggaccucgagaaguacgucgaggacaccaagaucgaccucugguccuacaacgccgagcuccucgucgcccucgagaaccagcacaccaucgaccucaccgacuccgagaugaacaagcucuucgagaagacccgcaagcagcuccgcgagaacgccgaggacaugggcaacggcugcuucaagaucuaccacaagugcgacaacgccugcaucggcuccauccgcaacggcaccuacgaccacgacgucuaccgcgacgaggcccucaacaaccgcuuccagaucaagggcgucgagcucaaguccggcuacaaggacuggauccucuggaucuccuucgccaucuccugcuuccuccucugcgucguccuccucggcuucaucaugugggccugccagaagggcaacauccgcugcaacaucugcaucuga

SEQ ID NO: 104598 - RNA, 1701 nt, Artificial Sequence
  derived and/or modified CDS sequence (opt2) from hemagglutinin__InfluenzaA__AFG99193
augaagaccaucaucgcccucuccuacaucuccugccucgucuucgcccagaagcuccccggcaacgacaacuccaccgccacccucugccucggccaccacgccguccccaacggcacccucgucaagaccaucaccaacgaccagaucgaggucaccaacgccaccgagcucguccaguccuccuccaccggccgcaucugcgacuccccccaccgcauccucgacggcaagaacugcacccucaucgacgcccuccucggcgacccccacugcgacggcuuccagaacgagaagugggaccucuucgucgagcgcuccaaggccuucuccaacugcuaccccuacgacguccccgacuacgccucccuccgcucccucgucgccuccuccggcacccucgaguucaucaacgagggcuucaacuggaccggcgucacccaguccggcggcuccuacgccugcaagcgcggcuccgucaacuccuucuucucccgccucaacuggcucuacgaguccgaguccaaguaccccgcccucaacgucaccaugcccaacaacggcaaguucgagaagcucuacaucuggggcguccaccaccccuccaccgacaaggagcagaccaaccucuacguccgcgccuccggccgcgucaccgucuccaccaagcgcucccagcagaccgucauccccaacaucggcccccgccccuggguccgcggccucuccucccgcaucuccaucuacuggaccaucgucaagcccggcgacauccuccucaucaacuccaccggcaaccucaucgccccccgcggcuacuucaagauccgcaccggcaaguccuccaucaugcgcuccgacgcccccaucggcaccugcuccuccgagugcaucacccccaacggcuccauccccaacgacaagcccuuccagaacgucaacaagaucaccuacggcgccugcccccgcuacgucaagcagaacacccucaagcucgccaccggcaugcgcaacguccccgagaagcagacccgcggcaucuucggcgccaucgccggcuucaucgagaacggcugggagggcauggucgacggcugguacggcuuccgccaccagaacuccgagggcaccggccaggccgccgaccucaaguccacccaggccgccaucgaccagaucaacggcaagcucaaccgccucaucgagaagaccaacgagaaguuccaccagaucgagaaggaguucuccgaggucgagggccgcauccaggaccucgagaaguacgucgaggacaccaagaucgaccucugguccuacaacgccgagcuccucgucgcccucgagaaccagcacaccaucgacaugaccgacuccgagaugaacaagcucuucgagaagacccgcaagcagcuccgcgagaacgccgaggacaugggcaacggcugcuucaagaucuaccacaagugcgacaacgccugcaucggcuccauccgcaacggcaccuacgaccacgacgucuaccgcgacgaggcccucaacaaccgcuuccagaucaagggcgucgagcucaaguccggcuacaaggacuggauccucuggaucuccuucgccaucuccugcuuccuccucugcgucguccuccucggcuucaucaugugggccugccagaagggcaacauccgcugcaacaucugcaucuga

SEQ ID NO: 104599 - RNA, 1701 nt, Artificial Sequence
  derived and/or modified CDS sequence (opt2) from hemagglutinin__InfluenzaA__AFG99204
augaagaccaucaucgcccucuccuacaucuucugccucggcuucgcccagaagcuccccggcaacgacaacuccaccgccacccucugccucggccaccacgccguccccaacggcacccucgucaagaccaucaccaacgaccagaucgaggucaccaacgccaccgagcucguccaguccuccuccaccggccgcaucugcgacuccccccaccgcauccucgacggcaagaacugcacccucaucgacgcccuccucggcgacccccacugcgacggcuuccagaacgagaagugggaccucuucgucgagcgcuccaaggccuucuccaacugcuaccccuacgacguccccgacuacgccucccuccgcucccucgucgccuccuccggcacccucgaguucaucaacgagggcuucaacuggaccggcgucacccaguccggcggcuccuacgccugcaagcgcggcuccgucaacuccuucuucucccgccucaacuggcucuacaaguccgaguccaaguaccccgcccucaacgucaccaugcccaacaacggcaaguucgacaagcucuacaucuggggcguccaccaccccuccaccgacaaggagcagaccaaccucuacguccgcgccuccggccgcgucaccgucuccaccaagcgcucccagcagaccgucauccccaacaucggcucccgccccuggguccgcggccucuccucccgcaucuccaucuacuggaccaucgucaagcccggcgacauccuccucaucaacuccaccggcaaccucaucgccccccgcggcuacuucaagauccgcaccggcaaguccuccaucauccgcuccgacgcccccaucggcaccugcuccuccgagugcaucacccccaacggcuccauccccaacgacaagcccuuccagaacgucaacaagaucaccuacggcgccugcccccgcuacgucaagcagaacacccucaagcucgccaccggcaugcgcaacguccccgagaagcagacccgcggcaucuucggcgccaucgccggcuucaucgagaacggcugggagggcauggucgacggcugguacggcuuccgccaccagaacuccgagggcaccggccaggccgccgaccucaaguccacccaggccgccaucgaccagaucaacggcaagcucaaccgccucaucgagaagaccaacgagaaguuccaccagaucgagaaggaguucuccgaggucgagggccgcauccaggaccucgagaaguacgucgaggacaccaagaucgaccucugguccuacaacgccgagcuccucgucgcccucgagaaccagcacaccaucgaccucaccgacuccgagaugaacaagcucuucgagaagacccgcaagcagcuccgcgagaacgccgaggacaugggcaacggcugcuucaagaucuaccacaagugcgacaacgccugcaucggcuccauccgcaacggcaccuacgaccacgacgucuaccgcgacgaggcccucaacaaccgcuuccagaucaagggcgucgagcucaaguccggcuacaaggacuggauccucuggaucuccuucgccaucuccugcuuccuccucugcgucguccuccucggcuucaucaugugggccugccagaagggcaacauccgcugcaacaucugcaucuga

SEQ ID NO: 104600 - RNA, 1701 nt, Artificial Sequence
  derived and/or modified CDS sequence (opt2) from hemagglutinin__InfluenzaA__AFG99215
augaagaccaucaucgcccucuccuacaucuucugccucgucuucgcccagaagcuccccggcaacgacaacuccaccgccacccucugccucggccaccacgccguccccaacggcacccucgucaagaccaucaccaacgaccagaucgaggucaccaacgccaccgagcucguccaguccuccuccaccggccgcaucugcgacuccccccaccgcauccucgacggcaagaacugcacccucaucgacgcccuccucggcgacccccacugcgacggcuuccagaacgagaagugggaccucuucaucgagcgcuccaaggccuucuccaacugcuaccccuacgacguccccgacuacgccucccuccgcucccucgucgccuccuccggcacccucgaguucaucaacgagggcuucaacuggaccggcgucacccaguccggcggcuccuacgccugcaagcgcggcuccgucaacuccuucuucucccgccucaacuggcucuacgaguccgaguacaaguaccccgcccucaacgucaccaugcccaacaacggcaaguucgacaagcucuacaucuggggcguccaccaccccuccaccgagaaggagcagaccaaccucuacguccgcgccuccggccgcgucaccgucuccaccaagcgcucccagcagaccgucacccccaacaucggcucccgccccuggguccgcggccucuccucccgcaucuccaucuacuggaccaucgucaagcccggcgacauccuccucaucaacuccaccggcaaccucaucgccccccgcggcuacuucaagauccgcaccggcaaguccuccaucaugcgcuccgacgcccccaucggcaccugcuccuccgagugcaucacccccaacggcuccauccccaacgacaagcccuuccagaacgucaacaagaucaccuacggcgccugcccccgcuacgucaagcagaacacccucaagcucgccaccggcaugcgcaacguccccgagaagcagacccgcggcaucuucggcgccaucgccggcuucaucgagaacggcugggagggcauggucgacggcugguacggcuuccgccaccagaacuccgagggcaccggccaggccgccgaccucaaguccacccaggccgccaucgaccagaucaacggcaagcucaaccgccucaucgagaagaccaacgagaaguuccaccagaucgagaaggaguucuccgaggucgagggccgcauccaggaccucgagaaguacgucgaggacaccaagaucgaccucugguccuacaacgccgagcuccucgucgcccucgagaaccagcacaccaucgaccucaccgacuccgagaugaacaagcucuucgagaagacccgcaagcagcuccgcgagaacgccgaggacaugggcaacggcugcuucaagaucuaccacaagugcgacaacgccugcaucggcuccauccgcaacggcaccuacgaccacgacgucuaccgcgacgaggcccucaacaaccgcuuccagaucaagggcgucgagcucaaguccggcuacaaggacuggauccucuggaucuccuucgccaucuccugcuuccuccucugcgucguccuccucggcuucaucaugugggccugccagaagggcaacauccgcugcaacaucugcaucuga

SEQ ID NO: 104601 - RNA, 1701 nt, Artificial Sequence
  derived and/or modified CDS sequence (opt2) from hemagglutinin__InfluenzaA__AFG99226
augaagaccaucaucgcccucuccuacaucuucugccucgucuucgcccagaagcuccccggcaacgacaacuccaccgccacccucugccucggccaccacgccguccccaacggcacccucgucaagaccaucaccaacgaccagaucgaggucaccaacgccaccgagcucguccaguccuccuccaccggccgcaucugcgacuccccccaccgcauccucgacggcaagaacugcacccucaucgacgcccuccucggcgacccccacugcgacggcuuccagaacgagaagugggaccucuucgucgagcgcuccaaggccuucuccaacugcuaccccuacgacguccccgacuacgccucccuccgcucccucgucgccuccuccggcacccucgaguucaucaacgagggcuucaacuggaccggcgucacccaguccggcggcuccuacgccugcaagcgcggcuccgucaacuccuucuucucccgccucaacuggcucuacgaguccgaguacaaguaccccgcccucaacgucaccaugcccaacaacggcaaguucgacaagcucuacaucuggggcguccaccaccccuccaccgacaaggagcagaccaaccucuacguccgcgccuccggccgcgucaccgucuccaccaagcgcucccagcagaccgucauccccaacaucggcucccgccccuggguccgcggccucuccucccgcaucuccaucuacuggaccaucgucaagcccggcgacauccucuccaucaacuccaccggcaaccucaucgccccccgcggcuacuucaagauccgcaccggcaaguccuccaucaugcgcuccgacgcccccaucggcaccugcuccuccgagugcaucacccccaacggcuccauccccaacgacaagcccuuccagaacgucaacaagaucaccuacggcgccugcccccgcuacgucaagcagaacacccucaagcucgccaccggcaugcgcaacguccccgagaagcagacccgcggcaucuucggcgccaucgccggcuucaucgagaacggcugggagggcauggucgacggcugguacggcuuccgccaccagaacuccgagggcaccggccaggccgccgaccucaaguccacccaggccgccaucgaccagaucaacggcaagcucaaccgccucaucgagaagaccaacgagaaguuccaccagaucgagaaggaguucuccgaggucgagggccgcauccaggaccucgagaaguacgucgaggacaccaagaucgaccucugguccuacaacgccgagcuccucgucgcccucgagaaccagcacaccaucgaccucaccgacuccgagaugaacaagcucuucgagaagacccgcaagcagcuccgcgagaacgccgaggacaugggcaacggcugcuucaagaucuaccacaagugcgacaacgccugcaucggcuccauccgcaacggcaccuacgaccacgacgucuaccgcgacgaggcccucaacaaccgcuuccagaucaagggcgucgagcucaaguccggcuacaaggacuggauccucuggaucuccuucgccaucuccugcuuccuccucugcgucguccuccucggcuucaucaugugggccugccagaagggcaacauccgcugcaacaucugcaucuga

SEQ ID NO: 104602 - RNA, 1701 nt, Artificial Sequence
  derived and/or modified CDS sequence (opt2) from hemagglutinin__InfluenzaA__AFG99237
augaagaccaucaucgcccucuccuacaucuucugccucgucuucgcccagaagcuccccggcaacgacaacuccaccgccacccucugccucggccaccacgccguccccaacggcacccucgucaagaccaucaccaacgaccagaucgaggucaccaacgccaccgagcucguccaguccuccuccaccggccgcaucugcgacuccccccaccgcauccucgacggcaagaacugcacccucaucgacgcccuccucggcgacccccacugcgacggcuuccagaacgagaagugggaccucuucgucgagcgcuccaaggccuucuccaacugcuaccccuacgacguccccgacuacgccucccuccgcucccucgucgccuccuccggcacccucgaguucaucaacgaggacuucaacuggaccggcgucacccaguccggcggcuccuacgccugcaagcgcgaguccgucaacuccuucuucucccgccucaacuggcucuacgaguccgaguacaaguaccccgcccucaacgucaccaugcccaacaacggcaaguucgagaagcucuacaucuggggcguccaccaccccuccaccgacaaggagcagaccaaccucuacguccgcgccuccggccgcgucaccgucuccaccaagcgcucccagcagaccgucauccccaacaucggcucccgccccuggguccgcggccucuccucccgcaucuccaucuacuggaccaucgucaagcccggcgacauccuccucaucaacuccaccggcaaccucaucgccccccgcggcuacuucaagauccgcaccggcaaguccuccaucaugcgcuccgacgcccccaucggcaccugcuccuccgagugcaucacccccaacggcuccauccccaacgacaagcccuuccagaacgucaacaagaucaccuacggcgccugcccccgcuacguccgccagaacacccucaagcucgccaccggcaugcgcaacguccccgagaagcagacccgcggcaucuucggcgccaucgccggcuucaucgagaacggcugggagggcauggucgacggcugguacggcuuccgccaccagaacuccgagggcaccggccaggccgccgaccucaaguccacccaggccgccaucgaccagaucaacggcaagcucaaccgccucaucgagaagaccaacgagaaguuccaccagaucgagaaggaguucuccgaggucgagggccgcauccaggaccucgagaaguacgucgaggacaccaagaucgaccucugguccuacaacgccgagcuccucgucgcccucgagaaccagcacaccaucgaccucaccgacuccgagaugaacaagcucuucgagaagacccgcaagcagcuccgcgagaacgccgaggacaugggcaacggcugcuucaagaucuaccacaagugcgacaacgccugcaucggcuccauccgcaacggcaccuacgaccacgacgucuaccgcgacgaggcccucaacaaccgcuuccagaucaagggcgucgagcucaaguccggcuacaaggacuggauccucuggaucuccuucgccaucuccugcuuccuccucugcgucguccuccucggcuucaucaugugggccugccagaagggcaacauccgcugcaacaucugcaucuga

SEQ ID NO: 104603 - RNA, 1701 nt, Artificial Sequence
  derived and/or modified CDS sequence (opt2) from hemagglutinin__InfluenzaA__AFG99248
augaagaccaucaucgcccucuccuacaucuucugccucgucuucgcccagaagcuccccggcaacgacaacuccaccgccacccucugccucggccaccacgccguccccaacggcacccucgucaagaccaucaccaacgaccagaucgaggucaccaacgccaccgagcucguccaguccuccuccaccggccgcaucugcgacuccccccaccgcauccucgacggcaagaacugcacccucaucgacgcccuccucggcgacccccacugcgacggcuuccagaacgagaagugggaccucuucgucgagcgcuccaaggccuacuccaacugcuaccccuacgacguccccgacuacgccucccuccgcucccucgucgccuccuccggcacccucgaguucaucaacgaggacuucaacuggaccggcgucacccaguccggcggcucccacgccugcaagcgcggcuccgucaacuccuucuucucccgccucaacuggcuccacgaguccgaguacaaguaccccgcccucaacgucaccaugcccaacaacggcaaguucgacaagcucuacaucuggggcguccaccaccccaucaccgaccgcgagcagaccaaccucuacguccgcgccuccggccgcgucaccgucuccaccaagcgcucccagcagaccgucauccccaacaucggcuuccgccccuggguccgcggccucuccucccgcaucuccaucuacuggaccaucgucaagcccggcgacauccuccucaucaacuccaccggcaaccucaucgccccccgcggcuacuucaagauccgcaacggcaaguccuccaucaugcgcuccgacgcccccaucggcaccugcuccuccgagugcaucacccccaacggcuccauccccaacgacaagcccuuccagaacgucaacaagaucaccuacggcgccugcccccgcuacgucaagcagaacacccucaagcucgccaccggcaugcgcaacguccccgagaagcagacccgcggcaucuucggcgccaucgccggcuucaucgagaacggcugggagggcauggucgacggcugguacggcuuccgccaccagaacuccgagggcaccggccaggccgccgaccucaaguccacccaggccgccaucgaccagaucaacggcaagcucaaccgccucaucgagaagaccaacgagaaguuccaccagaucgagaaggaguucuccgaggucgagggccgcauccaggaccucgagaaguacgucgaggacaccaagaucgaccucugguccuacaacgccgagcuccucgucgcccucgagaaccagcacaccaucgaccucaccgacuccgagaugaacaagcucuucgagaagacccgcaagcagcuccgcgagaacgccgaggacaugggcaacggcugcuucaagaucuaccacaagugcgacaacgccugcaucggcuccauccgcaacggcaccuacgaccacgacgucuaccgcgacgaggcccucaacaaccgcuuccagaucaagggcgucgagcucaaguccggcuacaaggacuggauccucuggaucuccuucgccaucuccugcuuccuccucugcgucguccuccucggcuucaucaugugggccugccagaagggcaacauccgcugcaacaucugcaucuga

SEQ ID NO: 104604 - RNA, 1701 nt, Artificial Sequence
  derived and/or modified CDS sequence (opt2) from hemagglutinin__InfluenzaA__AFG99259
augaagaccaucaucgcccucuccuacaucuucugccucgucuucgcccagaagcuccccggcaacgacaacuccaccgccacccucugccucggccaccacgccguccccaacggcacccucgucaagaccaucaccaacgaccaggucgaggucaccaacgccaccgagcucguccaguccuccuccaccggccgcaucugcgacuccccccaccgcauccucgacggcaagaacugcacccucaucgacgcccuccucggcgacccccacugcgacggcuuccagaacgagaagugggaccucuucgucgagcgcuccaaggccuacuccaacugcuaccccuacgacguccccgacuacgccucccuccgcucccucgucgccuccuccggcacccucgaguucaucaacgaggacuucaacuggaccggcgucacccaguccggcggcuccuacgccugcaagcgcggcuccgucaacuccuucuucucccgccucaacuggcuccacaaguccgaguacaaguaccccgcccucaacgucaccaugcccaacaacggcaaguucgacaagcucuacaucuggggcguccaccaccccuccaccgaccgcgagcagaccaaccucuacguccgcgccuccggccgcgucaccgucuccaccaagcgcucccagcagaccgucauccccaacaucggcucccgccccuggguccgcggccucuccucccgcaucuccaucuacuggaccaucgucaagcccggcgacauccuccucaucaacuccaccggcaaccucaucgccccccgcggcuacuucaagauccgcaccggcaaguccuccaucaugcgcuccgacgcccccaucggcaccugcuccuccgagugcaucacccccaacggcuccauccccaacgacaagcccuuccagaacgucaacaagaucaccuacggcgccugcccccgcuacgucaagcagaacacccucaagcucgccaccggcaugcgcaacguccccgagaagcagacccgcggcaucuucggcgccaucgccggcuucaucgagaacggcugggagggcauggucgacggcugguacggcuuccgccaccagaacuccgagggcaccggccaggccgccgaccucaaguccacccaggccgccaucgaccagaucaacggcaagcucaaccgccucaucgagaagaccaacgagaaguuccaccagaucgagaaggaguucuccgaggucgagggccgcauccaggaccucgagaaguacgucgaggacaccaagaucgaccucugguccuacaacgccgagcuccucgucgcccucgagaaccagcacaccaucgaccucaccgacuccgagaugaacaagcucuucgagaagacccgcaagcagcuccgcgagaacgccgaggacaugggcaacggcugcuucaagaucuaccacaagugcgacaacgccugcaucggcuccauccgcaacggcaccuacgaccacgacgucuaccgcgacgaggcccucaacaaccgcuuccagaucaagggcgucgagcucaaguccggcuacaaggacuggauccucuggaucuccuucgccaucuccugcuuccuccucugcgucguccuccucggcuucaucaugugggccugccagaagggcaacauccgcugcaacaucugcaucuga

SEQ ID NO: 104605 - RNA, 1701 nt, Artificial Sequence
  derived and/or modified CDS sequence (opt2) from hemagglutinin__InfluenzaA__AFG99270
augaagaccaucaucgcccucuccuacaucuucugccucgucuucgcccagaagcuccccggcaacgacaacuccaccgccacccucugccucggccaccacgccguccccaacggcacccucgucaagaccaucaccaacgaccagaucgaggucaccaacgccaccgagcucguccaguccuccuccaccggccgcaucugcgacuccccccaccgcauccucgacggcaagaacugcacccucaucgacgcccuccucggcgacccccacugcgacggcuuccagaacaaggagugggaccucuucgucgagcgcuccaaggccuacuccaacugcuaccccuacgacguccccgacuacgccucccuccgcucccucgucgccuccuccggcacccucgaguucaucaacgaggacuucaacuggaccggcgucgcccaguccggcggcuccuacgccugcaagcgcggcuccgucaacuccuucuucucccgccucaacuggcuccacaaguccgaguacaaguaccccgcccucaacgucaccaugcccaacaacggcaaguucgacaagcucuacaucuggggcguccaccaccccuccaccgaccgcgagcagaccaaccucuacguccgcgccuccggccgcgucaccgucuccaccaagcgcucccagcagaccgucauccccaacaucggcucccgccccuggguccgcggccucuccucccgcaucuccaucuacuggaccaucgucaagcccggcgacauccuccucaucaacuccaccggcaaccucaucgccccccgcggcuacuucaagauccgcaccggcaaguccuccaucaugcgcuccgacgcccccaucggcaccugcuccuccgagugcaucacccccaacggcuccauccccaacgacaagcccuuccagaacgucaaccgcaucaccuacggcgccugcccccgcuacgucaagcagaacacccucaagcucgccaccggcaugcgcaacguccccgagaagcagacccgcggcaucuucggcgccaucgccggcuucaucgagaacggcugggagggcauggucgacggcugguacggcuuccgccaccacaacuccgagggcaccggccaggccgccgaccucaaguccacccaggccgccaucgaccagaucaacggcaagcucaaccgccucaucgagaagaccaacgagaaguuccaccagaucgagaaggaguucuccgaggucgagggccgcauccaggaccucgagaaguacgucgaggacaccaagaucgaccucugguccuacaacgccgagcuccucgucgcccucgagaaccagcacaccaucgaccucaccgacuccgagaugaacaagcucuucgagaagacccgcaagcagcuccgcgagaacgccgaggacaugggcaacggcugcuucaagaucuaccacaagugcgacaacgccugcaucggcuccauccgcaacggcaccuacgaccacgacgucuaccgcgacgaggcccucaacaaccgcuuccagaucaagggcgucgagcucaaguccggcuacaaggacuggauccucuggaucuccuucgccaucuccugcuuccuccucugcgucguccuccucggcuucaucaugugggccugccagaagggcaacauccgcugcaacaucugcaucuga

SEQ ID NO: 104606 - RNA, 1701 nt, Artificial Sequence
  derived and/or modified CDS sequence (opt2) from hemagglutinin__InfluenzaA__AFG99281
augaagaccaucaucgcccucuccuacaucuucugccucgucuucgcccagaagcuccccggcaacgacaacuccaccgccacccucugccucggccaccacgccguccccaacggcacccucgucaagaccaucaccaacgaccagaucgaggucaccaacgccaccgagcucguccaguccuccuccaccggccgcaucugcgacuccccccaccgcauccucgacggcaagaacugcacccucaucgacgcccuccucggcgacccccacugcgacggcuuccagaacgagaagugggaccucuucgucgagcgcuccaaggccuucuccaacugcuaccccuacgacguccccgacuacgccucccuccgcucccucgucgccuccuccggcacccucgaguucaucaacgaggaguucaacuggaccggcgucacccaguccggcggcuccuacgccugcaagcgcggcuccgucaacuccuucuucucccgccucaacuggcuccacaaguccgaguacaaguaccccgcccucaacgucaccaugcccaacaacggccgcuucgacaagcucuacaucuggggcguccaccaccccuccaccgaccgcgagcagaccaaccucuacguccgcgccuccggccgcgucaccgucuccaccaagcgcucccagcagaccgucauccccaacaucggcccccgccccuggguccgcggccucuccucccgcaucuccaucuacuggaccaucgucaagcccggcgacauccuccucaucaacuccaccggcaaccucaucgccccccgcggcuacuucaagauccacaccggcaaguccuccaucaugcgcuccgacgcccccaucggcaccugcuccuccgagugcaucacccccaacggcuccauccccaacgacaagcccuuccagaacgucaacaagaucaccuacggcgccugcccccgcuacgucaagcagaacacccucaagcucgccaccggcaugcgcaacguccccgacaagcagacccgcggcaucuucggcgccaucgccggcuucaucgagaacggcugggagggcauggucgacggcugguacggcuuccgccaccagaacuccgagggcaccggccaggccgccgaccucaaguccacccaggccgccaucgaccagaucaacggcaagcucaaccgccucaucgagaagaccaacgagaaguuccaccagaucgagaaggaguucuccgaggucgagggccgcauccaggaccucgagaaguacgucgaggacaccaagaucgaccucugguccuacaacgccgagcuccucgucgcccucgagaaccagcacaccaucgaccucaccgacuccgagaugaacaagcucuucgagaagacccgcaagcagcuccgcgagaacgccgaggacaugggcaacggcugcuucaagaucuaccacaagugcgacaacgccugcaucggcuccauccgcaacggcaccuacgaccacgacgucuaccgcgacgaggcccucaacaaccgcuuccagaucaagggcgucgagcucaaguccggcuacaaggacuggauccucuggaucuccuucgccaucuccugcuuccuccucugcgucguccuccucggcuucaucaugugggccugccagaagggcaacauccgcugcaacaucugcaucuga

SEQ ID NO: 104607 - RNA, 1701 nt, Artificial Sequence
  derived and/or modified CDS sequence (opt2) from hemagglutinin__InfluenzaA__AFG99292
augaagaccaucaucgcccucuccuacaucuucugccucgucuucgcccagaagcuccccggcaacgacaacuccaccgccacccucugccucggccaccacgccguccccaacggcacccucgucaagaccaucaccaacgaccaggucgaggucaccaacgccaccgagcucguccaguccuccuccaccggccgcaucugcgacuccccccaccgcauccucgacggcaagaacugcacccucaucgacgcccuccucggcgacccccacugcgacggcuuccagaacgagaagugggaccucuucgucgagcgcuccaaggccuacuccaacugcuaccccuacgacguccccgacuacgccucccuccgcucccucgucgccuccuccggcacccucgaguucaucaacgaggacuucaacuggaccggcgucacccaguccggcggcuccuacgccugcaagcgcggcuccgucaacuccuucuucucccgccucaacuggcuccacgaguccgaguacaaguaccccgcccucaacgucaccaugcccaacaacggcaaguucgacaagcucuacaucuggggcguccaccaccccuccaccgaccgcgagcagaccaaccucuacguccgcgccuccggccgcgucaccgucuccaccaagcgcucccagcagaccgucauccccaacaucggcucccgccccuggguccgcggccucuccucccgcaucuccaucuacuggaccaucgucaagcccggcgacauccuccucaucaacuccaccggcaaccucaucgccccccgcggcuacuucaagauccgcaccggcaaguccuccaucaugcgcuccgacgcccccaucggcaccugcuccuccgagugcaucacccccaacggcuccauccccaacgacaagcccuuccagaacgucaacaagaucaccuacggcgccugcccccgcuacgucaagcagaacacccucaagcucgccaccggcaugcgcaacguccccgagaagcagacccgcggcaucuucggcgccaucgccggcuucaucgagaacggcugggagggcauggucgacggcugguacggcuuccgccaccagaacuccgagggcaccggccaggccgccgaccucaaguccacccaggccgccaucgaccagaucaacggcaagcucaaccgccucaucgagaagaccaacgagaaguuccaccagaucgagaaggaguucuccgaggucgagggccgcauccaggaccucgagaaguacgucgaggacaccaagaucgaccucugguccuacaacgccgagcuccucgucgcccucgagaaccagcacaccaucgaccucaccgacuccgagaugaacaagcucuucgagaagacccgcaagcagcuccgcgagaacgccgaggacaugggcaacggcugcuucaagaucuaccacaagugcgacaacgccugcaucggcuccauccgcaacggcaccuacgaccacgacgucuaccgcgacgaggcccucaacaaccgcuuccagaucaagggcgucgagcucaaguccggcuacaaggacuggauccucuggaucuccuucgccaucuccugcuuccuccucugcgucguccuccucggcuucaucaugugggccugccagaagggcaacauccgcugcaacaucugcaucuga

SEQ ID NO: 104608 - RNA, 1701 nt, Artificial Sequence
  derived and/or modified CDS sequence (opt2) from hemagglutinin__InfluenzaA__AFG99303
augaagaccaucaucgcccucuccuacaucuucugccucgucgucgcccagaagcuccccggcaacgacaacuccaccgccacccucugccucggccaccacgccguccccaacggcacccucgucaagaccaucaccaacgaccagaucgaggucaccaacgccaccgagcucguccaguccuccuccaccggccgcaucugcgacuccccccaccgcauccucgacggcaagaacugcacccucaucgacgcccuccucggcgacccccacugcgacggcuuccagaacaaggagugggaccucuucgucgagcgcuccaaggccuacuccaacugcuaccccuacgacguccccgacuacgccucccuccgcucccucgucgccuccuccggcacccucgaguucaucaacgaggacuucaacuggaccggcgucgcccaguccggcggcuccuacgccugcaagcgcggcuccgucaacuccuucuucucccgccucaacuggcuccacgaguccgaguacaaguaccccgcccucaacgucaccaugcccaacaacggcaaguucgacaagcucuacaucuggggcguccaccaccccuccaccgaccgcgagcagaccaaccucuacguccgcgccuccggccgcgucaccgucuccaccaagcgcucccagcagaccgucauccccaacaucggcucccgccccuggguccgcggccucuccucccgcaucuccaucuacuggaccaucgucaagcccggcgacauccuccucaucaacuccaccggcaaccucaucgccccccgcggcuacuucaagauccgcaccggcaaguccuccaucaugcgcuccgacgcccccaucggcaccugcuccuccgagugcaucacccccaacggcuccaucuccaacgacaagcccuuccagaacgucaaccgcaucaccuacggcgccugcccccgcuacgucaagcagaacacccucaagcucgccaccggcaugcgcaacguccccgagaagcagacccgcggcaucuucggcgccaucgccggcuucaucgagaacggcugggagggcauggucgacggcugguacggcuuccgccaccagaacuccgagggcaccggccaggccgccgaccucaaguccacccaggccgccaucgaccagaucaacggcaagcucaaccgccucaucgagaagaccaacgagaaguuccaccagaucgagaaggaguucuccgaggucgagggccgcauccaggaccucgagaaguacgucgaggacaccaagaucgaccucugguccuacaacgccgagcuccucgucgcccucgagaaccagcacaccaucgaccucaccgacuccgagaugaacaagcucuucgagaagacccgcaagcagcuccgcgagaacgccgaggacaugggcaacggcugcuucaagaucuaccacaagugcgacaacgccugcaucggcuccauccgcaacggcaccuacgaccacgacgucuaccgcgacgaggcccucaacaaccgcuuccagaucaagggcgucgagcucaaguccggcuacaaggacuggauccucuggaucuccuucgccaucuccugcuuccuccucugcgucguccuccucggcuucaucaugugggccugccagaagggcaacauccgcugcaacaucugcaucuga

SEQ ID NO: 104609 - RNA, 1701 nt, Artificial Sequence
  derived and/or modified CDS sequence (opt2) from hemagglutinin__InfluenzaA__AFG99314
augaagaccaucaucgcccucuccuacaucuucugccucgucuucgcccagaagcuccccggcaacgacaacuccaccgccacccucugccucggccaccacgccguccccaacggcacccucgucaagaccaucaccaacgaccagaucgaggucaccaacgccaccgagcucguccaguccuccuccaccggccgcaucugcgacuccccccaccgcauccucgacggcaagaacugcacccucaucgacgcccuccucggcgacccccacugcgacuccuuccagaacgagaagugggaccucuucgucgagcgcuccaaggccuacuccaacugcuaccccuacgacguccccgacuacgccucccuccgcucccucgucgccuccuccggcacccucgaguucaucaacgaggacuucaacuggaccggcgucacccaguccggcggcuccuacgccugcaagcgcggcuccgucaacuccuucuucucccgccucaacuggcuccacgaguccgaguacaaguaccccgcccucaacgucaccaugcccaacaacggcaaguucgacaagcucuacaucuggggcauccaccaccccuccaccgaccgcgagcagaccaaccucuacguccgcgccuccggccgcgucaccgucuccaccaagcgcucccagcagaccgucauccccaacaucggcucccgccccuggguccgcggccucuccucccgcaucuccaucuacuggaccaucgucaagcccggcgacauccuccucaucaacuccaccggcaaccucaucgccccccgcggcuacuucaagcuccgcaccggcaaguccuccaucaugcgcuccgacgcccccaucggcaccugcuccuccgagugcaucacccccaacggcuccauccccaacgacaagcccuuccagaacgucaacaagaucaccuacggcgccugcccccgcuacgucaagcagaacacccucaagcucgccaccggcaugcgcaacguccccgagaagcagacccgcggcaucuucggcgccaucgccggcuucaucgagaacggcugggagggcauggucgacggcugguacggcuuccgccaccagaacuccgagggcaccggccaggccgccgaccucaaguccacccaggccgccaucgaccagaucaacggcaagcucaaccgccucaucgagaagaccaacgagaaguuccaccagaucgagaaggaguucuccgaggucgagggccgcauccaggaccucgagaaguacgucgaggacaccaagaucgaccucugguccuacaacgccgagcuccucgucgcccucgagaaccagcacaccaucgaccucaccgacuccgagaugaacaagcucuucgagaagacccgcaagcagcuccgcgagaacgccgaggacaugggcaacggcugcuucaagaucuaccacaagugcgacaacgccugcaucggcuccauccgcaacggcaccuacgaccacgacgucuaccgcgacgaggcccucaacaaccgcuuccagaucaagggcgucgagcucaaguccggcuacaaggacuggauccucuggaucuccuucgccaucuccugcuuccuccucugcgucguccuccucggcuucaucaugugggccugccagaagggcaacauccgcugcaacaucugcaucuga

SEQ ID NO: 104610 - RNA, 1701 nt, Artificial Sequence
  derived and/or modified CDS sequence (opt2) from hemagglutinin__InfluenzaA__AFG99336
augaagaccaucaucgcccucuccuacaucuucugccucgucuucgcccagaagcuccccggcaacgacaacuccaccgccacccucugccucggccaccacgccguccccaacggcacccucgucaagaccaucaccaacgaccagaucgaggucaccaacgccaccgagcucguccaguccuccuccaccggccgcaucugcgacuccccccaccgcauccucgacggcaagaacugcacccucaucgacgcccuccucggcgacccccacugcgacggcuuccagaacaaggagugggaccucuucgucgagcgcuccaaggccuacuccaacugcuaccccuacgacguccccgacuacgccucccuccgcucccucgucgccuccuccggcacccucgaguucaucaacgaggacuucaacuggaccggcgucgcccaguccggcggcuccuacgccugcaagcgcggcuccgucaacuccuucuucucccgccucaacuggcuccacaaguccgaguacaaguaccccgcccucaacgucaccaugcccaacaacggcaaguucgacaagcucuacaucuggggcguccaccaccccuccaccgaccgcgagcagaccaaccucuacguccgcgccuccggccgcgucaccgucuccaccaagcgcucccagcagaccgucauccccaacaucggcucccgccccuggguccgcggccucuccucccgcaucuccaucuacuggaccaucgucaagcccggcgacauccuccucaucaacuccaccggcaaccucaucgccccccgcggcuacuucaagauccgcaccggcaaguccuccaucaugcgcuccgacgcccccaucggcaccugcuccuccgagugcaucacccccaacggcuccauccccaacgacaagcccuuccagaacgucaaccgcaucaccuacggcgccugcccccgcuacgucaagcagaacacccucaagcucgccaccggcaugcgcaacguccccgagaagcagacccgcggcaucuucggcgccaucgccggcuucaucgagaacggcugggagggcauggucgacggcugguacggcuuccgccaccagaacuccgagggcaccggccaggccgccgaccucaaguccacccaggccgccaucgaccagaucaacggcaagcucaaccgccucaucgagaagaccaacgagaaguuccaccagaucgagaaggaguucuccgaggucgagggccgcauccaggaccucgagaaguacgucgaggacaccaagaucgaccucugguccuacaacgccgagcuccucgucgcccucgagaaccagcacaccaucgaccucaccgacuccgagaugaacaagcucuucgagaagacccgcaagcagcuccgcgagaacgccgaggacaugggcaacggcugcuucaagaucuaccacaagugcgacaacgccugcaucggcuccauccgcaacggcaccuacgaccacgacgucuaccgcgacgaggcccucaacaaccgcuuccagaucaagggcgucgagcucaaguccggcuacaaggacuggauccucuggaucuccuucgccaucuccugcuuccuccucugcgucguccuccucggcuucaucaugugggccugccagaagggcaacauccgcugcaacaucugcaucuga

SEQ ID NO: 104611 - RNA, 1701 nt, Artificial Sequence
  derived and/or modified CDS sequence (opt2) from hemagglutinin__InfluenzaA__AFG99347
augaagaccaucaucgcccucuccuacaucuucugccucgucuucgcccagaagcuccccggcaacgacaacuccaccgccacccucugccucggccaccacgccguccccaacggcacccucgucaagaccaucaccaacgaccagaucgaggucaccaacgccaccgagcucguccaguccuccuccaccggccgcaucugcgacuccccccaccgcauccucgacggcaagaacugcacccucaucgacgcccuccucggcgacccccacugcgacggcuuccagaacaaggagugggaccucuucgucgagcgcuccaaggccuacuccaacugcuaccccuacgacguccccgacuacgccucccuccgcucccucgucgccuccuccggcacccucgaguucaucaacgaggacuucaacuggaccggcgucgcccaguccggcggcuccuacgccugcaagcgcggcuccgucaacuccuucuucucccgccucaacuggcuccacaagcccgaguacaaguaccccgcccucaacgucaccaugcccaacaacggcaaguucgacaagcucuacaucuggggcguccaccaccccuccaccgaccgcgagcagaccaaccucuacguccgcgccuccggccgcgucaccgucuccaccaagcgcucccagcagaccgucauccccaacaucggcucccgccccuggguccgcggccucuccucccgcaucuccaucuacuggaccaucgucaagcccggcgacauccuccucaucaacuccaccggcaaccucaucgccccccgcggcuacuucaagauccgcaccggcaaguccuccaucaugcgcuccgacgcccccaucggcaccugcuccuccgagugcaucacccccaacggcuccauccccaacgacaagcccuuccagaacgucaaccgcaucaccuacggcgccugcccccgcuacgucaagcagaacacccucaagcucgccaccggcaugcgcaacguccccgagaagcagacccgcggcaucuucggcgccaucgccggcuucaucgagaacggcugggagggcauggucgacggcugguacggcuuccgccaccagaacuccgagggcaccggccaggccgccgaccucaaguccacccaggccgccaucgaccagaucaacggcaagcucaaccgccucaucgacaagaccaacgagaaguuccaccagaucgagaaggaguucuccgaggucgagggccgcauccaggaccucgagaaguacgucgaggacaccaagaucgaccucugguccuacaacgccgagcuccucgucgcccucgagaaccagcacaccaucgaccucaccgacuccgagaugaacaagcucuucgagaagacccgcaagcagcuccgcgagaacgccgaggacaugggcaacggcugcuucaagaucuaccacaagugcgacaacgccugcaucggcuccauccgcaacggcaccuacgaccacgacgucuaccgcgacgaggcccucaacaaccgcuuccagaucaagggcgucgagcucaaguccggcuacaaggacuggauccucuggaucuccuucgccaucuccugcuuccuccucugcgucguccuccucggcuucaucaugugggccugccagaagggcaacauccgcugcaacaucugcaucuga

SEQ ID NO: 104612 - RNA, 1701 nt, Artificial Sequence
  derived and/or modified CDS sequence (opt2) from hemagglutinin__InfluenzaA__AFG99358
augaagaccaucaucgcccucucccacauccucugccucgucuucgcccagaagcuccccggcaacgacaacuccaccgccacccucugccucggccaccacgccguccccaacggcacccucgucaagaccaucaccaacgaccagaucgaggucaccaacgccaccgagcucguccaguccuccuccaccggccgcaucugcgacuccccccaccgcauccucgacggcaagaacugcacccucaucgacgcccuccucggcgacccccacugcgacggcuuccagaacaaggagugggaccucuucgucgagcgcuccaaggccuacuccaacugcuaccccuacgacguccccgacuacgccucccuccgcucccucgucgccuccuccggcacccucgaguucaucaacgaggacuucaacuggaccggcgucgcccaggacggcggcuccuacgccugcaagcgcggcuccgucaacuccuucuucucccgccucaacuggcuccacaagcucgaguacaaguaccccgcccucaacgucaccaugcccaacaacggcaaguucgacaagcucuacaucuggggcguccaccaccccuccaccgacuccgaccagaccucccucuacguccgcgccuccggccgcgucaccgucuccaccaagcgcucccagcagaccgucacccccaacaucggcucccgccccuggguccgcggccucuccucccgcaucuccaucuacuggaccaucgucaagcccggcgacauccuccucaucaacuccaucggcaaccucaucgccccccgcggcuacuucaagauccgcaacggcaaguccuccaucaugcgcuccgacguccccaucggcaacugcuccuccgagugcaucacccccaacggcuccauccccaacgacaagcccuuccagaacgucaaccgcaucaccuacggcgccugcccccgcuacgucaagcagaacacccucaagcucgccaccggcaugcgcaacguccccgagaagcagacccgcggcaucuucggcgccaucgccggcuucaucgagaacggcugggagggcauggucgacggcugguacggcuuccgccaccagaacuccgagggcaccggccaggccgccgaccucaaguccacccaggccgccaucgaccagaucaacggcaagcucaaccgccucaucgagaagaccaacgagaaguuccaccagaucgagaaggaguucuccgaggucgagggccgcauccaggaccucgagaaguacgucgaggacaccaagaucgaccucugguccuacaacgccgagcuccucgucgcccucgagaaccagcacaccaucgaccucaccgacuccgagaugaacaagcucuucgagaagacccgcaagcagcuccgcgagaacgccgaggacaugggcaacggcugcuucaagaucuaccacaagugcgacaacgccugcaucggcuccauccgcaacggcaccuacgaccacgacgucuaccgcgacgaggcccucaacaaccgcuuccagaucaagggcgucgagcucaaguccggcuacaaggacuggauccucuggaucuccuucgccaucuccugcuuccuccucugcgucguccuccucggcuucaucaugugggccugccagaagggcaacauccgcugcaacaucugcaucuga

SEQ ID NO: 104613 - RNA, 1701 nt, Artificial Sequence
  derived and/or modified CDS sequence (opt2) from hemagglutinin__InfluenzaA__AFG99369
augaagaccaucaucgcccucuccuacaucuucugccucgucuucgcccagaagcuccccggcaacgacaacuccaccgccacccucugccucggccaccacgccguccccaacggcacccucgucaagaccaucaccaacgaccagaucgaggucaccaacgccaccgagcucguccaguccuccuccaccggccgcaucugcgacuccccccaccgcauccucgacggcaagaacugcacccucaucgacgcccuccucggcgacccccacugcgacggcuuccagaacaaggagugggaccucuucgucgagcgcuccaaggccuacuccaacugcuaccccuacgacguccccgacuacgccucccuccgcucccucgucgccuccuccggcacccucgaguucaucaacgaggacuucaacugggccggcgucgcccaguccggcggcuccuacgccugcaagcgcggcuccgucaacuccuucuucucccgccucaacuggcuccacgaguccgaguacaaguaccccgcccucaacgucaccaugcccaacaacggcaaguucgacaagcucuacaucuggggcguccaccaccccuccaccgaccgcgagcagaccaaccucuacguccgcgccuccggccgcgucaccgucuccaccaagcgcucccagcagaccgucauccccaacaucggcucccgccccuggguccgcggccucuccucccgcaucuccaucuacuggaccaucgucaagcccggcgacauccuccucaucaacuccaccggcaaccucaucgccccccgcggcuacuucaagauccgcaccggcaaguccuccaucaugcgcuccgacgcccccaucggcaccugcuccuccgagugcaucacccccaacggcuccauccccaacgacaagcccuuccagaacgucaaccgcaucaccuacggcgccugcccccgcuacgucaagcagaacacccucaagcucgccaccggcaugcgcaacguccccgagaagcagacccgcggcaucuucggcgccaucgccggcuucaucgagaacggcugggagggcauggucgacggcugguacggcuuccgccaccagaacuccgagggcaccggccaggccgccgaccucaaguccacccaggccgccaucgaccagaucaacggcaagcucaaccgccucaucgagaagaccaacgagaaguuccaccagaucgagaaggaguucuccgaggucgagggccgcauccaggaccucgagaaguacgucgaggacaccaagaucgaccucugguccuacaacgccgagcuccucgucgcccucgagaaccagcacaccaucgaccucaccgacuccgagaugaacaagcucuucgagaagacccgcaagcagcuccgcgagaacgccgaggacaugggcaacggcugcuucaagaucuaccacaagugcgacaacgccugcaucggcuccauccgcaacggcaccuacgaccacgacgucuaccgcgacgaggcccucaacaaccgcuuccagaucaagggcgucgagcucaaguccggcuacaaggacuggauccucuggaucuccuucgccaccuccugcuuccuccucugcgucguccuccucggcuucaucaugugggccugccagaagggcaacauccgcugcaacaucugcaucuga

SEQ ID NO: 104614 - RNA, 1701 nt, Artificial Sequence
  derived and/or modified CDS sequence (opt2) from hemagglutinin__InfluenzaA__AFG99380
augaagaccaucaucgcccucuccuacaucuucugccucgucuucgcccagaagcuccccggcaacgacaacuccaccgccacccucugccucggccaccacgccguccccaacggcacccucgucaagaccaucaccaacgaccagaucgaggucaccaacgccaccgagcucguccaguccuccuccaccggccgcaucugcgacuccccccaccgcauccucgacggcaagaacugcacccucaucgacgcccuccucggcgacccccacugcgacggcuuccagaacaaggagugggaccucuucgucgagcgcuccaaggccuacuccaacugcuaccccuacgacguccccgacuacgccucccuccgcucccucgucgccuccuccggcacccucgaguucaucaacgaggacuucaacuggaccggcgucgcccaguccggcggcuccuacgccugcaagcgcggcuccgucaacuccuucuucucccgccucaacuggcuccacgaguccgaguacaaguaccccgcccucaacgucaccaugcccaacaacggcaaguucgacaagcucuacaucuggggcguccaccaccccuccaccgaccgcgagcagaccaaccucuacguccgcgccuccggccgcgucaccgucuccaccaagcgcucccagcagaccgucauccccaacaucggcucccgccccuggguccgcggccucuccucccgcaucuccaucuacuggaccaucgucaagcccggcgacauccuccucaucaacuccaccggcaaccucaucgccccccgcggcuacuucaagauccgcaccggcaaguccuccaucaugcgcuccgacgcccccaucggcaccugcuccuccgagugcaucacccccaacggcuccauccccaacgacaagcccuuccagaacgucaaccgcaucaccuacggcgccugcccccgcuacgucaagcagaacacccucaagcucgccaccggcaugcgcaacguccccgagaagcagacccgcggcaucuucggcgccaucgccggcuucaucgagaacggcugggagggcauggucgacggcugguacggcuuccgccaccagaacuccgagggcaccggccaggccgccgaccucaaguccacccaggccgccaucgaccagaucaacggcaagcucaaccgccucaucgagaagaccaacgagaaguuccaccagaucgagaaggaguucuccgaggucgagggccgcauccaggaccucgagaaguacgucgaggacaccaagaucgaccucugguccuacaacgccgagcuccucgucgcccucgagaaccagcacaccaucgaccucaccgacuccgagaugaacaagcucuucgagaagacccgcaagcagcuccgcgagaacgccgaggacaugggcaacggcugcuucaagaucuaccacaagugcgacaacgccugcaucggcuccauccgcaacggcaccuacgaccacgacgucuaccgcgacgaggcccucaacaaccgcuuccagaucaagggcgucgagcucaaguccggcuacaaggacuggauccucuggaucuccuucgccaucuccugcuuccuccucugcgucguccuccucggcuucaucaugugggccugccagaagggcaacauccgcugcaacaucugcaucuga

SEQ ID NO: 104615 - RNA, 1701 nt, Artificial Sequence; identical to SEQ ID NO: 104614
  derived and/or modified CDS sequence (opt2) from hemagglutinin__InfluenzaA__AFG99391

SEQ ID NO: 104616 - RNA, 1701 nt, Artificial Sequence
  derived and/or modified CDS sequence (opt2) from hemagglutinin__InfluenzaA__AFG99402
augaagaccaucaucgcccucuccuacaucuucugccucgucuucgcccagaagcuccccggcaacgacaacuccaccgccacccucugccucggccaccacgccguccccaacggcacccucgucaagaccaucaccaacgaccagaucgaggucaccaacgccaccgagcucguccaguccuccuccaccggccgcaucugcgacuccccccaccgcauccucgacggcaagaacugcacccucaucgacgcccuccucggcgacccccacugcgacggcuuccagaacgagaagugggaccucuucgucgagcgcuccaaggccuacuccaacugcuaccccuacgacguccccgacuacgccucccuccgcucccucgucgccuccuccggcacccucgaguucaucaacgaggacuucaacuggaccggcgucacccaguccggcggcuccuacgccugcaagcgcggcuccgucaacuccuucuucucccgccucaacuggcuccacaaguccgaguacaaguaccccgcccucaacgucaccaugcccaacaacggcaaguucgacaagcucuacaucuggggcguccaccaccccgucaccgaccgcgagcagaccaaccucuacguccgcgccuccggccgcgucaccgucuccaccaagcgcucccagcagaccgucauccccaacaucggcucccgccccuggguccgcggccucuccucccgcaucuccaucuacuggaccaucgucaagcccggcgacauccuccucaucaacuccaccggcaaccucaucgccccccgcggcuacuucaagauccgcaccggcaaguccuccaucaugcgcuccgacgcccccaucggcaccugcuccuccgagugcaucacccccaacggcuccauccccaacgacaagcccuuccagaacgucaacaagaucaccuacggcgccugcccccgcuacgucaagcagaacacccucaagcucgccaccggcaugcgcaacguccccgagaagcagacccgcggcaucuucggcgccaucgccggcuucaucgagaacggcugggagggcauggucgacggcugguacggcuuccgccaccagaacuccgagggcaccggccaggccgccgaccucaaguccacccaggccgccaucgaccagaucaacggcaagcucaaccgccucaucgagaagaccaacgagaaguuccaccagaucgagaaggaguucuccgaggucgagggccgcauccaggaccucgagaaguacgucgaggacaccaagaucgaccucugguccuacaacgccgagcuccucgucgcccucgagaaccagcacaccaucgaccucaccgacuccgagaugaacaagcucuucgagaagacccgcaagcagcuccgcgagaacgccgaggacaugggcaacggcugcuucaagaucuaccacaagugcgacaacgccugcaucggcuccauccgcaacggcaccuacgaccacgacgucuaccgcgacgaggcccucaacaaccgcuuccagaucaagggcgucgagcucaaguccggcuacaaggacuggauccucuggaucuccuucgccaucuccugcuuccuccucugcgucguccuccucggcuucaucaugugggccugccagaagggcaacauccgcugcaacaucugcaucuga

SEQ ID NO: 104617 - RNA, 1701 nt, Artificial Sequence
  derived and/or modified CDS sequence (opt2) from hemagglutinin__InfluenzaA__AFG99413
augaagaccaucaucgcccucuccuacaucuucugccucgucuucgcccagaagcuccccggcaacgacaacuccaccgccacccucugccucggccaccacgccguccccaacggcacccucgucaagaccaucaccaacgaccagaucgaggucaccaacgccaccgagcucguccaguccuccuccaccggccgcaucugcgacuccccccaccgcauccucgacggcaagaacugcacccucaucgacgcccuccucggcgacccccacugcgacggcuuccagaacaaggagugggaccucuucgucgagcgcuccaaggccuacuccaacugcuaccccuacgacguccccgacuacgccucccuccgcucccucgucgccuccuccggcacccucgaguucaucaacgaggacuucaacuggaccggcgucgcccaguccggcggcuccuacgccugcaagcgcggcuccgucaacuccuucuucucccgccucaacuggcuccacgaguccgaguacaaguaccccgcccucaacgucaccaugcccaacaacggcaaguucgacaagcucuacaucuggggcguccaccaccccuccaccgaccgcgagcagaccaaccucuacguccgcgccuccggccgcgucaccgucuccaccaagcgcucccagcagaccgucauccccaacaucggcucccgccccuggguccgcggccucuccucccgcaucuccaucuacuggaccaucgucaagcccggcgacauccuccucaucaacuccaccggcaaccucaucgccccccgcggcuacuucaagauccgcaccggcaaguccuccaucaugcgcuccgacgcccccaucggcaccugcuccuccgagugcaucacccccaacggcuccauccccaacgacaagcccuuccagaacgucaaccgcaucaccuacggcgccugcccccgcuacgucaagcagaacacccucaagcucgccaccggcaugcgcaacguccccgagaagcagacccgcggcaucuucggcgccaucgccggcuucaucgagaacggcugggagggcauggucgacggcugguacggcuuccgccaccagaacuccgagggcaccggccaggccgccgaccucaaguccacccaggccgccaucgaccagaucaacggcaagcucaaccgccucaucgagaagaccaacgagaaguuccaccagaucgagaaggaguucuccgaggucgagggccgcauccaggaccucgagaaguacgucgaggacaccaagaucgaccucugguccuacaacgccgagcuccucgucgcccucgagaaccagcacaccaucgaccucaccgacuccgagaugaacaagcucuucgagaagacccgccgccagcuccgcgagaacgccgaggacaugggcaacggcugcuucaagaucuaccacaagugcgacaacgccugcaucggcuccauccgcaacggcaccuacgaccacgacgucuaccgcgacgaggcccucaacaaccgcuuccagaucaagggcgucgagcucaaguccggcuacaaggacuggauccucuggaucuccuucgccaucuccugcuuccuccucugcgucguccuccucggcuucaucaugugggccugccagaagggcaacauccgcugcaacaucugcaucuga

SEQ ID NO: 104618 - RNA, 1701 nt, Artificial Sequence
  derived and/or modified CDS sequence (opt2) from hemagglutinin__InfluenzaA__AFG99424
augaagaccaucaucgcccucuccuacaucuucugccucgucuucgcccagaagcuccccggcaacgacaacuccaccgccacccucugccucggccaccacgccguccccaacggcacccucgucaagaccaucaccaacgaccagaucgaggucaccaacgccaccgagcucguccaguccuccuccaccggccgcaucugcgacuccccccaccgcauccucgacggcaagaacugcacccucaucgacgcccuccucggcgacccccacugcgacggcuuccagaacaaggagugggaccucuucgucgagcgcuccaaggccuacuccaacugcuaccccuacgacguccccgacuacgccucccuccgcucccucgucgccuccuccggcacccucgaguucaucaacgaggacuucaacuggaccggcgucgcccaguccggcggcuccuacgccugcaagcgcggcuccgucaacuccuucuucucccgccucaacuggcuccacaaguccgaguacaaguaccccgcccucaacgucaccaugcccaacaacggcaaguucgacaagcucuacaucuggggcguccaccaccccuccaccgaccgcgagcagaccaaccucuacguccgcgccuccggccgcgucaccgucuccaccaagcgcucccagcagaccgucauccccaacaucggcucccgccccuggguccgcggccucuccucccgcaucuccaucuacuggaccaucgucaagcccggcgacauccuccucaucaacuccaccggcaaccucaucgccccccgcggcuacuucaagauccgcaccggcaaguccuccaucaugcgcuccgacgcccccaucggcaccugcuccuccgagugcaucacccccaacggcuccauccccaacgacaagcccuuccagaacgucaaccgcaucaccuacggcgccugcccccgcuacgucaagcagaacacccucaagcucgccaccggcaugcgcaacguccccgagaagcagacccgcggcaucuucggcgccaucgccggcuucaucgagaacggcugggagggcauggucgacggcugguacggcuuccgccaccagaacuccgagggcaccggccaggccgccgaccucaaguccacccaggccgccaucgaccagaucaacggcaagcucaaccgccucaucgagaagaccaacgagaaguuccaccagaucgagaaggaguucuccgaggucgagggccgcauccaggaccucgagaaguacgucgaggacaccaagaucgaccucugguccuacaacgccgagcuccucgucgcccucgagaaccagcacaccaucgaccucaccgacuccgagaugaacaagcucuucgagaagacccgccgccagcuccgcgagaacgccgaggacaugggcaacggcugcuucaagaucuaccacaagugcgacaacgccugcaucggcuccauccgcaacggcaccuacgaccacgacgucuaccgcgacgaggcccucaacaaccgcuuccagaucaagggcgucgagcucaaguccggcuacaaggacuggauccucuggaucuccuucgccaucuccugcuuccuccucugcgucguccuccucggcuucaucaugugggccugccagaagggcaacauccgcugcaacaucugcaucuga

SEQ ID NO: 104619 - RNA, 1701 nt, Artificial Sequence
  derived and/or modified CDS sequence (opt2) from hemagglutinin__InfluenzaA__AFG99435
augaagaccaucaucgcccucuccuacaucuucugccucgucuucgcccagaagcuccccggcaacgacaacuccaccgccacccucugccucggccaccacgccguccccaacggcacccucgucaagaccaucaccaacgaccagaucgaggucaccaacgccaccgagcucguccagaacuccuccaccggccgcaucugcgacuccccccaccgcauccucgacggcaagaacugcacccucaucgacgcccuccucggcgacccccacugcgacggccuccagaacaaggagugggaccucuucgucgagcgcuccaaggccuacuccaacugcuaccccuacgacguccccgacuacgccucccuccgcucccucgucgccuccuccggcacccucgaguucaccaaggaggacuucaacuggaccggcgucgcccaguccggcggcuccuacgccugcaagcgcggcuccgucaacuccuucuucucccgccucaacuggcuccacgaguccgaguacaaguaccccgcccucaacgucaccaugcccaacaacggcaaguucgacaagcucuacaucuggggcguccaccaccccuccaccgaccgcgagcagaccaaccucuacguccgcgccuccggccgcgucaccgucuccaccaagcgcucccagcagaccgucauccccaacaucggcucccgccccuggguccgcggccucuccucccgcaucuccaucuacuggaccaucgucaagcccggcgacauccuccucaucaacuccaccggcaaccucaucgccccccgcggcuacuucaagauccgcaccggcaaguccuccaucaugcgcuccgacgcccccaucggcaccugcuccuccgagugcaucacccccaacggcuccauccccaacgacaagcccuuccagaacgucaaccgcaucaccuacggcgccugcccccgcuacgucaagcagaacacccucaagcucgccaccggcaugcgcaacguccccgagaagcagacccgcggcaucuucggcgccaucgccggcuucaucgagaacggcugggagggcauggucgacggcugguacggcuuccgccaccagaacuccgagggcaccggccaggccgccgaccucaaguccacccaggccgccaucgaccagaucaacggcaagcucaaccgccucaucgagaagaccaacgagaaguuccaccagaucgagaaggaguucuccgaggucgagggccgcauccaggaccucgagaaguacgucgaggacaccaagaucgaccucugguccuacaacgccgagcuccucgucgcccucgagaaccagcacaccaucgaccucaccgacuccgagaugaacaagcucuucgagaagacccgcaagcagcuccgcgagaacgccgaggacaugggcaacggcugcuucaagaucuaccacaagugcgacaacgccugcaucggcuccauccgcaacggcaccuacgaccacgacgucuaccgcgacgaggcccucaacaaccgcuuccagaucaagggcgucgagcucaaguccggcuacaaggacuggauccucuggaucuccuucgccaucuccugcuuccuccucugcgucguccuccucggcuucaucaugugggccugccagaagggcaacauccgcugcaacaucugcaucuga

SEQ ID NO: 104620 - RNA, 1701 nt, Artificial Sequence; identical to SEQ ID NO: 104619
  derived and/or modified CDS sequence (opt2) from hemagglutinin__InfluenzaA__AFG99446

SEQ ID NO: 104621 - RNA, 1701 nt, Artificial Sequence
  derived and/or modified CDS sequence (opt2) from hemagglutinin__InfluenzaA__AFG99457
augaagaccaucaucgcccucuccuacauccucugccucgucuucgcccagaagcuccccggcaacgacaacuccaccgccacccucugccucggccaccacgccguccccaacggcacccucgucaagaccaucaccaacgaccagaucgaggucaccaacgccaccgagcucguccaguccuccuccaccggccgcaucugcgacuccccccaccgcauccucgacggcgagaacugcacccucaucgacgcccuccucggcgacccccacugcgacggcuuccagaacaaggagugggaccucuucgucgagcgcuccaaggccuacuccaacugcuaccccuacgacguccccgacuacgccucccuccgcucccucgucgccuccuccggcacccucgaguucaucaacgaggacuucaacuggaccggcgucgcccaguccggcggcuccuacgccugcaagcgcggcuccgucaacuccuucuucucccgccucaacuggcuccacaaguccgaguacaaguaccccgcccucaacgucaccaugcccaacaacggcaaguucgacaagcucuacaucuggggcguccaccaccccuccaccgaccgcgaccagaccucccucuacguccgcgccuccggccgcgucaccgucuccaccaagcgcucccagcagaccgucauccccaacaucggcucccgccccuggguccgcggccaguccucccgcaucuccaucuacuggaccaucgucaagcccggcgacauccuccucaucaacuccaccggcaaccucaucgccccccgcggcuacuucaagauccgcaacggcaaguccuccaucaugcgcuccgacgcccccaucggcaccugcuccuccgagugcaucacccccaacggcuccauccccaacgacaagcccuuccagaacgucaaccgcaucaccuacggcgccugcccccgcuacgucaagcagaacacccucaagcucgccaccggcaugcgcaacguccccgagaagcagacccgcggcaucuucggcgccaucgccggcuucaucgagaacggcugggagggcauggucgacggcugguacggcuuccgccaccagaacuccgagggcaccggccaggccgccgaccucaaguccacccaggccgccaucgaccagaucaacggcaagcucaaccgccucaucgagaagaccaacgagaaguuccaccagaucgagaaggaguucuccgaggucgagggccgcauccaggaccucgagaaguacgucgaggacaccaagaucgaccucugguccuacaacgccgagcuccucgucgcccucgagaaccagcacaccaucgaccucaccgacuccgagaugaacaagcucuucgagaagacccgcaagcagcuccgcgagaacgccgaggacaugggcaacggcugcuucaagaucuaccacaagugcgacaacgccugcaucggcuccauccgcaacggcaccuacgaccacgacgucuaccgcgacgaggcccucaacaaccgcuuccagaucaagggcgucgagcucaaguccggcuacaaggacuggauccucuggaucuccuucgccaucuccugcuuccuccucugcgucguccuccucggcuucaucaugugggccugccagaagggcaacauccgcugcaacaucugcaucuga

SEQ ID NO: 104622 - RNA, 1701 nt, Artificial Sequence
  derived and/or modified CDS sequence (opt2) from hemagglutinin__InfluenzaA__AFG99468
augaagaccaucaucgcccucuccuacaucuucugccucgucuucgcccagaagcuccccggcaacgacaacuccaccgccacccucugccucggccaccacgccguccccaacggcacccucgucaagaccaucaccaacgaccagaucgaggucaccaacgccaccgagcucguccaguccuccuccaccggccgcaucugcgacuccccccaccgcauccucgacggcaagaacugcacccucaucgacgcccuccucggcgacccccacugcgacggcuuccagaacaaggagugggaccucuucgucgagcgcuccaaggccuacuccaacugcuaccccuacgacguccccgacuacgccucccuccgcucccucgucgccuccuccggcacccucgaguucaucaacgaggacuucaacuggaccggcgucgcccaguccggcggcuccuacgccugcaagcgcggcuccgucaacuccuucuucucccgccucaacuggcuccacgaguccgaguacaaguaccccgcccucaacgucaccaugcccaacaacggcaaguucgacaagcucuacaucuggggcguccaccaccccuccaccgaccgcgagcagaccaaccucuacguccgcgccuccggccgcgucaccgucuccaccaagcgcucccagcagaccgucauccccaacaucggcucccgccccuggguccgcggccucuccucccgcaucuccaucuacuggaccaucgucaagcccggcgacauccuccucaucaacuccaccggcaaccucaucgccccccgcggcuacuucaagauccgcaccggcaaguccuccaucaugcgcuccgacgcccccaucggcaccugcuccuccgagugcaucacccccaacggcuccauccccaacgacaagcccuuccagaacgucaaccgcaucaccuacggcgccugcccccgcuacgucaagcagaacacccucaagcucgccaccggcaugcgcaacguccccgagaagcagacccgcggcaucuucggcgccaucgccggcuucaucgagaacggcugggagggcauggucgacggcugguacggcuuccgccaccagaacuccgagggcaccggccaggccgccgaccucaaguccacccaggccgccaucgaccagaucaacggcaagcucaaccgccucaucgagaagaccaacgagaaguuccaccagaucgagaaggaguucuccgaggucgagggccgcauccaggaccucgagaaguacgucgaggacaccaagaucgaccucugguccuacaacgccgagcuccucgucgcccucgagaaccagcacaccaucgaccucaccgacuccgagauggacaagcucuucgagaagacccgcaagcagcuccgcgagaacgccgaggacaugggcaacggcugcuucaagaucuaccacaagugcgacaacgccugcaucggcuccauccgcaacggcaccuacgaccacgacgucuaccgcgacgaggcccucaacaaccgcuuccagaucaagggcgucgagcucaaguccggcuacaaggacuggauccucuggaucuccuucgccaucuccugcuuccuccucugcgucguccuccucggcuucaucaugugggccugccagaagggcaacauccgcugcaacaucugcaucuga

SEQ ID NO: 104623 - RNA, 1701 nt, Artificial Sequence
  derived and/or modified CDS sequence (opt2) from hemagglutinin__InfluenzaA__AFG99490
augaagaccaucaucgcccucuccuacauccucugccucgucuucgcccagaagcuccccggcaacgacaacuccaccgccacccucugccucggccaccacgccguccccaacggcacccucgucaagaccaucaccaacgaccagaucgaggucaccaacgccaccgagcucguccaguccuccuccaccggccgcaucugcgacuccccccaccgcauccucgacggcaagaacugcacccucaucgacgcccuccucggcgacccccacugcgacggcuuccagaacaaggagugggaccucuucaucgagcgcuccaaggccuacuccaacugcuaccccuacgacguccccgacuacgccucccuccgcucccucgucgccuccuccggcacccucgaguucaucaacgaggacuucaacuggaccggcgucgcccaguccggcgaguccuacgccugcaagcgcggcuccgucaaguccuucuucucccgccucaacuggcuccacgaguccgaguacaaguaccccgcccucaacgucaccaugcccaacaacggcaaguucgacaagcucuacaucuggggcguccaccaccccuccaccgaccgcgagcagaccucccucuacguccgcgccuccggccgcgucaccgucuccaccaagcgcucccagcagaccgucauccccaacaucggcucccgccccuggguccgcggccucuccucccgcaucuccaucuacuggaccaucgucaagcccggcgacauccuccucaucaacuccaccggcaaccucaucgccccccgcggcuacuucaagauccgcaccggcaaguccuccaucaugcgcuccgacgcccccaucggcaccugcuccuccgagugcaucacccccaacggcuccauccccaacgacaagcccuuccagaacgucaaccgcaucaccuacggcgccugcccccgcuacgucaagcagaacacccucaagcucgccaccggcaugcgcaacguccccgagaagcagacccgcggcaucuucggcgccaucgccggcuucaucgagaacggcugggagggcauggucgacggcugguacggcuuccgccaccagaacuccgagggcaccggccaggccgccgaccucaaguccacccaggccgccaucgaccagaucaacggcaagcucaaccgccucaucgagaagaccaacgagaaguuccaccagaucgagaaggaguucuccgaggucgagggccgcauccaggaccucgagaaguacgucgaggacaccaagaucgaccucugguccuacaacgccgagcuccucgucgcccucgagaaccagcacaccaucgaccucaccgacuccgagaugaacaagcucuucgagaagacccgcaagcagcuccgcgagaacgccgaggacaugggcaacggcugcuucaagaucuaccacaagugcgacaacgccugcaucggcuccauccgcaacggcaccuacgaccacgacgucuaccgcgacgaggcccucaacaaccgcuuccagaucaagggcgucgagcucaaguccggcuacaaggacuggauccucuggaucuccuucgccaucuccugcuuccuccucugcgucguccuccucggcuucaucaugugggccugccagaagggcaacauccgcugcaacaucugcaucuga

SEQ ID NO: 104624 - RNA, 1701 nt, Artificial Sequence
  derived and/or modified CDS sequence (opt2) from hemagglutinin__InfluenzaA__AFG99501
augaagaccaucaucgcccucuccuacaucuucugccucgucgucgcccagaagcuccccggcaacgacaacuccaccgccacccucugccucggccaccacgccguccccaacggcacccucgucaagaccaucaccaacgaccagaucgaggucaccaacgccaccgagcucguccaguccuccuccaccggccgcaucugcgacuccccccaccgcauccucgacggcaagaacugcacccucaucgacgcccuccucggcgacccccacugcgacggcuuccagaacaaggagugggaccucuucgucgagcgcuccaaggccuacuccaacugcuaccccuacgacguccccgacuacgccucccuccgcucccucgucgccuccuccggcacccucgaguucaucaacgaggacuucaacuggaccggcgucgcccaguccggcggcuccuacaccugcaagcgcggcuccgucaacuccuucuucucccgccucaacuggcuccacgaguccgaguacaaguaccccgcccucaacgucaccaugcccaacaacggcaaguucgacaagcucuacaucuggggcguccaccaccccuccaccgaccgcgagcagaccaaccucuacguccgcgccuccggccgcgucaccgucuccaccaagcgcucccagcagaccgucauccccaacaucggcucccgccccuggguccgcggccucuccucccgcaucuccaucuacuggaccaucgucaagcccggcgacauccuccucaucaacuccaccggcaaccucaucgccccccgcggcuacuucaagauccgcaccggcaaguccuccaucaugcgcuccgacgcccccaucggcaccugcuccuccgagugcaucacccccaacggcuccaucuccaacgacaagcccuuccagaacgucaaccgcaucaccuacggcgccugcccccgcuacgucaagcagaacacccucaagcucgccaccggcaugcgcaacguccccgagaagcagacccgcggcaucuucggcgccaucgccggcuucaucgagaacggcugggagggcauggucgacggcugguacggcuuccgccaccagaacuccgagggcaccggccaggccgccgaccucaaguccacccaggccgccaucgaccagaucaacggcaagcucaaccgccucaucgagaagaccaacgagaaguuccaccagaucgagaaggaguucuccgaggucgagggccgcauccaggaccucgagaaguacgucgaggacaccaagaucgaccucugguccuacaacgccgagcuccucgucgcccucgagaaccagcacaccaucgaccucaccgacuccgagaugaacaagcucuucgagaagacccgcaagcagcuccgcgagaacgccgaggacaugggcaacggcugcuucaagaucuaccacaagugcgacaacgccugcaucggcuccauccgcaacggcaccuacgaccacgacgucuaccgcgacgaggcccucaacaaccgcuuccagaucaagggcgucgagcucaaguccggcuacaaggacuggauccucuggaucuccuucgccaucuccugcuuccuccucugcgucguccuccucggcuucaucaugugggccugccagaagggcaacauccgcugcaacaucugcaucuga

SEQ ID NO: 104625 - RNA, 1701 nt, Artificial Sequence
  derived and/or modified CDS sequence (opt2) from hemagglutinin__InfluenzaA__AFG99512
augaagaccaucaucgcccucuccuacauccucugccucgucuucgcccagaagcuccccggcaacgacaacuccaccgccacccucugccucggccaccacgccguccccaacggcacccucgucaagaccaucaccaacgaccagaucgaggucaccaacgccaccgagcucguccaguccuccuccaccggccgcaucugcgacuccccccaccgcauccucgacggcaagaacugcacccucaucgacgcccuccucggcgacccccacugcgacggcuuccagaacaaggagugggaccucuucgucgagcgcuccaaggccuacuccaacugcuaccccuacgacguccccgacuacgccucccuccgcucccucgucgccuccuccggcacccucgaguucaucaacgaggacuucaacuggaccggcgucgcccaguccggcgacuccuacgccugcaagcgcggcuccgucaaguccuucuucucccgccucaacuggcuccacgaguccgaguacaaguaccccgcccucaacgucaccaugcccaacaacgacaaguucgacaagcucuacaucuggggcguccaccaccccuccaccgaccgcgagcagaccucccucuacauccgcgccuccggccgcgucaccgucuccaccaagcgcucccagcagaccgucauccccaacaucggcucccgccccuggguccgcggccucuccucccgcaucuccaucuacuggaccaucgucaagcccggcgacauccuccucaucaacuccaccggcaaccucaucgccccccgcggcuacuucaagauccgcaccggcaaguccuccaucaugcgcuccgacgcccccaucggcaccugcuccuccgagugcaucacccccaacggcuccauccccaacgacaagcccuuccagaacgucaaccgcaucaccuacggcgccugcccccgcuacgucaagcagaacacccucaagcucgccaccggcaugcgcaacguccccgagaagcagacccgcggcaucuucggcgccaucgccggcuucaucgagaacggcugggagggcauggucgacggcugguacggcuuccgccaccagaacuccgagggcaccggccaggccgccgaccucaaguccacccaggccgccaucgaccagaucaacggcaagcucaaccgccucaucgagaagaccaacgagaaguuccaccagaucgagaaggaguucuccgaggucgagggccgcauccaggaccucgagaaguacgucgaggacaccaagaucgaccucugguccuacaacgccgagcuccucgucgcccucgagaaccagcacaccaucgaccucaccgacuccgagaugaacaagcucuucgagaagacccgcaagcagcuccgcgagaacgccgaggacaugggcaacggcugcuucaagaucuaccacaagugcgacaacgccugcaucggcuccauccgcaacggcaccuacgaccacgacgucuaccgcgacgaggcccucaacaaccgcuuccagaucaagggcgucgagcucaaguccggcuacaaggacuggauccucuggaucuccuucgccaucuccugcuuccuccucugcgucguccuccucggcuucaucaugugggccugccagaagggcaacauccgcugcaacaucugcaucuga

SEQ ID NO: 104626 - RNA, 1701 nt, Artificial Sequence
  derived and/or modified CDS sequence (opt2) from hemagglutinin__InfluenzaA__AFG99523
augaagaccaucaucgcccucuccuacaucuucugccucgucuucgcccagaagcuccccggcaacgacaacuccaccgccacccucugccucggccaccacgccguccccaacggcacccucgucaagaccaucaccaacgaccagaucgaggucaccaacgccaccgagcucguccaguccuccuccaccggccgcaucugcgacuccccccaccgcauccucgacggcaagaacugcacccucaucgacgcccuccucggcgacccccacugcgacggcuuccagaacaaggagugggaccucuucgucgagcgcuccaaggccuacuccaacugcuaccccuacgacguccccgacuacgccucccuccgcucccucgucgccuccuccggcacccucgaguucaucaacgaggacuucaacuggaccggcgucgcccaguccggcggcuccuacgccugcaagcgcggcuccgucaacuccuucuucucccgccucaacuggcuccacgagucccaguacaaguaccccgcccucaacgucaccaugcccaacaacggcaaguucgacaagcucuacaucuggggcguccaccaccccuccaccgaccgcgagcagaccaaccucuacguccgcgccuccggccgcgucaccgucuccaccaagcgcucccagcagaccgucauccccaacaucggcucccgccccuggguccgcggccucuccucccgcaucuccaucuacuggaccaucgucaagcccggcgacauccuccucaucaacuccaccggcaaccucaucgccccccgcggcuacuucaagauccgcaccggcaaguccuccaucaugcgcuccgacgcccccaucggcaccugcuccuccgagugcaucacccccaacggcuccauccccaacgacaagcccuuccagaacgucaaccgcaucaccuacggcgccugcccccgcuacgucaagcagaacacccucaagcucgccaccggcaugcgcaacguccccgagaagcagacccgcggcaucuucggcgccaucgccggcuucaucgagaacggcugggagggcauggucgacggcugguacggcuuccgccaccagaacuccgagggcaccggccaggccgccgaccucaaguccacccaggccgccaucgaccagaucaacggcaagcucaaccgccucaucgagaagaccaacgagaaguuccaccagaucgagaaggaguucuccgaggucgagggccgcauccaggaccucgagaaguacgucgaggacaccaagaucgaccucugguccuacaacgccgagcuccucgucgcccucgagaaccagcacaccaucgaccucaccgacuccgagaugaacaagcucuucgagaagacccgcaagcagcuccgcgagaacgccgaggacaugggcaacggcugcuucaagaucuaccacaagugcgacaacgccugcaucggcuccauccgcaacggcaccuacgaccacgacgucuaccgcgacgaggcccucaacaaccgcuuccagaucaagggcgucgagcucaaguccggcuacaaggacuggauccucuggaucuccuucgccaucuccugcuuccuccucugcgucguccuccucggcuucaucaugugggccugccagaagggcaacauccgcugcaacaucugcaucuga

SEQ ID NO: 104627 - RNA, 1701 nt, Artificial Sequence; identical to SEQ ID NO: 104523
  derived and/or modified CDS sequence (opt2) from hemagglutinin__InfluenzaA__AFG99534

SEQ ID NO: 104628 - RNA, 1701 nt, Artificial Sequence; identical to SEQ ID NO: 104523
  derived and/or modified CDS sequence (opt2) from hemagglutinin__InfluenzaA__AFG99545

SEQ ID NO: 104629 - RNA, 1701 nt, Artificial Sequence
  derived and/or modified CDS sequence (opt2) from hemagglutinin__InfluenzaA__AFG99556
augaagaccaucaucgcccucuccuacauccucugccucgucuucgcccagaagcuccccggcaacgacaacuccaccgccacccucugccucggccaccacgccguccccaacggcacccucgucaagaccaucaccaacgaccagaucgaggucaccaacgccaccgagcucguccaguccuccuccaccggccgcaucugcgacuccccccaccgcauccucgacggcaagaacugcacccucaucgacgcccuccucggcgacccccacugcgacggcuuccagaacaaggagugggaccucuucgucgagcgcuccaaggccuacuccaacugcuaccccuacgacguccccgacuacgccucccuccgcucccucgucgccuccuccggcacccucgaguucaccaacgaggacuucaacuggaccggcgucgcccaguccggcgaguccuacgccugcaagcgcggcuccgucaaguccuucuucucccgccucaacuggcuccacgaguccgacuacaaguaccccgcccucaacgucaccaugcccaacaacggcaaguucgacaagcucuacaucuggggcguccaccaccccuccaccgaccgcgagcagaccucccucuacguccgcgccuccggccgcgucaccgucuccaccaagcgcucccagcagaccgucauccccaacaucggcucccgccccuggguccgcggccucuccucccgcaucuccaucuacuggaccaucgucaagcccggcgacauccuccucaucaacuccaccggcaaccucaucgccccccgcggcuacuucaagauccgcaccggcaaguccuccaucaugcgcuccgacgcccccaucggcaccugcuccuccgagugcaucacccccaacggcuccauccccaacgacaagcccuuccagaacgucaaccgcaucaccuacggcgccugcccccgcuacgucaagcagaacacccucaagcucgccaccggcaugcgcaacguccccgagaagcagacccgcggcaucuucggcgccaucgccggcuucaucgagaacggcugggagggcauggucgacggcugguacggcuuccgccaccagaacuccgagggcaccggccaggccgccgaccgcaaguccacccaggccgccaucgaccagaucaacggcaagcucaaccgccucaucgagaagaccaacgagaaguuccaccagaucgagaaggaguucuccgaggucgagggccgcauccaggaccucgagaaguacgucgaggacaccaagaucgaccucugguccuacaacgccgagcuccucgucgcccucgagaaccagcacaccaucgaccucaccgacuccgagaugaacaagcucuucgagaagacccgcaagcagcuccgcgagaacgccgaggacaugggcaacggcugcuucaagaucuaccacaagugcgacaacgccugcaucggcuccauccgcaacggcaccuacgaccacgacgucuaccgcgacgaggcccucaacaaccgcuuccagaucaagggcgucgagcucaaguccggcuacaaggacuggauccucuggaucuccuucgccaucuccugcuuccuccucugcgucguccuccucggcuucaucaugugggccugccagaagggcaacauccgcugcaacaucugcaucuga

SEQ ID NO: 104630 - RNA, 1701 nt, Artificial Sequence; identical to SEQ ID NO: 104523
  derived and/or modified CDS sequence (opt2) from hemagglutinin__InfluenzaA__AFG99567

SEQ ID NO: 104631 - RNA, 1701 nt, Artificial Sequence; identical to SEQ ID NO: 104523
  derived and/or modified CDS sequence (opt2) from hemagglutinin__InfluenzaA__AFG99578

SEQ ID NO: 104632 - RNA, 1701 nt, Artificial Sequence; identical to SEQ ID NO: 104523
  derived and/or modified CDS sequence (opt2) from hemagglutinin__InfluenzaA__AFG99589

SEQ ID NO: 104633 - RNA, 1701 nt, Artificial Sequence
  derived and/or modified CDS sequence (opt2) from hemagglutinin__InfluenzaA__AFG99600
augaagaccaucaucgcccucuccuacauccucugccucgucuucgcccagaagcuccccggcaacgacaacuccaccgccacccucugccucggccaccacgccguccccaacggcacccucgucaagaccaucaccaacgaccagaucgaggucaccaacgccaccgagcucguccaguccuccuccaccggccgcaucugcgacuccccccaccgcguccucgacggcaagaacugcacccucaucgacgcccuccucggcgacccccacugcgacggcuuccagaacaaggagugggaccucuucgucgagcgcuccaaggccuacuccaacugcuaccccuacgacguccccgacuacgccucccuccgcucccucgucgccuccuccggcacccucgaguucaccaacgaggacuucaacuggaccggcgucgcccaguccggcgaguccuacgccugcaagcgcggcuccgucaaguccuucuucucccgccucaacuggcuccacgaguccgacuacaaguaccccgcccucaacgucaccaugcccaacaacggcaaguucgacaagcucuacaucuggggcguccaccaccccuccaccgaccgcgagcagaccucccucuacguccgcgccuccggccgcgucaccgucuccaccaagcgcucccagcagaccgucauccccaacaucggcucccgccccuggguccgcggccucuccucccgcaucuccaucuacuggaccaucgucaagcccggcgacauccuccucaucaacuccaccggcaaccucaucgccccccgcggcuacuucaagauccgcaucggcaaguccuccaucaugcgcuccgacgcccccaucggcaccugcuccuccgagugcaucacccccaacggcuccauccccaacgacaagcccuuccagaacgucaaccgcaucaccuacggcgccugcccccgcuacgucaagcagaacacccucaagcucgccaccggcaugcgcaacguccccgagaagcagacccgcggcaucuucggcgccaucgccggcuucaucgagaacggcugggagggcauggucgacggcugguacggcuuccgccaccagaacuccgagggcaccggccaggccgccgaccucaaguccacccaggccgccaucgaccagaucaacggcaagcucaaccgccucaucgagaagaccaacgagaaguuccaccagaucgagaaggaguucuccgaggucgagggccgcauccaggaccucgagaaguacgucgaggacaccaagaucgaccucugguccuacaacgccgagcuccucgucgcccucgagaaccagcacaccaucgaccucaccgacuccgagaugaacaagcucuucgagaagacccgcaagcagcuccgcgagaacgccgaggacaugggcaacggcugcuucaagaucuaccacaagugcgacaacgccugcaucggcuccauccgcaacggcaccuacgaccacgacgucuaccgcgacgaggcccucaacaaccgcuuccagaucaagggcgucgagcucaaguccggcuacaaggacuggauccucuggaucuccuucgccaucuccugcuuccuccucugcgucguccuccucggcuucaucaugugggccugccagaagggcaacauccgcugcaacaucugcaucuga

SEQ ID NO: 104634 - RNA, 1701 nt, Artificial Sequence; identical to SEQ ID NO: 104523
  derived and/or modified CDS sequence (opt2) from hemagglutinin__InfluenzaA__AFG99611

SEQ ID NO: 104635 - RNA, 1701 nt, Artificial Sequence; identical to SEQ ID NO: 104523
  derived and/or modified CDS sequence (opt2) from hemagglutinin__InfluenzaA__AFG99622

SEQ ID NO: 104636 - RNA, 1701 nt, Artificial Sequence; identical to SEQ ID NO: 104523
  derived and/or modified CDS sequence (opt2) from hemagglutinin__InfluenzaA__AFG99633

SEQ ID NO: 104637 - RNA, 1701 nt, Artificial Sequence
  derived and/or modified CDS sequence (opt2) from hemagglutinin__InfluenzaA__AFG99644
augaagaccaucaucgcccucuccuacauccucugccucgucuucgcccagaagcuccccggcaacgacaacuccaccgccacccucugccucggccaccacgccguccccaacggcacccucgucaagaccaucaccaacgaccagaucgaggucaccaacgccaccgagcucguccagaacuccuccaccggccgcaucugcgacuccccccaccgcauccucgacggcaagaacugcacccucaucgacgcccuccucggcgacccccacugcgacgacuuccagaacaaggagugggaccucuucgucgagcgcuccaaggccuacuccaacugcuaccccuacgacguccccgacuacgccucccuccgcucccucgucgccgccuccggcacccucgaguucaucaacgaggacuucaacuggaccggcgucgcccaguccggcgaguccuacgccugcaagcgcggcuccgucaaguccuucuucucccgccucaacuggcuccacgaguccgaguacaaguaccccgcccucaacgucaccaugcccaacaacggcaaguucgacaagcucuacaucuggggcguccaccaccccuccaccgaccgcgagcagaccucccucuacguccgcgccuccggccgcgucaccgucuccaccaagcgcucccagcagaccgucauccccaacaucggcucccgccccuggguccgcggccucuccucccgcaucuccaucuacuggaccaucgucaagcccggcgacauccuccucaucaacuccaccggcaaccucaucgccccccgcggcuacuucaagauccgcaccggcaaguccuccaucaugcgcuccgacgcccccaucggcaccugcuccuccgagugcaucacccccaacggcuccauccccaacgacaagcccuuccagaacgucaaccgcaucaccuacggcgccugcccccgcuacgucaagcagaacacccucaagcucgccaccggcaugcgcaacguccccgagaagcagacccgcggcaucuucggcgccaucgccggcuucaucgagaacggcugggagggcauggucgacggcugguacggcuuccgccaccagaacuccgagggcaccggccaggccgccgaccucaaguccacccaggccgccaucgaccagaucaacggcaagcucaaccgccucaucgagaagaccaacgagaaguuccaccagaucgagaaggaguucuccgagaucgagggccgcauccagaaccucgagaaguacgucgaggacaccaagaucgaccucugguccuacaacgccgagcuccucgucgcccucgagaaccagcacaccaucgaccucaccgacuccgagaugaacaagcucuucgagaagacccgcaagcagcuccgcgagaacgccgaggacaugggcaacggcugcuucaagaucuaccacaagugcgacaacgccugcaucggcuccauccgcaacggcaccuacgaccacgacgucuaccgcgacgaggcccucaacaaccgcuuccagaucaagggcgucgagcucaaguccggcuacaaggacuggauccucuggaucuccuucgccaucuccugcuuccuccucugcgucguccuccucggcuucaucaugugggccugccagaagggcaacauccgcugcaacaucugcaucuga

SEQ ID NO: 104638 - RNA, 1701 nt, Artificial Sequence
  derived and/or modified CDS sequence (opt2) from hemagglutinin__InfluenzaA__AFG99655
augaagaccaucaucgcccucuccuacauccucugccucgucuucgcccagaagcuccccggcaacgacaacuccaccgccacccucugccucggccaccacgccguccccaacggcacccucgucaagaccaucaccaacgaccagaucgaggucaccaacgccaccgagcucguccagaacuccuccaccggccgcaucugcgacuccccccaccgcauccucgacggcaagaacugcacccucaucgacgcccuccucggcgacccccacugcgacgacuuccagaacaaggagugggaccucuucgucgagcgcuccaaggccuacuccaacugcuaccccuacgacguccccgacuacgccucccuccgcucccucgucgccuccuccggcacccucgaguucaucaacgaggacuucaacuggaccggcgucgcccaguccggcgaguccuacgccugcaagcgcggcuccgucaaguccuucuucucccgccucaacuggcuccacgaguccgaguacaaguaccccgcccucaacgucaccaugcccaacaacggcaaguucgacaagcucuacaucuggggcguccaccaccccuccaccgaccgcgagcagaccucccucuacguccgcgccuccggccgcgucaccgucuccaccaagcgcucccagcagaccgucauccccaacaucggcucccgccccuggguccgcggccucuccucccgcaucuccaucuacuggaccaucgucaagcccggcgacauccuccucaucaacuccaccggcaaccucaucgccccccgcggcuacuucaagauccgcaccggcaaguccuccaucaugcgcuccgacgcccccaucggcaccugcuccuccgagugcaucacccccaacggcuccauccccaacgacaagcccuuccagaacgucaaccgcaucaccuacggcgccugcccccgcuacgucaagcagaacacccucaagcucgccaccggcaugcgcaacguccccgagaagcagacccgcggcaucuucggcgccaucgccggcuucaucgagaacggcugggagggcauggucgacggcugguacggcuuccgccaccagaacuccgagggcaccggccaggccgccgaccucaaguccacccaggccgccaucgaccagaucaacggcaagcucaaccgccucaucgagaagaccaacgagaaguuccaccagaucgagaaggaguucuccgagaucgagggccgcauccaggaccucgagaaguacgucgaggacaccaagaucgaccucugguccuacaacgccgagcuccucgucgcccucgagaaccagcacaccaucgaccucaccgacuccgagaugaacaagcucuucgagaagacccgcaagcagcuccgcgagaacgccgaggacaugggcaacggcugcuucaagaucuaccacaagugcgacaacgccugcaucggcuccauccgcaacggcaccuacgaccacgacgucuaccgcgacgaggcccucaacaaccgcuuccagaucaagggcgucgagcucaaguccggcuacaaggacuggauccucuggaucuccuucgccaucuccugcuuccuccucugcgucguccuccucggcuucaucaugugggccugccagaagggcaacauccgcugcaacaucugcaucuga

SEQ ID NO: 104639 - RNA, 1701 nt, Artificial Sequence; identical to SEQ ID NO: 104638
  derived and/or modified CDS sequence (opt2) from hemagglutinin__InfluenzaA__AFG99666

SEQ ID NO: 104640 - RNA, 1701 nt, Artificial Sequence; identical to SEQ ID NO: 98374
  derived and/or modified CDS sequence (opt2) from hemagglutinin__InfluenzaA__AFG99677

SEQ ID NO: 104641 - RNA, 1701 nt, Artificial Sequence; identical to SEQ ID NO: 104523
  derived and/or modified CDS sequence (opt2) from hemagglutinin__InfluenzaA__AFG99688

SEQ ID NO: 104642 - RNA, 1701 nt, Artificial Sequence
  derived and/or modified CDS sequence (opt2) from hemagglutinin__InfluenzaA__AFG99701
augaagaccaucaucgcccucuccuacauccucugccucgucuucgcccagaagcuccccggcaacgacaacuccaccgccacccucugccucggccaccacgccguccccaacggcacccucgucaagaccaucaccaacgaccagaucgaggucaccaacgccaccgagcucguccaguccuccuccaccggccgcaucugcgacuccccccaccgcauccucgacggcaagaacugcacccucaucgacgcccuccucggcgacccccacugcgacggcuuccagaacaaggagugggaccucuucgucgagcgcuccaacgccuacuccaacugcuaccccuacgacguccccgacuacgccucccuccgcucccucgucgccuccuccggcacccucgaguucaccaacgaggacuucaacuggaccggcgucgcccaguccggcgaguccuacgccugcaagcgcggcuccgucaaguccuucuucucccgccucaacuggcuccacgaguccgacuacaaguaccccgcccucaacgucaccaugcccaacaacggcaaguucgacaagcucuacaucuggggcguccaccaccccuccaccgaccgcgagcagaccucccucuacguccgcgccuccggccgcgucaccgucuccaccaagcgcucccagcagaccgucauccccaacaucggcucccgccccuggguccgcggccucuccucccgcaucuccaucuacuggaccaucgucaagcccggcgacauccuccucaucaacuccaccggcaaccucaucgccccccgcggcuacuucaagauccgcaccggcaaguccuccaucaugcgcuccgacgcccccaucggcaccugcuccuccgagugcaucacccccaacggcuccauccccaacgacaagcccuuccagaacgucaaccgcaucaccuacggcgccugcccccgcuacgucaagcagaacacccucaagcucgccaccggcaugcgcaacguccccgagaagcagacccgcggcaucuucggcgccaucgccggcuucaucgagaacggcugggagggcauggucgacggcugguacggcuuccgccaccagaacuccgagggcaccggccaggccgccgaccucaaguccacccaggccgccaucgaccagaucaacggcaagcucaaccgccucaucgagaagaccaacgagaaguuccaccagaucgagaaggaguucuccgaggucgagggccgcauccaggaccucgagaaguacgucgaggacaccaagaucgaccucugguccuacaacgccgagcuccucgucgcccucgagaaccagcacaccaucgaccucaccgacuccgagaugaacaagcucuucgagaagacccgcaagcagcuccgcgagaacgccgaggacaugggcaacggcugcuucaagaucuaccacaagugcgacaacgccugcaucggcuccauccgcaacggcaccuacgaccacgacgucuaccgcgacgaggcccucaacaaccgcuuccagaucaagggcgccgagcucaaguccggcuacaaggacuggauccucuggaucuccuucgccaucuccugcuuccuccucugcgucguccuccucggcuucaucaugugggccugccagaagggcaacauccgcugcaacaucugcaucuga

SEQ ID NO: 104643 - RNA, 1701 nt, Artificial Sequence
  derived and/or modified CDS sequence (opt2) from hemagglutinin__InfluenzaA__AFG99712
augaagaccaucaucgcccucuccuacauccucugccucgucuucgcccagaagcuccccggcaacgacaacuccaccgccacccucugccucggccaccacgccguccccaacggcacccucgucaagaccaucaccaacgaccagaucgaggucaccaacgccaccgagcucguccaguccuccuccaccggccgcaucugcgacuccccccaccgcauccucgacggcaagaacugcacccucaucgacgcccuccucggcgacccccacugcgacggcuuccagaacaaggagugggaccucuucgucgagcgcuccaaggccuacuccaacugcuaccccuacgagguccccgacuacgccucccuccgcucccucgucgccuccuccggcacccucgaguucaccaacgaggacuucaacuggaccggcgucgcccaguccggcgaguccuacgccugcaagcgcggcuccgucaaguccuucuucucccgccucaacuggcuccacgaguccgacuacaaguaccccgcccucaacgucaccaugcccaacaacggcaaguucgacaagcucuacaucuggggcguccaccaccccuccaccgaccgcgagcagaccucccucuacguccgcgccuccggccgcgucaccgucuccaccaagcgcucccagcagaccgucauccccaacaucggcucccgccccuggguccgcggccucuccucccgcaucuccaucuacuggaccaucgucaagcccggcgacauccuccucaucaacuccaccggcaaccucaucgccccccgcggcuacuucaagauccgcaccggcaaguccuccaucaugcgcuccgacgcccccaucggcaccugcuccuccgagugcaucacccccaacggcuccauccccaacgacaagcccuuccagaacgucaaccgcaucaccuacggcgccugcccccgcuacgucaagcagaacacccucaagcucgccaccggcaugcgcaacguccccgagaagcagacccgcggcaucuucggcgccaucgccggcuucaucgagaacggcugggagggcauggucgacggcugguacggcuuccgccaccagaacuccgagggcaccggccaggccgccgaccucaaguccacccaggccgccaucgaccagaucaacggcaagcucaaccgccucaucgagaagaccaacgagaaguuccaccagaucgagaaggaguucuccgaggucgagggccgcauccaggaccucgagaaguacgucgaggacaccaagaucgaccucugguccuacaacgccgagcuccucgucgcccucgagaaccagcacaccaucgaccucaccgacuccgagaugaacaagcucuucgagaagacccgcaagcagcuccgcgagaacgccgaggacaugggcaacggcugcuucaagaucuaccacaagugcgacaacgccugcaucggcuccauccgcaacggcaccuacgaccacgacgucuaccgcgacgaggcccucaacaaccgcuuccagaucaagggcgucgagcucaaguccggcuacaaggacuggauccucuggaucuccuucgccaucuccugcuuccuccucugcgucguccuccucggcuucaucaugugggccugccagaagggcaacauccgcugcaacaucugcaucuga

SEQ ID NO: 104644 - RNA, 1701 nt, Artificial Sequence; identical to SEQ ID NO: 104523
  derived and/or modified CDS sequence (opt2) from hemagglutinin__InfluenzaA__AFG99723

SEQ ID NO: 104645 - RNA, 1701 nt, Artificial Sequence; identical to SEQ ID NO: 104638
  derived and/or modified CDS sequence (opt2) from hemagglutinin__InfluenzaA__AFG99734

SEQ ID NO: 104646 - RNA, 1701 nt, Artificial Sequence
  derived and/or modified CDS sequence (opt2) from hemagglutinin__InfluenzaA__AFG99745
augaagaccaucaucgcccucuccuacauccucugccucgucuucgcccagaagcuccccggcaacgacaacuccaccgccacccucugccucggccaccacgccguccccaacggcacccucgucaagaccaucaccaacgaccagaucgaggucaccaacgccaccgagcucguccaguccuccuccaccggccgcaucugcgacuccccccaccgcauccucgacggcaagaacugcacccucaucgacgcccuccucggcgacccccacugcgacggcuuccagaacaaggagugggaccucuucgucgagcgcuccaaggccuacuccaacugcuaccccuacgacguccccgacuacgccucccuccgcucccucgucgccuccuccggcacccucgaguucaucaacgaggacuucaacuggaccggcgucgcccaguccggcgacuccuacgccugcaagcgcggcuccgucaaguccuucuucucccgccucaacuggcuccacgaguccgaguacaaguaccccgcccucaacgucaccaugcccaacaacgacaaguucgacaagcucuacaucuggggcguccaccaccccuccaccgagcgcgagcagaccucccucuacauccgcgccuccggccgcgucaccgucuccaccaagcgcucccagcagaccgucauccccaacaucggcuccaagcccuggguccgcggccucuccucccgcaucuccaucuacuggaccaucgucaagcccggcgacauccuccucaucaacuccaccggcaaccucaucgccccccgcggcuacuucaagauccgcaccggcaaguccuccaucaugcgcuccgacgcccccaucggcaccugcuccuccgagugcaucacccccaacggcuccauccccaacgacaagcccuuccagaacgucaaccgcaucaccuacggcgccugcccccgcuacgucaagcagaacacccucaagcucgccaccggcaugcgcaacguccccgagaagcagacccgcggcaucuucggcgccaucgccggcuucaucgagaacggcugggagggcauggucgacggcugguacggcuuccgccaccagaacuccgagggcaccggccaggccgccgaccucaaguccacccaggccgccaucgaccagaucaacggcaagcucaaccgccucaucgagaagaccaacgagaaguuccaccagaucgagaaggaguucuccgaggucgagggccgcauccaggaccucgagaaguacgucgaggacaccaagaucgaccucugguccuacaacgccgagcuccucgucgcccucgagaaccagcacaccaucgaccucaccgacuccgagaugaacaagcucuucgagaagacccgcaagcagcuccgcgagaacgccgaggacaugggcaacggcugcuucaagaucuaccacaagugcgacaacgccugcaugggcuccauccgcaacggcaccuacgaccacgacgucuaccgcgacgaggcccucaacaaccgcuuccagaucaagggcgucgagcucaaguccggcuacaaggacuggauccucuggaucuccuucgccaucuccugcuuccuccucugcgucguccuccucggcuucaucaugugggccugccagaagggcaacauccgcugcaacaucugcaucuga

SEQ ID NO: 104647 - RNA, 1701 nt, Artificial Sequence; identical to SEQ ID NO: 104523
  derived and/or modified CDS sequence (opt2) from hemagglutinin__InfluenzaA__AFG99756

SEQ ID NO: 104648 - RNA, 1701 nt, Artificial Sequence
  derived and/or modified CDS sequence (opt2) from hemagglutinin__InfluenzaA__AFG99767
augaagaccaucaucgcccucuccuacauccucugccucgucuucgcccagaagcuccccggcaacgacaacuccaccgccacccucugccucggccaccacgccguccccaacggcacccucgucaagaccaucaccaacgaccagaucgaggucaccaacgccaccgagcucguccaguccuccuccaccggccgcaucugcgacuccccccaccgcauccucgacggcaagaacugcacccucaucgacgcccuccucggcgacccccacugcgacgacuuccagaacaaggagugggaccucuucgucgagcgcuccaaggccuacuccaacugcuaccccuacgacguccccgacuacgccucccuccgcucccucgucgccuccuccggcacccucgaguucaucaacgaggacuucaacuggaccggcgucgcccaguccggcgaguccuacgccugcaagcgcggcuccgucaaguccuucuucucccgccucaacuggcuccacgaguccgaguacaaguaccccgcccucaacgucaccaugcccaacaacgacaaguucgacaagcucuacaucuggggcguccaccaccccuccaccgaccgcgagcagaccucccucuacauccgcgccuccggccgcgucaccgucuccaccaagcgcucccagcagaccgucauccccaacaucggcucccgccccuggguccgcggccucuccucccgcaucuccaucuacuggaccaucgucaagcccggcgacauccuccucaucaacuccaccggcaaccucaucgccccccgcggcuacuucaagauccgcaccggcaaguccuccaucaugcgcuccgacgcccccaucggcaccugcuccuccgagugcaucacccccaacggcuccauccccaacgacaagcccuuccagaacgucaaccgcaucaccuacggcgccugcccccgcuacgucaagcagaacacccucaagcucgccaccggcaugcgcaacguccccgagaagcagacccgcggcaucuucggcgccaucgccggcuucaucgagaacggcugggagggcauggucgacggcugguacggcuuccgccaccagaacuccgagggcaccggccaggccgccgaccucaaguccacccaggccgccaucgaccagaucaacggcaagcucaaccgccucaucgagaagaccaacgagaaguuccaccagaucgagaaggaguucuccgaggucgagggccgcauccaggaccucgagaaguacgucgaggacaccaagaucgaccucugguccuacaacgccgagcuccucgucgcccucgagaaccagcacaccaucgaccucaccgacuccgagaugaacaagcucuucgagaagacccgcaagcagcuccgcgagaacgccgaggacaugggcaacggcugcuucaagaucuaccacaagugcgacaacgccugcaucggcuccauccgcaacggcaccuacgaccacgacgucuaccgcgacgaggcccucaacaaccgcuuccagaucaagggcgucgagcucaaguccggcuacaaggacuggauccucuggaucuccuucgccaucuccugcuuccuccucugcgucguccuccucggcuucaucaugugggccugccagaagggcaacauccgcugcaacaucugcaucuga

SEQ ID NO: 104649 - RNA, 1701 nt, Artificial Sequence
  derived and/or modified CDS sequence (opt2) from hemagglutinin__InfluenzaA__AFG99778
augaagaccaucaucgcccucuccuacauccucugccucgucuucgcccagaagcuccccggcaacgacaacuccaccgccacccucugccucggccaccacgccguccccaacggcacccucgucaagacccucaccaacgaccagaucgaggucaccaacgccaccgagcucguccaguccuccuccaccggcaagaucugcgacuccccccaccgcauccucgacggcaagaacugcacccucaucgacgcccuccucggcgacccccacugcgacggccuccagaacaaggagugggaccucuucgucgagcgcuccaaggccuacuccaacugcuaccccuacgacguccccgacuacgccucccuccgcucccucgucgccuccuccggcacccucgaguucaucaacgaggacuucaacuggaccggcgucgcccaggacggcggcuccuacgccugcaagcgcggcuccgucaacuccuucuucucccgccucaacuggcuccacaaguccgaguacaaguaccccgcccucaacgucaccaugcccaacaacggcaaggucgacaagcucuacaucuggggcguccaccaccccuccaccgaccgcgaccagaccucccucuacguccgcgccuccggccgcgucaccgucuccaccaagcgcucccagcagaccgucauccccaacaucggcucccgccccuggguccgcggccaguccucccgcaucuccaucuacuggaccaucgucaagcccggcgacauccuccucaucaacuccaccggcaaccucaucgccccccgcggcuacuucaagauccgcaacggcaaguccuccaucaugcgcuccgacgcccccaucggcaccugcuccuccgagugcaucacccccaacggcuccauccccaacgacaagcccuuccagaacgucaaccgcaucaccuacggcgccugcccccgcuacgucaagcagaacacccucaagcucgccaccggcaugcgcaacguccccgagaagcagacccgcggcaucuucggcgccaucgccggcuucaucgagaacggcugggagggcauggucgacggcugguacggcuuccgccaccagaacuccgagggcaccggccaggccgccgaccucaaguccacccaggccgccaucgaccagaucaacggcaagcucaaccgccucaucgagaagaccaacgagaaguuccaccagaucgagaaggaguucuccgaggucgagggccgcauccaggaccucgagaaguacgucgaggacaccaagaucgaccucugguccuacaacgccgagcuccucgucgcccucgagaaccagcacaccaucgaccucaccgacuccgagaugaacaagcucuucgagaagacccgcaagcagcuccgcgagaacgccgaggacaugggcaacggcugcuucaagaucuaccacaagugcgacaacgccugcaucggcuccauccgcaacggcaccuacgaccacgacgucuaccgcgacgaggcccucaacaaccgcuuccagaucaagggcgucgagcucaaguccggcuacaaggacuggauccucuggaucuccuucgccaucuccugcuuccuccucugcgucguccuccucggcuucaucaugugggccugccagaagggcaacauccgcugcaacaucugcaucuga

SEQ ID NO: 104650 - RNA, 1701 nt, Artificial Sequence; identical to SEQ ID NO: 104523
  derived and/or modified CDS sequence (opt2) from hemagglutinin__InfluenzaA__AFG99789

SEQ ID NO: 104651 - RNA, 1701 nt, Artificial Sequence; identical to SEQ ID NO: 104638
  derived and/or modified CDS sequence (opt2) from hemagglutinin__InfluenzaA__AFG99800

SEQ ID NO: 104652 - RNA, 1701 nt, Artificial Sequence
  derived and/or modified CDS sequence (opt2) from hemagglutinin__InfluenzaA__AFG99811
augaagaccaucaucgcccucuccuacauccucugccucgucuucucccagaagcuccccggcaacgacaacuccaccgccacccucugccucggccaccacgccguccccaacggcacccucgucaagaccaucaccaacgaccagaucgaggucaccaacgccaccgagcucguccagaacuccuccaccggccgcaucugcgacuccccccaccgcauccucgacggcaagaacugcacccucaucgacgcccuccucggcgacccccacugcgacgacuuccagaacaaggagugggaccucuucgucgagcgcuccaaggccuacuccaacugcuaccccuacgacguccccgacuacgccucccuccgcucccucgucgccuccuccggcacccucgaguucaucaacgaggacuucaacuggaccggcgucgcccaguccggcgaguccuacgccugcaagcgcggcuccgucaaguccuucuucucccgccucaacuggcuccacgaguccgaguacaaguaccccgcccucaacgucaccaugcccaacaacggcaaguucgacaagcucuacaucuggggcguccaccaccccuccaccgaccgcgagcagaccucccucuacguccgcgccuccggccgcgucaccgucuccaccaagcgcucccagcagaccgucauccccaacaucggcucccgccccuggguccgcggccucuccucccgcaucuccaucuacuggaccaucgucaagcccggcgacauccuccucaucaacuccaccggcaaccucaucgccccccgcggcuacuucaagauccgcaccggcaaguccuccaucaugcgcuccgacgcccccaucggcaccugcuccuccgagugcaucacccccaacggcuccauccccaacgacaagcccuuccagaacgucaaccgcaucaccuacggcgccugcccccgcuacgucaagcagaacacccucaagcucgccaccggcaugcgcaacguccccgagaagcagacccgcggcaucuucggcgccaucgccggcuucaucgagaacggcugggagggcauggucgacggcugguacggcuuccgccaccagaacuccgagggcaccggccaggccgccgaccucaaguccacccaggccgccaucgaccagaucaacggcaagcucaaccgccucaucgagaagaccaacgagaaguuccaccagaucgagaaggaguucuccgagaucgagggccgcauccaggaccucgagaaguacgucgaggacaccaagaucgaccucugguccuacaacgccgagcuccucgucgcccucgagaaccagcacaccaucgaccucaccgacuccgagaugaacaagcucuucgagaagacccgcaagcagcuccgcgagaacgccgaggacaugggcaacggcugcuucaagaucuaccacaagugcgacaacgccugcaucggcuccauccgcaacggcaccuacgaccacgacgucuaccgcgacgaggcccucaacaaccgcuuccagaucaagggcgucgagcucaaguccggcuacaaggacuggauccucuggaucuccuucgccaucuccugcuuccuccucugcgucguccuccucggcuucaucaugugggccugccagaagggcaacauccgcugcaacaucugcaucuga

SEQ ID NO: 104653 - RNA, 1701 nt, Artificial Sequence; identical to SEQ ID NO: 104523
  derived and/or modified CDS sequence (opt2) from hemagglutinin__InfluenzaA__AFG99822

SEQ ID NO: 104654 - RNA, 1701 nt, Artificial Sequence; identical to SEQ ID NO: 104523
  derived and/or modified CDS sequence (opt2) from hemagglutinin__InfluenzaA__AFG99833

SEQ ID NO: 104655 - RNA, 1701 nt, Artificial Sequence; identical to SEQ ID NO: 104523
  derived and/or modified CDS sequence (opt2) from hemagglutinin__InfluenzaA__AFG99844

SEQ ID NO: 104656 - RNA, 1701 nt, Artificial Sequence
  derived and/or modified CDS sequence (opt2) from hemagglutinin__InfluenzaA__AFG99855
augaagaccaucaucgcccucuccuacauccucugccucgucuucgcccagaagcuccccggcaacgacaacuccaccgccacccucugccucggccaccacgccguccccaacggcacccucgucaagaccaucaccaacgaccagaucgaggucaccaacgccaccgagcucguccaguccuccuccaccggccgcaucugcgacuccccccaccgcauccucgacggcaagaacugcacccucaucgacgcccuccucggcgacccccacugcgacggcuuccagaacaaggagugggaccucuucgucgagcgcuccaaggccuacuccaacugcuaccccuacgacguccccgacuacgccucccuccgcucccucgucgccuccuccggcacccucgaguucaccaacgaggacuucaacuggaccggcgucgcccaguccggcgaguccuacgccugcaagcgcggcuccgucaaguccuucuucucccgccucaacuggcuccacgaguccgacuacaaguaccccgcccucaacgucaccaugcccaacaacggcaaguucgacaagcucuacaucuggggcguccaccaccccuccaccgaccgcgagcagaccucccucuacguccgcgccuccggccgcgucaccgucuccaccaagcgcucccagcagaccgucauccccaacaucggcucccgccccuggguccgcggccucuccucccgcaucuccaucuacuggaccaucgucaagcccggcgacauccuccucaucaacuccaccggcaaccucaucgccccccgcggcuacuucaagauccgcaccggcaaguccuccaucaugcgcuccgacgcccccaucggcaccugcuccuccgagugcaucacccccaacggcuccauccccaacgacaagcccuuccagaacgucaaccgcaucaccuacggcgccugcccccgcuacgucaagcagaacacccucaagcucgccaccggcaugcgcaacguccccggcaagcagacccgcggcaucuucggcgccaucgccggcuucaucgagaacggcugggagggcauggucgacggcugguacggcuuccgccaccagaacuccgagggcaccggccaggccgccgaccucaaguccacccaggccgccaucgaccagaucaacggcaagcucaaccgccucaucgagaagaccaacgagaaguuccaccagaucgagaaggaguucuccgaggucgagggccgcauccaggaccucgagaaguacgucgaggacaccaagaucgaccucugguccuacaacgccgagcuccucgucgcccucgagaaccagcacaccaucgaccucaccgacuccgagaugaacaagcucuucgagaagacccgcaagcagcuccgcgagaacgccgaggacaugggcaacggcugcuucaagaucuaccacaagugcgacaacgccugcaucggcuccauccgcaacggcaccuacgaccacgacgucuaccgcgacgaggcccucaacaaccgcuuccagaucaagggcgucgagcucaaguccggcuacaaggacuggauccucuggaucuccuucgccaucuccugcuuccuccucugcgucguccuccucggcuucaucaugugggccugccagaagggcaacauccgcugcaacaucugcaucuga

SEQ ID NO: 104657 - RNA, 1701 nt, Artificial Sequence; identical to SEQ ID NO: 104523
  derived and/or modified CDS sequence (opt2) from hemagglutinin__InfluenzaA__AFG99866

SEQ ID NO: 104658 - RNA, 1701 nt, Artificial Sequence; identical to SEQ ID NO: 104523
  derived and/or modified CDS sequence (opt2) from hemagglutinin__InfluenzaA__AFG99877

SEQ ID NO: 104659 - RNA, 1701 nt, Artificial Sequence
  derived and/or modified CDS sequence (opt2) from hemagglutinin__InfluenzaA__AFG99888
augaagaccaucaucgcccucuccuacauccucugccucgucuucgcccagaagcuccccggcaacgacaacuccaccgccacccucugccucggccaccacgccguccccaacggcacccucgucaagaccaucaccaacgaccagaucgaggucaccaacgccaccgagcucguccaguccuccuccaccggccgcaucugcgacuccccccaccgcauccucgacggcaagaacugcacccucaucgacgcccuccucggcgacccccacugcgacggcuuccagaacaaggagugggaccucuucgucgagcgcuccaaggccuacuccaacugcuaccccuacgacguccccgacuacgccucccuccgcucccucgucgccuccuccggcacccucgaguucaucaacgaggacuucaacuggaccggcgucgcccaguccggcgaguccuacgccugcaagcgcggcuccgucaaguccuucuucucccgccucaacuggcuccacgaguccgaguacaaguaccccgcccucaacgucaccaugcccaacaacgacaaguucgacaagcucuacaucuggggcguccaccaccccuccaccgaccgcgagcagaccucccucuacauccgcgccuccggccgcgucaccgucuccaccaagcgcucccagcagaccgucauccccaacaucggcucccgccccuggguccgcggccucuccucccgcaucuccaucuacuggaccaucgucaagcccggcgacauccuccucaucaacuccaccggcaaccucaucgccccccgcggcuacuucaagauccgcaccggcaaguccuccaucaugcgcuccgacgcccccaucggcaccugcaacuccgagugcaucacccccaacggcuccauccccaacgacaagcccuuccagaacgucaaccgcaucaccuacggcgccugcccccgcuacgucaagcagaacacccucaagcucgccaccggcaugcgcaacguccccgagaagcagacccgcggcaucuucggcgccaucgccggcuucaucgagaacggcugggagggcauggucgacggcugguacggcuuccgccaccagaacuccgagggcaccggccaggccgccgaccucaaguccacccaggccgccaucgaccagaucaacggcaagcucaaccgccucaucgagaagaccaacgagaaguuccaccagaucgagaaggaguucuccgaggucgagggccgcauccaggaccucgagaaguacgucgaggacaccaagaucgaccucugguccuacaacgccgagcuccucgucgcccucgagaaccagcacaccaucgaccucaccgacuccgagaugaacaagcucuucgagaagacccgcaagcagcuccgcgagaacgccgaggacaugggcaacggcugcuucaagaucuaccacaagugcgacaacgccugcaucggcuccauccgcaacggcaccuacaaccacgacgucuaccgcgacgaggcccucaacaaccgcuuccagaucaagggcgucgagcucaaguccggcuacaaggacuggauccucuggaucuccuucgccaucuccugcuuccuccucugcgucguccuccucggcuucaucaugugggccugccagaagggcaacauccgcugcaacaucugcaucuga

SEQ ID NO: 104660 - RNA, 1701 nt, Artificial Sequence; identical to SEQ ID NO: 104523
  derived and/or modified CDS sequence (opt2) from hemagglutinin__InfluenzaA__AFG99899

SEQ ID NO: 104661 - RNA, 1701 nt, Artificial Sequence; identical to SEQ ID NO: 104523
  derived and/or modified CDS sequence (opt2) from hemagglutinin__InfluenzaA__AFG99910

SEQ ID NO: 104662 - RNA, 1701 nt, Artificial Sequence; identical to SEQ ID NO: 104523
  derived and/or modified CDS sequence (opt2) from hemagglutinin__InfluenzaA__AFG99921

SEQ ID NO: 104663 - RNA, 1701 nt, Artificial Sequence
  derived and/or modified CDS sequence (opt2) from hemagglutinin__InfluenzaA__AFG99932
augaagaccaucaucgcccucuccuacauccucugccucgucuucgcccagaagcuccccggcaacgacaacuccaccgccacccucugccucggccaccacgccguccccaacggcacccucgucaagaccaucaccaacgaccagaucgaggucaccaacgccaccgagcucguccaguccuccuccaccggccgcaucugcgacuccccccaccgcauccucgacggcaagaacugcacccucaucgacgcccuccucggcgacccccacugcgacggcuuccagaacaaggagugggaccucuucgucgagcgcuccaaggccuacuccaacugcuaccccuacgacguccccgacuacgccucccuccgcucccucgucgccuccuccggcacccucgaguucaucaacgaggacuucaacuggaccggcgucgcccaguccggcgaguccuacgccugcaagcgcggcuccgucaaguccuucuucucccgccucaacuggcuccacgaguccgaguacaaguaccccgcccucaacgucaccaugcccaacaacgacaaguucgacaagcucuacaucuggggcguccaccaccccuccaccgaccgcgagcagaccucccucuacauccgcgccuccggccgcgucaccgucuccaccaagcgcucccagcagaccgucauccccaacaucggcucccgccccuggguccgcggccucuccucccgcaucuccaucuacuggaccaucgucaagcccggcgacauccuccucaucaacuccaccggcaaccucaucgccccccgcggcuacuucaagauccgcaccggcaaguccuccaucaugcgcuccgacgcccccaucggcaccugcuccuccgagugcaucacccccaacggcuccauccccaacgacaagcccuuccagaacgucaaccgcaucaccuacggcgccugcccccgcuacgucaagcagaacacccucaagcucgccaccggcaugcgcaacguccccgagaagcagacccgcggcaucuucggcgccaucgccggcuucaucgagaacggcugggagggcauggucgacggcugguacggcuuccgccaccagaacuccgagggcaccggccaggccgccgaccucaaguccacccaggccgccaucgaccagaucaacggcaagcucaaccgccucaucgagaagaccaacgagaaguuccaccagaucgagaaggaguucuccgaggucgagggccgcauccaggaccucgagaaguacgucgaggacaccaagaucgaccucugguccuacaacgccgagcuccucgucgcccucgagaaccagcacaccaucgaccucaccgacuccgagaugaacaagcucuucgagaagacccgcaagcagcuccgcgagaacgccgaggacaugggcaacggcugcuucaagaucuaccacaagugcgacaacgccugcaucggcuccauccgcaacggcaccuacgaccacgacgucuaccgcgacgaggcccucaacaaccgcuuccagaucaagggcgucgagcucaaguccggcuacaaggacuggauccucuggaucuccuucgccaucuccugcuuccuccucugcgucguccuccucggcuucaucaugugggccugccagaagggcaacauccgcugcaacaucugcaucuga

SEQ ID NO: 104664 - RNA, 1701 nt, Artificial Sequence; identical to SEQ ID NO: 104523
  derived and/or modified CDS sequence (opt2) from hemagglutinin__InfluenzaA__AFG99943

SEQ ID NO: 104665 - RNA, 1701 nt, Artificial Sequence
  derived and/or modified CDS sequence (opt2) from hemagglutinin__InfluenzaA__AFG99954
augaagaccaucaucgcccucuccuacauccucugccucgucuucgcccagaagcuccccggcaacgacaacuccaccgccacccucugccucggccaccacgccguccccaacggcacccucgucaagaccaucaccaacgaccagaucgaggucaccaacgccaccgagcucguccaguccuccuccaccggccgcaucugcgacuccccccaccgcauccucgacggcaagaacugcacccucaucgacgcccuccucggcgacccccacugcgacggcuuccagaacaaggagugggaccucuucgucgagcgcuccaaggccuacuccaacugcuaccccuacgacguccccgacuacgccucccuccgcucccucgucgccuccuccggcacccucgaguucaucaacgaggacuucaacuggaccggcgucgcccaguccggcgacuccuacgccugcaagcgcggcuccgucaaguccuucuucucccgccucaacuggcuccacgaguccgaguacaaguaccccgcccucaacgucaccaugcccaacaacgacaaguucgacaagcucuacaucuggggcguccaccaccccuccaccgagcgcgagcagaccucccucuacauccgcgccuccggccgcgucaccgucuccaccaagcgcucccagcagaccgucauccccaacaucggcuucaagcccuggguccgcggccucuccucccgcaucuccaucuacuggaccaucgucaagcccggcgacauccuccucaucaacuccaccggcaaccucaucgccccccgcggcuacuucaagauccgcaccggcaaguccuccaucaugcgcuccgacgcccccaucggcaccugcuccuccgagugcaucacccccaacggcuccauccccaacgacaagcccuuccagaacgucaaccgcaucaccuacggcgccugcccccgcuacgucaagcagaacacccucaagcucgccaccggcaugcgcaacguccccgagaagcagacccgcggcaucuucggcgccaucgccggcuucaucgagaacggcugggagggcauggucgacggcugguacggcuuccgccaccagaacuccgagggcaccggccaggccgccgaccucaaguccacccaggccgccaucgaccagaucaacggcaagcucaaccgccucaucgagaagaccaacgagaaguuccaccagaucgagaaggaguucuccgaggucgagggccgcauccaggaccucgagaaguacgucgaggacaccaagaucgaccucugguccuacaacgccgagcuccucgucgcccucgagaaccagcacaccaucgaccucaccgacuccgagaugaacaagcucuucgagaagacccgcaagcagcuccgcgagaacgccgaggacaugggcaacggcugcuucaagaucuaccacaagugcgacaacgccugcaucggcuccauccgcaacggcaccuacgaccacgacgucuaccgcgacgaggcccucaacaaccgcuuccagaucaagggcgucgagcucaaguccggcuacaaggacuggauccucuggaucuccuucgccaucuccugcuuccuccucugcgucguccuccucggcuucaucaugugggccugccagaagggcaacauccgcugcaacaucugcaucuga

SEQ ID NO: 104666 - RNA, 1701 nt, Artificial Sequence
  derived and/or modified CDS sequence (opt2) from hemagglutinin__InfluenzaA__AFG99965
augaagaccaucaucgcccucuccuacauccucugccucgccuucgcccagaagcuccccggcaacgacaacuccaccgccacccucugccucggccaccacgccguccccaacggcacccucgucaagaccaucaccaacgaccagaucgaggucaccaacgccaccgagcucguccaguccuccuccaccggccgcaucugcgacuccccccaccgcauccucgacggcaagaacugcacccucaucgacgcccuccucggcgacccccacugcgacggcuuccagaacaaggagugggaccucuucgucgagcgcuccaaggccuacuccaacugcuaccccuacgacguccccgacuacgccucccuccgcucccucgucgccuccuccggcacccucgaguucaccaacgaggacuucaacuggaccggcgucgcccaguccggcgaguccuacgccugcaagcgcggcuccgucaaguccuucuucucccgccucaacuggcuccacgaguccgacuacaaguaccccgcccucaacgucaccaugcccaacaacggcaaguucgacaagcucuacaucuggggcguccaccaccccuccaccgaccgcgagcagaccucccucuacguccgcgccuccggccgcgucaccgucuccaccaagcgcucccagcagaccgucauccccaacaucggcucccgccccuggguccgcggccucuccucccgcaucuccaucuacuggaccaucgucaagcccggcgacauccuccucaucaacuccaccggcaaccucaucgccccccgcggcuacuucaagauccgcaccggcaaguccuccaucaugcgcuccgacgcccccaucggcaccugcuccuccgagugcaucacccccaacggcuccauccccaacgacaagcccuuccagaacgucaaccgcaucaccuacggcgccugcccccgcuacgucaagcagaacacccucaagcucgccaccggcaugcgcaacguccccgagaagcagacccgcggcaucuucggcgccaucgccggcuucaucgagaacggcugggagggcauggucgacggcugguacggcuuccgccaccagaacuccgagggcaccggccaggccgccgaccucaaguccacccaggccgccaucgaccagaucaacggcaagcucaaccgccucaucgagaagaccaacgagaaguuccaccagaucgagaaggaguucuccgaggucgagggccgcauccaggaccucgagaaguacgucgaggacaccaagaucgaccucugguccuacaacgccgagcuccucgucgcccucgagaaccagcacaccaucgaccucaccgacuccgagaugaacaagcucuucgagaagacccgcaagcagcuccgcgagaacgccgaggacaugggcaacggcugcuucaagaucuaccacaagugcgacaacgccugcaucggcuccauccgcaacggcaccuacgaccacgacgucuaccgcgacgaggcccucaacaaccgcuuccagaucaagggcgucgagcucaaguccggcuacaaggacuggauccucuggaucuccuucgccaucuccugcuuccuccucugcgucguccuccucggcuucaucaugugggccugccagaagggcaacauccgcugcaacaucugcaucuga

SEQ ID NO: 104667 - RNA, 1701 nt, Artificial Sequence; identical to SEQ ID NO: 104523
  derived and/or modified CDS sequence (opt2) from hemagglutinin__InfluenzaA__AFG99976

SEQ ID NO: 104668 - RNA, 1701 nt, Artificial Sequence
  derived and/or modified CDS sequence (opt2) from hemagglutinin__InfluenzaA__AFG99987
augaagaccaucaucgcccucuccuacauccucugccucgucuucgcccagaagcuccccggcaacgacaacuccaccgccacccucugccucggccaccacgccguccccaacggcacccucgucaagaccaucaccaacgaccagaucgaggucaccaacgccaccgagcucguccaguccuccuccaccggccgcaucugcgacuccccccaccgcauccucgacggcaagaacugcacccucaucgacgcccuccucggcgacccccacugcgacggcuuccagaacaaggagugggaccucuucgucgagcgcuccaaggccuacuccaacugcuaccccuacgacguccccgacuacgccucccuccgcucccucgucgccuccuccggcacccucgaguucaucaacgaggacuucaacuggaccggcgucgcccagaacggcgacuccuacgccugcaagcgcggcuccgucaaguccuucuucucccgccucaacuggcuccacgaguccgaguacaaguaccccgcccucaacgucaccaugcccaacaacgacaaguucgacaagcucuacaucuggggcguccaccaccccuccaccgaccgcgagcagaccucccucuacauccgcgccuccggccgcgucaccgucuccaccaagcgcucccagcagaccgucauccccaacaucggcucccgccccuggguccgcggccucuccucccgcaucuccaucuacuggaccaucgucaagcccggcgacauccuccucaucaacuccaccggcaaccucaucgccccccgcggcuacuucaagauccgcaccggcaaguccuccaucaugcgcuccgacgcccccaucggcaccugcuccuccgagugcaucacccccaacggcuccauccccaacgacaagcccuuccagaacgucaaccgcaucaccuacggcgccugcccccgcuacgucaagcagaacacccucaagcucgccaccggcaugcgcaacguccccgagaagcagacccgcggcaucuucggcgccaucgccggcuucaucgagaacggcugggagggcauggucgacggcugguacggcuuccgccaccagaacuccgagggcaccggccaggccgccgaccucaaguccacccaggccgccaucgaccagaucaacggcaagcucaaccgccucaucgagaagaccaacgagaaguuccaccagaucgagaaggaguucuccgaggucgagggccgcauccaggaccucgagaaguacgucgaggacaccaagaucgaccucugguccuacaacgccgagcuccucgucgcccucgagaaccagcacaccaucgaccucaccgacuccgagaugaacaagcucuucgagaagacccgcaagcagcuccgcgagaacgccgaggacaugggcaacggcugcuucaagaucuaccacaagugcgacaacgccugcaucggcuccauccgcaacggcaccuacgaccacgacgucuaccgcgacgaggcccucaacaaccgcuuccagaucaagggcgucgagcucaaguccggcuacaaggacuggauccucuggaucuccuucgccaucuccugcuuccuccucugcgucguccuccucggcuucaucaugugggccugccagaagggcaacauccgcugcaacaucugcaucuga

SEQ ID NO: 104669 - RNA, 1701 nt, Artificial Sequence
  derived and/or modified CDS sequence (opt2) from hemagglutinin__InfluenzaA__AFG99998
augaagaccaucaucgcccucuccuacauccucugccucgucuucgcccagaagcuccccggcaacgacaacuccaccgccacccucugccucggccaccacgccguccccaacggcacccucgucaagaccaucaccaacgaccagaucgaggucaccaacgccaccgagcucguccaguccuccuccaccggccgcaucugcgacuccccccaccgcauccucgacggcaagaacugcacccucaucgacgcccuccucggcgacccccacugcgacggcuuccagaacaaggagugggaccucuucgucgagcgcuccaaggccuacuccaacugcuaccccuacgacguccccgacuacgccucccuccgcucccucgucgccuccuccggcacccucgaguucaucaacgaggacuucaacuggaccggcgucgcccaggacggcggcuccuacgccugcaagcgcggcuccgucaacuccuucuucucccgccucaacuggcuccacaagcucgaguacaaguaccccgcccucaacgucaccaugcccaacaacggcaaguucgacaagcucuacaucuggggcguccaccaccccuccaccgacuccgaccagaccucccucuacguccgcgccuccggccgcgucaccgucuccaccaagcgcucccagcagaccgucacccccaacaucggcucccgccccuggguccgcggccucuccucccgcaucuccaucuacuggaccaucgucaagcccggcgacauccuccucaucaacuccaccggcaaccucaucgccccccgcggcuacuucaagauccgcaacggcaaguccuccaucaugcgcuccgacgcccccaucggcaacugcuccuccgagugcaucacccccaacggcuccauccccaacgacaagcccuuccagaacgucaaccgcaucaccuacggcgccugcccccgcuacgucaagcagaacacccucaagcucgccaccggcaugcgcaacguccccgagaagcagacccgcggcaucuucggcgccaucgccggcuucaucgagaacggcugggagggcauggucgacggcugguacggcuuccgccaccagaacuccgagggcaccggccaggccgccgaccucaaguccacccaggccgccaucgaccagaucaacggcaagcucaaccgccucaucgagaagaccaacgagaaguuccaccagaucgagaaggaguucuccgaggucgagggccgcauccaggaccucgagaaguacgucgaggacaccaagaucgaccucugguccuacaacgccgagcuccucgucgcccucgagaaccagcacaccaucgaccucaccgacuccgagaugaacaagcucuucgagaagacccgcaagcagcuccgcgagaacgccgaggacaugggcaacggcugcuucaagaucuaccacaagugcgacaacgccugcaucggcuccauccgcaacggcaccuacgaccacgacgucuaccgcgacgaggcccucaacaaccgcuuccagaucaagggcgucgagcucaaguccggcuacaaggacuggauccucuggaucuccuucgccaucuccugcuuccuccucugcgucguccuccucggcuucaucaugugggccugccagaagggcaacauccgcugcaacaucugcaucuga

SEQ ID NO: 104670 - RNA, 1701 nt, Artificial Sequence; identical to SEQ ID NO: 104638
  derived and/or modified CDS sequence (opt2) from hemagglutinin__InfluenzaA__AFH00021

SEQ ID NO: 104671 - RNA, 1701 nt, Artificial Sequence
  derived and/or modified CDS sequence (opt2) from hemagglutinin__InfluenzaA__AFH00032
augaagaccaucaucgcccucuccuacauccucugccucgucuucgcccagaagcuccccggcaacgacaacuccaccgccacccucugccucggccaccacgccguccccaacggcacccucgucaagaccaucaccaacgaccagaucgaggucaccaacgccaccgagcucguccaguccuccuccaccggcaagaucugcgacuccccccaccgcauccucgacggcaagaacugcacccucaucgacgcccuccucggcgacccccacugcgacgacuuccagaacaaggagugggaccucuucgucgagcgcuccaaggccuacuccaacugcuaccccuacgacguccccgacuacgccucccuccgcucccucgucgccuccuccggcacccucgaguucaucaacgaggacuucaacuggaccggcgucgcccaguccggcgacuccuacgccugcaagcgcggcuccgucaaguccuucuucucccgccucaacuggcuccacgaguccgaguacaaguaccccgcccucaacgucaccaugcccaacaacgacaaguucgacaagcucuacaucuggggcguccaccaccccuccaccgaccgcgagcagaccucccucuacauccgcgccuccggccgcgucaccgucuccaccaagcgcucccagcagaccgucauccccaacaucggcucccgccccuggguccgcggccucuccucccgcaucuccaucuacuggaccaucgucaagcccggcgacauccuccucaucaacuccaccggcaaccucaucgccccccgcggcuacuucaagauccgcaccggcaaguccuccaucaugcgcuccgacgcccccaucggcaccugcuccuccgagugcaucacccccaacggcuccauccccaacgacaagcccuuccagaacgucaaccgcaucaccuacggcgccugcccccgcuacgucaagcagaacacccucaagcucgccaccggcaugcgcaacguccccgagaagcagacccgcggcaucuucggcgccaucgccggcuucaucgagaacggcugggagggcauggucgacggcugguacggcuuccgccaccagaacuccgagggcaccggccaggccgccgaccucaaguccacccaggccgccaucgaccagaucaacggcaagcucaacaagcucaucgagaagaccaacgagaaguuccaccagaucgagaaggaguucuccgaggucgagggccgcauccaggaccucgagaaguacgucgaggacaccaagaucgaccucugguccuacaacgccgagcuccucgucgcccucgagaaccagcacaccaucgaccucaccgacuccgagaugaacaagcucuucgagaagacccgcaagcagcuccgcgagaacgccgaggacaugggcaacggcugcuucaagaucuaccacaagugcgacaacgccugcaucggcuccauccgcaacggcaccuacgaccacgacgucuaccgcgacgaggcccucaacaaccgcuuccagaucaagggcgucgagcucaaguccggcuacaaggacuggauccucuggaucuccuucgccaucuccugcuuccuccucugcgucguccuccucggcuucaucaugugggccugccagaagggcaacauccgcugcaacaucugcaucuga

SEQ ID NO: 104672 - RNA, 1701 nt, Artificial Sequence
  derived and/or modified CDS sequence (opt2) from hemagglutinin__InfluenzaA__AFH00043
augaagaccaucaucgcccucuccuacauccucugccucgucuucgcccagaagcuccccggcaacgacaacuccaccgccacccucugccucggccaccacgccguccccaacggcacccucgucaagaccaucaccaacgaccagaucgaggucaccaacgccaccgagcucguccaguccuccuccaccggcaagaucugcgacuccccccaccgcauccucgacggcaagaacugcacccucaucgacgcccuccucggcgacccccacugcgacgacuuccagaacaaggagugggaccucuucgucgagcgcuccaaggccuacuccaacugcuaccccuacgacguccccgacuacgccucccuccgcucccucgucgccuccuccggcacccucgaguucaucaacgaggacuucaacuggaccggcgucgcccaguccggcgacuccuacgccugcaagcgcggcuccgucaaguccuucuucucccgccucaacuggcuccacgaguccgaguacaaguaccccgcccucaacgucaccaugcccaacaacgacaaguucgacaagcucuacaucuggggcguccaccaccccuccaccgaccgcgagcagaccucccucuacauccgcgccuccggccgcgucaccgucuccaccaagcgcucccagcagaccgucauccccaacaucggcucccgccccuggguccgcggccucuccucccgcaucuccaucuacuggaccaucgucaagcccggcgacauccuccucaucaacuccaccggcaaccucaucgccccccgcggcuacuucaagauccgcaccggcaaguccuccaucaugcgcuccgacgccaccaucggcaccugcuccuccgagugcaucacccccaacggcuccauccccaacgacaagcccuuccagaacgucaaccgcaucaccuacggcgccugcccccgcuacgucaagcagaacacccucaagcucgccaccggcaugcgcaacguccccgagaagcagacccgcggcaucuucggcgccaucgccggcuucaucgagaacggcugggagggcauggucgacggcugguacggcuuccgccaccagaacuccgagggcaccggccaggccgccgaccucaaguccacccaggccgccaucgaccagaucaacggcaagcucaacaagcucaucgagaagaccaacgagaaguuccaccagaucgagaaggaguucuccgaggucgagggccgcauccaggaccucgagaaguacgucgaggacaccaagaucgaccucugguccuacaacgccgagcuccucgucgcccucgagaaccagcacaccaucgaccucaccgacuccgagaugaacaagcucuucgagaagacccgcaagcagcuccgcgagaacgccgaggacaugggcaacggcugcuucaagaucuaccacaagugcgacaacgccugcaucggcuccauccgcaacggcaccuacgaccacgacgucuaccgcgacgaggcccucaacaaccgcuuccagaucaagggcgucgagcucaaguccggcuacaaggacuggauccucuggaucuccuucgccaucuccugcuuccuccucugcgucguccuccucggcuucaucaugugggccugccagaagggcaacauccgcugcaacaucugcaucuga

SEQ ID NO: 104673 - RNA, 1701 nt, Artificial Sequence
  derived and/or modified CDS sequence (opt2) from hemagglutinin__InfluenzaA__AFH00054
augaagaccaucaucgcccucuccuacauccucugccucgucuucgcccagaagcuccccggcaacgacaacuccaccgccacccucugccucggccaccacgccguccccaacggcacccucgucaagaccaucaccaacgaccagaucgaggucaccaacgccaccgagcucguccaguccuccuccaccggccgcaucugcgacuccccccaccgcauccucgacggcaagaacugcacccucaucgacgcccuccucggcgacccccacugcgacggcuuccagaacaaggagugggaccucuucgucgagcgcuccaaggccuacuccaacugcuaccccuacgacguccccgacuacgccucccuccgcucccucgucgccuccuccggcacccucgaguucaucaacgaggacuucaacuggaccggcgucgcccagaacggcgacuccuacgccugcaagcgcggcuccgucaaguccuucuucucccgccucaacuggcuccacgaguccgaguacaaguaccccgcccucaacgucaccaugcccaacaacgacaaguucgacaagcucuacaucuggggcguccaccaccccuccaccgaccgcgagcagaccucccucuacauccgcgccuccggccgcgucaccgucuccaccaagcgcucccagcagaccgucauccccaacaucggcucccgccccuggguccgcggccucuccucccgcaucuccaucuacuggaccaucgucaagcccggcgacauccuccucaucaacuccaccggcaaccucaucgccccccgcggcuacuucaagauccgcaccggcaaguccuccaucaugcgcuccgacgcccccaucggcaccugcuccuccgagugcaucacccccaacggcuccauccccaacgacaagcccuuccagaacgucaaccgcaucaccuacggcgccugcccccgcuacgucaagcagaacacccucaagcucgccaccggcaugcgcaacguccccgagaagcagacccgcggcaucuucggcgccaucgccggcuucaucgagaacggcugggagggcauggucgacggcugguacggcuuccgccaccagaacuccgagggcaccggccaggccgccgaccucaaguccacccaggccgccaucgaccagaucaacggcaagcucaaccgccucaucgagaagaccaacgagaaguuccaccagaucgagaaggaguucuccgaggucgagggccgcauccaggaccucgagaaguacgucgaggacaccaagaucgaccucugguccuacaacgccgagcuccucgucgcccucgagaaccagcacaccaucgaccucaccgacuccgagaugaacaagcucuucgagaagacccgcaagcagcuccgcgagaacgccgaggacaugggcaacggcugcuucaagaucuaccacaagugcgacaacgccugcaucggcuccauccgcaacggcaccuacgaccacgacgucuaccgcgacgaggcccucaacaaccgcuuccacaucaagggcgucgagcucaaguccggcuacaaggacuggauccucuggaucuccuucgccaucuccugcuuccuccucugcgucguccuccucggcuucaucaugugggccugccagaagggcaacauccgcugcaacaucugcaucuga

SEQ ID NO: 104674 - RNA, 1701 nt, Artificial Sequence
  derived and/or modified CDS sequence (opt2) from hemagglutinin__InfluenzaA__AFH00065
augaagaccaucaucgcccucuccuacauccucugccucgucuucgcccagaagcuccccggcaacgacaacuccaccgccacccucugccucggccaccacgccguccccaacggcacccucgucaagaccaucaccaacgaccagaucgaggucaccaacgccaccgagcucguccaguccuccuccaccggccgcaucugcgacuccccccaccgcauccucgacggcaagaacugcacccucaucgacgcccuccucggcgacccccacugcgacggcuuccagaacaaggagugggaccucuucgucgagcgcuccaaggccuacuccaacugcuaccccuacgacguccccgacuacgccucccuccgcucccucgucgccuccuccggcacccucgaguucaucaacgaggacuucaacuggaccggcgucgcccaggacggcggcuccuacgccugcaagcgcggcuccgucaacuccuucuucucccgccucaacuggcuccacaagcucgaguacaaguaccccgcccucaacgucaccaugcccaacaacggcaaguucgacaagcucuacaucuggggcguccaccaccccuccaccgacuccgaccagaccucccucuacguccgcgccuccggccgcgucaccgucuccaccaagcgcucccagcagaccgucauccccaacaucggcucccgccccuggguccgcggccagcccucccgcaucuccaucuacuggaccaucgucaagcccggcgacauccuccucaucaacuccaccggcaaccucaucgccccccgcggcuacuucaagauccgcaacggcaaguccuccaucaugcgcuccgacgcccccaucggcaacugcuccuccgagugcaucacccccaacggcuccauccccaacgacaagcccuuccagaacgucaaccgcaucaccuacggcgccugcccccgcuacgucaagcagaacacccucaagcucgccaccggcaugcgcaacguccccgagaagcagacccgcggcaucuucggcgccaucgccggcuucaucgagaacggcugggagggcauggucgacggcugguacggcuuccgccaccagaacuccgagggcaccggccaggccgccgaccucaaguccacccaggccgccaucgaccagaucaacggcaagcucaaccgccucaucgagaagaccaacgagaaguuccaccagaucgagaaggaguucuccgaggucgagggccgcauccaggaccucgagaaguacgucgaggacaccaagaucgaccucugguccuacaacgccgagcuccucgucgcccucgagaaccagcacaccaucgaccucaccgacuccgagaugaacaagcucuucgagcgcacccgcaagcagcuccgcgagaacgccgaggacaugggcaacggcugcuucaagaucuaccacaagugcgacaacgccugcaucggcuccauccgcaacggcaccuacgaccacgacgucuaccgcgacgaggcccucaacaaccgcuuccagaucaagggcgucgagcucaaguccggcuacaaggacuggauccucuggaucuccuucgccaucuccugcuuccuccucugcgucguccuccucggcuucaucaugugggccugccagaagggcaacauccgcugcaacaucugcaucuga

SEQ ID NO: 104675 - RNA, 1701 nt, Artificial Sequence
  derived and/or modified CDS sequence (opt2) from hemagglutinin__InfluenzaA__AFH00076
augaagaccaucaucgcccucuccuacauccucugccucgucuucgcccagaagcuccccggcaacgacaacuccaccgccacccucugccucggccaccacgccguccccaacggcacccucgucaagaccaucaccaacgaccagaucgaggucaccaacgccaccgagcucguccaguccuccuccaccggcaagaucugcgacuccccccaccgcauccucgacggcaagaacugcacccucaucgacgcccuccucggcgacccccacugcgacgacuuccagaacaaggagugggaccucuucgucgagcgcuccaaggccuacuccaacugcuaccccuacgacguccccgacuacgccucccuccgcucccucgucgccuccuccggcacccucgaguucaucaacgaggacuucaacuggaccggcgucgcccaguccggcgacuccuacgccugcaagcgcggcuccgucaaguccuucuucucccgccucaacuggcuccacgaguccgaguacaaguaccccgcccucaacgucaccaugcccaacaacgacaaguucgacaagcucuacaucuggggcguccaccaccccuccaccgaccgcgagcagaccucccucuacauccgcgccuccggccgcgucaccgucuccaccaagcgcucccagcagaccgucauccccaacaucggcucccgccccuggguccgcggccucuccucccgcaucuccaucuacuggaccaucgucaagcccggcgacauccuccucaucaacuccaccggcaaccucaucgccccccgcggcuacuucaagauccgcaccggcaaguccuccaucaugcgcuccgacgcccccaucggcaccugcaacuccgagugcaucacccccaacggcuccauccccaacgacaagcccuuccagaacgucaaccgcaucaccuacggcgccugcccccgcuacgucaagcagaacacccucaagcucgccaccggcaugcgcaacguccccgagaagcagacccgcggcaucuucggcgccaucgccggcuucaucgagaacggcugggagggcauggucgacggcugguacggcuuccgccaccagaacuccgagggcaccggccaggccgccgaccucaaguccacccaggccgccaucgaccagaucaacggcaagcucaaccgccucaucgagaagaccaacgagaaguuccaccagaucgagaaggaguucuccgaggucgagggccgcauccaggaccucgagaaguacgucgaggacaccaagaucgaccucugguccuacaacgccgagcuccucgucgcccucgagaaccagcacaccaucgaccucaccgacuccgagaugaacaagcucuucgagaagacccgcaagcagcuccgcgagaacgccgaggacaugggcaacggcugcuucaagaucuaccacaagugcgacaacgccugcaucggcuccauccgcaacggcaccuacgaccacgacgucuaccgcgacgaggcccucaacaaccgcuuccagaucaagggcgucgagcucaaguccggcuacaaggacuggauccucuggaucuccuucgccaucuccugcuuccuccucugcgucguccuccucggcuucaucaugugggccugccagaagggcaacauccgcugcaacaucugcaucuga

SEQ ID NO: 104676 - RNA, 1701 nt, Artificial Sequence
  derived and/or modified CDS sequence (opt2) from hemagglutinin__InfluenzaA__AFH00087
augaagaccaucaucgcccucuccuacauccucugccucgucuucgcccagaagcuccccggcaacgacaacuccaccgccacccucugccucggccaccacgccguccccaacggcacccucgucaagaccaucaccaacgaccagaucgaggucaccaacgccaccgagcucguccaguccuccuccaccggccgcaucugcgacuccccccaccgcauccucgacggcaagaacugcacccucaucgacgcccuccucggcgacccccacugcgacggcuuccagaacaaggagugggaccucuucgucgagcgcuccgaggccuacuccuccugcuaccccuacgacguccccgacuacgccucccuccgcucccucgucgccuccuccggcacccucgaguucaucaacgaggacuucaacuggaccggcgucgcccaggacggcaaguccuacgccugcaagcgcggcuccgucaacuccuucuucucccgccucaacuggcuccacaagcucgaguacaaguaccccgcccucaacgucaccaugcccaacaacggcaaguucgacaagcucuacaucuggggcguccaccaccccuccaccgacuccgaccagaccucccucuacguccgcgccuccggccgcgucaccgucuccaccaagcgcucccagcagaccgucauccccaacaucggcucccgccccuggguccgcggccaguccucccgcaucggcaucuacuggaccaucgucaagcccggcgacauccuccucaucaacuccaccggcaaccucaucgccccccgcggcuacuucaagauccgcaacggcaaguccuccaucaugcgcuccgacgcccccaucggcaacugcuccuccgagugcaucacccccaacggcuccauccccaacgacaagcccuuccagaacgucaacaagaucaccuacggcgccugcccccgcuacgucaagcagaacacccucaagcucgccaccggcaugcgcaacguccccgagaagcagacccgcggcaucuucggcgccaucgccggcuucaucgagaacggcugggagggcauggucgacggcugguacggcuuccgccaccagaacuccgagggcaccggccaggccgccgaccucaaguccacccaggccgccaucgaccagaucaacggcaagcucaaccgccucaucgagaagaccaacgagaaguuccaccagaucgagaaggaguucuccgaggucgagggccgcauccaggaccucgagaaguacgucgaggacaccaagaucgaccucugguccuacaacgccgagcuccucgucgcccucgagaaccagcacaccaucgaccucaccgacuccgagaugaacaagcucuucgagcgcacccgcaagcagcuccgcgagaacgccgaggacaugggcaacggcugcuucaagaucuaccacaagugcgacaacgccugcaucggcuccauccgcaacggcaccuacgaccacgacgucuaccgcgacgaggcccucaacaaccgcuuccagaucaagggcgucgagcucaaguccggcuacaaggacuggauccucuggaucuccuucgccaucuccugcuuccuccucugcgucguccuccucggcuucaucaugugggccugccagaagggcaacauccgcugcaacaucugcaucuga

SEQ ID NO: 104677 - RNA, 1701 nt, Artificial Sequence
  derived and/or modified CDS sequence (opt2) from hemagglutinin__InfluenzaA__AFH00098
augaagaccaucaucgcccucuccuacauccucugccucgucuucgcccagaagcuccccggcaacgacaacuccaccgccacccucugccucggccaccacgccguccccaacggcacccucgucaagaccaucaccaacgaccagaucgaggucaccaacgccaccgagcucguccaguccuccuccaccggccgcaucugcgacuccccccaccgcauccucgacggcaagaacugcacccucaucgacgcccuccucggcgacccccacugcgacggcuuccagaacaaggagugggaccucuucgucgagcgcuccaaggccuacuccaacugcuaccccuacgacguccccgacuacgccucccuccgcucccucgucgccuccuccggcacccucgaguucaucaacgaggacuucaacuggaccggcgucgcccaggacggcggcuccuacgccugcaagcgcggcuccgucaacuccuucuucucccgccucaacuggcuccacaagcucgaguacaaguaccccgcccucaacgucaccaugcccaacaacggcaaguucgacaagcucuacaucuggggcguccaccaccccuccaccgacuccgaccagaccucccucuacguccgcgccuccggccgcgucaccgucuccaccaagcgcucccagcagaccgucauccccaacaucggcucccgccccuggguccgcggccuccccucccgcaucuccaucuacuggaccaucgucaagcccggcgacauccuccucaucaacuccaccggcaaccucaucgccccccgcggcuacuucaagauccgcaacggcaaguccuccaucaugcgcuccgacgcccccaucggcaacugcuccuccgagugcaucacccccaacggcuccauccccaacgacaagcccuuccagaacgucaaccgcaucaccuacggcgccugcccccgcuacgucaagcagaacacccucaagcucgccaccggcaugcgcaacguccccgagaagcagacccgcggcaucuucggcgccaucgccggcuucaucgagaacggcugggagggcauggucgacggcugguacggcuuccgccaccagaacuccgagggcaccggccaggccgccgaccucaaguccacccaggccgccaucgaccagaucaacggcaagcucaaccgccucaucgagaagaccaacgagaaguuccaccagaucgagaaggaguucuccgaggucgagggccgcauccaggaccucgagaaguacgucgaggacaccaagaucgaccucugguccuacaacgccgagcuccucgucgcccucgagaaccagcacaccaucgaccucaccgacuccgagaugaacaagcucuucgagcgcacccgcaagcagcuccgcgagaacgccgaggacaugggcaacggcugcuucaagaucuaccacaagugcgacaacgccugcaucggcuccauccgcaacggcaccuacgaccacgacgucuaccgcgacgaggcccucaacaaccgcuuccagaucaagggcgucgagcucaaguccggcuacaaggacuggauccucuggaucuccuucgccaucuccugcuuccuccucugcgucguccuccucggcuucaucaugugggccugccagaagggcaacauccgcugcaacaucugcaucuga

SEQ ID NO: 104678 - RNA, 1701 nt, Artificial Sequence
  derived and/or modified CDS sequence (opt2) from hemagglutinin__InfluenzaA__AFH00109
augaagaccaucaucgcccucuccuacauccucugccucgucuucgcccagaagcuccccggcaacgacaacuccaccgccacccucugccucggccaccacgccguccccaacggcacccucgucaagaccaucaccaacgaccagaucgaggucaccaacgccaccgagcucguccaguccuccuccaccggccgcaucugcgacuccccccaccgcauccucgacggcaagaacugcacccucaucgacgcccuccucggcgacccccacugcgacggcuuccagaacaaggagugggaccucuucgucgagcgcuccaaggccuacuccaacugcuaccccuacgacguccccgacuacgccucccuccgcucccucgucgccuccuccggcacccucgaguucaucaacgaggacuucaacuggaccggcgucgcccaggacggcaaguccuacaccugcaagcgcggcuccgucaacuccuucuucucccgccucaacuggcuccacaagcucgaguacaaguaccccgcccucaacgucaccaugcccaacaacggcaaguucgacaagcucuacaucuggggcguccaccaccccuccaccgacuccgaccagaccucccucuacguccgcgccuccggccgcgucaccgucuccaccaagcgcucccagcagaccgucauccccaacaucggcuuccgccccuggguccgcggccucuccucccgcaucuccaucuacuggaccaucgucaagcccggcgacauccuccucaucaacuccaccggcaaccucaucgccccccgcggcuacuucaagauccgcaacggcaaguccuccaucaugcgcuccgacgcccccaucggcaacugcuccuccgagugcaucacccccaacggcuccauccccaacgacaagcccuuccagaacgucaaccgcaucaccuacggcgccugcccccgcuacgucaagcagaacacccucaagcucgccaccggcaugcgcaacguccccgagaagcagacccgcggcaucuucggcgccaucgccggcuucaucgagaacggcugggagggcauggucgacggcugguacggcuuccgccaccagaacuccgagggcaccggccaggccgccgaccucaaguccacccaggccgccaucgaccagaucaacggcaagcucaaccgccucaucgagaagaccaacgagaaguuccaccagaucgagaaggaguucuccgaggucgagggccgcauccaggaccucgagaaguacgucgaggacaccaagaucgaccucugguccuacaacgccggccuccucgucgcccucgagaaccagcacaccaucgaccucaccgacuccgagaugaacaagcucuucgagcgcacccgcaagcagcuccgcgagaacgccgaggacaugggcaacggcugcuucaagaucuaccacaagugcgacaacgccugcaucggcuccauccgcaacggcaccuacgaccacgacgucuaccgcgacgaggcccucaacaaccgcuuccagaucaagggcgucgagcucaaguccggcuacaaggacuggauccucuggaucuccuucgccaucuccugcuuccuccucugcgucguccuccucggcuucaucaugugggccugccagaagggcaacauccgcugcaacaucugcaucuga

SEQ ID NO: 104679 - RNA, 1701 nt, Artificial Sequence
  derived and/or modified CDS sequence (opt2) from hemagglutinin__InfluenzaA__AFH00120
augaagaccaucaucgcccucuccuacauccucugccucgucuucgcccagaagcuccccggcaacgacaacuccaccgccacccucugccucggccaccacgccguccccaacggcacccucgucaagaccaucaccaacgaccagaucgaggucaccaacgccaccgagcucguccaguccuccuccaccggccgcaucugcgacuccccccaccgcauccucgacggcaagaacugcacccucaucgacgcccuccucggcgacccccacugcgacggcuuccagaacaaggagugggaccucuucgucgagcgcuccaaggccuacuccaacugcuaccccuacgacguccccgacuacgccucccuccgcucccucgucgccuccuccggcacccucgaguucaucaacgaggacuucaacuggaccggcgucgcccaggacggcaaguccuacgccugcaagcgcggcuccgucaacuccuucuucucccgccucaacuggcuccacaagcucgaguacaaguaccccgcccucaacgucaccaugcccaacaacggcaaguucgacaagcucuacaucuggggcguccaccaccccuccaccgacuccgaccagaccucccucuacguccgcgccuccggccgcgucaccgucuccaccaagcgcucccagcagaccgucauccccaacaucggcuuccgccccuggguccgcggccucuccucccgcaucuccaucuacuggaccaucgucaagcccggcgacauccuccucaucaacuccaccggcaaccucaucgccccccgcggcuacuucaagauccgcaacggcaaguccuccaucaugcgcuccgacgcccccaucggcaacugcuccuccgagugcaucacccccaacggcuccauccccaacgacaagcccuuccagaacgucaaccgcaucaccuacggcgccugcccccgcuacgucaagcagaacacccucaagcucgccaccggcaugcgcaacguccccgagaagcagacccgcggcaucuucggcgccaucgccggcuucaucgagaacggcugggagggcauggucgacggcugguacggcuuccgccaccagaacuccgagggcaccggccaggccgccgaccucaaguccacccaggccgccaucgaccagaucaacggcaagcucaaccgccucaucgagaagaccaacgagaaguuccaccagaucgagaaggaguucuccgaggucgagggccgcauccaggaccucgagaaguacgucgaggacaccaagaucgaccucugguccuacaacgccggccuccucgucgcccucgagaaccagcacaccaucgaccucaccgacuccgagaugaacaagcucuucgagcgcacccgcaagcagcuccgcgagaacgccgaggacaugggcaacggcugcuucaagaucuaccacaagugcgacaacgccugcaucggcuccauccgcaacggcaccuacgaccacgacgucuaccgcgacgaggcccucaacaaccgcuuccagaucaagggcgucgagcucaaguccggcuacaaggacuggauccucuggaucuccuucgccaucuccugcuuccuccucugcgucguccuccucggcuucaccaugugggccugccagaagggcaacauccgcugcaacaucugcaucuga

SEQ ID NO: 104680 - RNA, 1701 nt, Artificial Sequence; identical to SEQ ID NO: 104534
  derived and/or modified CDS sequence (opt2) from hemagglutinin__InfluenzaA__AFH00131

SEQ ID NO: 104681 - RNA, 1701 nt, Artificial Sequence
  derived and/or modified CDS sequence (opt2) from hemagglutinin__InfluenzaA__AFH00153
augaagaccaucaucgcccucuccuacauccucugccucgucuucgcccagaagcuccccggcaacgacaacuccaccgccacccucugccucggccaccacgccguccccaacggcacccucgucaagaccaucaccaacgaccagaucgaggucaccaacgccaccgagcucguccaguccuccuccaccggccgcaucugcgacuccccccaccgcauccucgacggcaagaacugcacccucaucgacgcccuccucggcgacccccacugcgacggcuuccagaacaaggagugggaccucuucgucgagcgcuccaaggccuacuccaacugcuaccccuacgacguccccgacuacgccucccuccgcucccucgucgccuccuccggcacccucgaguucaucaacgaggacuucaacuggaccggcgucgcccaggacggcaaguccuacgccugcaagcgcggcuccgucaacuccuucuucucccgccucaacuggcuccacaagcucgaguacaaguaccccgcccucaacgucaccaugcccaacaacggcaaguucgacaagcucuacaucuggggcguccaccaccccuccaccgacuccgaccagaccucccucuacauccgcgccuccggccgcgucaccgucuccaccaagcgcucccagcagaccgucauccccaacaucggcucccgccccuggguccgcggccucuccucccgcaucuccaucuacuggaccaucgucaagcccggcgacauccuccucaucaacuccaccggcaaccucaucgccccccgcggcuacuucaagauccgcaacggcaaguccuccaucaugcgcuccgacgcccccaucggcaacugcuccuccgagugcaucacccccaacggcuccauccccaacgacaagcccuuccagaacgucaaccgcaucaccuacggcgccugcccccgcuacgucaagcagaacacccucaagcucgccaccggcaugcgcaacguccccgagaagcagacccgcggcaucuucggcgccaucgccggcuucaucgagaacggcugggagggcauggucgacggcugguacggcuuccgccaccagaacuccgagggcaccggccaggccgccgaccucaaguccacccaggccgccaucgaccagaucaacggcaagcucaaccgccucaucgagaagaccaacgagaaguuccaccagaucgagaaggaguucuccgaggucgagggccgcauccaggaccucgagaaguacgucgaggacaccaagaucgaccucugguccuacaacgccgagcuccucgucgcccucgagaaccagcacaccaucgaccucaccgacuccgagaugaacaagcucuucgagcgcacccgcaagcagcuccgcgagaacgccgaggacaugggcaacggcugcuucaagaucuaccacaagugcgacaacgccugcaucggcuccauccgcaacggcaccuacgaccacgacgucuaccgcgacgaggcccucaacaaccgcuuccagaucaagggcgucgagcucaaguccggcuacaaggacuggauccucuggaucuccuucgccaucuccugcuuccuccucugcgucguccuccucggcuucaucaugugggccugccagaagggcaacauccgcugcaacaucugcaucuga

SEQ ID NO: 104682 - RNA, 1701 nt, Artificial Sequence
  derived and/or modified CDS sequence (opt2) from hemagglutinin__InfluenzaA__AFH00164
augaagaccaucaucgcccucuccuacauccucugccucgucuucgcccagaagcuccccggcaacgacaacuccaccgccacccucugccucggccaccacgccguccccaacggcacccucgucaagaccaucaccaacgaccagaucgaggucaccaacgccaccgagcucguccaguccuccuccaccggccgcaucugcgacuccccccaccgcauccucgacggcaagaacugcacccucauggacgcccuccucggcgacccccacugcgacggcuuccagaacaaggagugggaccucuucgucgagcgcuccaaggccuacuccaacugcuaccccuacgacguccccgacuacgccucccuccgcucccucgucgccuccuccggcacccucgaguucaucaacgaggacuucaacuggaccggcgucgcccagaacggcgacuccuacgccugcaagcgcggcuccgucaaguccuucuucucccgccucaacuggcuccacgaguccgaguacaaguaccccgcccucaacgucaccaugcccaacaacgacaaguucgacaagcucuacaucuggggcguccaccaccccuccaccgaccgcgagcagaccucccucuacauccgcgccuccggccgcgucaccgucuccaccaagcgcucccagcagaccgucauccccaacaucggcucccgccccuggguccgcggccucuccucccgcaucuccaucuacuggaccaucgucaagcccggcgacauccuccucaucaacuccaccggcaaccucaucgccccccgcggcuacuucaagauccgcaccggcaaguccuccaucaugcgcuccgacgcccccaucggcaccugcuccuccgagugcaucacccccaacggcuccauccccaacgacaagcccuuccagaacgucaaccgcaucaccuacggcgccugcccccgcuacgucaagcagaacacccucaagcucgccaccggcaugcgcaacguccccgagaagcagacccgcggcaucuucggcgccaucgccggcuucaucgagaacggcugggagggcauggucgacggcugguacggcuuccgccaccagaacuccgagggcaccggccaggccgccgaccucaaguccacccaggccgccaucgaccagaucaacggcaagcucaaccgccucaucgagaagaccaacgagaaguuccaccagaucgagaaggaguucuccgaggucgagggccgcauccaggaccucgagaaguacgucgaggacaccaagaucgaccucugguccuacaacgccgagcuccucgucgcccucgagaaccagcacaccaucgaccucaccgacuccgagaugaacaagcucuucgagaagacccgcaagcagcuccgcgagaacgccgaggacaugggcaacggcugcuucaagaucuaccacaagugcgacaacgccugcaucggcuccauccgcaacggcaccuacgaccacgacgucuaccgcgacgaggcccucaacaaccgcuuccagaucaagggcgucgagcucaaguccggcuacaaggacuggauccucuggaucuccuucgccaucuccugcuuccuccucugcgucguccuccucggcuucaucaugugggccugccagaagggcaacauccgcugcaacaucugcaucuga

SEQ ID NO: 104683 - RNA, 1701 nt, Artificial Sequence
  derived and/or modified CDS sequence (opt2) from hemagglutinin__InfluenzaA__AFH00175
augaagaccaucaucgcccucuccuacauccucugccucgucuucgcccagaagcuccccggcaacgacaacuccaccgccacccucugccucggccaccacgccguccccaacggcacccucgucaagaccaucaccaacgaccagaucgaggucaccaacgccaccgagcucguccaguccuccuccaccggccgcaucugcgacuccccccaccgcauccucgacggcaagaacugcacccucaucgacgcccuccucggcgacccccacugcgacggcuuccagaacaaggagugggaccucuucgucgagcgcuccaaggccuacuccaacugcuaccccuacgacguccccgacuacgccucccuccgcucccucgucgccuccuccggcacccucgaguucaucaacgaggacuucaacuggaccggcgucgcccaggacggcaaguccuacgccugcaagcgcggcuccgucaaguccuucuucucccgccucaacuggcuccacaagcucgaguacaaguaccccgcccucaacgucaccaugcccaacaacggcaaguucgacaagcucuacaucuggggcguccaccaccccuccaccgacuccgaccagaccucccucuacguccgcgccuccggccgcgucaccgucuccaccaagaagucccagcagaccgucauccccaacaucggcucccgccccuggguccgcggccaguccucccgcaucuccaucuacuggaccaucgucaagcccggcgacauccuccucaucaacuccaccggcaaccucaucgccccccgcggcuacuucaagauccgcaacggcaaguccuccaucaugcgcuccgacgcccccaucggcaacugcuccuccgagugcaucacccccaacggcuccauccccaacgacaagcccuuccagaacgucaaccgcaucaccuacggcgccugcccccgcuacgucaagcagaacacccucaagcucgccaccggcaugcgcaacguccccgagaagcagacccgcggcaucuucggcgccaucgccggcuucaucgagaacggcugggagggcauggucgacggcugguacggcuuccgccaccagaacuccgagggcaccggccaggccgccgaccucaaguccacccaggccgccaucgaccagaucaacggcaagcucaaccgccucaucgagaagaccaacgagaaguuccaccagaucgagaaggaguucuccgaggucgagggccgcauccaggaccucgagaaguacgucgaggacaccaagaucgaccucugguccuacaacgccgagcuccucgucgcccucgagaaccagcacaccaucgaccucaccgacuccgagaugaacaagcucuucgagcgcacccgcaagcagcuccgcgagaacgccgaggacaugggcaacggcugcuucaagaucuaccacaagugcgacaacgccugcaucggcuccauccgcaacggcaccuacgaccacgacgucuaccgcgacgaggcccucaacaaccgcuuccagaucaagggcgucgagcucaaguccggcuacaaggacuggauccucuggaucuccuucgccaucuccugcuuccuccucugcgucguccuccucggcuucaucaugugggccugccagaagggcaacauccgcugcaacaucugcaucuga

SEQ ID NO: 104684 - RNA, 1701 nt, Artificial Sequence
  derived and/or modified CDS sequence (opt2) from hemagglutinin__InfluenzaA__AFH00186
augaagaccaucaucgcccucucccacauccucugccucgucuucgcccagaagcuccccggcaacgacaacuccaccgccacccucugccucggccaccacgccguccccaacggcacccucgucaagaccaucaccaacgaccagaucgaggucaccaacgccaccgagcucguccaguccuccuccaccggccgcaucugcgacuccccccaccgcauccucgacggcaagaacugcacccucaucgacgcccuccucggcgacccccacugcgacggcuuccagaacaaggagugggaccucuucgucgagcgcuccaaggccuacuccaacugcuaccccuacgacguccccgacuacgccucccuccgcucccucgucgccuccuccggcacccucgaguucaucaacgaggacuucaacuggaccggcgucgcccaggacggcggcuccuacgccugcaagcgcggcuccgucaacuccuucuucucccgccucaacuggcuccacaagcucgaguacaaguaccccgcccucaacgucaccaugcccaacaacggcaaguucgacaagcucuacaucuggggcguccaccaccccuccaccgacuccgaccagaccucccucuacguccgcgccuccggccgcgucaccgucuccaccaagcgcucccagcagaccgucacccccaacaucggcucccgccccuggguccgcggccaguccucccgcaucuccaucuacuggaccaucgucaagcccggcgacauccuccucaucuccuccaccggcaaccucaucgccccccgcggcuacuucaagauccgcaacggcaaguccuccaucaugcgcuccgacguccccaucggcaacugcuccuccgagugcaucacccccaacggcuccauccccaacgacaagcccuuccagaacgucaaccgcaucaccuacggcgccugcccccgcuacgucaagcagaacacccucaagcucgccaccggcaugcgcaacguccccgagaagcagacccgcggcaucuucggcgccaucgccggcuucaucgagaacggcugggagggcauggucgacggcugguacggcuuccgccaccagaacuccgagggcaccggccaggccgccgaccucaaguccacccaggccgccaucgaccagaucaacggcaagcucaaccgccucaucgagaagaccaacgagaaguuccaccagaucgagaaggaguucuccgaggucgagggccgcauccaggaccucgagaaguacgucgaggacaccaagaucgaccucugguccuacaacgccgagcucaucgucgcccucgagaaccagcacaccaucgaccucaccgacuccgagaugaacaagcucuucgagaagacccgcaagcagcuccgcgagaacgccgaggacaugggcaacggcugcuucaagaucuaccacaagugcgacaacgccugcaucggcuccauccgcaacggcaccuacgaccacgacgucuaccgcgacgaggcccucaacaaccgcuuccagaucaagggcgucgagcucaaguccggcuacaaggacuggauccucuggaucuccuucgccaucuccugcuuccuccucugcgucguccuccucggcuucaucaugugggccugccagaagggcaacauccgcugcaacaucugcaucuga

SEQ ID NO: 104685 - RNA, 1701 nt, Artificial Sequence
  derived and/or modified CDS sequence (opt2) from hemagglutinin__InfluenzaA__AFH00197
augaagaccaucaucgcccucuccuacauccucugccucgucuucgcccagaagcuccccggcaacgacaacuccaccgccacccucugccucggccaccacgccguccccaacggcacccucgucaagaccaucaccaacgaccagaucgaggucaccaacgccaccgagcucguccaguccuccuccaccggccgcaucugcgacuccccccaccgcauccucgacggcaagaacugcacccucaucgacgcccuccucggcgacccccacugcgacggcuuccagaacaaggagugggaccucuucgucgagcgcuccaaggccuacuccaacugcuaccccuacgacguccccgacuacgccucccuccgcucccucgucgccuccuccggcacccucgaguucaucaacgaggacuucaacuggaccggcgucgcccaggacggcggcuccuacaccugcaagcgcggcuccgucaacuccuucuucucccgccucaacuggcuccacaagcucgaguacaaguaccccgcccucaacgucaccaugcccaacaacggcaaguucgacaagcucuacaucuggggcguccaccaccccuccaccgacuccgaccagaccucccucuacguccgcgccuccggccgcgucaccgucuccaccaagaucucccagcagaccgucauccccaacaucggcucccgccccuggguccgcggccucuccucccgcaucuccaucuacuggaccaucgucaagcccggcgacauccuccucaucaacuccaccggcaaccucaucgccccccgcggcuacuucaagauccgcaacggcaaguccuccaucaugcgcuccgacgcccccaucggcaacugcuccuccgagugcaucacccccaacggcuccauccccaacgacaagcccuuccagaacgucaaccgcaucaccuacggcgccugcccccgcuacgucaagcagaacacccucaagcucgccaccggcaugcgcaacguccccgagaagcagacccgcggcaucuucggcgccaucgccggcuucaucgagaacggcugggagggcauggucgacggcugguacggcuuccgccaccagaacuccgagggcaccggccaggccgccgaccucaaguccacccaggccgccaucgaccagaucaacggcaagcucaaccgccucaucgagaagaccaacgagaaguuccaccagaucgagaaggaguucuccgaggucgagggccgcauccaggaccucgagaaguacgucgaggacaccaagaucgaccucugguccuacaacgccgagcuccucgucgcccucgagaaccagcacaccaucgaccucaccgacuccgagaugaacaagcucuucgagcgcacccgcaagcagcuccgcgagaacgccgaggacaugggcaacggcugcuucaagaucuaccacaagugcgacaacgccugcaucggcuccauccgcaacggcaccuacgaccacgacgucuaccgcgacgaggcccucaacaaccgcuuccagaucaagggcgucgagcucaaguccggcuacaaggacuggauccucuggaucuccuucgccaucuccugcuuccuccucugcgucguccuccucggcuucaucaugugggccugccagaagggcaacauccgcugcaacaucugcaucuga

SEQ ID NO: 104686 - RNA, 1701 nt, Artificial Sequence
  derived and/or modified CDS sequence (opt2) from hemagglutinin__InfluenzaA__AFH00208
augaagaccaucaucgcccucuccuacauccucugccucgucuucgcccagaagcuccccggcaacgacaacuccaccgccacccucugccucggccaccacgccguccccaacggcacccucgucaagaccaucaccaacgaccagaucgaggucaccaacgccaccgagcucguccaguccuccuccaccggccgcaucugcgacuccccccaccgcauccucgacggcaagaacugcacccucaucgacgcccuccucggcgacccccacugcgacggcuuccagaacaaggagugggaccucuucgucgagcgcuccaaggccuacuccaacugcuaccccuacgacguccccgacuacgccucccuccgcucccucgucgccuccuccggcacccucgaguucaucaacgaggacuucaacuggaccggcgucgcccagaacggcgacuccuacgccugcaagcgcggcuccgucaaguccuucuucucccgccucaacuggcuccacgaguccgaguacaaguaccccgcccucaacgucaccaugcccaacaacgacaaguucgacaagcucuacaucuggggcguccaccaccccuccaccgaccgcgagcagaccucccucuacauccgcgccuccggccgcgucaccgucuccaccaagcgcucccagcagaccgucauccccaacaucggcucccgccccuggguccgcggccucuccucccgcaucuccaucuacuggaccaucgucaagcccggcgacauccuccucaucaacuccaccggcaaccucaucgccccccgcggcuacuucaagauccgcaccggcaaguccuccgucaugcgcuccgacgcccccaucggcaccugcuccuccgagugcaucacccccaacggcuccauccccaacgacaagcccuuccagaacgucaaccgcaucaccuacggcgccugcccccgcuacgucaagcagaacacccucaagcucgccaccggcaugcgcaacguccccgagaagcagacccgcggcaucuucggcgccaucgccggcuucaucgagaacggcugggagggcauggucgacggcugguacggcuuccgccaccagaacuccgagggcaccggccaggccgccgaccucaaguccacccaggccgccaucgaccagaucaacggcaagcucucccgccucaucgagaagaccaacgagaaguuccaccagaucgagaaggaguucuccgaggucgagggccgcauccaggaccucgagaaguacgucgaggacaccaagaucgaccucugguccuacaacgccgagcuccucgucgcccucgagaaccagcacaccaucgaccucaccgacuccgagaugaacaagcucuucgagaagacccgcaagcagcuccgcgagaacgccgaggacaugggcaacggcugcuucaagaucuaccacaagugcgacaacgccugcaucggcuccauccgcaacggcaccuacgaccacgacgucuaccgcgacgaggcccucaacaaccgcuuccagaucaagggcgucgagcucaaguccggcuacaaggacuggauccucuggaucuccuucgccaucuccugcuuccuccucugcgucguccuccucggcuucaucaugugggccugccagaagggcaacauccgcugcaacaucugcaucuga

SEQ ID NO: 104687 - RNA, 1701 nt, Artificial Sequence
  derived and/or modified CDS sequence (opt2) from hemagglutinin__InfluenzaA__AFH00219
augaagaccaucaucgcccucuccuacauccucugccucgucuucgcccagaagcuccccggcaacgacaacuccaccgccacccucugccucggccaccacgccguccccaacggcacccucgucaagaccaucaccaacgaccagaucgaggucaccaacgccaccgagcucguccaguccuccuccaccggccgcaucugcgacuccccccaccgcauccucgacggcaagaacugcacccucaucgacgcccuccucggcgaccccaacugcgacggcuuccagaacaaggagugggaccucuucgucgagcgcuccaaggccuacuccaacugcuaccccuacgacguccccgacuacgccucccuccgcucccucgucgccuccuccggcacccucgaguucaccaacgaggacuucaacuggaccggcgucgcccaggacggcggcuccuacgccugcaagcgcggcuccgucaacuccuucuucucccgccucaacuggcuccacaagcucgaguacaaguaccccgcccucaacgucaccaugcccaacaacggcaaguucgacaagcucuacaucuggggcguccaccaccccuccaccgacuccgaccagaccucccucuacguccgcgccuccggccgcgucaccgucuccaccaagcgcucccagcagaccgucacccccaacaucggcucccgccccuggguccgcggccucuccucccgcaucuccaucuacuggaccaucgucaagcccggcgacauccuccucaucaacuccaccggcaaccucaucgccccccgcggcuacuucaagauccgcaacggcaaguccuccaucaugcgcuccgacgcccccaucggcaccugcuccuccgagugcaucacccccaacggcuccauccccaacgacaagcccuuccagaacgucaaccgcaucaccuacggcgccugcccccgcuacgucaagcagaacacccucaagcucgccaccggcaugcgcaacguccccgagaagcagacccgcggcaucuucggcgccaucgccggcuucaucgagaacggcugggagggcauggucgacggcugguacggcuuccgccaccagaacuccgagggcaccggccaggccgccgaccucaaguccacccaggccgccaucgaccagaucaacggcaagcucaaccgccucaucgacaagaccaacgagaaguuccaccagaucgagaaggaguucuccgaggucgagggccgcauccaggaccucgagaaguacgucgaggacaccaagaucgaccucugguccuacaacgccgagcuccucgucgcccucgagaaccagcacaccaucgaccucaccgacuccgagaugaacaagcucuucgagaagacccgcaagcagcuccgcgagaacgccgaggacaugggcaacggcugcuucaagaucuaccacaagugcgacaacgccugcaucggcuccauccgcaacggcaccuacgaccacgacgucuaccgcgacgaggcccucaacaaccgcuuccagaucaagggcgucgagcucaaguccggcuacaaggacuggauccucuggaucuccuucgccaucuccugcuuccuccucugcgucguccuccucggcuucaucaugugggccugccagaagggcaacauccgcugcaacaucugcaucuga

SEQ ID NO: 104688 - RNA, 1701 nt, Artificial Sequence
  derived and/or modified CDS sequence (opt2) from hemagglutinin__InfluenzaA__AFH00230
augaagaccaucaucgcccucuccuacauccucugccucgucuucgcccagaagcuccccggcaacgacaacuccaccgccacccucugccucggccaccacgccguccccaacggcacccucgucaagaccaucaccaacgaccagaucgaggucaccaacgccaccgagcucguccaguccuccuccaccggccgcaucugcgacuccccccaccgcauccucgacggcaagaacugcacccucaucgacgcccuccucggcgacccccacugcgacggcuuccagaacaaggagugggaccucuucgucgagcgcuccaaggccuacuccaacugcuaccccuacgacguccccgacuacgccucccuccgcucccucgucgccuccuccggcacccucgaguucaucaacgaggacuucaacuggaccggcgucgcccaggacggcaaguccuacgccugcaagcgcggcuccgucaaguccuucuucucccgccucaacuggcuccacaagcucgaguacaaguaccccgcccucaacgucaccaugcccaacaacggcaaguucgacaagcucuacaucuggggcguccaccaccccuccaccaacuccgaccagaccucccucuacguccgcgccuccggccgcgucaccgucuccaccaagcgcucccagcagaccgucauccccaacaucggcuuccgccccuggguccgcggccucuccucccgcaucuccaucuacuggaccaucgucaagcccggcgacauccuccucaucaacuccaccggcaaccucaucgccccccgcggcuacuucaagauccgcaacggcaaguccuccaucaugcgcuccgacgcccccaucggcaacugcuccuccgagugcaucacccccaacggcuccauccccaacgacaagcccuuccagaacgucaaccgcaucaccuacggcgccugcccccgcuacgucaagcagaacacccucaagcucgccaccggcaugcgcaacguccccgagaagcagacccgcggcaucuucggcgccaucgccggcuucaucgagaacggcugggagggcauggucgacggcugguacggcuuccgccaccagaacuccgagggcaccggccaggccgccgaccucaaguccacccaggccgccaucgaccagaucaacggcaagcucaaccgccucaucgagaagaccaacgagaaguuccaccagaucgagaaggaguucuccgaggucgagggccgcauccaggaccucgagaaguacgucgaggacaccaagaucgaccucugguccuacaacgccggccuccucgucgcccucgagaaccagcacaccaucgaccucaccgacuccgagaugaacaagcucuucgagcgcacccgcaagcagcuccgcgagaacgccgaggacaugggcaacggcugcuucaagaucuaccacaagugcgacaacgccugcaucggcuccauccgcaacggcaccuacgaccacgacgucuaccgcgacgaggcccucaacaaccgcuuccagaucaagggcgucgagcucaaguccggcuacaaggacuggauccucuggaucuccuucgccaucuccugcuuccuccucugcgucguccuccucggcuucaucaugugggccugccagaagggcaacauccgcugcaacaucugcaucuga

SEQ ID NO: 104689 - RNA, 1701 nt, Artificial Sequence; identical to SEQ ID NO: 97060
  derived and/or modified CDS sequence (opt2) from hemagglutinin__InfluenzaA__AFH00241

SEQ ID NO: 104690 - RNA, 1701 nt, Artificial Sequence
  derived and/or modified CDS sequence (opt2) from hemagglutinin__InfluenzaA__AFH00252
augaagaccaucaucgcccucuccuacauccucugccucgucuucgcccagaagcuccccggcaacgacaacuccaccgccacccucugccucggccaccacgccguccccaacggcacccucgucaagaccaucaccaacgaccagaucgaggucaccaacgccaccgagcucguccaguccuccuccaccggccgcaucugcgacuccccccaccgcauccucgacggcaagaacugcacccucaucgacgcccuccucggcgacccccacugcgacgacuuccagaacaaggagugggaccucuucgucgagcgcuccaaggccuacuccaacugcuaccccuacgacguccccgacuacgccucccuccgcucccucgucgccuccuccggcacccucgaguucaucaacgaggacuucaacuggaccggcgucgcccaguccggcgacuccuacgccugcaagcgcggcuccgucaaguccuucuucucccgccucaacuggcuccacgaguccgaguacaaguaccccgcccucaacgucaccaugcccaacaacgacaaguucgacaagcucuacaucuggggcguccaccaccccuccaccgaccgcgagcagaccucccucuacauccgcgccuccggccgcgucaccgucuccaccaagcgcucccagcagaccgucauccccaacaucggcucccgccccuggguccgcggccucuccucccgcaucuccaucuacuggaccaucgucaagcccggcgacauccuccucaucaacuccaccggcaaccucaucgccccccgcggcuacuucaagauccgcaccggcaaguccuccaucaugcgcuccgacgcccccaucggcaccugcuccuccgagugcaucacccccaacggcuccauccccaacgacaagcccuuccagaacgucaaccgcaucaccuacggcgccugcccccgcuacgucaagcagaacacccucaagcucgccaccggcaugcgcaacguccccgagaagcagacccgcggcaucuucggcgccaucgccggcuucaucgagaacggcugggagggcauggucgacggcugguacggcuuccgccaccagaacuccgagggcaccggccaggccgccgaccucaaguccacccaggccgccaucgaccagaucaacggcaagcucaaccgccucaucgagaagaccaacgagaaguuccaccagaucgagaaggaguucuccgaggucgagggccgcauccaggaccucgagaaguacgucgaggacaccaagaucgaccucugguccuacaacgccgagcuccucgucgcccucgagaaccagcacaccaucgaccucaccgacuccgagaugaacaagcucuucgagaagacccgcaagcagcuccgcgagaacgccgaggacaugggcaacggcugcuucaagaucuaccacaagugcgacaacgccugcaucggcuccauccgcaacggcaccuacgaccacgacgucuaccgcgacgaggcccucaacaaccgcuuccagaucaagggcgucgagcucaaguccggcuacaaggacuggauccucuggaucuccuucgccaucuccugcuuccuccucugcgucguccuccucggcuucaucaugugggccugccagaagggcaacauccgcugcaacaucugcaucuga

SEQ ID NO: 104691 - RNA, 1701 nt, Artificial Sequence
  derived and/or modified CDS sequence (opt2) from hemagglutinin__InfluenzaA__AFH00263
augaagaccaucaucgcccucuccuacauccuccaccucgucuucgcccagaagcuccccggcaacgacaacuccaccgccacccucugccucggccaccacgccguccccaacggcacccucgucaagaccaucaccaacgaccagaucgaggucaccaacgccaccgagcucguccaguccuccuccaccggccgcaucugcgacuccccccaccgcauccucgacggcaagaacugcacccucaucgacgcccuccucggcgaccccaacugcgacggcuuccagaacaaggagugggaccucuucgucgagcgcuccaaggccuacuccaacugcuaccccuacgacguccccgacuacgccucccuccgcucccucgucgccuccuccggcacccucgaguucaccaacgaggacuucaacuggaccggcgucgcccaggacggcggcuccuacgccugcaagcgcggcuccgucaacuccuucuucucccgccucaacuggcuccacaagcucgaguacaaguaccccgcccucaacgucaccaugcccaacaacggcaaguucgacaagcucuacaucuggggcguccaccaccccuccaccgacuccguccagaccucccucuacguccgcgccuccggcaaggucaccgucuccaccaagcgcucccagcagaccgucacccccaacaucggcuccaagcccuggguccgcggccucuccucccgcaucuccaucuacuggaccaucgucaagcccggcgacauccuccucaucaacuccaccggcaaccucaucgccccccgcggcuacuucaagauccgcaacggcaaguccuccaucaugcgcuccgacgcccccaucggcaccugcuccuccgagugcaucacccccaacggcuccauccccaacgacaagcccuuccagaacgucaaccgcaucaccuacggcgccugcccccgcuacgucaagcagaacacccucaagcucgccaccggcaugcgcaacguccccgagaagcagacccgcggcaucuucggcgccaucgccggcuucaucgagaacggcugggagggcauggucgacggcugguacggcuuccgccaccagaacuccgagggcaccggccaggccgccgaccucaaguccacccaggccgccaucgaccagaucaacggcaagcucaaccgccucaucgagaagaccaacgagaaguuccaccagaucgagaaggaguucuccgaggucgagggccgcauccaggaccucgagaaguacgucgaggacaccaagaucgaccucugguccuacaacgccgagcuccucgucgcccucgagaaccagcacaccaucgaccucaccgacuccgagaugaacaagcucuucgagaagacccgcaagcagcuccgcgagaacgccgaggacaugggcaacggcugcuucaagaucuaccacaagugcgacaacgccugcaucggcuccauccgcaacggcaccuacgaccacgacgucuaccgcgacgaggcccucaacaaccgcuuccagaucaagggcgucgagcucaaguccggcuacaaggacuggauccucuggaucuccuucgccaucuccugcuuccuccucugcgucguccuccucggcuucaucaugugggccugccagaagggcaacauccgcugcaacaucugcaucuga

SEQ ID NO: 104692 - RNA, 1701 nt, Artificial Sequence
  derived and/or modified CDS sequence (opt2) from hemagglutinin__InfluenzaA__AFH00274
augaagaccaucaucgcccucuccuacauccucugccucgucuucgcccagaagcuccccggcaacgacaacuccaccgccacccucugccucggccaccacgccguccccaacggcacccucgucaagaccaucaccaacgaccagaucgaggucaccaacgccaccgagcucguccaguccuccuccaccggccgcaucugcgacuccccccaccgcauccucgacggcaagaacugcacccucaucgacgcccuccucggcgacccccacugcgacggcuuccagaacaaggagugggaccucuucgucgagcgcuccaaggccuacuccaacugcuaccccuacgacguccccgacuacgccucccuccgcucccucgucgccuccuccggcacccucgaguucaucaacgaggacuucaacuggaccggcgucgcccaggacggcaaguccuacgccugcaagcgcggcuccgucaacuccuucuucucccgccucaacuggcuccacaagcucgaguacaaguaccccgcccucaacgucaccaugcccaacaacggcaaguucgacaagcucuacaucuggggcguccaccaccccuccaccgacuccgaccagaccucccucuacguccgcgccuccggccgcgucaccgucuccaccaagcgcucccagcagaccgucauccccaacaucggcuuccgccccuggguccgcggccucuccuccggcaucuccaucuacuggaccaucgucaagcccggcgacauccuccucaucaacuccaccggcaaccucaucgccccccgcggcuacuucaagauccgcaacggcaaguccuccaucaugcgcuccgacgcccccaucggcaacugcuccuccgagugcaucacccccaacggcuccauccccaacgacaagcccuuccagaacgucaaccgcaucaccuacggcgccugcccccgcuacgucaagcagaacacccucaagcucgccaccggcaugcgcaacguccccgagaagcagacccgcggcaucuucggcgccaucgccggcuucaucgagaacggcugggagggcauggucgacggcugguacggcuuccgccaccagaacuccgagggcaccggccaggccgccgaccucaaguccacccaggccgccaucgaccagaucaacggcaagcucaaccgccucaucgagaagaccaacgagaaguuccaccagaucgagaaggaguucuccgaggucgagggccgcauccaggaccucgagaaguacgucgaggacaccaagaucgaccucugguccuacaacgccggccuccucgucgcccucgagaaccagcacaccaucgaccucaccgacuccgagaugaacaagcucuucgagcgcacccgcaagcagcuccgcgagaacgccgaggacaugggcaacggcugcuucaagaucuaccacaagugcgacaacgccugcaucggcuccauccgcaacggcaccuacgaccacgacgucuaccgcgacgaggcccucaacaaccgcuuccagaucaagggcgucgagcucaaguccggcuacaaggacuggauccucuggaucuccuucgccaucuccugcuuccuccucugcgucguccuccucggcuucaucaugugggccugccagaagggcaacauccgcugcaacaucugcaucuga

SEQ ID NO: 104693 - RNA, 1701 nt, Artificial Sequence
  derived and/or modified CDS sequence (opt2) from hemagglutinin__InfluenzaA__AFH00285
augaagaccaucaucgcccucuccuacauccucugccucgucuucgcccagaagcuccccggcaacgacaacuccaccgccacccucugccucggccaccacgccguccccaacggcacccucgucaagaccaucaccaacgaccagaucgaggucaccaacgccaccgagcucguccaguccuccuccaccggccgcaucugcggcuccccccaccgcauccucgacggcaagaacugcacccucaucgacgcccuccucggcgacccccacugcgacggcuuccagaacaaggagugggaccucuucgucgagcgcuccaaggccuacuccaacugcuaccccuacgacguccccgacuacgccucccuccgcucccucgucgccuccuccggcacccucgaguucaucaacgaggacuucaacuggaccggcgucgcccaggacggcggcuccuacgccugcaagcgcggcuccgucaacuccuucuucucccgccucaacuggcuccacaagcucgaguacaaguaccccgcccucaacgucaccaugcccaacaacggcaaguucgacaagcucuacaucuggggcguccaccaccccuccaccgacuccgaccagaccucccucuacguccgcgccuccggccgcgucaccgucuccaccaagcgcucccagcagaccgucacccccaacaucggcucccgccccuggguccgcggccaguccucccgcaucuccaucuacuggaccaucgucaagcccggcgacauccuccucaucaacuccaccggcaaccucaucgccccccgcggcuacuucaagauccgcaacggcaaguccuccaucaugcgcuccgacgcccccaucggcaacugcuccuccgagugcaucacccccaacggcuccauccccaacgacaagcccuuccagaacgucaaccgcaucaccuacggcgccugcccccgcuacgucaagcagaacacccucaagcucgccaccggcaugcgcaacguccccgagaagcagacccgcggcaucuucggcgccaucgccggcuucaucgagaacggcugggagggcauggucgacggcugguacggcuuccgccaccagaacuccgagggcaccggccaggccgccgaccucaaguccacccaggccgccaucgaccagaucaacggcaagcucaaccgccucaucgagaagaccaacgagaaguuccaccagaucgagaaggaguucuccgaggucgagggccgcauccaggaccucgagaaguacgucgaggacaccaagaucgaccucugguccuacaacgccgagcuccucgucgcccucgagaaccagcacaccaucgaccucaccgacuccgagaugaacaagcucuucgagaagacccgcaagcagcuccgcgagaacgccgaggacaugggcaacggcugcuucaagaucuaccacaagugcgacaacgccugcaucggcuccauccgcaacggcaccuacgaccacgacgucuaccgcgacgaggcccucaacaaccgcuuccagaucaagggcgucgagcucaaguccggcuacaaggacuggauccucuggaucuccuucgccaucuccugcuuccuccucugcgucguccuccucggcuucaucaugugggccugccagaagggcaacauccgcugcaacaucugcaucuga

SEQ ID NO: 104694 - RNA, 1701 nt, Artificial Sequence
  derived and/or modified CDS sequence (opt2) from hemagglutinin__InfluenzaA__AFH00296
augaagaccaucaucgcccucuccuacaucuucugccucgucuucgcccagaagcuccccggcaacgacaacuccaccgccacccucugccucggccaccacgccguccccaacggcacccucgucaagaccaucaccaacgaccagaucgaggucaccaacgccaccgagcucguccaguccuccuccaccggccgcaucugcgacuccccccaccgcauccucgacggcaagaacugcacccucaucgacgcccuccucggcgacccccacugcgacggcuuccagaacaaggagugggaccucuucgucgagcgcuccaaggccuacuccaacugcuaccccuacgacguccccgacuacgccucccuccgcucccucgucgccuccuccggcacccucgaguucaucaacgaggacuucaacuggaccggcgucgcccaguccggcggcuccuacgccugcaagcgcggcuccgucaacuccuucuucucccgccucaacuggcuccacgaguccgaguacaaguaccccgcccucaacgucaccaugcccaacaacggcaaguucgacaagcucuacaucuggggcguccaccaccccuccaccgaccgcgagcagaccaaccucuacguccgcgccuccggccgcgucaccgucuccaccaagcgcucccagcagaccgucauccccaacaucggcucccgccccuggguccgcggccucuccucccgcaucuccaucuacuggaccaucgucaagcccggcgacauccuccucaucaacuccaccggcaaccucaucgccccccgcggcuacuucaagauccgcaccggcaaguccuccaucaugcgcuccgacgcccccaucggcaccugcuccuccgagugcaucacccccaacggcuccauccccaacgacaagcccuuccagaacgucaaccgcaucaccuacggcgccugcccccgcuacgucaagcagaacacccucaagcucgccaccggcaugcgcaacguccccgagaagcagacccgcggcaucuucggcgccaucgccggcuucaucgagaacggcugggagggcauggucgacggcugguacggcuuccgccaccagaacuccgagggcaccggccaggccgccgaccucaaguccacccaggccgccaucgaccagaucaacggcaagcucaaccgccucaucgagaagaccaacgagaaguuccaccagaucgagaaggaguucuccgaggucgagggccgcauccaggaccucgagaaguacgucgaggacaccaagaucgaccucugguccuacaacgccgagcuccucgucgcccucgagaaccagcacaccaucgaccucaccgacuccgagaugaacaagcucuucgagaagacccgcaagcagcuccgcgagaacgccgaggacaugggcaacggcugcuucaagaucuaccacaagugcgacaacgccugcaucggcuccauccgcaacggcaccuacgaccacgacgucuaccgcgacgaggcccucaacaaccgcuuccagaucaagggcgucgagcucaaguccggcuacaaggacuggauccucuggaucuccuucgccaccuccugcuuccuccucugcgucguccuccucggcuucaucaugugggccugccagaagggcaacauccgcugcaacaucugcaucuga

SEQ ID NO: 104695 - RNA, 1701 nt, Artificial Sequence
  derived and/or modified CDS sequence (opt2) from hemagglutinin__InfluenzaA__AFH00307
augaagaccaucaucgcccucuccuacauccucugccucgucuucgcccagaagcuccccggcaacgacaacuccaccgccacccucugccucggccaccacgccguccccaacggcacccucgucaagaccaucaccaacgaccagaucgaggucaccaacgccaccgagcucguccaguccuccuccaccggccgcaucugcgacuccccccaccgcauccucgacggcaagaacugcacccucaucgacgcccuccucggcgacccccacugcgacggcuuccagaacaaggagugggaccucuucgucgagcgcuccaaggccuacuccaacugcuaccccuacgacguccccgacuacgccucccuccgcucccucgucgccuccuccggcacccucgaguucaucaacgaggacuucaacuggaccggcgucgcccaggacggcggcuccuacgccugcaagcgcggcuccgucaacuccuucuucucccgccucaacuggcuccacaagcucgaguacaaguaccccgcccucaacgucaccaugcccaacaacggcaaguucgacaagcucuacaucuggggcguccaccaccccuccaccgacuccgaccagaccucccucuacguccgcgccuccggccgcgucaccgucuccaccaagcgcucccagcagaccgucacccccaacaucggcucccgccccuggguccgcggccaguccucccgcaucuccaucuacuggaccaucgucaagcccggcgacauccuccucaucaacuccaccggcaaccucaucgccccccgcggcuacuucaagauccgcaacggcaaguccuccaucaugcgcuccgacgcccccaucggcaacugcuccuccgagugcaucacccccaacggcuccauccccaacgacaagcccuuccagaacgucaaccgcaucaccuacggcgccugcccccgcuacgucaagcagaacacccucaagcucgccaccggcaugcgcaacguccccgagaagcagacccgcggcaucuucggcgccaucgccggcuucaucgagaacggcugggagggcauggucgacggcugguacggcuuccgccaccagaacuccgagggcaccggccaggccgccgaccucaaguccacccaggccgccaucgaccagaucaacggcaagcucaaccgccucaucgagaagaccaacgagaaguuccaccagaucgagaaggaguucuccgaggucgagggccgcauccaggaccucgagaaguacgucgaggacaccaagaucgaccucugguccuacaacgccgagcuccucgucgcccucgagaaccagcacaccaucgaccucaccgacuccgagaugaacaagcucuucgagaagacccgcaagcagcuccgcgagaacgccgaggacaugggcaacggcugcuucaagaucuaccacaagugcgacaacgccugcaucggcuccauccgcaacggcaccuacgaccacgacgucuaccgcgacgaggcccucaacaaccgcuuccagaucaagggcgucgagcucaaguccggcuacaaggacuggauccucuggaucuccuucgccaucuccugcuuccuccucugcgucguccuccucggcuucaucaugugggccugccagaagggcaacauccgcugcaacaucugcaucuga

SEQ ID NO: 104696 - RNA, 1701 nt, Artificial Sequence; identical to SEQ ID NO: 104695
  derived and/or modified CDS sequence (opt2) from hemagglutinin__InfluenzaA__AFH00318

SEQ ID NO: 104697 - RNA, 1701 nt, Artificial Sequence
  derived and/or modified CDS sequence (opt2) from hemagglutinin__InfluenzaA__AFH00329
augaagaccaucaucgcccucuccuacauccucugccucgucuucgcccagaagcuccccggcaacgacaacuccaccgccacccucugccucggccaccacgccguccccaacggcacccucgucaagaccaucaccaacgaccagaucgaggucaccaacgccaccgagcucguccaguccuccuccaccggccgcaucugcgacucccaccaccgcauccucgacggcaagaacugcacccucaucgacgcccuccucggcgacccccacugcgacggcuuccagaacaaggagugggaccucuucgucgagcgcuccaaggccuacuccaacugcuaccccuacgacguccccgacuacgccucccuccgcucccucgucgccuccuccggcacccucgaguucaucaacgaggacuucaacuggaccggcgucgcccaggacggcaaguccuacgccugcaagcgcggcuccgucaacuccuucuucucccgccucaacuggcuccacaagcucgaguacaaguaccccgcccucaacgucaccaugcccaacaacggcaaguucgacaagcucuacaucuggggcguccaccaccccuccaccgacuccgaccagaccuccaucuacguccgcgccuccggccgcgucaccgucuccaccaagcgcucccagcagaccgucauccccaacaucggcucccgccccuggguccgcggcaucuccucccgcaucuccaucuacuggaccaucgucaagcccggcgacauccuccucaucaacuccaccggcaaccucaucgccccccgcggcuacuucaagauccgcaacggcaaguccuccaucaugcgcuccgacgcccccaucggcaacugcaacuccgagugcaucacccccaacggcuccauccccaacgacaagcccuuccagaacgucaaccgcaucaccuacggcgccugcccccgcuacgucaagcagaacacccucaagcucgccaccggcaugcgcaacguccccgagaagcagacccgcggcaucuucggcgccaucgccggcuucaucgagaacggcugggagggcauggucgacggcugguacggcuuccgccaccagaacuccgagggcaccggccaggccgccgaccucaaguccacccaggccgccaucgaccagaucaacggcaagcucaaccgccucaucgagaagaccaacgagaaguuccaccagaucgagaaggaguucuccgaggucgagggccgcauccaggaccucgagaaguacgucgaggacaccaagaucgaccucugguccuacaacgccgagcuccucgucgcccucgagaaccagcacaccaucgaccucaccgacuccgagaugaacaagcucuucgagcgcacccgcaagcagcuccgcgagaacgccgaggacaugggcaacggcugcuucaagaucuaccacaagugcgacaacgccugcaucggcuccauccgcaacggcaccuacgaccacgacgucuaccgcgacgaggcccucaacaaccgcuuccagaucaagggcgucgagcucaaguccggcuacaaggacuggauccucuggaucuccuucgccaccuccugcuuccuccucugcgucguccuccucggcuucaucaugugggccugccagaagggcaacauccgcugcaacaucugcaucuga

SEQ ID NO: 104698 - RNA, 1701 nt, Artificial Sequence
  derived and/or modified CDS sequence (opt2) from hemagglutinin__InfluenzaA__AFH00340
augaagaccaucaucgcccucuccuacauccucugccucgucuucgcccagaagcuccccggcaacgacaacuccaccgccacccucugccucggccaccacgccguccccaacggcacccucgucaagaccaucaccaacgaccagaucgaggucaccaacgccaccgagcucguccaguccuccuccaccggccgcaucugcgacuccccccaccgcauccucgacggcaagaacugcacccucaucgacgcccuccucggcgacccccacugcgacggcuuccagaacaaggagugggaccucuucgucgagcgcuccaaggccuacuccaacugcuaccccuacgacguccccgacuacgccucccuccgcucccucgucgccuccuccggcacccucgaguucaucaacgaggacuucaacuggaccggcgucgcccaggacggcaaguccuacgccugcaagcgcggcuccgucaacuccuucuucucccgccucaacuggcuccacaagcucgaguacaaguaccccgcccucaacgucaccaugcccaacaacggcaaguucgacaagcucuacaucuggggcguccaccaccccuccaccgacuccgaccagaccucccucuacguccgcgccuccggccgcgucaccgucuccaccaagcgcucccagcagaccgucauccccaacaucggcuuccgccccuggguccgcggccucuccucccgcaucuccaucuacuggaccaucgucaagcccggcgacauccuccucaucuccuccaccggcaaccucaucgccccccgcggcuacuucaagauccgcaacggcaaguccuccaucaugcgcuccgacgcccccaucggcaacugcuccuccgagugcaucacccccaacggcuccauccccaacgacaagcccuuccagaacgucaaccgcaucaccuacggcgccugcccccgcuacgucaagcagaacacccucaagcucgccaccggcaugcgcaacauccccgagaagcagacccgcggcaucuucggcgccaucgccggcuucaucgagaacggcugggagggcauggucgacggcugguacggcuuccgccaccagaacuccgagggcaccggccaggccgccgaccucaaguccacccaggccgccaucgaccagaucaacggcaagcucaaccgccucaucgagaagaccaacgagaaguuccaccagaucgagaaggaguucuccgaggucgagggccgcauccaggaccucgagaaguacgucgaggacaccaagaucgaccucugguccuacaacgccggccuccucgucgcccucgagaaccagcacaccaucgaccucaccgacuccgagaugaacaagcucuucgagcgcacccgcaagcagcuccgcgagaacgccgaggacaugggcaacggcugcuucaagaucuaccacaagugcgacaacgccugcaucggcuccauccgcaacggcaccuacgaccacgacgucuaccgcgacgaggcccucaacaaccgcuuccagaucaagggcgucgagcucaaguccggcuacaaggacuggauccucuggaucuccuucgccaucuccugcuuccuccucugcgucguccuccucggcuucaucaugugggccugccagaagggcaacauccgcugcaacaucugcaucuga

SEQ ID NO: 104699 - RNA, 1701 nt, Artificial Sequence
  derived and/or modified CDS sequence (opt2) from hemagglutinin__InfluenzaA__AFH00351
augaagaccaucaucgcccucuccuacauccucugccucgucuucgcccagaagcuccccggcaacgacaacuccaccgccacccucugccucggccaccacgccguccccaacggcacccucgucaagaccaucaccaacgaccagaucgaggucaccaacgccaccgagcucguccaguccuccuccaccggccgcaucugcgacuccccccaccgcauccucgacggcaagaacugcacccucaucgacgcccuccucggcgacccccacugcgacggcuuccagaacaaggagugggaccucuucgucgagcgcuccaaggccuacuccaacugcuaccccuacgacguccccgacuacgccucccuccgcucccucgucgccuccuccggcacccucgaguucaccaaggagggcuucaacuggaccggcgucgcccaggacggcaaguccuacgccugcaagcgcggcuccgucaaguccuucuucucccgccucaacuggcuccacaagcucgaguacaaguaccccgcccucaacgucaccaugcccaacaacgacaaguucgacaagcucuacaucuggggcguccaccaccccuccaccgacuccgaccagaccucccucuacguccaggccuccggccgcgucaccgucuccaccaagcgcucccagcagaccgucauccccaacaucggcucccgccccuggguccgcggcaucuccucccgcaucuccaucuacuggaccaucgucaagcccggcgacauccuccucaucaacuccaccggcaaccucaucgccccccgcggcuacuucaagauccgcaacggcaaguccuccaucaugcgcuccgacgcccccaucggcaacugcaacuccgagugcaucacccccgacggcuccauccccaacgacaagcccuuccagaacgucaaccgcaucaccuacggcgccugcccccgcuacgucaagcagaacacccucaagcucgccaccggcaugcgcaacguccccgagaagcagacccgcggcaucuucggcgccaucgccggcuucaucgagaacggcugggagggcauggucgacggcugguacggcuuccgccaccagaacuccgagggcaccggccaggccgccgaccucaaguccacccaggccgccaucgaccagaucaacggcaagcucaaccgccucaucgagaagaccaacaagaaguuccaccagaucgagaaggaguucuccgaggucgagggccgcauccaggaccucgagaaguacgucgaggacaccaagaucgaccucugguccuacaacgccgagcuccucgucgcccucgagaaccagcacaccaucgaccucaccgacuccgagaugaacaagcucuucgagcgcacccgcaagcagcuccgcgagaacgccgaggacaugggcaacggcugcuucaagaucuaccacaagugcgacaacgccugcaucggcuccauccgcaacggcaccuacgaccacgacgucuaccgcgacgaggcccucaacaaccgcuuccagaucaagggcgucgagcucaaguccggcuacaaggacuggauccucuggaucuccuucgccaucuccugcuuccuccucugcgucguccuccucggcuucaucaugugggccugccagaagggcaacauccgcugcaacaucugcaucuga

SEQ ID NO: 104700 - RNA, 1701 nt, Artificial Sequence
  derived and/or modified CDS sequence (opt2) from hemagglutinin__InfluenzaA__AFH00362
augaagaccaucaucgcccucuccuacauccucugccucgucuucgcccagaagcuccccggcaacgacaacuccaccgccacccucugccucggccaccacgccguccccaacggcacccucgucaagaccaucaccaacgaccagaucgaggucaccaacgccaccgagcucguccaguccuccuccaccggccgcaucugcgacuccccccaccgcauccucgacggcaagaacugcacccucaucgacgcccuccucggcgacccccacugcgacggcuuccagaacaaggagugggaccucuucgucgagcgcuccaaggccuacuccaacugcuaccccuacgacguccccgacuacgccucccuccgcucccucgucgccuccuccggcacccucgaguucaccaacgagggcuucaacuggaccggcgucgcccaggacggcaaguccuacgccugcaagcgcggcuccgucaaguccuucuucucccgccucaacuggcuccacaagcucgaguacaaguaccccgcccucaacgucaccaugcccaacaacgacaaguucgacaagcucuacaucuggggcguccaccaccccuccaccgacuccgaccagaccucccucuacguccaggccuccggccgcgucaccgucuccaccaagcgcucccagcagaccgucauccccaacaucggcucccgccccuggguccgcggcaucuccucccgcaucuccaucuacuggaccaucgucaagcccggcgacauccuccucaucaacuccaccggcaaccucaucgccccccgcggcuacuucaagauccgcaacggcaaguccuccaucaugcgcuccgacgcccccaucgacaacugcaacuccgagugcaucacccccaacggcuccauccccaacgacaagcccuuccagaacgucaaccgcaucaccuacggcgccugcccccgcuacgucaagcagaacacccucaagcucgccaccggcaugcgcaacguccccgagaagcagacccgcggcaucuucggcgccaucgccggcuucaucgagaacggcugggagggcauggucgacggcugguacggcuuccgccaccagaacuccgagggcaccggccaggccgccgaccucaaguccacccaggccgccaucgaccagaucaacggcaagcucaaccgccucaucgagaagaccaacgagaaguuccaccagaucgagaaggaguucuccgaggucgagggccgcauccaggaccucgagaaguacgucgaggacaccaagaucgaccucugguccuacaacgccgagcuccucgucgcccucgagaaccagcacaccaucgaccucaccgacuccgagaugaacaagcucuucgagcgcacccgcaagcagcuccgcgagaacgccgaggacaugggcaacggcugcuucaagaucuaccacaagugcgacaacgccugcaucggcuccauccgcaacggcaccuacgaccacgacgucuaccgcgacgaggcccucaacaaccgcuuccagaucaagggcgucgagcucaaguccggcuacaaggacuggauccucuggaucuccuucgccaccuccugcuuccuccucugcgucguccuccucggcuucaucaugugggccugccagaagggcaacauccgcugcaacaucugcaucuga

SEQ ID NO: 104701 - RNA, 1701 nt, Artificial Sequence
  derived and/or modified CDS sequence (opt2) from hemagglutinin__InfluenzaA__AFH00384
augaagaccaucaucgcccucuccuacauccucugccucgucuucgcccagaagcuccccggcaacgacaacuccaccgccacccucugccucggccaccacgccguccccaacggcacccucgucaagaccaucaccaacgaccagaucgaggucaccaacgccaccgagcucguccaguccuccuccaccggccgcaucugcgacuccccccaccgcauccucgacggcaagaacugcacccucaucgacgcccuccucggcgacccccacugcgacggcuuccagaacaaggagugggaccucuucgucgagcgcuccaaggccuacuccaacugcuaccccuacgacguccccgacuacgccucccuccgcucccucgucgccuccuccggcacccucgaguucaccaaggagggcuucaacuggaccggcgucgcccaggacggcaaguccuacgccugcaagcgcggcuccgucaacuccuucuucucccgccucaacuggcuccacaagcucgaguacaaguaccccgcccucaacgucaccaugcccaacaacgacaaguucgacaagcucuacaucuggggcguccaccaccccuccaccgacuccgaccagaccucccucuacguccaggccuccggccgcgucaccgucuccaccaagcgcucccagcagaccgucauccccaacaucggcucccgccccuggguccgcggcaucuccucccgcaucuccaucuacuggaccaucgucaagcccggcgacauccuccucaucaacuccaucggcaaccucaucgccccccgcggcuacuucaagauccgcaacggcaaguccuccaucaugcgcuccgacgcccccaucggcaacugcaacuccgagugcaucacccccaacggcuccauccccaacgacaagcccuuccagaacgucaaccgcaucaccuacggcgccugcccccgcuacgucaagcagaacacccucaagcucgccaccggcaugcgcaacguccccgagaagcagacccgcggcaucuucggcgccaucgccggcuucaucgagaacggcugggagggcauggucgacggcugguacggcuuccgccaccagaacuccgagggcaccggccaggccgccgaccucaaguccacccaggccgccaucgaccagaucaacggcaagcucaaccgccucaucgagaagaccaacgagaaguuccaccagaucgagaaggaguucuccgaggucgagggccgcauccaggaccucgagaaguacgucgaggacaccaagaucgaccucugguccuacaacgccggccuccucgucgcccucgagaaccagcacaccaucgaccucaccgacuccgagaugaacaagcucuucgagcgcacccgcaagcagcuccgcgagaacgccgaggacaugggcaacggcugcuucaagaucuaccacaagugcgacaacgccugcaucggcuccauccgcaacggcaccuacgaccacgacgucuaccgcgacgaggcccucaacaaccgcuuccagaucaagggcgucgagcucaaguccggcuacaaggacuggauccucuggaucuccuucgccaucuccugcuuccuccucugcgucguccuccucggcuucaucaugugggccugccagaagggcaacauccgcugcaacaucugcaucuga

SEQ ID NO: 104702 - RNA, 1701 nt, Artificial Sequence
  derived and/or modified CDS sequence (opt2) from hemagglutinin__InfluenzaA__AFH00395
augaaggccaucaucgcccucuccuacauccucugccucgucuucgcccagaagcuccccggcaacgacaacuccaccgccacccucugccucggccaccacgccguccccaacggcacccucgucaagaccaucaccaacgaccagaucgaggucaccaacgccaccgagcucguccaguccuccuccaccggccgcaucugcgacuccccccaccgcauccucgacggcaagaacugcacccucaucgacgcccuccucggcgacccccacugcgacggcuuccagaacaaggagugggaccucuucgucgagcgcuccaaggccuacuccaacugcuaccccuacgacguccccgacuacgccucccuccgcucccucgucgccuccuccggcacccucgaguucaccaaggagggcuucaacuggaccggcgucgcccaggacggcaaguccuacgccugcaagcgcggcuccgucaacggcuucuucucccgccucaacuggcuccacaagcucgaguacaaguaccccgcccucaacgucaccaugcccaacaacgacaaguucgacaagcucuacaucuggggcguccaccaccccuccaccgacuccgaccagaccucccucuacguccaggccuccggccgcgucaccgucuccaccaagcgcucccagcagaccgucauccccaacaucggcucccgccccuggguccgcggcaucuccucccgcaucuccaucuacuggaccaucgucaagcccggcgacauccuccucaucaaguccaccggcaaccucaucgccccccgcggcuacuucaagauccgcaacggcaaguccuccaucaugcgcuccgacgcccccaucggcaacugcaacuccgagugcaucacccccaacggcuccauccccaacgacaagcccuuccagaacgucaaccgcaucaccuacggcgccugcccccgcuacgucaagcagaacacccucaagcucgccaccggcaugcgcaacguccccgagaagcagacccgcggcaucuucggcgccaucgccggcuucaucgagaacggcugggagggcauggucgacggcugguacggcuuccgccaccagaacuccgagggcaccggccaggccgccgaccucaaguccacccaggccgccaucgaccagaucaacggcaagcucaaccgccucaucgagaagaccaacgagaaguuccaccagaucgagaaggaguucuccgaggucgagggccgcauccaggaccucgagaaguacgucgaggacaccaagaucgaccucugguccuacaacgccgagcuccucgucgcccucgagaaccagcacaccaucgaccucaccgacuccgagaugaacaagcucuucgagcgcacccgcaagcagcuccgcgagaacgccgaggacaugggcaacggcugcuucaagaucuaccacaagugcgacaacgccugcaucggcuccauccgcaacggcaccuacgaccacgacgucuaccgcgacgaggcccucaacaaccgcuuccagaucaagggcgucgagcucaaguccggcuacaaggacuggauccucuggaucuccuucgccaucuccugcuuccuccucugcgucguccuccucggcuucaucaugugggccugccagaagggcaacauccgcugcaacaucugcaucuga

SEQ ID NO: 104703 - RNA, 1701 nt, Artificial Sequence
  derived and/or modified CDS sequence (opt2) from hemagglutinin__InfluenzaA__AFH00417
augaagaccaucaucgcccucuccuacauccucugccucgucuucgcccagaagcuccccggcaacgacaacuccaccgccacccucugccucggccaccacgccguccccaacggcacccucgucaagaccaucaccaacgaccagaucgaggucaccaacgccaccgagcucguccaguccuccuccaccggccgcaucugcgacuccccccaccgcauccucgacggcaagaacugcacccucaucgacgcccuccucggcgacccccacugcgacggcuuccagaacaaggagugggaccucuucgucgagcgcuccaaggccuacuccaacugcuaccccuacgacguccccgacuacgccucccuccgcucccucgucgccuccuccggcacccucgaguucaccaacgagggcuucaacuggaccggcgucgcccaggacggcaaguccuacgccugcaagcgcggcuccgucaaguccuucuucucccgccucaacuggcuccacaagcucgaguacaaguaccccgcccucaacgucaccaugcccaacaacgacaaguucgacaagcucuacaucuggggcguccaccaccccuccaccgacuccgaccagaccucccucuacguccaggccuccggccgcgucaccgucuccaccaagcgcucccagcagaccgucauccccaacaucggcucccgccccuggguccgcggcaucuccucccgcaucuccaucuacuggaccaucgucaagcccggcgacauccuccucaucaacuccaccggcaaccucaucgccccccgcggcuacuucaagauccgcaacggcaaguccuccaucaugcgcuccgacgcccccaucgacaacugcaacuccgagugcaucacccccaacggcuccauccccaacgacaagcccuuccagaacgucaaccgcaucaccuacggcgccugcccccgcuacgucaagcagaacacccucaagcucgccaccggcaugcgcaacguccccgagaagcagacccgcggcaucuucggcgccaucgccggcuucaucgagaacggcugggagggcauggucgacggcugguacggcuuccgccaccagaacuccgagggcaccggccaggccgccgaccucaaguccacccaggccgccaucgaccagaucaacggcaagcucaaccgccucaucgagaagaccaacgagaaguuccaccagaucgagaaggaguucuccgaggucgagggccgcauccaggaccucgagaaguacgucgaggacaccaagaucgaccucugguccuacaacgccgagcuccucgucgcccucgagaaccagcacaccaucgaccucaccgacuccgagaugaacaagcucuucgagcgcacccgcaagcagcuccgcgagaacgccgaggacaugggcaacggcugcuucaagaucuaccacaagugcgacaacgccugcaucggcuccauccgcaacggcaccuacgaccacgacgucuaccgcgacgaggcccucaacaaccgcuuccagaucaagggcgucgagcucaaguccggcuacaaggacuggauccucuggaucuccuucgccaucuccugcuuccuccucugcgucguccuccucggcuucaucaugugggccugccagaagggcaacauccgcugcaacaucugcaucuga

SEQ ID NO: 104704 - RNA, 1701 nt, Artificial Sequence; identical to SEQ ID NO: 97024
  derived and/or modified CDS sequence (opt2) from hemagglutinin__InfluenzaA__AFH00428

SEQ ID NO: 104705 - RNA, 1701 nt, Artificial Sequence
  derived and/or modified CDS sequence (opt2) from hemagglutinin__InfluenzaA__AFH00439
augaagaccaucaucgcccucuccuacauccucugccucgucuucgcccagaagcuccccggcaacgacaacuccaccgccacccucugccucggccaccacgccguccccaacggcacccucgucaagaccaucaccaacgaccagaucgaggucaccaacgccaccgagcucguccaguccuccuccaccggccgcaucugcgacuccccccaccgcauccucgacggcaagaacugcacccucaucgacgcccuccucggcgacccccacugcgacggcuuccagaacaaggagugggaccucuucgucgagcgcuccaaggccuacuccaacugcuaccccuacgacguccccgacuacgccucccuccgcucccucgucgccuccuccggcacccucgaguucaccaacgagggcuucaacuggaccggcgucgcccaggacggcaccuccuacgccugcaagcgcggcuccgucaaguccuucuucucccgccucaacuggcuccacaagcucgaguacaaguaccccgcccucaacgucaccaugcccaacaacgacaaguucgacaagcucuacaucuggggcguccaccaccccuccaccgacuccgaccagaccucccucuacguccaggccuccggccgcgucaccgucuccaccaagcgcucccagcagaccgucauccccaacaucggcucccgccccuggguccgcggcgucuccucccgcaucuccaucuacuggaccaucgucaagcccggcgacauccuccucaucaacuccaccggcaaccucaucgccccccgcggcuacuucaagauccgcuccggcaaguccuccaucaugcgcuccgacgcccccaucggcaacugcaacuccgagugcaucacccccaacggcuccauccccaacgacaagcccuuccagaacgucaaccgcaucaccuacggcgccugcccccgcuacgucaagcagaacacccucaagcucgccaccggcaugcgcaacguccccgagaagcagacccgcggcaucuucggcgccaucgccggcuucaucgagaacggcugggagggcauggucgacggcugguacggcuuccgccaccagaacuccgagggcaccggccaggccgccgaccucaaguccacccaggccgccaucaaccagaucaacggcaagcucaaccgccucaucgagaagaccaacgagaaguuccaccagaucgagaaggaguucuccgaggucgagggccgcauccaggaccucgagaaguacgucgaggacaccaagaucgaccucugguccuacaacgccgagcuccucgucgcccucgagaaccagcacaccaucgaccucaccgacuccgagauguccaagcucuucgagcgcacccgcaagcagcuccgcgagaacgccgaggacaugggcaacggcugcuucaagaucuaccacaagugcgacaacgccugcaucggcuccauccgcaacggcaccuacgaccacgacgucuaccgcgacgaggcccucaacaaccgcuuccagaucaagggcgucgagcucaaguccggcuacaaggacuggauccucuggaucuccuucgccaucuccugcuuccuccucugcgucguccuccucggcuucaucaugugggccugccagaagggcaacauccgcugcaacaucugcaucuga

SEQ ID NO: 104706 - RNA, 1701 nt, Artificial Sequence
  derived and/or modified CDS sequence (opt2) from hemagglutinin__InfluenzaA__AFH00450
augaagaccaucaucgcccucuccuacauccucugccucgucuucgcccagaagcuccccggcaacgacaacuccaccgccacccucugccucggccaccacgccguccccaacggcacccucgucaagaccaucaccaacgaccagaucgaggucaccaacgccaccgagcucguccaguccuccuccaccggccgcaucugcgacggcccccaccgcaucaucgacggcaagaacugcacccucaucgacgcccuccucggcgacccccacugcgacggcuuccagaacaaggagugggaccucuucgucgagcgcuccaaggccuacuccaacugcuaccccuacgacguccccgacuacgccucccuccgcucccucgucgccuccuccggcacccucgaguucaccaacgaguccuucaacuggaccggcgucgcccagaacggcaccuccuacgccugcaagcgcggcuccgucaaguccuucuucucccgccucaacuggcuccacaagcucgaguacaaguaccccgcccucaacgucaccaugcccaacaacgacaaguucgacaagcucuacaucuggggcguccaccaccccuccaccgacuccgaccagaccucccucuacguccaguccuccggccgcgucaccgucuccaccaagcgcucccagcagaccgucauccccaacaucggcucccgccccuggguccgcggcgucuccucccgcaucuccaucuacuggaccaucgucaagcccggcgacauccuccucaucaacuccaccggcaaccucaucgccccccgcggcuacuucaagauccgcuccggcaaguccuccaucaugcgcuccgacgcccccaucgacaacugcaacuccgagugcaucacccccaacggcuccauccccaacgacaagcccuuccagaacgucaaccgcaucaccuacggcgccugcccccgcuacgucaagcagaacacccucaagcucgccaccggcaugcgcaacguccccgagaagcagacccgcggcaucuucggcgccaucgccggcuucaucgagaacggcugggagggcaugaucgacggcugguacggcuuccgccaccagaacuccgagggcaccggccaggccgccgaccucaaguccacccaggccgccaucaaccagaucaacggcaagcucaaccgccucaucgagaagaccaacgagaaguuccaccagaucgagaaggaguucuccgaggucgagggccgcauccaggaccucgagaaguacgucgaggacaccaagaucgaccucugguccuacaacgccgagcuccucgucgcccucgagaaccagcacaccaucgaccucaccgacuccgagaugaacaagcucuucgagcgcacccgcaagcagcuccgcgagaacgccgaggacaugggcaacggcugcuucaagaucuaccacaagugcgacaacgccugcaucggcuccauccgcaacggcaccuacgaccacgacgucuaccgcgacgaggcccucaacaaccgcuuccagaucaagggcgucgagcucaaguccggcuacaaggacuggauccucuggaucuccuucgccaucuccugcuuccuccucugcgucguccuccucggcuucaucaugugggccugccagaagggcaacauccgcugcaacaucugcaucuga

SEQ ID NO: 104707 - RNA, 1701 nt, Artificial Sequence
  derived and/or modified CDS sequence (opt2) from hemagglutinin__InfluenzaA__AFH00461
augaagaccaucaucgcccucuccuacauccucugccucgucuucgcccagaagcuccccggcaacgacaacuccaccgccacccucugccucggccaccacgccguccccaacggcacccucgucaagaccaucaccaacgaccagaucgaggucaccaacgccaccgagcucguccaguccucccccaccggccgcaucugcgacuccccccaccgcauccucgacggcaagaacugcacccucaucgacgcccuccucggcgacccccacugcgacggcuuccagaacaaggagugggaccucuucgucgagcgcuccaaggccuacuccaacugcuaccccuacgacguccccgacuacgccucccuccgcucccucgucgccuccuccggcacccucgaguucaucaacgagaacuucaacuggaccggcgucgcccaggacggcaaguccuacgccugcaagcgcggcuccgucaacuccuucuucucccgccucaacuggcuccacaagcucgacuacaaguaccccgcccucaacgucaccaugcccaacaacggcaaguucgacaagcucuacaucuggggcguccaccaccccuccaccgacuccgaccagaucucccucuacguccgcuccuccggccgcgucaccgucuccaccaagcgcucccagcagaccgucauccccgacaucggcuaccgccccuggguccgcggccucuccucccgcaucuccaucuacuggaccaucgucaagcccggcgacauccuccucaucaacuccaccggcaaccucaucgccccccgcggcuacuucaagcuccgcaacggcaaguccuccaucaugcgcuccgacgcccccaucggcaacugcuccuccggcugcaucacccccaacggcuccauccccaacgacaagcccuuccagaacgucaaccgcaucaccuacggcgccugcccccgcuacgucaagcagaacacccucaagcucgccaccggcaugcgcaacguccccgagaagcagacccgcggcaucuucggcgccaucgccggcuucaucgagaacggcugggagggcauggucgacggcugguacggcuuccgccaccagaacuccgagggcaccggccaggccgccgaccucaaguccacccaggccgccaucgaccagaucaacggcaagcucaaccgccucgucgagaagaccaacgagaaguuccaccagaucgagaaggaguucuccgaggucgagggccgcauccaggaccucgagaaguacgucgaggacaccaagaucgaccucugguccuacaacgccgagcuccucgucgcccucgagaaccagcacaccaucgaccucaccgacuccgagaugaacaagcucuucgagcgcacccgcaagcagcuccgcgagaacgccgaggacaugggcaacggcugcuucaagaucuaccacaagugcgacaacgccugcaucggcuccauccgcaacggcaccuacgaccacgacgucuaccgcgacgaggcccucaacaaccgcuuccagaucaagggcgucgagcucaaguccggcuacaaggacuggauccucuggaucuccuucgccaucuccugcuuccuccucugcgucguccuccucggcuucaucaugugggccugccagaagggcaacauccgcugcaacaucugcaucuga

SEQ ID NO: 104708 - RNA, 1701 nt, Artificial Sequence
  derived and/or modified CDS sequence (opt2) from hemagglutinin__InfluenzaA__AFH00472
augaagaccaucaucgcccucuccuacauccucugccucgucuucgcccagaagcuccccggcaacgacaacuccaccgccacccucugccucggccaccacgccguccccaacggcacccucgucaagaccaucaccaacgaccagaucgaggucaccaacgccaccgagcucguccaguccuccuccaccggccgcaucugcgacuccccccaccgcauccucgacggcaagaacugcacccucaucgacgcccuccucggcgacccccacugcgacggcuuccagaacaaggagugggaccucuucgucgagcgcuccaaggccuacuccaacugcuaccccuacgacgucuccgacuacgccucccuccgcucccucgucgccuccuccggcacccucgaguucaacaacgaguccuucaacuggaccggcgucgcccagaacggcaccuccuacgccugcaagcgccgcuccgucaaguccuucuucucccgccucaacuggcuccacaagcucgaguacaaguaccccgcccucaacgucaccaugcccaacaacgacaaguucgacaagcucuacaucuggggcguccaccaccccuccaccgacuccgaccagaccucccucuacguccaggccuccggccgcgucaccgucuccaccaagcgcucccagcagaccgucauccccaacaucggcucccgccccuggguccgcggcgucuccucccgcaucuccaucuacuggaccaucgucaagcccggcgacauccuccucaucaacuccaccggcaaccucaucgccccccgcggcuacuucaagauccgcuccggcaaguccuccaucaugcgcuccgacgcccccaucggcaacugcaacuccgagugcaucacccccaacggcuccauccccaacgacaagcccuuccagaacgucaaccgcaucaccuacggcgccugcccccgcuacgucaagcagaacacccucaagcucgccaccggcaugcgcaacguccccgagaagcagacccgcggcaucuucggcgccaucgccggcuucaucgagaacggcugggagggcauggucgacggcugguacggcuuccgccaccagaacuccgagggcaccggccaggccgccgaccucaaguccacccaggccgccaucaaccagaucaacggcaagcucaaccgccucaucgagaagaccaacgagaaguuccaccagaucgagaaggaguucuccgaggucgagggccgcauccaggaccucgagaaguacgucgaggacaccaagaucgaccucugguccuacaacgccgagcuccucgucgcccucgagaaccagcacaccaucgaccucaccgacuccgagaugaacaagcucuucgagcgcacccgcaagcagcuccgcgagaacgccgaggacaugggcaacggcugcuucaagaucuaccacaagugcgacaacgccugcaucggcuccauccgcaacggcaccuacgaccacgacgucuaccgcgacgaggcccucaacaaccgcuuccagaucaagggcgucgagcucaaguccggcuacaaggacuggauccucuggaucuccuucgccaucuccugcuuccuccucugcgucguccuccucggcuucaucaugugggccugccagaagggcaacauccgcugcaacaucugcaucuga

SEQ ID NO: 104709 - RNA, 1701 nt, Artificial Sequence
  derived and/or modified CDS sequence (opt2) from hemagglutinin__InfluenzaA__AFH00483
augaagaccaucaucgcccucuccuacauccucugcauggucuucgcccagaagcuccccggcaacgacaacuccaccgccacccucugccucggccaccacgccguccccaacggcacccucgucaagaccaucaccaacgaccagaucgaggucaccaacgccaccgagcucguccaguccuccuccaccggcaagaucugcgacuccccccaccgcauccucgacggcaagaacugcacccucaucgacgcccuccucggcgacccccacugcgacggcuuccagaacaaggagugggaccucuucgucgagcgcuccaaggccuacuccaacugcuaccccuacgacguccccgacuacgccucccuccgcucccucgucgccuccuccggcacccucgaguucaacaacgaguccuucaacuggaccggcgucgcccagaacggcaccuccuacgccugcaagcgcggcuccgucaaguccuucuucucccgccucaacuggcuccacaagcucgaguacaaguaccccgcccucaacgucaccaugcccaacaacgacaaguucgacaagcucuacaucuggggcguccaccaccccuccaccgacuccgaccagaccucccucuacguccaggccuccggccgcgucaccgucuccaccaagcgcucccagcagaccgucauccccaacaucggcucccgccccuggguccgcggcgucuccucccgcaucuccaucuacuggaccaucgucaagcccggcgacauccuccucaucaacuccaccggcaaccucaucgccccccgcggcuacuucaagauccgcuccggcaaguccuccaucaugcgcuccgacgcccccaucggcaacugcaacuccgagugcaucacccccaacggcuccauccccaacgacaagcccuuccagaacgucaaccgcaucaccuacggcgccugcccccgcuacgucaagcagaacacccucaagcucgccaccggcaugcgcaacguccccgagaagcagacccgcggcaucuucggcgccaucgccggcuucaucgagaacggcugggagggcauggucgacggcugguacggcuuccgccaccagaacuccgagggcaccggccaggccgccgaccucaaguccacccaggccgccaucaaccagaucaacggcaagcucaaccgccucaucgagaagaccaacgagaaguuccaccagaucgagaaggaguucuccgaggucgagggccgcauccaggaccucgagaaguacgucgaggacaccaagaucgaccucugguccuacaacgccgagcuccucgucgcccucgagaaccagcacaccaucgaccucaccgacuccgagaugaacaagcucuucgagcgcacccgcaagcagcuccgcgagaacgccgaggacaugggcaacggcugcuucaagaucuaccacaagugcgacaacgccugcaucggcuccauccgcaacggcaccuacgaccacgacgucuaccgcgacgaggcccucaacaaccgcuuccagaucaagggcgucgagcucaaguccggcuacaaggacuggauccucuggaucuccuucgccaucuccugcuuccuccucugcgucguccuccucggcuucaucaugugggccugccagaagggcaacauccgcugcaacaucugcaucuga

SEQ ID NO: 104710 - RNA, 1701 nt, Artificial Sequence
  derived and/or modified CDS sequence (opt2) from hemagglutinin__InfluenzaA__AFH00494
augaagaccaucaucgcccucuccuacauccucugccucgucuucgcccagaagcuccccggcaacgacaacuccaccgccacccucugccucggccaccacgccguccccaacggcacccucgucaagaccaucaccaacgaccagaucgaggucaccaacgccaccgagcucguccaguccucccccaccggccgcaucugcgacuccccccaccgcauccucgacggcaagaacugcacccucaucgacgcccuccucggcgacccccacugcgacggcuuccagaacaaggagugggaccucuucgucgagcgcuccaaggccuacuccaacugcuaccccuacgacguccccgacuacgccucccuccgcucccucgucgccuccuccggcacccucgaguucaucaacgagaacuucaacuggaccggcgucgcccaggacggcaaguccuacgccugcaagcgcggcuccgucaacuccuucuucucccgccucaacuggcuccacaagcucgaguacaaguaccccgcccucaacgucaccaugcccaacaacggcaaguucgacaagcucuacaucuggggcguccaccaccccuccaccgacuccgaccagaccucccucuacguccgcgccuccggccgcgucaccgucuccaccaagcgcucccagcagaccgucauccccgacaucggcuaccgccccuggguccgcggccaguccucccgcaucggcaucuacuggaccaucgucaagcccggcgacauccuccucaucaacuccaccggcaaccucaucgccccccgcggcuacuucaagauccgcaacggcaaguccuccaucaugcgcuccgacgcccccaucggcaacugcuccuccgagugcaucacccccaacggcuccauccccaacgacaagcccuuccagaacgucaaccgcaucaccuacggcgccugcccccgcuacgucaagcagaacacccucaagcucgccaccggcaugcgcaacguccccgagaagcagacccgcggcaucuucggcgccaucgccggcuucaucgagaacggcugggagggcauggucgacggcugguacggcuuccgccaccagaacuccgagggcaccggccaggccgccgaccucaaguccacccaggccgccaucgaccagaucaacggcaagcucaaccgccucgucgagaagaccaacgagaaguuccaccagaucgagaaggaguucuccgaggucgagggccgcauccaggaccucgagaaguacgucgaggacaccaagaucgaccucugguccuacaacgccgagcuccucgucgcccucgagaaccagcacaccaucgaccucaccgacuccgagaugaacaagcucuucgagcgcacccgcaagcagcuccgcgagaacgccgaggacaugggcaacggcugcuucaagaucuaccacaagugcgacaacgccugcaucggcuccauccgcaacggcaccuacaaccacgacgucuaccgcgacgaggcccucaacaaccgcuuccagaucaagggcgucgagcucaaguccggcuacaaggacuggauccucuggaucuccuucgccaucuccugcuuccuccucugcgucguccuccucggcuucaucaugugggccugccagaagggcaacauccgcugcaacaucugcaucuga

SEQ ID NO: 104711 - RNA, 1701 nt, Artificial Sequence
  derived and/or modified CDS sequence (opt2) from hemagglutinin__InfluenzaA__AFH00505
augaagaccaucaucgcccucuccuacauccucugccucgucuucgcccagaagcuccccggcaacgacaacuccaccgccacccucugccucggccaccacgccguccccaacggcacccucgucaagaccaucaccaacgaccagaucgaggucaccaacgccaccgagcucguccaguccuccuccaccggccgcaucugcgacuccccccaccgcauccucgacggcaagaacugcacccucaucgacgcccuccucggcgacccccacugcgacggcuuccagaacaaggagugggaccucuucgucgagcgcuccaaggccuacuccaacugcuaccccuacgacguccccgacuacgccucccuccgcucccucgucgccuccuccggcacccucgaguucaccaacgagggcuucaacuggaccggcgucgcccaggacggcaccuccuacgccugcaagcgcggcuccgucaaguccuucuucucccgccucaacuggcuccacaagcucgaguacaaguaccccgcccucaacgucaccaugcccaacaacgacaaguucgacaagcucuacaucuggggcguccaccaccccuccaccgacuccgaccagaucucccucuacguccaggccuccggccgcgucaccgucuccaccaagcgcucccagcagaccgucauccccaacaucggcucccgccccuggguccgcggcgucuccuccaucaucuccaucuacuggaccaucgucaagcccggcgacauccuccucaucaacuccaccggcaaccucaucgccccccgcggcuacuucaagauccgcuccggcaaguccuccaucaugcgcuccgacgcccccaucgacaacugcaacuccgagugcaucacccccaacggcuccauccccaacgacaagcccuuccagaacgucaaccgcaucaccuacggcgccugcccccgcuacgucaagcagaacacccucaagcucgccaccggcaugcgcaacguccccgagaagcagacccgcggcaucuucggcgccaucgccggcuucaucgagaacggcugggagggcauggucgacggcugguacggcuuccgccaccagaacuccgagggcaccggccaggccgccgaccucaaguccacccaggccgccaucaaccagaucaacggcaagcucaaccgccucaucgagaagaccaacgagaaguuccaccagaucgagaaggaguucuccgaggucgagggccgcauccaggaccucgagaaguacgucgaggacaccaagaucgaccucugguccuacaacgccgagcuccucgucgcccucgagaaccagcacaccaucgaccucaccgacuccgagaugaacaagcucuucgagcgcacccgcaagcagcuccgcgagaacgccgaggacaugggcaacggcugcuucaagaucuaccacaagugcgacaacgccugcaucggcuccauccgcaacggcaccuacgaccacgacgucuaccgcgacgaggcccucaacaaccgcuuccagaucaagggcgucgagcucaaguccggcuacaaggacuggauccucuggaucuccuucgccaucuccugcuuccuccucugcgucguccuccucggcuucaucaugugggccugccagaagggcaacauccgcugcaacaucugcaucuga

SEQ ID NO: 104712 - RNA, 1701 nt, Artificial Sequence
  derived and/or modified CDS sequence (opt2) from hemagglutinin__InfluenzaA__AFH00516
augaagaccaucaucgcccucuccuacauccucugccaggucuucgcccagaagcuccccggcaacgacaacuccaccgccacccucugccucggccaccacgccguccccaacggcacccucgucaagaccaucaccaacgaccagaucgaggucaccaacgccaccgagcucguccaguccuccuccaccggccgcaucugcgacuccccccaccgcauccucgacggcaagaacugcacccucaucgacgcccuccucggcgacccccacugcgacggcuuccagaacaaggagugggaccucuucgucgagcgcuccaaggccuacuccaacugcuaccccuacgacguccccgacuacgccucccuccgcucccucgucgccuccuccggcacccucgaguucaccaacgagggcuucaacuggaccggcgucgcccaggacggcaaguccuacgccugcaagcgcggcuccgucaacuccuucuucucccgccucaacuggcuccacaagcucgaguacaaguaccccgcccucaacgucaccaugcccaacaacgacaaguucgacaagcucuacaucuggggcguccaccaccccuccaccgacuccgaccagaccucccucuacguccaggccuccggccgcgucaccgucuccaccaagcgcucccagcagaccgucauccccaacaucggcucccgccccuggguccgcggcaucuccucccgcaucuccaucuacuggaccaucgucaagcccggcgacauccuccucaucaaguccaccggcaaccucaucgccccccgcggcuacuucaagauccgcaacggcaaguccuccaucaugcgcuccgacgcccccaucgacaacugcaacuccgagugcaucacccccaacggcuccauccccaacgacaagcccuuccagaacgucaaccgcaucaccuacggcgccugcccccgcuacgucaagcagaacacccucaagcucgccaccggcaugcgcaacguccccgagaagcagacccgcggcaucuucggcgccaucgccggcuucaucgagaacggcugggagggcauggucgacggcugguacggcuuccgccaccagaacuccgagggcaccggccaggccgccgaccucaaguccacccaggccgccaucgaccagaucaacggcaagcucaaccgccucaucgagaagaccaacgagaaguuccaccagaucgagaaggaguucuccgaggucgagggccgcauccaggaccucgagaaguacgucgaggacaccaagaucgaccucugguccuacaacgccgagcuccucgucgcccucgagaaccagcacaccaucgaccucaccgacuccgagaugaacaagcucuucgagcgcacccgcaagcagcuccgcgagaacgccgaggacaugggcaacggcugcuucaagaucuaccacaagugcgacaacgccugcaucggcuccauccgcaacggcaccuacgaccacgacgucuaccgcgacgaggcccucaacaaccgcuuccagaucaagggcgucgagcucaaguccggcuacaaggacuggauccucuggaucuccuucgccaucuccugcuuccuccucugcgucguccuccucggcuucaucaugugggccugccagaagggcaacauccgcugcaacaucugcaucuga

SEQ ID NO: 104713 - RNA, 1701 nt, Artificial Sequence
  derived and/or modified CDS sequence (opt2) from hemagglutinin__InfluenzaA__AFH00527
augaagaccaucaucgcccucuccuacauccucugccucgucuucgcccagaagauccccggcaacgacaacuccaccgccacccucugccucggccaccacgccguccccaacggcacccucgucaagaccaucaccaacgaccagaucgaggucaccaacgccaccgagcucguccaguccuccuccaccggccgcaucugcgacuccccccaccgcauccucgacggcgagaacugcacccucaucgacgcccuccucggcgacccccacugcgacggcuuccagaacaaggagugggaccucuucgucgagcgcuccaaggccuacuccaacugcuaccccuacgacguccccgacuacgccucccuccgcucccucgucgccuccuccggcacccucgaguucaacaacgaguccuucaacuggaccggcgucgcccagaacggcaccuccuacgccugcaagcgccgcuccaucaaguccuucuucucccgccucaacuggcuccaccagcucaaguacaaguaccccgcccucaacgucaccaugcccaacaacgacaaguucgacaagcucuacaucuggggcguccaccaccccuccaccgacuccgaccagaccucccucuacgcccaggccuccggccgcgucaccgucuccaccaagcgcucccagcagaccgucauccccaacaucggcucccgccccuggguccgcggcgucuccucccgcaucuccauccacuggaccaucgucaagcccggcgacauccuccucaucaacuccaccggcaaccucaucgccccccgcggcuacuucaagauccgcuccggcaaguccuccaucaugcgcuccgacgcccccaucggcaagugcaacuccgagugcaucacccccaacggcuccauccccaacgacaagcccuuccagaacgucaaccgcaucaccuacggcgccugcccccgcuacgucaagcagaacacccucaagcucgccaccggcaugcgcaacguccccgagaagcagacccgcggcaucuucggcgccaucgccggcuucaucgagaacggcugggagggcauggucgacggcugguacggcuuccgccaccagaacuccgagggcaccggccaggccgccgaccucaaguccacccaggccgccaucaaccagaucaacggcaagcucaaccgccucaucgagaagaccaacgagaaguuccaccagaucgagaaggaguucuccgaggucgagggccgcauccaggaccucgagaaguacgucgaggacaccaagaucgaccucugguccuacaacgccgagcuccucgucgcccucgagaaccagcacaccaucgaccucaccgacuccgagaugaacaagcucuucgagcgcacccgcaagcagcuccgcgagaacgccgaggacaugggcaacggcugcuucaagaucuaccacaagugcgacaacgccugcaucggcuccauccgcaacggcaccuacgaccacgacgucuaccgcgacgaggcccucaacaaccgcuuccagaucaagggcgucgagcucaaguccggcuacaaggacuggauccucuggaucuccuucgccaucuccugcuuccuccucugcgucguccuccucggcuucaucaugugggccugccagaagggcaacauccgcugcaacaucugcaucuga

SEQ ID NO: 104714 - RNA, 1701 nt, Artificial Sequence
  derived and/or modified CDS sequence (opt2) from hemagglutinin__InfluenzaA__AFH00538
augaagaccaucaucgcccucuccuacauccucugccucgucuucgcccagaagauccccggcaacgacaacuccaccgccacccucugccucggccaccacgccguccccaacggcacccucgucaagaccaucaccaacgaccagaucgaggucaccaacgccaccgagcucguccagcgcuccuccaccggccgcaucugcgacuccccccaccgcauccucgacggcgagaacugcacccucaucgacgcccuccucggcgacccccacugcgacggcuuccagaacaaggagugggaccucuucgucgagcgcuccaaggccuacuccaacugcuaccccuacgacguccccgacuacgccucccuccgcucccucgucgccuccuccggcacccucgaguucaacaacgaguccuucaacuggaccggcgucgcccagaacggcaccuccuacgccugcaagcgccgcuccaucaaguccuucuucucccgccucaacuggcuccaccagcucaaguacaaguaccccgcccucaacgucaccaugcccaacaacgacaaguucgacaagcucuacaucuggggcguccaccaccccuccaccgacuccgaccagaccucccucuacgcccaggccuccggccgcgucaccgucuccaccaagcgcucccagcagaccgucauccccaacaucggcucccgccccuggguccgcggcgucuccucccgcaucuccaucuacuggaccaucgucaagcccggcgacauccuccucaucaacuccaccggcaaccucaucgccccccgcggcuacuucaagauccgcuccggcaaguccuccaucaugcgcuccgacgcccccaucggcaagugcaacuccgagugcaucacccccaacggcuccauccccaacgacaagcccuuccagaacgucaaccgcaucaccuacggcgccugcccccgcuacgucaagcagaacacccucaagcucgccaccggcaugcgcaacguccccgagaagcagacccgcggcaucuucggcgccaucgccggcuucaucgagaacggcugggagggcauggucgacggcugguacggcuuccgccaccagaacuccgagggcaccggccaggccgccgaccucaaguccacccaggccgccaucaaccagaucaacggcaagcucaaccgccucaucgagaagaccaacgagaaguuccaccagaucgagaaggaguucuccgaggucgagggccgcauccaggaccucgagaaguacgucgaggacaccaagaucgaccucugguccuacaacgccgagcuccucgucgcccucgagaaccagcacaccaucgaccucaccgacuccgagaugaacaagcucuucgagcgcacccgcaagcagcuccgcgagaacgccgaggacaugggcaacggcugcuucaagaucuaccacaagugcgacaacgccugcaucggcuccauccgcaacggcaccuacgaccacgacgucuaccgcgacgaggcccucaacaaccgcuuccagaucaagggcgucgagcucaaguccggcuacaaggacuggauccucuggaucuccuucgccaucuccugcuuccuccucugcgucguccuccucggcuucaucaugugggccugccagaagggcaacauccgcugcaacaucugcaucuga

SEQ ID NO: 104715 - RNA, 1701 nt, Artificial Sequence
  derived and/or modified CDS sequence (opt2) from hemagglutinin__InfluenzaA__AFH00549
augaagaccaucaucgcccucuccuacauccucugccucgucuucgcccagaagcuccccggcaacgacaacuccaccgccacccucugccucggccaccacgccguccccaacggcacccucgucaagaccaucaccaacgaccagaucgaggucaccaacgccaccgagcucguccaguccuccuccaccggccgcaucugcgacuccccccaccgcauccucgacggcgagaacugcacccucaucgacgcccuccucggcgacccccacugcgacggcuuccagaacaaggagugggaccucuucgucgagcgcuccaaggccuacuccaacugcuaccccuacgacguccccgacuacgccucccuccgcucccucgucgccuccuccggcacccucgaguucaacaacgaguccuucaacuggaccggcgucgcccagaacggcaccuccuccgccugcaagcgccgcuccaucaaguccuucuucucccgccucaacuggcuccaccagcucaaguacaaguaccccgcccucaacgucaccaugcccaacaacgacaaguucgacaagcucuacaucuggggcguccaccaccccuccaccgacuccgaccagaccucccucuacgcccaggcccccggccgcgucaccgucuccacccgccgcucccagcagaccgucauccccaacaucggcucccgccccuggguccgcggcgucuccuccaucaucuccaucuacuggaccaucgucaagcccggcgacauccuccucaucaacuccaccggcaaccucaucgccccccgcggcuacuucaagauccgcuccggcaaguccuccaucaugcgcuccgacgcccccaucuccaagugcaacuccgagugcaucacccccaacggcuccauccccaacgacaagcccuuccagaacgucaaccgcaucaccuacggcgccugcccccgcuacgucaagcagaacacccucaagcucgccaccggcaugcgcaacguccccgagaagcagacccgcggcaucuucggcgccaucgccggcuucaucgagaacggcugggagggcauggucgacggcugguacggcuuccgccaccagaacuccgagggcaccggccaggccgccgaccucaaguccacccaggccgccaucaaccagaucaacggcaagcucaaccgccucaucgagaagaccaacgagaaguuccaccagaucgagaaggaguucuccgaggucgagggccgcauccaggaccucgagaaguacgucgaggacaccaagaucgaccucugguccuacaacgccgagcuccucgucgcccucgagaaccagcacaccaucgaccucaccgacuccgagaugaacaagcucuucgagcgcacccgcaagcagcuccgcgagaacgccgaggacaugggcaacggcugcuucaagaucuaccacaagugcgacaacgccugcaucggcuccauccgcaacggcaccuacgaccacgacgucuaccgcgacgaggcccucaacaaccgcuuccagaucaagggcgucgagcucaaguccggcuacaaggacuggauccucuggaucuccuucgccaucuccugcuuccuccucugcgucguccuccucggcuucaucaugugggccugccagaagggcaacauccgcugcaacaucugcaucuga

SEQ ID NO: 104716 - RNA, 1701 nt, Artificial Sequence
  derived and/or modified CDS sequence (opt2) from hemagglutinin__InfluenzaA__AFH00560
augaagaccaucaucgcccucuccuacauccucugccucgucuucgcccagaagcuccccgucaacgacaacuccaccgccacccucugccucggccaccacgccguccccaacggcacccucgucaagaccaucaccaacgaccacaucgaggucaccaacgccaccgagcucguccaguccuccuccaccggccgcaucugcgacaucccccaccagauccucgacggcgagaacugcacccucaucgacgcccuccucggcgacccccacugcgacggcuuccagaacaaggagugggaccucuucgucgagcgcuccaccgccuacuccaacugcuaccccuacgacguccccgacuacgccucccuccgcucccucgucgccuccuccggcacccucgaguucaacaacgaguccuucaacuggaccggcgucgcccagaacggcaccuccuccgccugcaagcgccgcuccaucaaguccuucuucucccgccucaacuggcuccaccagcucaaguacaaguaccccgcccucaacgucaccaugcccaacaacgagaaguucgacaagcucuacaucuggggcguccaccaccccuccaccgacuccgaccagaucucccucuacgcccaggcccccggccgcgucaccgucuccaccaagcgcucccagcagaccgucauccccaacaucggcucccgccccuggguccgcggcgucuccucccgcaucuccaucuacuggaccaucgucaagcccggcgacauccuccucaucaacuccaccggcaaccucaucgccccccgcggcuacuucaagauccgcuccggcaaguccuccaucaugcgcuccgacgcccccaucggcaagugcaacuccgagugcaucacccccaacggcuccauccccaacgacaagcccuuccagaacgucaaccgcaucaccuacggcgccugcccccgcuacgucaagcagaacacccucaagcucgccaccggcaugcgcaacguccccgagaagcagacccgcggcaucuucggcgccaucgccggcuucaucgagaacggcugggagggcauggucgacggcugguacggcuuccgccaccagaacuccgagggcaccggccaggccgccgaccucaaguccacccaggccgccaucaaccagaucaacggcaagcucaaccgccucaucgagaagaccaacgagaaguuccaccagaucgagaaggaguucuccgaggccgagggccgcauccaggaccucgagaaguacgucgaggacaccaagaucgaccucugguccuacaacgccgagcuccucgucgcccucgagaaccagcacaccaucgaccucaccgacuccgagaugaacaagcucuucgagcgcacccgcaagcagcuccgcgagaacgccgaggacaugggcaacggcugcuucaagaucuaccacaagugcgacaacgccugcaucggcuccauccgcaacggcaccuacgaccacgacgucuaccgcgacgaggcccucaacaaccgcuuccagaucaagggcgucgagcucaaguccggcuacaaggacuggauccucuggaucuccuucgccaucuccugcuuccuccucugcaucguccuccucggcuucaucaugugggccugccagaagggcaacauccgcugcaacaucugcaucuga

SEQ ID NO: 104717 - RNA, 1701 nt, Artificial Sequence
  derived and/or modified CDS sequence (opt2) from hemagglutinin__InfluenzaA__AFH00571
augaagaccaucaucgcccucuccuacauccucugccucgucuucgcccagaagcuccccgucaacgacaacuccaccgccacccucugccucggccaccacgccguccccaacggcacccucgucaagaccaucaccaacgacaacaucgaggucaccaacgccaccgagcucguccaguccuccuccaccggccgcaucugcgacuccccccaccagauccucgacggcgagaacugcacccucaucgacgcccuccucggcgacccccacugcgacggcuuccagaacaaggagugggaccucuucgucgagcgcuccaccgccuacuccaacugcuaccccuacgacguccccgacuacgccucccuccgcucccucgucgccuccuccggcacccucgaguucaacaacgaguccuucaacuggaccggcgucgaccagaacggcaccuccuccgccugcaagcgccgcuccaacaaguccuucuucucccgccucaacuggcuccaccagcucaaguacaaguaccccgcccucaacgucaccaugcccaacaacgagaaguucgacaagcucuacaucuggggcguccaccaccccuccaccgacuccgaccagaucucccucuacgcccaggccuccggccgcgucaccgucuccaccaagcgcucccagcagaccgucauccccaacaucggcucccgccccuggguccgcggcgucuccucccgcaucuccaucuacuggaccaucgucaagcccggcgacauccuccucaucaacuccaccggcaaccucaucgccccccgcggcuacuucaagauccgcuccggcaaguccuccaucaugcgcuccaacgcccccaucggcaagugcaacuccgagugcaucacccccaacggcuccauccccaacgacaagcccuuccagaacgucaaccgcaucaccuacggcgccugcccccgcuacgucaagcagaacacccucaagcucgccaccggcaugcgcaacguccccgagaagcagacccgcggcaucuucggcgccaucgccggcuucaucgagaacggcugggagggcauggucgacggcugguacggcuuccgccaccagaacuccgagggcaccggccaggccgccgaccucaaguccacccaggccgccaucaaccagaucaacggcaagcucaaccgccucaucgagaagaccaacgagaaguuccaccagaucgagaaggaguucuccgaggucgagggccgcauccaggaccucgagaaguacgucgaggacaccaagaucgaccucugguccuacaacgccgagcuccucgucgcccucgagaaccagcacaccaucgaccucaccgacuccgagaugaacaagcucuucgagcgcacccgcaagcagcuccgcgagaacgccgaggacaugggcaacggcugcuucaagaucuaccacaagugcgacaacgccugcaucggcuccauccgcaacggcaccuacgaccacgacgucuaccgcgacgaggcccucaacaaccgcuuccagaucaagggcgucgagcucaaguccggcuacaaggacuggauccucuggaucuccuucgccaucuccugcuuccuccucugcgucguccuccucggcuucaucaugugggccugccagaagggcaacauccgcugcaacaucugcaucuga

SEQ ID NO: 104718 - RNA, 1701 nt, Artificial Sequence
  derived and/or modified CDS sequence (opt2) from hemagglutinin__InfluenzaA__AFH00582
augaagaccaucaucgcccucuccuacauccucugccucgucuucgcccagaagcuccccggcaacgacaacuccaccgccacccucugccucggccaccacgccguccccaacggcacccucgucaagaccaucaccaacgaccagaucgaggucaccaacgccaccgagcucguccaguccuccuccaccggcggcaucugcgacuccccccaccagauccucgacggcgagaacugcacccucaucgacgcccuccucggcgacccccacugcgacggcuuccagaacaaggagugggaccucuucgucgagcgcuccaaggccuacuccaacugcuaccccuacgacguccccgacuacgccucccuccgcucccucgucgccuccuccggcacccucgaguucaacaacgaguccuucaacuggaccggcgucgcccagaacggcaccuccuccgccugcaagcgccgcuccaacaaguccuucuucucccgccucaacuggcuccaccagcucaaguacaaguaccccgcccucaacgucaccaugcccaacaacgagaaguucgacaagcucuacaucuggggcguccaccaccccuccaccgacuccgaccagaucucccucuacgcccaggcccccggccgcgucaccgucuccaccaagcgcucccagcagaccgucauccccaacaucggcucccgccccuggguccgcggcgucuccucccgcaucuccaucuacuggaccaucgucaagcccggcgacauccuccucaucaacugcaccggcaaccucaucgccccccgcggcuacuucaagauccgcuccggcaaguccuccaucaugcgcuccgacgccuccaucggcaagugcaacuccgagugcaucacccccaacggcuccauccccaacgacaagcccuuccagaacgucaaccgcaucaccuacggcgccugcccccgcuacgucaagcagaacacccucaagcucgccaccggcaugcgcaacguccccgagaagcagacccgcggcaucuucggcgccaucgccggcuucaucgagaacggcugggagggcauggucgacggcugguacggcuuccgccaccagaacuccgagggcaccggccaggccgccgaccucaaguccacccaggccgccaucaaccagaucaacggcaagcucaaccgccucaucgagaagaccaacgagaaguuccaccagaucgagaaggaguucuccgaggucgagggccgcauccaggaccucgagaaguacgucgaggacaccaagaucgaccucugguccuacaacgccgagcuccucgucgcccucgagaaccagcacaccaucgaccucaccgacuccgagaugaacaagcucuucgagcgcaccaagaagcagcuccgcgagaacgccgaggacaugggcaacggcugcuucaagaucuaccacaagugcgacaacgccugcaucggcuccauccgcaacggcaccuacgaccacgacgucuaccgcgacgaggcccucaacaaccgcuuccagaucaagggcgucgagcucaaguccggcuacaaggacuggauccucuggaucuccuucgccaccuccugcuuccuccucugcgucguccuccucggcuucaucaugugggccugccagaagggcaacauccgcugcaacaucugcaucuga

SEQ ID NO: 104719 - RNA, 1701 nt, Artificial Sequence; identical to SEQ ID NO: 97341
  derived and/or modified CDS sequence (opt2) from hemagglutinin__InfluenzaA__AFH00593

SEQ ID NO: 104720 - RNA, 1701 nt, Artificial Sequence; identical to SEQ ID NO: 97341
  derived and/or modified CDS sequence (opt2) from hemagglutinin__InfluenzaA__AFH00604

SEQ ID NO: 104721 - RNA, 1701 nt, Artificial Sequence
  derived and/or modified CDS sequence (opt2) from hemagglutinin__InfluenzaA__AFH00615
augaagaccaucaucgcccucuccuacauccucugccucgucuucgcccagaagcuccccggcaacgacaacuccaccgccacccucugccucggccaccacgccguccccaacggcaccaucgucaagaccaucaccaacgaccagaucgaggucaccaacgccaccgagcucguccaguccuccuccaccggcggcaucugcaacuccccccaccagauccucgacggcgagaacugcacccucaucgacgcccuccucggcgacccccagugcgacggcuuccagaacaagaagugggaccucuucgucgagcgcuccaaggccuacuccaacugcuaccccuacgacguccccgacuacgccucccuccgcucccucgucgccuccuccggcacccucgaguucaacaacgaguccuucaacuggaccggcgucacccagaacggcaccuccuccgccugcaagcgccgcuccaacaaguccuucuucucccgccucaacuggcucacccaccucaaguacaaguaccccgcccucaacgucaccaugcccaacaacgagaaguucgacaagcucuacaucuggggcguccaccaccccggcaccgacuccgaccagaucucccucuacgcccaggccuccggccgcaucaccgucuccaccaagcgcucccagcagaccgucauccccaacaucggcucccgcccccgcguccgcgacaucuccucccgcaucuccaucuacuggaccaucgucaagcccggcgacauccuccucaucaacuccaccggcaaccucaucgccccccgcggcuacuucaagauccgcuccggcaaguccuccaucaugcgcuccgacgcccccaucggcaagugcaacuccgagugcaucacccccaacggcuccauccccaacgacaagcccuuccagaacgucaaccgcaucaccuacggcgccugcccccgcuacgucaagcagaacacccucaagcucgccaccggcaugcgcaacguccccgagaagcagacccgcggcaucuucggcgccaucgccggcuucaucgagaacggcugggagggcauggucgacggcugguacggcuuccgccaccagaacuccgagggcaccggccaggccgccgaccucaaguccacccaggccgccaucaaccagaucaacggcaagcucaaccgccucaucggcaagaccaacgagaaguuccaccagaucgagaaggaguucuccgaggucgagggccgcauccaggacaucgagaaguacgucgaggacaccaagaucgaccucugguccuacaacgccgagcuccucgucgcccucgagaaccagcacaccaucgaccucaccgacuccgagaugaacaagcucuucgagcgcaccaagaagcagcuccgcgagaacgccgaggacaugggcaacggcugcuucaagaucuaccacaagugcgacaacgccugcaucgaguccauccgcaacggcaccuacgaccacgacgucuaccgcgacgaggcccucaacaaccgcuuccagaucaagggcgucgagcucaaguccggcuacaaggacuggauccucuggaucuccuucgccaucuccugcuuccuccucugcgucgcccuccucggcuucaucaugugggccugccagaagggcaacauccgcugcaacaucugcaucuga

SEQ ID NO: 104722 - RNA, 1701 nt, Artificial Sequence; identical to SEQ ID NO: 104313
  derived and/or modified CDS sequence (opt2) from hemagglutinin__InfluenzaA__AFH00626

SEQ ID NO: 104723 - RNA, 1701 nt, Artificial Sequence
  derived and/or modified CDS sequence (opt2) from hemagglutinin__InfluenzaA__AFH00637
augaagaccaucaucgcccucuccuacauccucugccucgucuucgcccagaagcuccccggcaacgacaacuccaccgccacccucugccucggccaccacgccguccccaacggcaccaucgucaagaccaucaccaacgaccagaucgaggucaccaacgccaccgagcucguccaguccuccuccaccggcggcaucugcgacuccccccaccagauccucgacggcgagaacugcacccucaucgacgcccuccucggcgacccccagugcgacggcuuccagaacaagaagugggaccucuucgucgagcgcuccaaggccuacuccaacugcuaccccuacgacguccccgacuacgccucccuccgcucccucgucgccuccuccggcacccucgaguucaacaacgaguccuucaacuggaccggcgucacccagaacggcaccuccuccuccugcaagcgccgcuccaacaacuccuucuucucccgccucaacuggcucacccaccucaaguucaaguaccccgcccucaacgucaccaugcccaacaacgagaaguucgacaagcucuacaucuggggcguccaccaccccggcaccaacaacgaccagaucucccucuacacccaggccuccggccgcaucaccgucuccaccaagcgcucccagcagaccgucauccccaacaucggcucccgcccccgcguccgcgacauccccucccgcaucuccaucuacuggaccaucgucaagcccggcgacauccuccucaucaacuccaccggcaaccucaucgccccccgcggcuacuucaagauccgcuccggcaaguccuccaucaugcgcuccgacgcccccaucggcaagugcaacuccgagugcaucacccccaacggcuccauccccaacgacaagcccuuccagaacgucaaccgcaucaccuacggcgccugcccccgcuacgucaagcagaacacccucaagcucgccaccggcaugcgcaacguccccgagaagcagacccgcggcaucuucggcgccaucgccggcuucaucgagaacggcugggagggcauggucgacggcugguacggcuuccgccaccagaacuccgagggcaucggccaggccgccgaccucaaguccacccaggccgccaucaaccagaucaacggcaagcucaaccgccucaucggcaagaccaacgagaaguuccaccagaucgagaaggaguucuccgaggucgagggccgcauccaggaccucgagaaguacgucgaggacaccaagaucgaccucugguccuacaacgccgagcuccucgucgcccucgagaaccagcacaccaucgaccucaccgacuccgagaugaacaagcucuucgagcgcaccaagaagcagcuccgcgagaacgccgaggacaugggcaacggcugcuucaagaucuaccacaagugcgacaacgccugcaucggcuccauccgcaacggcaccuacgaccacgacgucuaccgcgacgaggcccucaacaaccgcuuccagaucaagggcgucgagcucaaguccggcuacaaggacuggauccucuggaucuccuucgccaucuccugcuuccuccucugcgucgcccuccucggcuucaucaugugggccugccagaagggcaacauccgcugcaacaucugcaucuga

SEQ ID NO: 104724 - RNA, 1701 nt, Artificial Sequence
  derived and/or modified CDS sequence (opt2) from hemagglutinin__InfluenzaA__AFH00648
augaagaccaucaucgcccucuccuacauccucugccucgucuucgcccagaagcuccccggcaacgacgacuccaccgccacccucugccucggccaccacgccguccccaacggcaccaucgucaagaccaucaccaacgaccagaucgaggucaccaacgccaccgagcucguccaguccuccuccaccggcggcaucugcgacuccccccaccagauccucgacggcgagaacugcacccucaucgacgcccuccucggcgacccccagugcgacggcuuccagaacaagaagugggaccucuucgucgagcgcuccaaggccuacuccaacugcuaccccuacgacguccccgacuacgccucccuccgcucccucgucgccuccuccggcacccucgaguucaacgacgaguccuucaacuggaccggcgucacccagaacggcaccuccuccuccugcaagcgccgcuccaacaacuccuucuucucccgccucaacuggcucacccaccucaaguucaaguaccccgcccucaacgucaccaugcccaacaacgagaaguucgacaagcucuacaucuggggcguccaccaccccgucaccgacaacgaccagaucuuccucuacgcccaggccuccggccgcaucaccgucuccaccaagcgcucccagcagaccgucauccccaacaucggcucccgcccccgcauccgcaacauccccucccgcaucuccaucuacuggaccaucgucaagcccggcgacauccuccucaucaacuccaccggcaaccucaucgccccccgcggcuacuucaagauccgcuccggcaaguccuccaucaugcgcuccgacgcccccaucggcaagugcaacuccgagugcaucacccccaacggcuccauccccaacgacaagcccuuccagaacgucaaccgcaucaccuacggcgccugcccccgcuacgucaagcagaacacccucaagcucgccaccggcaugcgcaacguccccgagaagcagacccgcggcaucuucggcgccaucgccggcuucaucgagaacggcugggagggcauggucgacggcugguacggcuuccgccaccagaacuccgagggcaucggccaggccgccgaccucaaguccacccaggccgccaucaaccagaucaacggcaagcucaaccgccucaucggcaagaccaacgagaaguuccaccagaucgagaaggaguucuccgaggucgagggccgcauccaggaccucgagaaguacgucgaggacaccaagaucgaccucugguccuacaacgccgagcuccucgucgcccucgagaaccagcacaccaucgaccucaccgacuccgagaugaacaagcucuucgagcgcaccaagaagcagcuccgcgagaacgccgaggacaugggcaacggcugcuucaagaucuaccacaagugcgacaacgccugcaucggcuccauccgcaacggcaccuacgaccacgacgucuaccgcgacgaggcccucaacaaccgcuuccagaucaagggcgucgagcucaaguccggcuacaaggacuggauccucuggaucuccuucgccaucuccugcuuccuccucugcgucgcccuccucggcuucaucaugugggccugccagaagggcaacauccgcugcaacaucugcaucuga

SEQ ID NO: 104725 - RNA, 1701 nt, Artificial Sequence
  derived and/or modified CDS sequence (opt2) from hemagglutinin__InfluenzaA__AFH00659
augaagaccaucaucgcccucuccuacauccucugccucgucuucacccagaagcuccccggcaacgacaacuccaccgccacccucugccucggccaccacgccguccccaacggcaccauggucaagaccaucaccaacgaccagaucgaggucaccaacgccaccgagcucguccaguccuccuccaccggcgagaucugcgacuccccccaccagauccucgacggcgagaacugcacccucaucgacgcccuccucggcgacccccagugcgacggcuuccagaacaagaagugggaccucuucgucgagcgcuccaaggcccacuccaacugcuaccccuacgacguccccgacuacgccucccuccgcucccucaucgccuccuccggcacccucgaguucaacaacgaguccuucaacuggaccggcgucacccagaacggcaccuccuccgccugcaagcgccgcuccgacaacuccuucuucucccgccucaacuggcucacccaccucaaguucaaguaccccgcccucaacgucaccaugcccaacaacgaggaguucgacaagcucuacaucuggggcguccaccaccccggcaccgacaacgaccagaucucccucuacgcccaggccuccggccgcaucaccgucuccaccaagcgcucccagcagaccgucauccccaacaucggcucccgcccccgcguccgcgacauccccucccgcaucuccaucuacuggaccaucgucaagcccggcgacauccuccucaucaacuccaccggcaaccucaucgccccccgcggcuacuucaagauccgcuccggcaaguccuccaucaugcgcuccgacgcccccaucggcaagugcaacuccggcugcaucacccccaacggcuccauccccaacgacaagcccuuccagaacgucaaccgcaucaccuacggcgccugcccccgcuacgucaagcagaacacccucaagcucgccaccggcaugcgcaacguccccgagaagcagacccgcggcaucuucggcgccaucgccggcuucaucgagaacggcugggagggcauggucgacggcugguacggcuuccgccaccagaacuccgagggcaucggccaggccgccgaccucaaguccacccaggccgccaucgaccagaucaacggcaagcucaaccgccucaucggcaagaccaacgagaaguuccaccagaucgagaaggaguucuccgaggucgagggccgcauccaggaccucgagaaguacgucgaggacaccaagaucgaccucugguccuacaacgccgagcuccucgucgcccucgagaaccagcacaccaucgaccucaccgacuccgagaugaacaagcucuucgagcgcaccaagaagcagcuccgcgagaacgccgaggacaugggcaacggcugcuucaagaucuaccacaagugcgacaacgccugcaucggcuccauccgcaacggcaccuacgaccacgacgucuaccgcgacgaggcccucaacaaccgcuuccagaucaagggcgucgagcucaaguccggcuacaaggacuggauccucuggaucuccuucgccaucuccugcuuccuccucugcgucgcccuccucggcuucaucaugugggccugccagaagggcaacauccgcugcaacaucugcaucuga

SEQ ID NO: 104726 - RNA, 1701 nt, Artificial Sequence
  derived and/or modified CDS sequence (opt2) from hemagglutinin__InfluenzaA__AFH00670
augaagaccaucaucgcccucuccuacauccucugccucgucuucgcccagaagcuccccggcaucgacaacuccaccgccacccucugccucggccaccacgccguccccaacggcaccaucgucaagaccaucaccaacgaccagaucgaggucaccaacgccaccgagcucguccagaacuccuccaccggcggcaucugcgacuccccccaccagauccucgacggcgagaacugcacccucaucgacgcccuccucggcgacccccagugcgacggcuuccagaacaagaagugggaccucuucgucgagcgcuccaaggccuacuccaacugcuaccccuacgacguccccgacuacgccucccuccgcucccucgucgccuccuccggcacccucgaguucaacaacgaguccuucaacuggaccggcgucacccagaacggcaccuccuccgccugcaagcgcggcuccaacaacuccuucuucucccgccucaacuggcucacccacuccaaguucaaguaccccgcccucaacgucaccaugcccaacaacgaggaguucgacaagcucuacaucuggggcguccuccaccccggcaccgacaacgaccagaucuuccucuacgcccaggccuccggccgcaucaccgucuccaccaagcgcucccagcagaccgucauccccaacaucggcucccgcccccgcguccgcaacauccccucccgcaucuccaucuacuggaccaucgucaagcccggcgacauccuccucaucaacuccaccggcaaccucaucgccccccgcggcuacuucaagauccgcuccggcaaguccuccaucaugcgcuccgacgcccccaucggcaagugcaacuccgagugcaucacccccaacggcuccauccccaacgacaagcccuuccagaacgucaaccgcaucaccuacggcgccugcccccgcuacgucaagcagaacacccucaagcucgccaccggcaugcgcaacguccccgagaagcagacccgcggcaucuucggcgccaucgccggcuucaucgagaacggcugggagggcauggucgacggcugguacggcuuccgccaccagaacuccgagggcaucggccaggccgccgaccucaaguccacccaggccgccaucgaccagaucaacggcaagcucaaccgccucaucggcaagaccaacgagaaguuccaccagaucgagaaggaguucuccgaggucgagggccgcauccaggaccucgagaaguacgucgaggacaccaagaucgaccucugguccuacaacgccgagcuccucgucgcccucgagaaccagcacaccaucgaccucaccgacuccgagaugaacaagcucuucgagaagaccaagaagcagcuccgcgagaacgccgaggacaugggcaacggcugcuucaagaucuaccacaagugcgacaacgccugcaucggcuccauccgcaacggcaccuacgaccacgacgucuaccgcgacgaggcccucaacaaccgcuuccagaucaagggcgucgagcucaaguccggcuacaaggacuggauccucuggaucuccuucgccaucuccugcuuccuccucugcgucgcccuccucggcuucaucaugugggccugccagaagggcaacauccgcugcaacaucugcaucuga

SEQ ID NO: 104727 - RNA, 1701 nt, Artificial Sequence
  derived and/or modified CDS sequence (opt2) from hemagglutinin__InfluenzaA__AFH00681
augaagaccaucaucgcccucuccuacauccucugccucgucuucgcccagaagcuccccggcaacgacaacuccaccgccacccucugccucggccaccacgccguccccaacggcaccaucgucaagaccaucaccaacgaccagaucgaggucaccaacgccaccgagcucguccaguccuccuccaccggcgagaucugcgacuccccccaccagauccucgacggcgagaacugcacccucaucgacgcccuccucggcgacccccagugcgacggcuuccagaacaagaagugggaccucuucaucgagcgcuccaaggccuacuccaacugcuaccccuacgacguccccgacuacgccucccuccgcucccucgucgccuccuccggcacccucgaguucaacaacgaguccuucaacuggaccggcgucacccagaacggcaccuccuccgccugcauccgccgcuccaacaacuccuucuucucccgccucaacuggcucacccaccucaaguucaaguaccccgcccucaacgucaccaugcccaacaaggagaaguucgacaagcucuacaucuggggcguccaccaccccggcaccgacaacgaccagaucuuccucuacgcccaggccuccggccgcaucaccgucuccaccaagcgcucccagcagaccgucauccccaacaucggcucccgcccccgcguccgcaacauccccucccgcaucuccaucuacuggaccaucgucaagcccggcgacauccuccucaucaacuccaccggcaaccucaucgccccccgcggcuacuucaagauccgcuccggcaaguccuccaucaugcgcuccgacgcccccaucggcaagugcaacuccgagugcaucacccccaacggcuccauccccaacgacaagcccuuccagaacgucaaccgcaucaccuacggcgccugcccccgcuacgucaagcagaacacccucaagcucgccaccggcaugcgcaacguccccgagaagcagacccgcggcaucuucggcgccaucgccggcuucaucgagaacggcugggagggcauggucgacggcugguacggcuuccgccaccagaacuccgagggcaucggccaggccgccgaccucaaguccacccaggccgccaucgaccagaucaacggcaagcucaaccgccucaucggcaagaccaacgagaaguuccaccagaucgagaaggaguucuccgaggucgagggccgcauccaggaccucgagaaguacgucgaggacaccaagaucgaccucugguccuacaacgccgagcuccucgucgcccucgagaaccagcacaccaucgaccucaccgacuccgagaugaacaagcucuucgagaagaccaagaagcagcuccgcgagaacgccgaggacaugggcaacggcugcuucaagaucuaccacaagugcgacaacgccugcaucggcuccauccgcaacggcaccuacgaccacgacgucuaccgcgacgaggcccucaacaaccgcuuccagaucaagggcgucgagcucaaguccggcuacaaggacuggauccucuggaucuccuucgccaucuccugcuuccuccucugcgucgcccuccucggcuucaucaugugggccugccagaagggcaacauccgcugcaacaucugcaucuga

SEQ ID NO: 104728 - RNA, 1701 nt, Artificial Sequence; identical to SEQ ID NO: 97964
  derived and/or modified CDS sequence (opt2) from hemagglutinin__InfluenzaA__AFH00692

SEQ ID NO: 104729 - RNA, 1701 nt, Artificial Sequence
  derived and/or modified CDS sequence (opt2) from hemagglutinin__InfluenzaA__AFH00703
augaagaccaucaucgcccucuccuacauccucugccucgucuucgcccagaagcuccccggcaacgacaacuccaccgccacccucugccucggccaccacgccguccccaacggcaccaucgucaagaccaucaccaacgaccagaucgaggucaccaacgccaccgagcucguccaguccuccuccaccggcaagaucugcgacuccccccaccagauccucgacggcaagaacugcacccucaucgacgcccuccucggcgacccccagugcgacggcuuccagaacaagaagugggaccucuucgucgagcgcuccaaggccuacuccaacugcuaccccuacgacguccccgacuacgccucccuccgcucccucgucgccuccuccggcacccucgaguucaacaacgaguccuucaacuggaccggcgucacccagaacggcaccuccuccgccugcauccgccgcuccaagaacuccuucuucucccgccucaacuggcucacccaccucaacuucaaguacuccgcccucaacgucaccaugcccaacaacgagcaguucgacaagcucuacaucuggggcguccaccaccccggcaccgacaaggaccagaucuuccucuacgcccaggccuccggccgcaucaccgucuccaccaagcgcucccagcagaccgucauccccaacaucggcucccgcccccgcguccgcaacauccccucccgcaucuccaucuacuggaccaucgucaagcccggcgacauccuccucaucaacuccaccggcaaccucaucgccccccgcggcuacuucaagaugcaguccggcaaguccuccaucaugcgcuccgacgcccccaucggcaagugcaacuccgagugcaucacccccaacggcuccauccccaacgacaagcccuuccagaacgucaaccgcaucaccuacggcgccugcccccgcuacgucaagcagaacacccucaagcucgccaccggcaugcgcaacguccccgagaagcagacccgcggcaucuucggcgccaucgccggcuucaucgagaacggcugggagggcauggucgacggcugguacggcuuccgccaccagaacuccgagggccgcggccaggccgccgaccucaaguccacccaggccgccaucgaccagaucaacggcaagcucaaccgccucaucggcaagaccaacgagaaguuccaccagaucgagaaggaguucuccgaggucgagggccgcauccaggaccucgagaaguacgucgaggacaccaagaucgaccucugguccuacaacgccgagcuccucgucgcccucgagaaccagcacaccaucgaccucaccgacuccgagaugaacaagcucuucgagaagaccaagaagcagcuccgcgagaacgccgaggacaugggcaacggcugcuucaagaucuaccacaagugcgacaacgccugcaucggcuccauccgcaacggcaccuacgaccacgacgucuaccgcgacgaggcccucaacaaccgcuuccagaucaagggcgucgagcucaaguccggcuacaaggacuggauccucuggaucuccuucgccaucuccugcuuccuccucugcgucgcccuccucggcuucaucaugugggccugccagaagggcaacauccgcugcaacaucugcaucuga

SEQ ID NO: 104730 - RNA, 1701 nt, Artificial Sequence
  derived and/or modified CDS sequence (opt2) from hemagglutinin__InfluenzaA__AFH00714
augaagaccaucaucgcccucuccuacaucuucugccucgucuucgcccagaaccuccccggcaacgacaacuccaccgccacccucugccucggccaccacgccguccccaacggcacccucgucaagaccaucaccaacgaccagaucgaggucaccaacgccaccgagcucguccaguccuccuccaccggccgcaucugcgacuccccccaccgcauccucgacggcaagaacugcacccucaucgacgcccuccucggcgacccccacugcgacggcuuccagaacgagaagugggaccucuucgucgagcgcuccaaggccuucuccaacugcuaccccuacgacguccccgacuacgccucccuccgcucccucgucgccuccuccggcacccucgaguucaucaacgagggcuucaacuggaccggcgucacccaguccggcggcuccuacgccugcaagcgcggcuccgacaaguccuucuucucccgccucaacuggcucuacgaguccgaguccaaguaccccguccucaacgucaccaugcccaacaacggcaacuucgacaagcucuacaucuggggcguccaccaccccuccaccgacaaggagcagaccaaccucuacguccgcgccuccggccgcgucaccgucuccaccaagcgcucccagcagaccaucauccccaacaucggcucccgccccuggguccgcggccucuccuccggcaucuccaucuacuggaccaucgucaagcccggcgacauccuccucaucaacuccaacggcaaccucaucgccccccgcggcuacuucaagauccgcaccggcaaguccuccaucaugcgcuccgacgcccccaucggcaccugcuccuccgagugcaucacccccaacggcuccauccccaacgacaagcccuuccagaacgucaacaagaucaccuacggcgccugccccaaguacgucaagcagaacacccucaagcucgccaccggcaugcgcaacguccccgagaagcagacccgcggcaucuucggcgccaucgccggcuucaucgagaacggcugggagggcauggucgacggcugguacggcuuccgccaccagaacuccgagggcaccggccaggccgccgaccucaaguccacccaggccgccaucgaccagaucaacggcaagcucaaccgcgucaucgagaagaccaacgagaaguuccaccagaucgagaaggaguucuccgaggucgagggccgcauccaggaccucgagaaguacgucgaggacaccaagaucgaccucugguccuacaacgccgagcuccucgucgcccucgagaaccagcacaccaucgaccucaccgacuccgagaugaacaagcucuucgagaagacccgccgccagcuccgcgagaacgccgaggacaugggcaacggcugcuucaagaucuaccacaagugcgacaacgccugcaucggcuccauccgcaacggcaccuacgaccacgacgucuaccgcgacgaggcccucaacaaccgcuuccagaucaagggcgucgagcucaaguccggcuacaaggacuggauccucuggaucuccuucgccaucuccugcuuccuccucugcgucguccuccucggcuucaucaugugggccugccagaagggcaacauccgcugcaacaucugcaucuga

SEQ ID NO: 104731 - RNA, 1701 nt, Artificial Sequence
  derived and/or modified CDS sequence (opt2) from hemagglutinin__InfluenzaA__AFH00725
augaagaccaucaucgcccucuccuacaucuucugccucaucuucgcccagaaccuccccggcaacgacaacuccaccgccacccucugccucggccaccacgccguccccaacggcacccucgucaagaccaucaccaacgaccagaucgaggucaccaacgccaccgagcucguccaguccuccuccaccggccgcaucugcgacuccccccaccgcauccucgacggcaagaacugcacccucaucgacgcccuccucggcgacccccacugcgacggcuuccagaacgagaagugggaccucuucgucgagcgcuccaaggccuucuccaacugcuaccccuacgacguccccgacuacgccucccuccgcucccucgucgccuccuccggcacccucgaguucaucaacgagggcuucaacuggaccggcgucacccaguccggcggcuccuacgccugcaagcgcggcuccgacaacuccuucuucucccgccucaacuggcucuacgaguccgaguccaaguaccccguccucaacgucaccaugcccaacaacggcaaguucgacaagcucuacaucuggggcguccaccaccccuccaccgacaaggagcagaccaagcucuacguccgcgccuccggccgcgucaccgucuccaccaagcgcucccagcagaccgucauccccaacaucggcucccgccccuggguccgcggccucuccucccgcaucuccaucuacuggaccaucgucaagcccggcgacauccuccucaucaacuccaccggcaaccucaucgccccccgcggcuacuucaagauccgcaccggcaaguccuccaucaugcgcuccgacgcccccaucggcaccugcuccuccgagugcaucacccccaacggcuccauccccaacgacaagcccuuccagaacgucaacaagaucaccuacggcgccugcccccgcuacgucaagcagaacacccucaagcucgccaccggcaugcgcaacguccccgagaagcagacccgcggcaucuucggcgccaucgccggcuucaucgagaacggcugggagggcauggucgacggcugguacggcuuccgccaccagaacuccgagggcaccggccaggccgccgaccucaaguccacccaggccgccaucgaccagaucaacggcaagcucaaccgcgucaucgagaagaccaacgagaaguuccaccagaucgagaaggaguucuccgaggucgagggccgcauccaggaccucgagaaguacgucgaggacaccaagaucgaccucugguccuacaacgccgagcuccucgucgcccucgagaaccagcacaccaucgaccucaccgacuccgagaugaacaagcucuucgagaagacccgcaagcagcuccgcgagaacgccgaggacaugggcaacggcugcuucaagaucuaccacaagugcgacaacgccugcaucggcuccauccgcaacggcaccuacgaccacgacgucuaccgcgacgaggcccucaacaaccgcuuccagaucaagggcgucgagcucaaguccggcuacaaggacuggauccucuggaucuccuucgccaucuccugcuuccuccucugcgucguccuccucggcuucaucaugugggccugccagaagggcaacauccgcugcaacaucugcaucuga

SEQ ID NO: 104732 - RNA, 1701 nt, Artificial Sequence; identical to SEQ ID NO: 103102
  derived and/or modified CDS sequence (opt2) from hemagglutinin__InfluenzaA__AFH00736

SEQ ID NO: 104733 - RNA, 1701 nt, Artificial Sequence
  derived and/or modified CDS sequence (opt2) from hemagglutinin__InfluenzaA__AFH00747
augaagaccaucaucgcccucuccuacaucuucugccucgucuucgcccagaagcuccccggcaacgacaacuccaccgccacccucugccucggccacuacgccguccccaacggcacccucgucaagaccaucaccaacgaccagaucgaggucaccaacgccaccgagcucguccaguccuccuccaccggccgcaucugcgacuccccccaccgcauccucgacggcaagaacugcacccucaucgacgcccuccucggcgacccccacugcgacggcuuccagaacgagaagugggaccucuucgucgagcgcuccaaggccuacuccaacugcuaccccuacgacguccccgacuacgccucccuccgcucccucgucgccuccuccggcacccucgaguucaucaacgaggacuucaacuggaccggcgucacccaguccggcggcuccuacgccugcaagcgcggcuccgucaaguccuucuucucccgccucaacuggcuccacgaguccgaguacaaguaccccgcccucaacgucaccaugcccaacaacggcaaguucgacaagcucuacaucuggggcguccaccaccccuccaccgaccgcgagcagaccaaccucuacguccgcgccuccggccgcgucaccgucuccaccaagcgcucccagcagaccgucauccccaacaucggcucccgccccuggguccgcggccucuccucccgcaucuccaucuacuggaccaucgucaagcccggcgacauccuccucaucaacuccaccggcaaccucaucgccccccgcggcuacuucaagauccgcaccggcaaguccuccaucaugcgcuccgacgcccccaucggcaccugcuccuccgagugcaucacccccaacggcuccauccccaacgacaagcccuuccagaacgucaacaagaucaccuacggcgccugcccccgcuacgucaagcagaacacccucaagcucgccaccggcaugcgcaacguccccgagaagcagacccgcggcaucuucggcgccaucgccggcuucaucgagaacggcugggagggcauggucgacggcugguacggcuuccgccaccagaacuccgagggcaccggccaggccgccgaccucaaguccacccaggccgccaucgaccagaucaacggcaagcucaaccgccucaucgagaagaccaacgagaaguuccaccagaucgagaaggaguucuccgaggucgagggccgcauccaggaccucgagaaguacgucgaggacaccaagaucgaccucugguccuacaacgccgagcuccucgucgcccucgagaaccagcacaccaucgaccucaccgacuccgagaugaacaagcucuucgagaagacccgcaagcagcuccgcgagaacgccgaggacaugggcaacggcugcuucaagaucuaccacaagugcgacaacgccugcaucggcuccauccgcaacggcaccuacgaccacgacgucuaccgcgacgaggcccucaacaaccgcuuccagaucaagggcgucgagcucaaguccggcuacaaggacuggauccucuggaucuccuucgccaucuccugcuuccuccucugcgucguccuccucggcuucaucaugugggccugccagaagggcaacauccgcugcaacaucugcaucuga

SEQ ID NO: 104734 - RNA, 1701 nt, Artificial Sequence
  derived and/or modified CDS sequence (opt2) from hemagglutinin__InfluenzaA__AFH00758
augaagaccaucaucgcccucuccuacauccucugccucgucuucgcccagaagcuccccggcaacgacaacuccaccgccacccucugccucggccaccacgccguccccaacggcacccucgucaagaccaucaccaacgaccagaucgaggucaccaacgccaccgagcucguccaguccuccuccaccggccgcaucugcgacuccccccaccgcauccucgacggcaagaacugcacccucaucgacgcccuccucggcgacccccacugcgacggcuuccagaacaaggagugggaccucuucgucgagcgcuccaaggccuacuccaacugcuaccccuacgacguccccgacuacgccucccuccgcucccucgucgccuccuccggcacccucgaguucaucaacgaggacuucaacuggaccggcgucgcccaguccggcgaguccuacgccugcaagcgcggcuccgucaaguccuucuucucccgccucaacuggcuccacgaguccgaguacaaguaccccgcccucaacgucaccaugcccaacaacggcaaguucgacaagcucuacaucuggggcguccaccaccccuccaccgaccgcgagcagaccaagcucuacguccgcgccuccggccgcgucaccgucuccaccaagcgcucccagcagaccgucauccccaacaucggcucccgccccuggguccgcggccucuccucccgcaucuccaucuacuggaccaucgucaagcccggcgacauccuccucaucaacuccaccggcaaccucaucgccccccgcggcuacuucaagauccgcaccggcaaguccuccaucaugcgcuccgacgcccccaucggcaccugcuccuccgagugcaucacccccaacggcuccauccccaacgacaagcccuuccagaacgucaaccgcaucaccuacggcgccugcccccgcuacgucaagcagaacacccucaagcucgccaccggcaugcgcaacguccccgagaagcagacccgcggcaucuucggcgccaucgccggcuucaucgagaacggcugggagggcauggucgacggcugguacggcuuccgccaccagaacuccgagggcaccggccaggccgccgaccucaaguccacccaggccgccaucgaccagaucaacggcaagcucaaccgccucaucgagaagaccaacgagaaguuccaccagaucgagaaggaguucuccgaggucgagggccgcauccaggaccucgagaaguacgucgaggacaccaagaucgaccucugguccuacaacgccgagcuccucgucgcccucgagaaccagcacaccaucgaccucaccgacuccgagaugaacaagcucuucgagaagacccgcaagcagcuccgcgagaacgccgaggacaugggcaacggcugcuucaagaucuaccacaagugcgacaacgccugcaucggcuccauccgcaacggcaccuacgaccacgacgucuaccgcgacgaggcccucaacaaccgcuuccagaucaagggcgucgagcucaaguccggcuacaaggacuggauccucuggaucuccuucgccaucuccugcuuccuccucugcgucguccuccucggcuucaucaugugggccugccagaagggcaacauccgcugcaacaucugcaucuga

SEQ ID NO: 104735 - RNA, 1701 nt, Artificial Sequence
  derived and/or modified CDS sequence (opt2) from hemagglutinin__InfluenzaA__AFH00769
augaagaccaucaucgcccucuccuacauccucugccucgucuucgcccagaagcuccccggcaacgacaacuccaccgccacccucugccucggccaccacgccguccccaacggcacccucgucaagaccaucaccaacgaccagaucgaggucaccaacgccaccgagcucguccaguccuccuccaccggccgcaucugcgacuccccccaccgcauccucgacggcaagaacugcacccucaucgacgcccuccucggcgacccccacugcgacggcuuccagaacaaggagugggaccucuucgucgagcgcuccaaggccuacuccaacugcuaccccuacgacguccccgacuacgccucccuccgcucccucgucgccuccuccggcacccucgaguucaucaacgaggacuucaacuggaccggcgucgcccaguccggcgaguccuacaccugcaagcgcggcuccgucaaguccuucuucucccgccucaacuggcuccacgaguccgaguacaaguaccccgcccucaacgucaccaugcccaacaacgacaaguucgacaagcucuacaucuggggcguccaccaccccuccaccgaccgcgagcagaccucccucuacauccgcgccuccggccgcgucaccgucuccaccaagcgcucccagcagaccgucauccccaacaucggcucccgccccuggguccgcggccucuccucccgcaucuccaucuacuggaccaucgucaagcccggcgacauccuccucaucaacuccaccggcaaccucaucgccccccgcggcuacuucaagauccgcaccggcaaguccuccaucaugcgcuccgacgcccccaucggcaccugcuccuccgagugcaucacccccaacggcuccauccccaacgacaagcccuuccagaacgucaaccgcaucaccuacggcgccugcccccgcuacgucaagcagaacacccucaagcucgccaccggcaugcgcaacguccccgagaagcagacccgcggcaucuucggcgccaucgccggcuucaucgagaacggcugggagggcauggucgacggcugguacggcuuccgccaccagaacuccgagggcaccggccaggccgccgaccucaaguccacccaggccgccaucgaccagaucaacggcaagcucaaccgccucaucgagaagaccaacgagaaguuccaccagaucgagaaggaguucuccgaggucgagggccgcauccaggaccucgagaaguacgucgaggacaccaagaucgaccucugguccuacaacgccgagcuccucgucgcccucgagaaccagcacaccaucgaccucaccgacuccgagaugaacaagcucuucgagaagacccgcaagcagcuccgcgagaacgccgaggacaugggcaacggcugcuucaagaucuaccacaagugcgacaacgccugcaucggcuccauccgcaacggcaccuacgaccacgacgucuaccgcgacgaggcccucaacaaccgcuuccagaucaagggcgucgagcucaaguccggcuacaaggacuggauccucuggaucuccuucgccaucuccugcuuccuccucugcgucguccuccucggcuucaucaugugggccugccagaagggcaacauccgcugcaacaucugcaucuga

SEQ ID NO: 104736 - RNA, 1701 nt, Artificial Sequence
  derived and/or modified CDS sequence (opt2) from hemagglutinin__InfluenzaA__AFH00780
augcgcgccaucaucgcccucuccuacauccucugccucgucuucgcccagaagcuccccggcaacgacaacuccaccgccacccucugccucggccaccacgccguccccaacggcacccucgucaagaccaucaccaacgaccagaucgaggucaccaacgccaccgagcucguccaguccuccuccaccggccgcaucugcgacuccccccaccgcauccucgacggcaagaacugcacccucaucgacgcccuccucggcgacccccacugcgacggcuuccagaacaaggagugggaccucuucgucgagcgcuccaaggccuacuccgacugcuaccccuacgacguccccgacuacgccucccuccgcucccucgucgccuccuccggcacccucgaguucaccaacgagggcuucaacuggaccggcgucgcccaggacggcaccuccuacgccugcaagcgcggcuccgucaaguccuucuucucccgccucaacuggcuccacaagcucgaguacaaguaccccgcccucaacgucaccaugcccaacaacgacaaguucgacaagcucuacaucuggggcguccaccaccccuccaccgacuccgaccagaccucccucuacguccaggccuccggccgcgucaccgucuccaccaagcgcucccagcagaccgucauccccaacaucggcucccgccccuggguccgcggcgucuccucccgcaucuccaucuacuggaccaucgucaagcccggcgacauccuccucaucaacuccaccggcaaccucaucgccccccgcggcuacuucaagauccgcuccggcaaguccuccaucaugcgcuccgacgcccccaucggcaacugcaacuccgagugcaucacccccaacggcuccauccccaacgacaagcccuuccagaacgucaaccgcaucaccuacggcgccugcccccgcuacgucaagcagaacacccucaagcucgccaccggcaugcgcaacguccccgagaagcagacccgcggcaucuucggcgccaucgccggcuucaucgagaacggcugggagggcauggucgacggcugguacggcuuccgccaccagaacuccgagggcaccggccaggccgccgaccucaaguccacccaggccgccaucaaccagaucaacggcaagcucaaccgccucaucgagaagaccaacgagaaguuccaccagaucgagaaggaguucuccgaggucgagggccgcauccaggaccucgagaaguacgucgaggacaccaagaucgaccucugguccuacaacgccgagcuccucgucgcccucgagaaccagcacaccaucgaccucaccgacuccgagaugaacaagcucuucgagcgcacccgcaagcagcuccgcgagaacgccgaggacaugggcaacggcugcuucaagaucuaccacaagugcgacaacgccugcaucggcuccauccgcaacggcaccuacgaccacgacgucuaccgcgacgaggcccucaacaaccgcuuccagaucaagggcgucgagcucaaguccggcuacaaggacuggauccucuggaucuccuucgccaucuccugcuuccuccucugcgucguccuccucggcuucaucaugugggccugccagaagggcaacauccgcugcaacaucugcaucuga

SEQ ID NO: 104737 - RNA, 1701 nt, Artificial Sequence
  derived and/or modified CDS sequence (opt2) from hemagglutinin__InfluenzaA__AFH00791
augaagaccaucaucgcccucuccuacauccucugccucgucuucgcccagaagcuccccggcaacgacaacuccaccgccacccucugccucggccaccacgccguccccaacggcacccucgucaagaccaucaccaacgaccagaucgaggucaccaacgccaccgagcucguccagggcuccuccaccggccgcaucugcgacuccccccaccagauccucgacggcaagaacugcacccucaucgacgcccuccucggcgacccccacugcgacggcuuccagaacaaggagugggaccucuucgucgagcgcuccaccgccuacuccaacugcuaccccuacgacguccccgacuacgccucccuccgcucccucgucgccuccuccggcacccucgaguucaccaaggagggcuucaacuggaccggcgucgcccaggacggcaccuccuacaccugcaagcgcggcuccgucaaguccuucuucucccgccucaacuggcuccacaagcucgaguacaaguaccccgcccucaacgucaccaugcccaacaacgacaaguucgacaagcucuacaucuggggcguccaccaccccuccaccgacuccgaccagaccucccucuacguccaggccuccggccgcgucaccgucuccaccaagcgcucccagcagaccgucauccccaacaucggcucccgccccuggguccgcggcgucuccucccgcaucuccaucuacuggaccaucgucaagcccggcgacauccuccucaucaacuccaccggcaaccucaucgccccccgcggcuacuucaagauccgcuccggcaaguccuccaucaugcgcuccgacgcccccaucgacaacugcaacuccgagugcaucacccccaacggcuccauccccaacgacaagcccuuccagaacgucaaccgcaucaccuacggcgccugcccccgcuacgucaagcagaacacccucaagcucgccaccggcaugcgcaacguccccgagaagcagacccgcggcaucuucggcgccaucgccggcuucaucgagaacggcugggagggcauggucgacggcugguacggcuuccgccaccagaacuccgagggcaccggccaggccgccgaccucaaguccacccaggccgccaucaaccagaucaacggcaagcucaaccgccucaucgagaagaccaacgagaaguuccaccagaucgagaaggaguucuccgaggucgagggccgcauccaggaccucgagaaguacgucgaggacaccaagaucgaccucugguccuacaacgccgagcuccucgucgcccucgagaaccagcacaccaucgaccucaccgacuccgagaugaacaagcucuucgagcgcacccgcaagcagcuccgcgagaacgccgaggacaugggcaacggcugcuucaagaucuaccacaagugcgacaacgccugcaucggcuccauccgcaacggcaccuacgaccacgacgucuaccgcgacgaggcccucaacaaccgcuuccagaucaagggcgucgagcucaaguccggcuacaaggacuggauccucuggaucuccuucgccaucuccugcuuccuccucugcgucguccuccucggcuucaucaugugggccugccagaagggcaacauccgcugcaacaucugcaucuga

SEQ ID NO: 104738 - RNA, 1701 nt, Artificial Sequence; identical to SEQ ID NO: 97378
  derived and/or modified CDS sequence (opt2) from hemagglutinin__InfluenzaA__AFH00802

SEQ ID NO: 104739 - RNA, 1701 nt, Artificial Sequence
  derived and/or modified CDS sequence (opt2) from hemagglutinin__InfluenzaA__AFH00813
augaagaccaucaucgcccucuccuacauccucugccucgucuucgcccagaagcuccccggcaacgacaacuccaccgccacccucugccucggccaccacgccguccccaacggcaccaucgucaagaccaucaccaacgaccagaucgaggucaccaacgccaccgagcucguccaguccuccuccaccggcgagaucugcaacuccccccaccagauccucgacggcgagaacugcacccucaucgacgcccuccucggcgacccccagugcgacggcuuccagaacaagaagugggaccucuucgucgagcgcuccaaggcccacuccaacugcuaccccuacgacguccccgacuacgccucccuccgcucccucgucgccuccuccggcacccucgaguucaacaacgaguccuucaacuggaccggcgucacccagaacggcaccuccuccgccugcauccgccgcuccaacaacuccuucuucucccgccucaacuggcucacccaccucaacuucaaguaccccgcccucaacgucaccaugcccaacaacgagcaguucgacaagcucuacaucuggggcguccaccaccccggcaccgacaaggaccagaucuuccucuacgcccaggccuccggccgcaucaccgucuccaccaagcgcucccagcaggccgucauccccaacaucggcucccgcccccgcguccgcgacauccccucccgcgucuccaucuacuggaccaucgucaagcccggcgacauccuccucaucaacuccaccggcaaccucaucgccccccgcggcuacuucaagauccgcuccggcaaguccuccaucaugcgcuccgacgcccccaucggcaagugcaacuccgccugcaucacccccaacggcuccauccccaacgacaagcccuuccagaacgucaaccgcaucaccuacggcgccugcccccgcuacgucaagcagaacacccucaagcucgccaccggcaugcgcaacguccccgagaagcagacccgcggcaucuucggcgccaucgccggcuucaucgagaacggcugggagggcauggucgacggcugguacggcuuccgccaccagaacuccgagggccgcggccaggccgccgaccucaaguccacccaggccgccaucgaccagaucaacggcaagcucaaccgccucaucggcaagaccaacgagaaguuccaccagaucgagaaggaguucuccgaggucgagggccgcauccaggaccucgagaaguacgucgaggacaccaagaucgaccucugguccuacaacgccgagcuccucgucgcccucgagaaccagcacaccaucgaccucaccgacuccgagaugaacaagcucuucgagaagaccaagaagcagcuccgcgagaacgccgaggacaugggcaacggcugcuucaagaucuaccacaagugcgacaacgccugcaucggcuccauccgcaacggcaccuacgaccacgacgucuaccgcgacgaggcccucaacaaccgcuuccagaucaagggcgucgagcucaaguccggcuacaaggacuggauccucuggaucuccuucgccaucuccugcuuccuccucugcgucgcccuccucggcuucaucaugugggccugccagaagggcaacauccgcugcaacaucugcaucuga

SEQ ID NO: 104740 - RNA, 1701 nt, Artificial Sequence
  derived and/or modified CDS sequence (opt2) from hemagglutinin__InfluenzaA__AFH00824
augaagaccaucaucgcccucuccuacauccuccgccucgucuucgcccagaagcuccccggcaacgacaacuccaccgccacccucugccucggccaccacgccguccccaacggcaccaucgucaagaccaucaccaacgaccagaucgaggucaccaacgccaccgagcucguccagaacuccuccaucggcgagaucugcaacuccccccaccagauccucgacggcgagaacugcacccucaucgacgcccuccucggcgacccccagugcgacggcuuccagaacaagaagugggaccucuucgucgagcgcuccaaggccuacuccaacugcuaccccuacgacguccccgacuacgccucccuccgcucccucgucgccuccuccggcacccucgaguucaacaacgaguccuucaacuggaccggcgucacccagaacggcaccuccuccgccugcauccgccgcuccaacaacuccuucuucucccgccucaacuggcucacccaccucaacuucaaguaccccgcccucaacgucaccaugcccaacaacgagcaguucgacaagcucuacaucuggggcguccaccaccccggcaccgacaaggaccagaucuuccucuacgcccaguccuccggccgcaucaccgucuccaccaagcgcucccagcaggccgucauccccaacaucggcucccgcccccgcauccgcgacauccccucccgcaucuccaucuacuggaccaucgucaagcccggcgacauccuccucaucaacuccaccggcaaccucaucgccccccgcggcuacuucaagauccgcuccggcaaguccuccaucaugcgcuccgacgcccccaucggcaagugcaacuccgagugcaucacccccaacggcuccauccccaacgacaagcccuuccagaacgucaaccgcaucaccuacggcgccugcccccgcuacgucaagcaguccacccucaagcucgccaccggcaugcgcaacguccccgagaagcagacccgcggcaucuucggcgccaucgccggcuucaucgagaacggcugggagggcauggucgacggcugguacggcuuccgccaccagaacuccgagggccgcggccaggccgccgaccucaaguccacccaggccgccaucgaccagaucaacggcaagcucaaccgccucaucggcaagaccaacgagaaguuccaccagaucgagaaggaguucuccgaggucgagggccgcauccaggaccucgagaaguacgucgaggacaccaagaucgaccucugguccuacaacgccgagcuccucgucgcccucgagaaccagcacaccaucgaccucaccgacuccgagaugaacaagcucuucgagaagaccaagaagcagcuccgcgagaacgccgaggacaugggcaacggcugcuucaagaucuaccacaagugcgacaacgccugcaucggcuccauccgcaacggcaccuacgaccacgacgucuaccgcgacgaggcccucaacaaccgcuuccagaucaagggcgucgagcucaaguccggcuacaaggacuggauccucuggaucuccuucgccaucuccugcuuccuccucugcgucgcccuccucggcuucaucaugugggccugccagaagggcaacauccgcugcaacaucugcaucuga

SEQ ID NO: 104741 - RNA, 1701 nt, Artificial Sequence
  derived and/or modified CDS sequence (opt2) from hemagglutinin__InfluenzaA__AFH01407
augaagaccaucaucgcccucuccuacauccucugccucgucuucgcccagaagcuccccggcaacgacaacuccaccgccacccucugccucggccaccacgccguccccaacggcaccaucgucaagaccaucaccaacgaccagaucgaggucaccaacgccaccgagcucguccaguccuccuccaccggcggcaucugcaacuccccccaccagauccucgacggcgagaacugcacccucaucgacgcccuccucggcgacccccagugcgacggcuuccagaacaagaagugggaccucuucgucgagcgcuccaaggccuacuccaacugcuaccccuacgacguccccgacuacgccucccuccgcucccucgucgccuccuccggcacccucgaguucaacaacgaguccuucaacuggaccggcgucacccagaacggcaccuccuccgccugcaagcgccgcuccaacaaguccuucuucucccgccucaacuggcucacccaccucaaguacaaguaccccgcccucaacgucaccaugcccaacaacgagaaguucgacaagcucuacaucuggggcguccaccaccccggcaccgacuccgaccagaucucccucuacgcccaggccuccggccgcaucaccgucuccaccaagcgcucccagcagaccgucauccccaacaucggcucccgcccccgcguccgcgacaucuccucccgcaucuccaucuacuggaccaucgucaagcccggcgacauccuccucaucaacuccaccggcaaccucaucgccccccgcggcuacuucaagauccgcuccggcaaguccuccaucaugcgcuccgacgcccccaucggcaagugcaacuccgagugcaucacccccaacggcuccauccccaacgacaagcccuuccagaacgucaaccgcaucaccuacggcgccugcccccgcuacgucaagcagaacacccucaagcucgccaccggcaugcgcaacguccccgagaagcagacccgcggcaucuucggcgccaucgccggcuucaucgagaacggcugggagggcauggucgacggcugguacggcuuccgccaccagaacuccgagggcaccggccaggccgccgaccucaaguccacccaggccgccaucaaccagaucaacggcaagcucaaccgccucaucggcaagaccaacgagaaguuccaccagaucgagaaggaguucuccgaggucgagggccgcauccaggaccucgagaaguacgucgaggacaccaagaucgaccucugguccuacaacgccgagcuccucgucgcccucgagaaccagcacaccaucgaccucaccgacuccgagaugaacaagcucuucgagcgcaccaagaagcagcuccgcgagaacgccgaggacaugggcaacggcugcuucaagaucuaccacaagugcgacaacgccugcaucgaguccauccgcaacggcaccuacgaccacgacgucuaccgcgacgaggcccucaacaaccgcuuccagaucaagggcgucgagcucaaguccggcuacaaggacuggauccucuggaucuccuucgccaucuccugcuuccuccucugcgucgcccuccucggcuucaucaugugggccugccagaagggcaacauccgcugcaacaucugcaucuga

SEQ ID NO: 104742 - RNA, 1701 nt, Artificial Sequence
  derived and/or modified CDS sequence (opt2) from hemagglutinin__InfluenzaA__AFH34940
augaagaccaucaucgcccucuccuacauccucugccucgucuucgcccagaagcuccccggcaacgacaacuccaccgccacccucugccucggccaccacgccguccccaacggcaccaucgucaagaccaucaccaacgaccagaucgaggucaccaacgccaccgagcucguccaguccuccuccaccggcgagaucugcgacuccccccaccagauccucgacggcgagaacugcacccucaucgacgcccuccucggcgacccccagugcgacggcuuccagaacaagaagugggaccucuucgucgagcgcuccaaggccuacuccaacugcuaccccuacgacguccccgacuacgccucccuccgcucccucgucgccuccuccggcacccucgaguucaacaacgaguccuucaacuggaccggcgucacccagaacggcaccuccuccgccugcauccgccgcuccaacuccuccuucuucucccgccucaacuggcucacccaccucaacuucaaguaccccgcccucaacgucaccaugcccaacaacgagcaguucgacaagcucuacaucuggggcguccaccaccccggcaccgacaaggaccagaucuuccucuacgcccaguccuccggccgcaucaccgucuccaccaagcgcucccagcaggccgucauccccaacaucggcucccgcccccgcauccgcaacauccccucccgcaucuccaucuacuggaccaucgucaagcccggcgacauccuccucaucaacuccaccggcaaccucaucgccccccgcggcuacuucaagauccgcuccggcaaguccuccaucaugcgcuccgacgcccccaucggcaagugcaacuccgagugcaucacccccaacggcuccauccccaacgacaagcccuuccagaacgucaaccgcaucaccuacggcgccugcccccgcuacgucaagcaguccacccucaagcucgccaccggcaugcgcaacguccccgagaagcagacccgcggcaucuucggcgccaucgccggcuucaucgagaacggcugggagggcauggucgacggcugguacggcuuccgccaccagaacuccgagggccgcggccaggccgccgaccucaaguccacccaggccgccaucgaccagaucaacggcaagcucaaccgccucaucggcaagaccaacgagaaguuccaccagaucgagaaggaguucuccgaggucgagggccgcauccaggaccucgagaaguacgucgaggacaccaagaucgaccucugguccuacaacgccgagcuccucgucgcccucgagaaccagcacaccaucgaccucaccggcuccgagaugaacaagcucuucgagaagaccaagaagcagcuccgcgagaacgccgaggacaugggcaacggcugcuucaagaucuaccacaagugcgacaacgccugcaucggcuccauccgcaacggcaccuacaaccacgacgucuaccgcgacgaggcccucaacaaccgcuuccagaucaagggcgucgagcucaaguccggcuacaaggacuggauccucuggaucuccuucgccaucuccugcuuccuccucugcgucgcccuccucggcuucaucaugugggccugccagaagggcaacauccgcugcaacaucugcaucuga

SEQ ID NO: 104743 - RNA, 1701 nt, Artificial Sequence
  derived and/or modified CDS sequence (opt2) from hemagglutinin__InfluenzaA__AFH34961
augaagaccaucaucgcccucuccuacauccucugccucgucuucgcccagaagcuccccggcaacgacaacuccaccgccacccucugccucggccaccacgccguccccaacggcaccaucgucaagaccaucaccaacgaccagaucgaggucaccaacgccaccgagcucguccaguccuccuccaccggcgagaucugcgacuccccccaccagauccucgacggcgagaacugcacccucaucgacgcccuccucggcgacccccagugcgacggcuuccagaacaagaagugggaccucuucgucgagcgcuccaaggccuacuccaacugcuaccccuacgacguccccgacuacgccucccuccgcucccucgucgccgccuccggcacccucgaguucaacaacgaguccuucaacuggaccggcgucacccagaacggcaccuccuccgccugcauccgccgcuccaacuccuccuucuucucccgccucaacuggcucacccaccucaacuucaaguaccccgcccucaacgucaccaugcccaacaacgagcaguucgacaagcucuacaucuggggcguccaccaccccggcaccgacaaggaccagaucuuccucuacgcccaguccuccggccgcaucaccgucuccaccaagcgcucccagcaggccgucauccccaacaucggcucccgcccccgcauccgcaacauccccucccgcaucuccaucuacuggaccaucgucaagcccggcgacauccuccucaucaacuccaccggcaaccucaucgccccccgcggcuacuucaagauccgcuccggcaaguccuccaucaugcgcuccgacgcccccaucggcaagugcaacuccgagugcaucacccccaacggcuccauccccaacgacaagcccuuccagaacgucaaccgcaucaccuacggcgccugcccccgcuacgucaagcaguccacccucaagcucgccaccggcaugcgcaacguccccgagaagcagacccgcggcaucuucggcgccaucgccggcuucaucgagaacggcugggagggcauggucgacggcugguacggcuuccgccaccagaacuccgagggccgcggccaggccgccgaccucaaguccacccaggccgccaucgaccagaucaacggcaagcucaaccgccucaucggcaagaccaacgagaaguuccaccagaucgagaaggaguucuccgaggucgagggccgcauccaggaccucgagaaguacgucgaggacaccaagaucgaccucugguccuacaacgccgagcuccucgucgcccucgagaaccagcacaccaucgaccucaccgacuccgagaugaacaagcucuucgagaagaccaagaagcagcuccgcgagaacgccgaggacaugggcaacggcugcuucaagaucuaccacaagugcgacaacgccugcaucggcuccauccgcaacggcaccuacaaccacgacgucuaccgcgacgaggcccucaacaaccgcuuccagaucaagggcgucgagcucaaguccggcuacaaggacuggauccucuggaucuccuucgccaucuccugcuuccuccucugcgucgcccuccucggcuucaucaugugggccugccagaagggcaacauccgcugcaacaucugcaucuga

SEQ ID NO: 104744 - RNA, 1701 nt, Artificial Sequence
  derived and/or modified CDS sequence (opt2) from hemagglutinin__InfluenzaA__AFH34968
augaagaccaucaucgcccucuccuacauccucugccucgucuucgcccagaagcuccccggcaacgacaacuccaccgccacccucugccucggccaccacgccguccccaacggcaccaucgucaagaccaucaccaacgaccagaucgaggucaccaacgccaccgagcucguccaguccuccuccaccggcgagaucugcgacuccccccaccagauccucgacggcgagaacugcacccucaucgacgcccuccucggcgacccccagugcgacggcuuccagaacaagaagugggaccucuucgucgagcgcuccaaggccuacuccaacugcuaccccuacgacguccccgacuacgccucccuccgcucccucgucgccgccuccggcacccucgaguucaacaacgaguccuucaacuggaccggcgucacccagaacggcaccuccuccgccugcauccgccgcuccaacuccuccuucuucucccgccucaacuggcucacccaccucaacuucaaguaccccgcccucaacgucaccaugcccaacaacgagcaguucgacaagcucuacaucuggggcguccaccaccccggcaccgacaaggaccagaucuuccucuacgcccaguccuccggccgcaucaccgucuccaccaagcgcucccagcaggccgucauccccaacaucggcucccgcccccgcauccgcgacauccccucccgcaucuccaucuacuggaccaucgucaagcccggcgacauccuccucaucaacuccaccggcaaccucaucgccccccgcggcuacuucaagauccgcuccggcaaguccuccaucaugcgcuccgacgcccccaucggcaagugcaacuccgccugcaucacccccaacggcuccauccccaacgacaagcccuuccagaacgucaaccgcaucaccuacggcgccugcccccgcuacgucaagcaguccacccucaagcucgccaccggcaugcgcaacguccccgagaagcagacccgcggcaucuucggcgccaucgccggcuucaucgagaacggcugggagggcauggucgacggcugguacggcuuccgccaccagaacuccgagggccgcggccaggccgccgaccucaaguccacccaggccgccaucgaccagaucaacggcaagcucaaccgccucaucggcaagaccaacgagaaguuccaccagaucgagaaggaguucuccgaggucgagggccgcauccaggaccucgagaaguacgucgaggacaccaagaucgaccucugguccuacaacgccgagcuccucgucgcccucgagaaccagcacaccaucgaccucaccgacuccgagaugaacaagcucuucgagaagaccaagaagcagcuccgcgagaacgccgaggacaugggcaacggcugcuucaagaucuaccacaagugcgacaacgccugcaucggcuccauccgcaacggcaccuacaaccacgacgucuaccgcgacgaggcccucaacaaccgcuuccagaucaagggcgucgagcucaaguccggcuacaaggacuggauccucuggaucuccuucgccaucuccugcuuccuccucugcgucgcccuccucggcuucaucaugugggccugccagaagggcaacauccgcugcaacaucugcaucuga

SEQ ID NO: 104745 - RNA, 1701 nt, Artificial Sequence
  derived and/or modified CDS sequence (opt2) from hemagglutinin__InfluenzaA__AFH34975
augaagaccaucaucgcccucuccuacauccucugccucgucuucgcccagaagcuccccggcaacgacaacuccaccgccacccucugccucggccaccacgccguccccaacggcaccaucgucaagaccaucaccaacgaccgcaucgaggucaccaacgccaccgagcucguccagaacuccuccaucggcgagaucugcgacuccccccaccagauccucgacggcgagaacugcacccucaucgacgcccuccucggcgacccccagugcgacggcuuccagaacaagaagugggaccucuucgucgagcgcuccaaggccuacuccaacugcuaccccuacgacguccccgacuacgccucccuccgcucccucgucgccuccuccggcacccucgaguucaacaacgaguccuucaacuggaacggcgucacccagaacggcaccuccuccgccugcauccgccgcuccaacaacuccuucuucucccgccucaacuggcucacccaccucaacuucaaguaccccgcccucaacgucaccaugcccaacaacgagcaguucgacaagcucuacaucuggggcguccaccaccccggcaccgacaaggaccagaucuuccucuacgcccagcccuccggccgcaucaccgucuccaccaagcgcucccagcaggccgucauccccaacaucggcucccgcccccgcauccgcaacauccccucccgcaucuccaucuacuggaccaucgucaagcccggcgacauccuccucaucaacuccaccggcaaccucaucgccccccgcggcuacuucaagauccgcuccggcaaguccuccaucaugcgcuccgacgcccccaucggcaagugcaaguccgagugcaucacccccaacggcuccauccccaacgacaagcccuuccagaacgucaaccgcaucaccuacggcgccugcccccgcuacgucaagcaguccacccucaagcucgccaccggcaugcgcaacguccccgagaagcagacccgcggcaucuucggcgccaucgccggcuucaucgagaacggcugggagggcauggucgacggcugguacggcuuccgccaccagaacuccgagggccgcggccaggccgccgaccucaaguccacccaggccgccaucgaccagaucaacggcaagcucaaccgccucaucggcaagaccaacgagaaguuccaccagaucgagaaggaguucuccgaggucgagggccgcauccaggaccucgagaaguacgucgaggacaccaagaucgaccucugguccuacaacgccgagcuccucgucgcccucgagaaccagcacaccaucgaccucaccgacuccgagaugaacaagcucuucgagaagaccaagaagcagcuccgcgagaacgccgaggacaugggcaacggcugcuucaagaucuaccacaagugcgacaacgccugcaucggcuccauccgcaacggcaccuacgaccacgacgucuaccgcgacgaggcccucaacaaccgcuuccagaucaagggcgucgagcucaaguccggcuacaaggacuggauccucuggaucuccuucgccaucuccugcuuccuccucugcgucgcccuccucggcuucaucaugugggccugccagaagggcaacauccgcugcaacaucugcaucuga

SEQ ID NO: 104746 - RNA, 1701 nt, Artificial Sequence; identical to SEQ ID NO: 99447
  derived and/or modified CDS sequence (opt2) from hemagglutinin__InfluenzaA__AFH74464

SEQ ID NO: 104747 - RNA, 1701 nt, Artificial Sequence; identical to SEQ ID NO: 98705
  derived and/or modified CDS sequence (opt2) from hemagglutinin__InfluenzaA__AFH74465

SEQ ID NO: 104748 - RNA, 1701 nt, Artificial Sequence; identical to SEQ ID NO: 99466
  derived and/or modified CDS sequence (opt2) from hemagglutinin__InfluenzaA__AFH74477

SEQ ID NO: 104749 - RNA, 1701 nt, Artificial Sequence
  derived and/or modified CDS sequence (opt2) from hemagglutinin__InfluenzaA__AFH74488
augaagaccaucaucgcccucuccuacauccucugccucgucuucgcccagaagcuccccggcaacgacaacuccaccgccacccucugccucggccaccacgccguccccaacggcaccaucgucaagaccaucaccaacgaccagaucgaggucaccaacgccaccgagcucguccaguccuccuccaccggcgagaucugcgacaacccccaccagauccucgacggcaagaacugcacccucaucgacgcccuccucggcgacccccagugcgacggcuuccagaacaagaagugggaccucuucgucgagcgcuccaaggccuacuccaacugcuaccccuacgacguccccgacuacgccucccuccgcucccucgucgccuccuccggcacccucgaguucaacaacgaguccuucaacuggaccggcgucacccagaacggcaccuccuccgccugcauccgccgcuccaagaacuccuucuucucccgccucaacuggcucacccaccucaacuucaaguaccccgcccucaacgucaccaugcccaacaacgagcaguucgacaagcucuacaucuggggcguccaccaccccggcaccgacaaggaccagaucuuccucuacgcccaggccuccggccgcaucaccgucuccaccaagcgcucccagcagaccgucauccccaacaucggcucccgcccccgcguccgcaacauccccucccgcaucuccaucuacuggaccaucgucaagcccggcgacauccuccucaucaacuccaccggcaaccucaucgccccccgcggcuacuucaagauccgcuccggcaaguccuccaucaugcgcuccgacgcccccaucggcaagugcaacuccgagugcaucacccccaacggcuccauccccaacgacaagcccuuccagaacgucaaccgcaucaccuacggcgccugcccccgcuacgucaagcagaacacccucaagcucgccaccggcaugcgcaacguccccgagaagcagacccgcggcaucuucggcgccaucgccggcuucaucgagaacggcugggagggcauggucgacggcugguacggcuuccgccaccagaacuccgagggccgcggccaggccgccgaccucaaguccacccaggccgccaucgaccagaucaacggcaagcucaaccgccucaucggcaagaccaacgagaaguuccaccagaucgagaaggaguucuccgaggucgagggccgcauccaggaccucgagaaguacgucgaggacaccaagaucgaccucugguccuacaacgccgagcuccucgucgcccucgagaaccagcacaccaucgaccucaccgacuccgagaugaacaagcucuucgagcgcaccaagaagcagcuccgcgagaacgccgaggacaugggcaacggcugcuucaagaucuaccacaagugcgacaacgccugcaucggcuccauccgcaacggcaccuacgaccacgacgucuaccgcgacgaggcccucaacaaccgcuuccagaucaagggcgucgagcucaaguccggcuacaaggacuggauccucuggaucuccuucgccaucuccugcuuccuccucugcgucgcccuccucggcuucaucaugugggccugccagaagggcaacauccgcugcaacaucugcaucuga

SEQ ID NO: 104750 - RNA, 1701 nt, Artificial Sequence; identical to SEQ ID NO: 99447
  derived and/or modified CDS sequence (opt2) from hemagglutinin__InfluenzaA__AFH74499

SEQ ID NO: 104751 - RNA, 1701 nt, Artificial Sequence; identical to SEQ ID NO: 99649
  derived and/or modified CDS sequence (opt2) from hemagglutinin__InfluenzaA__AFH74510

SEQ ID NO: 104752 - RNA, 1701 nt, Artificial Sequence
  derived and/or modified CDS sequence (opt2) from hemagglutinin__InfluenzaA__AFH74521
augaagaccaucaucgcccucuccuacauccucugccucgucuucgcccagaagauccccggcaacgacaacuccaccgccacccucugccucggccaccacgccguccccaacggcaccaucgucaagaccaucaccaacgaccagaucgaggucaccaacgccaccgagcucguccaguccuccuccaccggcgagaucugcaacuccccccaccagauccucgacggcgagaacugcacccucaucgacgcccuccucggcgacccccagugcgacggcuuccagaacaagaagugggaccucuucgucgagcgcuccaaggccuacuccaacugcuaccccuacgacguccccgacuacgccucccuccgcucccucgucgccuccuccggcacccucgaguucaacaacgaguccuucaacuggaccggcgucacccagaacggcaccuccuccgccugcauccgccgcuccaacaacuccuucuucucccgccucaacuggcucacccacuccaaguccaaguaccccgcccucaacgucaccaugcccaacaacgagcaguucgacaagcucuacaucuggggcguccaccaccccggcaccgacaacgaccagaucuuccucuacgcccaggccuccggccgcaucaccgucuccaccaagcgcucccagcagaccgucauccccaacaucggcucccgcccccgcauccgcgacauccccucccgcaucuccaucuacuggaccaucgucaagcccggcgacauccuccucaucaacuccaccggcaaccucaucgccccccgcggcuacuucaagauccgcuccggcaaguccuccaucaugaaguccgacgcccccaucggcaagugcaacuccgagugcaucacccccaacggcuccauccccaacgacaagcccuuccagaacgucaaccgcaucaccuacggcgccugcccccgcuacgucaagcagaacacccucaagcucgccaccggcaugcgcaacguccccgagaagcagacccgcggcaucuucggcgccaucgccggcuucaucgagaacggcugggagggcauggucgacggcugguacggcuuccgccaccagaacuccgagggccgcggccaggccgccgaccucaaguccacccaggccgccaucgaccagaucaacggcaagcucaaccgccucaucggcaagaccaacgagaaguuccaccagaucgagaaggaguucuccgaggucgagggccgcauccaggaccucgagaaguacgucgaggacaccaaggucgaccucugguccuacaacgccgagcuccucgucgcccucgagaaccagcacaccaucgaccucaccgacuccgagaugaacaagcucuucgagaagaccaagaagcagcuccgcgagaacgccgaggacaugggcaacggcugcuucaagaucuaccacaagugcgacaacgccugcaucggcuccauccgcaacggcaccuacgaccacgacgucuaccgcgacgaggcccucaacaaccgcuuccagaucaagggcgucgagcucaaguccggcuacaaggacuggauccucuggaucuccuucgccaucuccugcuuccuccucugcgucgcccuccucggcuucaucaugugggccugccagaagggcaacauccgcugcaacaucugcaucuga

SEQ ID NO: 104753 - RNA, 1701 nt, Artificial Sequence; identical to SEQ ID NO: 103024
  derived and/or modified CDS sequence (opt2) from hemagglutinin__InfluenzaA__AFH74532

SEQ ID NO: 104754 - RNA, 1701 nt, Artificial Sequence; identical to SEQ ID NO: 99649
  derived and/or modified CDS sequence (opt2) from hemagglutinin__InfluenzaA__AFH74543

SEQ ID NO: 104755 - RNA, 1701 nt, Artificial Sequence; identical to SEQ ID NO: 99649
  derived and/or modified CDS sequence (opt2) from hemagglutinin__InfluenzaA__AFH74554

SEQ ID NO: 104756 - RNA, 1701 nt, Artificial Sequence; identical to SEQ ID NO: 99649
  derived and/or modified CDS sequence (opt2) from hemagglutinin__InfluenzaA__AFH74565

SEQ ID NO: 104757 - RNA, 1701 nt, Artificial Sequence; identical to SEQ ID NO: 99649
  derived and/or modified CDS sequence (opt2) from hemagglutinin__InfluenzaA__AFH74576

SEQ ID NO: 104758 - RNA, 1701 nt, Artificial Sequence; identical to SEQ ID NO: 99649
  derived and/or modified CDS sequence (opt2) from hemagglutinin__InfluenzaA__AFH74587

SEQ ID NO: 104759 - RNA, 1701 nt, Artificial Sequence
  derived and/or modified CDS sequence (opt2) from hemagglutinin__InfluenzaA__AFH74598
augaagaccaucaucgcccucuccuacauccucugccucgucuucgcccagaagcuccccgagaacgacaacuccaccgccacccucugccucggccaccacgccguccccaacggcaccaucgucaagaccaucaccaacgaccagaucgaggucaccaacgccaccgagcucguccaguccuccuccaccggcgagaucugcgacuccccccaccagauccucgacggcaagaacugcacccucaucgacgcccuccucggcgacccccagugcgacggcuuccagaacaagaagugggaccucuucgucgagcgcuccaaggccuacuccaacugcuaccccuacgacguccccgacuacgccucccuccgcucccucgucgccuccuccggcacccucgaguucaacaacgaguccuucaacuggaccggcgucacccagaacggcaccuccuccgccugcauccgccgcuccaagaacuccuucuucucccgccucaacuggcucacccaccucaacuucaaguaccccgcccucaacgucaccaugcccaacaacgagcaguucgacaagcucuacaucuggggcguccaccaccccggcaccgacaaggaccagaucuuccucuacgcccaggccuccggccgcaucaccgucuccaccaagcgcucccagcagaccgccauccccaacaucggcucccgcccccgcguccgcaacauccccucccgcaucuccaucuacuggaccaucgucaagcccggcgacauccuccucaucaacuccaccggcaaccucaucgccccccgcggcuacuucaagauccgcuccggcaaguccuccaucaugcgcuccgacgcccccaucggcaagugcaacuccgagugcaucacccccaacggcuccauccccaacgacaagcccuuccagaacgucaaccgcaucaccuacggcgccugcccccgcuacgucaagcagaacacccucaagcucgccaccggcaugcgcaacguccccgagaagcagacccgcggcaucuucggcgccaucgccggcuucaucgagaacggcugggagggcauggucgacggcugguacggcuuccgccaccagaacuccgagggccgcggccaggccgccgaccucaaguccacccaggccgccaucgaccagaucaacggcaagcucaaccgccucaucggcaagaccaacgagaaguuccaccagaucgagaaggaguucuccgaggucgagggccgcauccaggaccucgagaaguacgucgaggacaccaagaucgaccucugguccuacaacgccgagcuccucgucgcccucgagaaccagcacaccaucgaccucaccgacuccgagaugaacaagcucuucgagaagaccaagaagcagcuccgcgagaacgccgaggacaugggcaacggcugcuucaagaucuaccacaagugcgacaacgccugcaucggcuccauccgcaacggcaccuacgaccacgacgucuaccgcgacgaggcccucaacaaccgcuuccagaucaagggcgucgagcucaaguccggcuacaaggacuggauccucuggaucuccuucgccaucuccugcuuccuccucugcgucgcccuccucggcuucaucaugugggccugccagaagggcaacauccgcugcaacaucugcaucuga

SEQ ID NO: 104760 - RNA, 1701 nt, Artificial Sequence; identical to SEQ ID NO: 99447
  derived and/or modified CDS sequence (opt2) from hemagglutinin__InfluenzaA__AFH74609

SEQ ID NO: 104761 - RNA, 1701 nt, Artificial Sequence; identical to SEQ ID NO: 99649
  derived and/or modified CDS sequence (opt2) from hemagglutinin__InfluenzaA__AFH74620

SEQ ID NO: 104762 - RNA, 1701 nt, Artificial Sequence
  derived and/or modified CDS sequence (opt2) from hemagglutinin__InfluenzaA__AFH74631
augaagaccaucaucgcccucuccuacauccucugccucgucuucgcccagaagcuccccggcaacgacaacuccaccgccacccucugccucggccaccacgccguccccaacggcaccaucgucaagaccaucaccaacgaccagaucgaggucaccaacgccaccgagcucguccaguccuccuccaccggcgagaucugcgacuccccccaccagauccucgacggcaccaacugcacccucaucgacgcccuccucggcgacccccagugcgacggcuuccagaacaagaagugggaccucuucgucgagcgcuccaaggccuacuccaacugcuaccccuacgacguccccgacuacgccucccuccgcucccucgucgccuccuccggcacccucgaguucaacaacgaguccuucaacuggaccggcgucacccagaacggcaccuccuccgccugcauccgccgcuccaagaacuccuucuucucccgccucaacuggcucacccaccucaacuucaaguaccccgcccucaacgucaccaugcccaacaacgagcaguucgacaagcucuacaucuggggcguccaccaccccggcaccgacaaggaccagaucuuccucuacgcccaggccuccggccgcaucaccgucuccaccaagcgcucccagcagaccgccauccccaacaucggcucccgcccccgcguccgcaacauccccucccgcaucuccaucuacuggaccaucgucaagcccggcgacauccuccucaucaacuccaccggcaaccucaucgccccccgcggcuacuucaagauccgcuccggcaaguccuccaucaugcgcuccgacgcccccaucggcaagugcaacuccgagugcaucacccccaacggcuccauccccaacgacaagcccuuccagaacgucaaccgcaucaccuacggcgccugcccccgcuacgucaagcagaacacccucaagcucgccaccggcaugcgcaacguccccgagaagcagacccgcggcaucuucggcgccaucgccggcuucaucgagaacggcugggagggcauggucgacggcugguacggcuuccgccaccagaacuccgagggccgcggccaggccgccgaccucaaguccacccaggccgccaucgaccagaucaacggcaagcucaaccgccucaucggcaagaccaacgagaaguuccaccagaucgagaaggaguucuccgaggucgagggccgcauccaggaccucgagaaguacgucgaggacaccaagaucgaccucugguccuacaacgccgagcuccucgucgcccucgagaaccagcacaccaucgaccucaccgacuccgagaugaacaagcucuucgagaagaccaagaagcagcuccgcgagaacgccgaggacaugggcaacggcugcuucaagaucuaccacaagugcgacaacgccugcaucggcuccauccgcaacggcaccuacgaccacgacgucuaccgcgacgaggcccucaacaaccgcuuccagaucaagggcgucgagcucaaguccggcuacaaggacuggauccucuggaucuccuucgccaucuccugcuuccuccucugcgucgcccuccucggcuucaucaugugggccugccagaagggcaacauccgcugcaacaucugcaucuga

SEQ ID NO: 104763 - RNA, 1701 nt, Artificial Sequence; identical to SEQ ID NO: 99447
  derived and/or modified CDS sequence (opt2) from hemagglutinin__InfluenzaA__AFH74642

SEQ ID NO: 104764 - RNA, 1701 nt, Artificial Sequence; identical to SEQ ID NO: 99447
  derived and/or modified CDS sequence (opt2) from hemagglutinin__InfluenzaA__AFH74653

SEQ ID NO: 104765 - RNA, 1701 nt, Artificial Sequence; identical to SEQ ID NO: 99447
  derived and/or modified CDS sequence (opt2) from hemagglutinin__InfluenzaA__AFH74664

SEQ ID NO: 104766 - RNA, 1701 nt, Artificial Sequence; identical to SEQ ID NO: 99447
  derived and/or modified CDS sequence (opt2) from hemagglutinin__InfluenzaA__AFH74675

SEQ ID NO: 104767 - RNA, 1701 nt, Artificial Sequence; identical to SEQ ID NO: 104195
  derived and/or modified CDS sequence (opt2) from hemagglutinin__InfluenzaA__AFH74686

SEQ ID NO: 104768 - RNA, 1701 nt, Artificial Sequence; identical to SEQ ID NO: 104195
  derived and/or modified CDS sequence (opt2) from hemagglutinin__InfluenzaA__AFH74697

SEQ ID NO: 104769 - RNA, 1701 nt, Artificial Sequence; identical to SEQ ID NO: 99649
  derived and/or modified CDS sequence (opt2) from hemagglutinin__InfluenzaA__AFH74708

SEQ ID NO: 104770 - RNA, 1701 nt, Artificial Sequence; identical to SEQ ID NO: 99649
  derived and/or modified CDS sequence (opt2) from hemagglutinin__InfluenzaA__AFH74719

SEQ ID NO: 104771 - RNA, 1701 nt, Artificial Sequence; identical to SEQ ID NO: 99649
  derived and/or modified CDS sequence (opt2) from hemagglutinin__InfluenzaA__AFH74730

SEQ ID NO: 104772 - RNA, 1701 nt, Artificial Sequence
  derived and/or modified CDS sequence (opt2) from hemagglutinin__InfluenzaA__AFH74741
augaagaccaucaucgcccucuccuacauccucugccucgucuucgcccagaagcuccccggcaacgacaacuccaccgccacccucugccucggccaccacgccguccccaacggcaccaucgucaagaccaucaccaacgaccagaucgaggucaccaacgccaccgagcucguccagaacuccuccaccggcgagaucugcgacuccccccaccagauccucgacggcaagaacugcacccucaucgacgcccuccucggcgacccccagugcgacggcuuccagaacaagaagugggaccucuucgucgagcgcuccaaggccuacuccaacugcuaccccuacgacguccccgacuacgccucccuccgcucccucgucgccuccuccggcacccucgaguucaacaacgaguccuucaacuggaccggcgucacccagaacggcaccuccuccgccugcauccgccgcuccaagaacuccuucuucucccgccucaacuggcucacccaccucaacuucaaguaccccgcccucaacgucaccaugcccaacaacgagcaguucgacaagcucuacaucuggggcguccaccaccccggcaccgacaaggaccagaucuuccucuacgcccaggccuccggccgcaucaccgucuccaccaagcgcucccagcagaccgccauccccaacaucggcucccgcccccgcguccgcaacauccccucccgcaucuccaucuacuggaccaucgucaagcccggcgacauccuccucaucaacuccaccggcaaccucaucgccccccgcggcuacuucaagauccgcuccggcaaguccuccaucaugcgcuccgacgcccccaucggcaagugcaacuccgagugcaucacccccaacggcuccauccccaacgacaagcccuuccagaacgucaaccgcaucaccuacggcgccugcccccgcuacgucaagcagaacacccucaagcucgccaccggcaugcgcaacguccccgagaagcagacccgcggcaucuucggcgccaucgccggcuucaucgagaacggcugggagggcauggucgacggcugguacggcuuccgccaccagaacuccgagggccgcggccaggccgccgaccucaaguccacccaggccgccaucgaccagaucaacggcaagcucaaccgccucaucggcaagaccaacgagaaguuccaccagaucgagaaggaguucuccgaggucgagggccgcauccaggaccucgagaaguacgucgaggacaccaagaucgaccucugguccuacaacgccgagcuccucgucgcccucgagaaccagcacaccaucgaccucaccgacuccgagaugaacaagcucuucgagaagaccaagaagcagcuccgcgagaacgccgaggacaugggcaacggcugcuucaagaucuaccacaagugcgacaacgccugcaucggcuccauccgcaacggcaccuacgaccacgacgucuaccgcgacgaggcccucaacaaccgcuuccagaucaagggcgucgagcucaaguccggcuacaaggacuggauccucuggaucuccuucgccaucuccugcuuccuccucugcgucgcccuccucggcuucaucaugugggccugccagaagggcaacauccgcugcaacaucugcaucuga

SEQ ID NO: 104773 - RNA, 1701 nt, Artificial Sequence; identical to SEQ ID NO: 99649
  derived and/or modified CDS sequence (opt2) from hemagglutinin__InfluenzaA__AFH74752

SEQ ID NO: 104774 - RNA, 1701 nt, Artificial Sequence; identical to SEQ ID NO: 99649
  derived and/or modified CDS sequence (opt2) from hemagglutinin__InfluenzaA__AFH74763

SEQ ID NO: 104775 - RNA, 1701 nt, Artificial Sequence; identical to SEQ ID NO: 99649
  derived and/or modified CDS sequence (opt2) from hemagglutinin__InfluenzaA__AFH74774

SEQ ID NO: 104776 - RNA, 1701 nt, Artificial Sequence; identical to SEQ ID NO: 103024
  derived and/or modified CDS sequence (opt2) from hemagglutinin__InfluenzaA__AFH74785

SEQ ID NO: 104777 - RNA, 1701 nt, Artificial Sequence; identical to SEQ ID NO: 99649
  derived and/or modified CDS sequence (opt2) from hemagglutinin__InfluenzaA__AFH74796

SEQ ID NO: 104778 - RNA, 1701 nt, Artificial Sequence; identical to SEQ ID NO: 104205
  derived and/or modified CDS sequence (opt2) from hemagglutinin__InfluenzaA__AFH74807

SEQ ID NO: 104779 - RNA, 1701 nt, Artificial Sequence; identical to SEQ ID NO: 104205
  derived and/or modified CDS sequence (opt2) from hemagglutinin__InfluenzaA__AFH74818

SEQ ID NO: 104780 - RNA, 1701 nt, Artificial Sequence; identical to SEQ ID NO: 104205
  derived and/or modified CDS sequence (opt2) from hemagglutinin__InfluenzaA__AFH74829

SEQ ID NO: 104781 - RNA, 1701 nt, Artificial Sequence; identical to SEQ ID NO: 104205
  derived and/or modified CDS sequence (opt2) from hemagglutinin__InfluenzaA__AFH74840

SEQ ID NO: 104782 - RNA, 1701 nt, Artificial Sequence
  derived and/or modified CDS sequence (opt2) from hemagglutinin__InfluenzaA__AFH74851
augaagaccaucaucgcccucuccuacauccucugccucgucuucgcccagaagcuccccggcaacgacaacuccaccgccacccucugccucggccaccacgccguccccaacggcaccaucgucaagaccaucaccaacgaccagaucgaggucaccaacgccaccgagcucguccaguccuccuccaccggcgagaucugcgacuccccccaccagauccucgacggcaagaacugcacccucaucgacgcccuccucggcgacccccagugcgacggcuuccagaacaagaagugggaccucuucgucgagcgcuccaaggccuacggcaacugcuaccccuacgacguccccgacuacgccucccuccgcucccucgucgccuccuccggcacccucgaguucaacaacgaguccuucaacuggaccggcgucacccagaacggcaccuccuccgccugcauccgccgcuccaagaacuccuucuucucccgccucaacuggcucacccaccucaacuucaaguaccccgcccucaacgucaccaugcccaacaacgagcaguucgacaagcucuacaucuggggcguccaccaccccggcaccgacaaggaccagaucuuccucuacgcccaggccuccggccgcaucaccgucuccaccaagcgcucccagcagaccgccauccccaacaucggcucccgcccccgcguccgcaacauccccucccgcaucuccaucuacuggaccaucgucaagcccggcgacauccuccucaucaacuccaccggcaaccucaucgccccccgcggcuacuucaagauccgcuccggcaaguccuccaucaugcgcuccgacgcccccaucggcaagugcaacuccgagugcaucacccccaacggcuccauccccaacgacaagcccuuccagaacgucaaccgcaucaccuacggcgccugcccccgcuacgucaagcagaacacccuccgccucgccaccggcaugcgcaacguccccgagaagcagacccgcggcaucuucggcgccaucgccggcuucaucgagaacggcugggagggcauggucgacggcugguacggcuuccgccaccagaacuccgagggccgcggccaggccgccgaccucaaguccacccaggccgccaucgaccagaucaacggcaagcucaaccgccucaucggcaagaccaacgagaaguuccaccagaucgagaaggaguucuccgaggucgagggccgcauccaggaccucgagaaguacgucgaggacaccaagaucgaccucugguccuacaacgccgagcuccucgucgcccucgagaaccagcacaccaucgaccucaccgacuccgagaugaacaagcucuucgagaagaccaagaagcagcuccgcgagaacgccgaggacaugggcaacggcugcuucaagaucuaccacaagugcgacaacgccugcaucggcuccauccgcaacggcaccuacgaccacgacgucuaccgcgacgaggcccucaacaaccgcuuccagaucaagggcgucgagcucaaguccggcuacaaggacuggauccucuggaucuccuucgccaucuccugcuuccuccucugcgucgcccuccucggcuucaucaugugggccugccagaagggcaacauccgcugcaacaucugcaucuga

SEQ ID NO: 104783 - RNA, 1701 nt, Artificial Sequence; identical to SEQ ID NO: 104208
  derived and/or modified CDS sequence (opt2) from hemagglutinin__InfluenzaA__AFH74862

SEQ ID NO: 104784 - RNA, 1701 nt, Artificial Sequence; identical to SEQ ID NO: 104208
  derived and/or modified CDS sequence (opt2) from hemagglutinin__InfluenzaA__AFH74873

SEQ ID NO: 104785 - RNA, 1701 nt, Artificial Sequence; identical to SEQ ID NO: 99649
  derived and/or modified CDS sequence (opt2) from hemagglutinin__InfluenzaA__AFH74884

SEQ ID NO: 104786 - RNA, 1701 nt, Artificial Sequence; identical to SEQ ID NO: 99649
  derived and/or modified CDS sequence (opt2) from hemagglutinin__InfluenzaA__AFH74895

SEQ ID NO: 104787 - RNA, 1701 nt, Artificial Sequence; identical to SEQ ID NO: 99649
  derived and/or modified CDS sequence (opt2) from hemagglutinin__InfluenzaA__AFH74906

SEQ ID NO: 104788 - RNA, 1701 nt, Artificial Sequence; identical to SEQ ID NO: 99447
  derived and/or modified CDS sequence (opt2) from hemagglutinin__InfluenzaA__AFH74917

SEQ ID NO: 104789 - RNA, 1701 nt, Artificial Sequence; identical to SEQ ID NO: 99649
  derived and/or modified CDS sequence (opt2) from hemagglutinin__InfluenzaA__AFH74928

SEQ ID NO: 104790 - RNA, 1701 nt, Artificial Sequence; identical to SEQ ID NO: 99649
  derived and/or modified CDS sequence (opt2) from hemagglutinin__InfluenzaA__AFH74939

SEQ ID NO: 104791 - RNA, 1701 nt, Artificial Sequence
  derived and/or modified CDS sequence (opt2) from hemagglutinin__InfluenzaA__AFH74950
augaagaccaucaucgcccucuccuacauccucugccucgucuucgcccagaagcuccccggcaacgacaacuccaccgccacccucugccucggccaccacgccguccccaacggcaccaucgucaagaccaucaccaacgaccagaucgaggucaccaacgccaccgagcucguccaguccuccuccaccggcgagaucugcgacuccccccaccagauccucgacggcaagaacugcacccucaucgacgcccuccucggcgacccccagugcgacggcuuccagaacaagaagugggaccucuucgucgagcgcuccaaggccuacggcaacugcuaccccuacgacguccccgacuacgccucccuccgcucccucgucgccuccuccggcacccucgaguucaacaacgaguccuucaacuggaccggcgucacccagaacggcaccuccuccgccugcauccgccgcuccaagaacuccuucuucucccgccucaacuggcucacccaccucaacuucaaguaccccgcccucaacgucaccaugcccaacaacgagcaguucgacaagcucuacaucuggggcguccaccaccccggcaccgacaaggaccagaucuuccucuacgcccaggccuccggccgcaucaccgucuccaccaagcgcucccagcagaccgccauccccaacaucggcucccgcccccgcguccgcaacauccccucccgcaucuccaucuacuggaccaucgucaagcccggcgacauccuccucaucaacuccaccggcaaccucaucgccccccgcggcuacuucaagauccgcuccggcaaguccuccaucaugcgcuccgacgcccccaucggcaagugcaacuccgagugcaucacccccaacggcuccauccccaacgacaagcccuuccagaacgucaaccgcaucaccuacggcgccugcccccgcuacgucaagcagaacacccucaagcucgccaccggcaugcgcaacguccccgagaagcagacccgcggcaucuucggcgccaucgccggcuucaucgagaacggcugggagggcauggucgacggcugguacggcuuccgccaccagaacuccgagggccgcggccaggccgccgaccucaaguccacccaggccgccaucgaccagaucaacggcaagcucaaccgccucaucggcaagaccaacgagaaguuccaccagaucgagaaggaguucuccgaggucgagggccgcauccaggaccucgagaaguacgucgaggacaccaagaucgaccucugguccuacaacgccgagcuccucgucgcccucgagaaccagcacaccaucgaccucaccgacuccgagaugaacaagcucuucgagaagaccaagaagcagcuccgcgagaacgccgaggacaugggcaacggcugcuucaagaucuaccacaagugcgacaacgccugcaucggcuccauccgcaacggcaccuacgaccacgacgucuaccgcgacgaggcccucaacaaccgcuuccagaucaagggcgucgagcucaaguccggcuacaaggacuggauccucuggaucuccuucgccaucuccugcuuccuccucugcgucgcccuccucggcuucaucaugugggccugccagaagggcaacauccgcugcaacaucugcaucuga

SEQ ID NO: 104792 - RNA, 1701 nt, Artificial Sequence; identical to SEQ ID NO: 104208
  derived and/or modified CDS sequence (opt2) from hemagglutinin__InfluenzaA__AFH74961

SEQ ID NO: 104793 - RNA, 1701 nt, Artificial Sequence; identical to SEQ ID NO: 99649
  derived and/or modified CDS sequence (opt2) from hemagglutinin__InfluenzaA__AFH75388

SEQ ID NO: 104794 - RNA, 1701 nt, Artificial Sequence
  derived and/or modified CDS sequence (opt2) from hemagglutinin__InfluenzaA__AFH97140
augaaggccauccucgucguccuccucuacaucuucgccaccgccaacgccgacacccucugcaucggcuaccacgccaacaacuccaccgacaccgucgacaccguccucgagaagaacgucaccgucacccacuccgucaaccuccucgaggacaagcacaacggcaagcucugcaagcuccgcggcgucgccccccuccaccucggcaagugcaacaucgccggcuggauccucggcaaccccgagugcgagucccucuccaccgccuccuccugguccuacaucgucgagaccuccuccuccgacaacggcaccugcuaccccggcgacuucaucgacuacgaggagcuccgcgagcagcucuccuccgucuccuccuucgagcgcuucgagaucuuccccaagaccuccuccuggcccaaccacgacuccaacaagggcgucaccgccgccugcccccacgccggcgccaaguccuucuacaagaaccucaucuggcucgucaagaagggcaacuccuaccccaagcucuccaaguccuacaucaacgacaagggcaaggagguccucguccucuggggcauccaccaccccuccaccuccgccgaccagcagucccucuaccagaacgccgacgccuacgucuucgucggcaccucccgcuacuccaagaaguucaagcccgagaucgccauccgccccaagguccgcgaccaggagggccgcaugaacuacuacuggacccucgucgagcccggcgacaagaucaccuucgaggccaccggcaaccucgucgucccccgcuacgccuucgccauggagcgcaacgccggcuccggcaucaucaucuccgacacccccguccacgacugcaacaccaccugccagacccccaagggcgccaucaacaccucccuccccuuccagaacauccaccccaucaccaucggcaagugccccaaguacgucaaguccaccaagcuccgccucgccaccggccuccgcaacguccccuccauccagucccgcggccucuucggcgccaucgccggcuucaucgagggcggcuggaccggcauggucgacggcugguacggcuaccaccaccagaacgagcagggcuccggcuacgccgccgaccucaaguccacccagaacgccaucgacgagaucaccaacaaggucaacuccgucaucgagaagaugaacacccaguucaccgccgucggcaaggaguucaaccaccucgagaagcgcaucgagaaccucaacaagaaggucgacgacggcuuccucgacaucuggaccuacaacgccgagcuccucguccuccucgagaacgagcgcacccucgacuaccacgacuccaacgucaagaaccucuacgagaagguccgcucccagcucaagaacaacgccaaggagaucggcaacggcugcuucgaguucuaccacaagugcgacaacaccugcauggaguccgucaagaacggcaccuacgacuaccccaaguacuccgaggaggccaagcucaaccgcgaggagaucgacggcgucaagcucgaguccacccgcaucuaccagauccucgccaucuacuccaccgucgccuccucccucguccucgucgucucccucggcgccaucuccuucuggaugugcuccaacggcucccuccagugccgcaucugcaucuga

SEQ ID NO: 104795 - RNA, 1701 nt, Artificial Sequence
  derived and/or modified CDS sequence (opt2) from hemagglutinin__InfluenzaA__AFJ05142
augaagaccaucaucgcccucuccuacauccucugccucgucuucgcccagaagauccccggcaacgacaacuccaccgccacccucugccucggccaccacgccguccccaacggcaccaucgucaagaccaucaccaacgaccagaucgaggucaccaacgccaccgagcucguccaguccuccuccaccggcgagaucugcgacuccccccaccagauccucgacggcgagaacugcacccucaucgacgcccuccucggcgacccccagugcgacggcuuccagaacaagaagugggaccucuucgucgagcgcuccaaggccuacuccaacugcuaccccuacgacguccccgacuacgccucccuccgcucccucgucgccuccuccggcacccucgaguucaacaacgagugcuucaacuggaccggcgucacccagaacggcaccuccuccgccugcauccgccgcuccaacuccuccuucuucucccgccucaacuggcucacccaccucaacuucaaguaccccgcccucaacgucaccaugcccaacaacgagcaguucgacaagcucuacaucuggggcguccaccaccccggcaccgacaaggaccagaucuuccucuacgcccaguccuccggccgcaucaccgucuccaccaagcgcucccagcaggccgucauccccaacaucggcucccgcccccgcauccgcaacauccccucccgcaucuccaucuacuggaccaucgucaagcccggcgacauccuccucaucaacuccaccggcaaccucaucgccccccgcggcuacuucaagauccgcuccggcaaguccuccaucaugcgcuccgacgcccccaucggcaagugcaacuccggcugcaucacccccaacggcuccauccccaacgacaagcccuuccagaacgucaaccgcaucaccuacggcgccugcccccgcuacgucaagcaguccacccucaagcucgccaccggcaugcgcaacguccccgagaagcagacccgcggcaucuucggcgccaucgccggcuucaucgagaacggcugggagggcauggucgacggcugguacggcuuccgccaccagaacuccgagggccgcggccaggccgccgaccucaaguccacccaggccgccaucgaccagaucaacggcaagcucaaccgccucaucggcaagaccaacgagaaguuccaccagaucgagaaggaguucuccgaggucgagggccgcauccaggaccucgagaaguacgucgaggacaccaagaucgaccucugguccuacaacgccgagcuccucgucgcccucgagaaccagcacaccaucgaccucaccgacuccgagaugaacaagcucuucgagaagaccaagaagcagcuccgcgagaacgccgaggacaugggcaacggcugcuucaagaucuaccacaagugcgacaacgccugcaucggcuccauccgcaacggcaccuacaaccacgacgucuaccgcgacgaggcccucaacaaccgcuuccagaucaagggcgucgagcucaaguccggcuacaaggacuggauccucuggaucuccuucgccaucuccugcuuccuccucugcgucgcccuccucggcuucaucaugugggccugccagaagggcaacauccgcugcaacaucugcaucuga

SEQ ID NO: 104796 - RNA, 1701 nt, Artificial Sequence
  derived and/or modified CDS sequence (opt2) from hemagglutinin__InfluenzaA__AFJ05144
augaagaccaucaucgcccucuccuacauccucugccucgucuucgcccagaagcuccccggcaacgacaacuccaccgccacccucugccucggccaccacgccguccccaacggcaccaucgucaagaccaucaccaacgaccagaucgaggucaccaacgccaccgagcucguccaguccuccuccaccggcgagaucugcgacuccccccaccagauccucgacggcgagaacugcacccucaucgacgcccuccucggcgacccccagugcgacggcuuccagaacaagaagugggaccucuucgucgagcgcuccaaggccuacuccaacugcuaccccuacgacguccccgacuacgccucccuccgcucccucgucgccuccuccggcacccucgaguucaacaacgaguccuucaacuggaccggcgucacccagaacggcaccuccuccgccugcauccgccgcuccaacuccuccuucuucucccgccucaacuggcucacccaccucaacuucaaguaccccgcccucaacgucaccaugcccaacaacgagcaguucgacaagcucuacaucuggggcguccaccaccccggcaccgacaaggaccagaucuuccucuacgcccaguccuccggccgcaucaccgucuccaccaagcgcucccagcaggccgucauccccaacaucggcucccgcccccgcguccgcaacauccccucccgcaucuccaucuacuggaccaucgucaagcccggcgacauccuccucaucaacuccaccggcaaccucaucgccccccgcggcuacuucaagauccgcuccggcaaguccuccaucaugcgcuccgacgcccccaucggcaagugcaacuccgagugcaucacccccaacggcuccauccccaacgacaagcccuuccagaacgucaaccgcaucaccuacggcgccugcccccgcuacgucaagcaguccacccucaagcucgccaccggcaugcgcaacguccccgagaagcagacccgcggcaucuucggcgccaucgccggcuucaucgagaacggcugggagggcauggucgacggcugguacggcuuccgccaccagaacuccgagggccgcggccaggccgccgaccucaaguccacccaggccgccaucgaccagaucaacggcaagcucaaccgccucaucggcaagaccaacgagaaguuccaccagaucgagaaggaguucuccgaggucgagggccgcauccaggaccucgagaaguacgucgaggacaccaagaucgaccucugguccuacaacgccgagcuccucgucgcccucgagaaccagcacaccaucgaccucaccgacuccgagaugaacaagcucuucgagaagaccaagaagcagcuccgcgagaacgccgaggacaugggcaacggcugcuucaagaucuaccacaagugcgacaacgccugcaucggcuccauccgcaacggcaccuacaaccacgacgucuaccgcgacgaggcccucaacaaccgcuuccagaucaagggcgucgagcucaaguccggcuacaaggacuggauccucuggaucuccuucgccaucuccugcuuccuccucugcgucgcccuccucggcuucaucaugugggccugccagaagggcaacauccgcugcaacaucugcaucuga

SEQ ID NO: 104797 - RNA, 1701 nt, Artificial Sequence
  derived and/or modified CDS sequence (opt2) from hemagglutinin__InfluenzaA__AFJ11706
augaagaccaucaucgcccucuccuacauccucugccucgucuucgcccagaagcuccccggcaacgacaacuccaccgccacccucugccucggccaccacgccguccccaacggcaccaucgucaagaccaucaccaacgaccagaucgaggucaccaacgccaccgagcucguccaguccuccuccaccggcgagaucugcgacuccccccaccagauccucgacggcgagaacugcacccucaucgacgcccuccucggcgacccccagugcgacggcuuccagaacaagaagugggaccucuucgucgagcgcuccaaggccuacuccaacugcuaccccuacgacguccccgacuacgccucccuccgcucccucgucgccuccuccggcacccucgaguucaacaacgaguccuucaacuggaccggcgucacccagaacggcaccuccuccgccugcauccgcuccuccaacaacuccuucuucucccgccucaacuggcucacccaccucaacuucaaguaccccgcccucaacgucaccaugcccaacaacgagcaguucgacaagcucuacaucuggggcguccaccaccccggcaccgacaaggaccagaucuuccucuacgcccaggccuccggccgcaucaccgucuccaccaagcgcucccagcaggccgucauccccaacaucggcucccgcccccgcguccgcaacauccccucccgcaucuccaucuacuggaccaucgucaagcccggcgacauccuccucaucaacuccaccggcaaccucaucgccccccgcggcuacuucaagauccgcuccggcaaguccuccaucaugcgcuccgacgcccccaucggcaagugcaacuccgagugcaucacccccaacggcuccauccccaacgacaagcccuuccagaacgucaaccgcaucaccuacggcgccugcccccgcuacgucaagcaguccacccucaagcucgccaccggcaugcgcaacguccccgagaagcagacccgcggcaucuucggcgccaucgccggcuucaucgagaacggcugggagggcauggucgacggcugguacggcuuccgccaccagaacuccgagggccgcggccaggccgccgaccucaaguccacccaggccgccaucgaccagaucaacggcaagcucaaccgccucaucggcaagaccaacgagaaguuccaccagaucgagaaggaguucuccgaggucgagggccgcauccaggaccucgagaaguacgucgaggacaccaagaucgaccucugguccuacaacgccgagcuccucgucgcccucgagaaccagcacaccaucgaccucaccgacuccgagaugaacaagcucuucgagaagaccaagaagcagcuccgcgagaacgccgaggacaugggcaacggcugcuucaccaucuaccacaagugcgacaacgccugcaucggcuccauccgcaacggcaccuacgaccacaacgucuaccgcgacgaggcccucaacaaccgcuuccagaucaagggcgucgagcucaaguccggcuacaaggacuggauccucuggaucuccuucgccaucuccugcuuccuccucugcgucgcccuccucggcuucaucaugugggccugccagaagggcaacauccgcugcaacaucugcaucuga

SEQ ID NO: 104798 - RNA, 1701 nt, Artificial Sequence; identical to SEQ ID NO: 103018
  derived and/or modified CDS sequence (opt2) from hemagglutinin__InfluenzaA__AFJ11728

SEQ ID NO: 104799 - RNA, 1701 nt, Artificial Sequence
  derived and/or modified CDS sequence (opt2) from hemagglutinin__InfluenzaA__AFJ19842
augaagaccaucaucgcccucuccuacauccucugccucgucuucgcccagaagcuccccggcaacgacaacuccaccgccacccucugccucggccaccacgccguccccaacggcaccaucgucaagaccaucaccaacgaccagaucgaggucaccaacgccaccgagcucguccaguccuccuccgccggcgagaucugcgacuccccccaccacauccucgacggcgagaacugcacccucaucgacgcccuccucggcgacccccagugcgacggcuuccagaacaagaagugggaccucuucgucgagcgcucccgcgccuacuccaacugcuaccccuacgacguccccgacuacgccucccuccgcucccucgucgccuccuccggcacccucgaguucaacaacgaguccuucaacuggaccggcgucacccagaacggcaccuccuccgccugcauccgccgcuccaacaacuccuucuucucccgccucaacuggcucacccaccucaacuucaaguaccccgcccucaacgucaccaugcccaacaacgagcaguucgacaagcucuacaucuggggcguccaccaccccggcaccgacaaggaccagaucuuccucuacgcccaggccuccggccgcaucaccgucuccaccaagcgcucccagcaggccgucauccccaacaucggcucccgcccccgcguccgcaacauccccucccgcaucuccaucuacuggaccaucgucaagcccggcgacauccuccucaucaacuccaccggcaaccucaucgccccccgcggcuacuucaagauccgcuccggcaaguccuccaucaugcgcuccgacgcccccaucggcaagugcaacuccgagugcaucacccccaacggcuccauccccaacgacaagcccuuccagaacgucaaccgcaucaccuacggcgccugcccccgcuacgucaagcaguccacccucaagcucgccaccggcaugcgcaacguccccgagaagcagacccgcggcaucuucggcgccaucgccggcuucaucgagaacggcugggagggcaugauggacggcugguacggcuuccgccaccagaacuccgagggccgcggccaggccgccgaccucaaguccacccaggccgccaucgaccagaucaacggcaagcucaaccgccucaucggcaagaccaacgagaaguuccaccagaucgagaaggaguucuccgaggucgagggccgcauccaggaccucgagaaguacgucgaggacaccaagaucgaccucugguccuacaacgccgagcuccucgucgcccucgagaaccagcacaccaucgaccucaccgacuccgagaugaacaagcucuucgagaagaccaagaagcagcuccgcgagaacgccgaggacaugggcaacggcugcuucaagaucuaccacaagugcgacaacgccugcaucggcuccauccgcaacggcaccuacgaccacgacgucuaccgcgacgaggcccucaacaaccgcuuccagaucaagggcaucgagcucaaguccggcuacaaggacuggauccucuggaucuccuucgccaucuccugcuuccuccucugcgucgcccuccucggcuucaucaugugggccugccagaagggcaacauccgcugcaacaucugcaucuga

SEQ ID NO: 104800 - RNA, 1701 nt, Artificial Sequence; identical to SEQ ID NO: 104397
  derived and/or modified CDS sequence (opt2) from hemagglutinin__InfluenzaA__AFJ20171

SEQ ID NO: 104801 - RNA, 1701 nt, Artificial Sequence; identical to SEQ ID NO: 103018
  derived and/or modified CDS sequence (opt2) from hemagglutinin__InfluenzaA__AFJ20182

SEQ ID NO: 104802 - RNA, 1701 nt, Artificial Sequence
  derived and/or modified CDS sequence (opt2) from hemagglutinin__InfluenzaA__AFJ74386
augaaggccaagcuccucguccuccucugcgccuucaccgccaccuacgccgacaccaucugcaucggcuaccacgccaacaacuccaccgacaccgucgacaccguccucgagaagaacgucaccgucacccacuccgucaaccuccucgaggacucccacaacggcaagcucugccgccucaagggcaccgccccccuccagcucggcaacugcuccgucgccggcuggauccucggcaaccccgagugcgagucccucuucuccaaggaguccugguccuacaucgccgagacccccaaccccgagaacggcaccugcuaccccggcuacuucgccgacuacgaggagcuccgcgagcagcucuccuccgucuccuccuucgagcgcuucgagaucuuccccaaggaguccuccuggcccaaccacaccgucaccaagggcgucaccgccuccugcucccacaacggcaaguccuccuucuacaagaaccuccucuggcucaccgagaagaacggccucuaccccaaccucuccaaguccuacgucaacaacaaggagaaggagguccucguccucuggggcguccaccaccccuccaacaucggcgaccagcgcgccaucuaccacaccgagaacgccuacgucuccgucauguccucccacuacucccgccgcuucacccccgagaucgccaagcgccccaagguccgcgaccaggagggccgcaucaacuacuacuggacccuccucgagcccggcgacaccaucaucuucgaggccaacggcaaccucaucgcccccugguacgccuucgcccucucccgcggcuucggcuccggcaucaucaccuccaacgccuccaugggcgagugcgacgccaagugccagaccccccagggcgccaucaacuccucccuccccuuccagaacguccaccccgucaccaucggcgagugccccaaguacguccgcuccaccaagcuccgcauggucaccggccuccgcaacauccccuccauccagucccgcggccucuucggcgccaucgccggcuucaucgagggcggcuggaccggcaugaucgacggcugguacggcuaccaccaccagaacgagcagggcuccggcuacgccgccgaccagaaguccacccagaacgccaucgacggcaucaccaacaaggucaacuccgucaucgagaagaugaacacccaguucaccgccgucggcaaggaguucaacaagcucgagcgccgcauggagaaccucaacaagaaggucgacgacggcuuccucgacaucuggaccuacaacgccgagcuccucguccuccucgagaacgagcgcacccucgacuuccacgacuccaacgucaagaaccucuacgagaaggucaagaaccagcucaagaacaacgccaaggagaucggcaacggcugcuucgaguucuaccacaagugcaacaacgagugcauggaguccgucaagaacggcaccuacgacuaccccaaguacuccggcgaguccaagcucaaccgcgagaagaucgacggcgucaagcucgaguccaugggcgucuaccagauccucgccaucuacuccaccgucgccuccucccucguccuccucgucucccucggcgccaucuccuucuggaugugcuccaacggcucccuccagugccgcaucugcaucuga

SEQ ID NO: 104803 - RNA, 1701 nt, Artificial Sequence
  derived and/or modified CDS sequence (opt2) from hemagglutinin__InfluenzaA__AFJ74407
augaagaccaucaucgcccucuccuacauccucugccucgucuucgcccagaagcuccccggcaacgacaacuccaccgccacccucugccucggccaccacgccguccccaacggcacccucgucaagaccaucaccaacgaccagaucgaggucaccaacgccaccgagcucguccaguccuccuccaccggccgcaucugcgacuccccccaccgcauccucgacggcaagaacugcacccucaucgacgcccuccucggcgacccccacugcgacggcuuccagaacaaggagugggaccucuucgucgagcgcuccaaggccuacuccaacugcuaccccuacgacguccccgacuacgccucccuccgcucccucgucgccuccuccggcacccucgaguucaccaacgagggcuucaacuggaccggcgucgcccaggacggcaccuccuacgccugcaagcgcggcuccgucaaguccuucuucucccgccucaacuggcuccacaagcucgaguacaaguaccccgcccucaacgucaccaugcccaacaacgacaaguucgacaagcucuacaucuggggcguccaccaccccuccaccgacuccgaccagaccucccucuacguccaggccuccggccgcgucaccgucuccaccaagcgcucccagcagaccgucauccccaacaucggcucccgccccuggguccgcggcgucuccucccgcaucuccaucuacuggaccaucgucaagcccggcgacauccuccucaucaacuccaccggcaaccucaucgccccccgcggcuacuucaagauccgcuccggcaaguccuccaucaugcgcuccgacgcccccaucggcaacugcuccuccgagugcaucacccccaacggcuccauccccaacgacaagcccuuccagaacgucaaccgcaucaccuacggcgccugcccccgcuacgucaagcagaacacccucaagcucgccaccggcaugcgcaacguccccgagaagcagacccgcggcaucuucggcgccaucgccggcuucaucgagaacggcugggagggcauggucgacggcugguacggcuuccgccaccagaacuccgagggcaccggccaggccgccgaccucaaguccacccaggccgccaucaaccagaucaacggcaagcucaaccgccucaucgagaagaccaacgagaaguuccaccagaucgagaaggaguucuccgaggucgagggccgcauccaggaccucgagaaguacgucgaggacaccaagaucgaccucugguccuacaacgccgagcuccucgucgcccucgagaaccagcacaccaucgaccucaccgacuccgagaugaacaagcucuucgagcgcacccgcaagcagcuccgcgagaacgccgaggacaugggcaacggcugcuucaagaucuaccacaagugcgacaacgccugcaucggcuccauccgcaacggcaccuacgaccacgacgucuaccgcgacgaggcccucaacaaccgcuuccagaucaagggcgucgagcucaaguccggcuacaaggacuggauccucuggaucuccuucgccaucuccugcuuccuccucugcgucguccuccucggcuucaucaugugggccugccagaagggcaacauccgcugcaacaucugcaucuga

SEQ ID NO: 104804 - RNA, 1701 nt, Artificial Sequence
  derived and/or modified CDS sequence (opt2) from hemagglutinin__InfluenzaA__AFJ74418
augaagaccaucaucgcccucuccuacauccucugccucgucuucgcccagaagcuccccggcaacgacaacuccaccgccacccucugccucggccaccacgccguccccaacggcacccucgucaagaccaucaccaacgaccagaucgaggucaccaacgccaccgagcucguccaguccuccuccaccggccgcaucugcgacuccccccaccagauccucgacggcgagaacugcacccucaucgacgcccuccucggcgacccccacugcgacggcuuccagaacaaggagugggaccucuucgucgagcgcuccaaggccuacuccaacugcuaccccuacgacguccccgacuacgccucccuccgcucccucgucgccuccuccggcacccucgaguucaacaacgaguccuucaacuggaccggcgucgcccagaacggcaccuccuccgccugcaagcgccgcuccaucaaguccuucuucucccgccucaacuggcuccaccagcucaaguacaaguaccccgcccucaacgucaccaugcccaacaacgagaaguucgacaagcucuacaucuggggcguccaccaccccuccaccgacuccgaccagaucucccucuacgcccaggccuccggccgcgucaccgucuccaccaagcgcucccagcagaccgucauccccaacaucggcucccgccccuggguccgcggcgucuccucccgcaucuccaucuacuggaccaucgucaagcccggcgacauccuccucaucaacuccaccggcaaccucaucgccccccgcggcuacuucaagauccgcuccggcaaguccuccaucaugcgcuccgacgcccccaucggcaagugcaacuccgagugcaucacccccaacggcuccauccccaacgacaagcccuuccagaacgucaaccgcaucaccuacggcgccugcccccgcuacgucaagcagaacacccucaagcucgccaccggcaugcgcaacguccccgagaagcagacccgcggcaucuucggcgccaucgccggcuucaucgagaacggcugggagggcauggucgacggcugguacggcuuccgccaccagaacuccgagggcaccggccaggccgccgaccucaaguccacccaggccgccaucaaccagaucaacggcaagcucaaccgccucaucgagaagaccaacgagaaguuccaccagaucgagaaggaguucuccgaggucgagggccgcauccaggaccucgagaaguacgucgaggacaccaagaucgaccucugguccuacaacgccgagcuccucgucgcccucgagaaccagcacaccaucgaccucaccgacuccgagaugaacaagcucuucgagcgcaccaagaagcagcuccgcgagaacgccgaggacaugggcaacggcugcuucaagaucuaccacaagugcgacaacgccugcaucggcuccauccgcaacggcaccuacgaccacgacgucuaccgcgacgaggcccucaacaaccgcuuccagaucaagggcgucgagcucaaguccggcuacaaggacuggauccucuggaucuccuucgccaucuccugcuuccuccucugcgucguccuccucggcuucaucaugugggccugccagaagggcaacauccgcugcaacaucugcaucuga

SEQ ID NO: 104805 - RNA, 1701 nt, Artificial Sequence
  derived and/or modified CDS sequence (opt2) from hemagglutinin__InfluenzaA__AFJ74437
augaagaccaucaucgcccucuccuacauccucugcaaggucuucgcccagaagcuccccggcaacgacaacuccaccgccacccucugccucggccaccacgccguccccaacggcacccucgucaagaccaucaccaacgaccagaucgaggucaccaacgccaccgagcucguccaguccuccuccaccggccgcaucugcgacuccccccaccagauccucgacggcgagaacugcacccucaucgacgcccuccucggcgacccccacugcgacggcuuccagaacaaggagugggaccucuucgucgagcgcuccaaggccuacuccaacugcuaccccuacgacguccccgacuacgccucccuccgcucccucgucgccuccuccggcacccucgaguucaacaacgaguccuucaacuggaccggcgucgcccagaacggcaccuccuccgccugcaagcgccgcuccaucaaguccuucuucucccgccucaacuggcuccaccagcucaaguacaaguaccccgcccucaacgucaccaugcccaacaacgagaaguucgacaagcucuacaucuggggcguccaccaccccuccaccgacuccgaccagaucucccucuacgcccaggccuccggccgcgucaccgucuccaccaagcgcucccagcagaccgucauccccaacaucggcucccgccccuggguccgcggcgucuccucccgcaucuccaucuacuggaccaucgucaagcccggcgacauccuccucaucaacuccaccggcaaccucaucgccccccgcggcuacuucaagauccgcuccggcaaguccuccaucaugcgcuccgacgcccccaucggcaagugcaacuccgagugcaucacccccaacggcuccauccccaacgacaagcccuuccagaacgucaaccgcaucaccuacggcgccugcccccgcuacgucaagcagaacacccucaagcucgccaccggcaugcgcaacguccccgagaagcagacccgcggcaucuucggcgccaucgccggcuucaucgagaacggcugggagggcauggucgacggcugguacggcuuccgccaccagaacuccgagggcaccggccaggccgccgaccucaaguccacccaggccgccaucaaccagaucaacggcaagcucaaccgccucaucgagaagaccaacgagaaguuccaccagaucgagaaggaguucuccgaggucgagggccgcauccaggaccucgagaaguacgucgaggacaccaagaucgaccucugguccuacaacgccgagcuccucgucgcccucgagaaccagcacaccaucgaccucaccgacuccgagaugaacaagcucuucgagcgcaccaagaagcagcuccgcgagaacgccgaggacaugggcaacggcugcuucaagaucuaccacaagugcgacaacgccugcaucggcuccauccgcaacggcaccuacgaccacgacgucuaccgcgacgaggcccucaacaaccgcuuccagaucaagggcgucgagcucaaguccggcuacaaggacuggauccucuggaucuccuucgccaucuccugcuuccuccucugcgucguccuccucggcuucaucaugugggccugccagaagggcaacauccgcugcaacaucugcaucuga

SEQ ID NO: 104806 - RNA, 1701 nt, Artificial Sequence
  derived and/or modified CDS sequence (opt2) from hemagglutinin__InfluenzaA__AFJ74448
augaagaccaucaucgcccucuccuacauccucugccucgucuucgcccagaagcuccccggcaacgacaacuccaccgccacccucugccucggccaccacgccguccccaacggcacccucgucaagaccaucaccaacgaccagaucgaggucaccaacgccaccgagcucguccaguccuccuccaccggccgcaucugcgacuccccccaccagauccucgacggcgagaacugcacccucaucgacgcccuccucggcggcccccacugcgacggcuuccagaacaaggagugggaccucuucgucgagcgcuccaaggccuacuccaacugcuaccccuacgacguccccgacuacgccucccuccgcucccucgucgccuccuccggcacccucgaguucaacaacgaguccuucaacuggaccggcgucgcccagaacggcaccuccuccgccugcaagcgccgcuccaacaaguccuucuucucccgccucaacuggcuccaccagcucaaguacaaguaccccgcccucaacgucaccaugcccaacaacgagaaguucgacaagcucuacaucuggggcguccaccaccccuccaccgacuccgaccagaucucccucuacgcccaggccuccggccgcgucaccgucuccaccaagcgcucccagcagaccgucauccccaacaucggcucccgccccuggguccgcggcgucuccucccgcaucuccaucuacuggaccaucgucaagcccggcgacauccuccucaucaacuccaccggcaaccucaucgccccccgcggcuacuucaagauccgcuccggcaaguccuccaucaugcgcuccgacgcccccaucggcaagugcaacuccgagugcaucacccccaacggcuccauccccaacgacaagcccuuccagaacgucaaccgcaucaccuacggcgccugcccccgcuacgucaagcagaacacccucaagcucgccaccggcaugcgcaacguccccgagaagcagacccgcggcaucuucggcgccaucgccggcuucaucgagaacggcugggagggcauggucgacggcugguacggcuuccgccaccagaacuccgagggcaccggccaggccgccgaccucaaguccacccaggccgccaucaaccagaucaacggcaagcucaaccgccucaucgagaagaccaacgagaaguuccaccagaucgagaaggaguucuccgaggucgagggccgcauccaggaccucgagaaguacgucgaggacaccaagaucgaccucugguccuacaacgccgagcuccucgucgcccucgagaaccagcacaccaucgaccucaccgacuccgagaugaacaagcucuucgagcgcaccaagaagcagcuccgcgagaacgccgaggacaugggcaacggcugcuucaagaucuaccacaagugcgacaacgccugcaucggcuccauccgcaacggcaccuacgaccacgacgucuaccgcgacgaggcccucaacaaccgcuuccagaucaagggcgucgagcucaaguccggcuacaaggacuggauccucuggaucuccuucgccaucuccugcuuccuccucugcgucguccuccucggcuucaucaugugggccugccagaagggcaacauccgcugcaacaucugcaucuga

SEQ ID NO: 104807 - RNA, 1701 nt, Artificial Sequence
  derived and/or modified CDS sequence (opt2) from hemagglutinin__InfluenzaA__AFJ74459
auggaggccaagcuccucguccuccucugcgccuucaccgccaccuacgccgacaccaucugcaucggcuaccacgccaacaacuccaccgacaccgucgacaccguccucgagaagaacgucaccgucacccacuccgucaaccuccucgaggacucccacaacggcaagcucugccgccucaagggcaccgccccccuccagcucggcaacugcuccaucgccggcuggauccucggcaaccccgagugcgagucccucuucuccaaggaguccugguccuacaucgccgagacccccaaccccgagaacggcaccugcuaccccggcuacuucgccgacuacgaggagcuccgcgagcagcucuccuccgucuccuccuucgagcgcuucgagaucuuccccaaggaguccuccuggcccaaccacaccgucaccaagggcgucaccgccuccugcucccacaacggcaaguccuccuucuacaagaaccuccucuggcucaccgagaagaacggccucuaccccaaccucuccaaguccuacgucaacaacaaggagaaggagguccucguccucuggggcguccaccaccccuccaacaucggcgaccagcgcgccaucuaccacaccgagaacgccuacgucuccgucgucuccucccacuacucccgccgcuucacccccgagaucgccaagcgccccaagguccgcaaccaggagggccgcaucaacuacuacuggacccuccucgagcccggcgacaccaucaucuucgaggccaacggcaaccucaucgcccccugguacgccuucgcccucucccgcggcuucggcuccggcaucaucaccuccaacgccuccaugggcgagugcgacgccaagugccagaccccccagggcgccaucaacuccucccuccccuuccagaacguccaccccgucaccaucggcgagugccccaaguacguccgcuccaccaagcuccgcauggucaccggccuccgcaacauccccuccauccagucccgcggccucuucggcgccaucgccggcuucaucgagggcggcuggaccggcaugaucgacggcugguacggcuaccaccaccagaacgagcagggcuccggcuacgccgccgaccagaaguccacccagaacgccaucaacggcaucaccaacaaggucaacuccaucaucgagaagaugaacacccaguucaccgccgucggcaaggaguucaacaagcucgagcgccgcauggagaaccucaacaagaaggucgacgacggcuuccucgacaucuggaccuacaacgccgagcuccucguccuccucgagaacgagcgcacccucgacuuccacgacuccaacgucaagaaccucuacgagaaggucaagaaccagcucaagaacaacgccaaggagaucggcaacggcugcuucgaguucuaccacaagugcaacaacgagugcauggaguccgucaagaacggcaccuacgacuaccccaaguacuccaaggaguccaagcucaaccgcgagaagaucgacggcgucaagcucgaguccaugggcgucuaccagauccucgccaucuacuccaccgucgccuccucccucguccuccucgucucccucggcgccaucuccuucuggaugugcuccaacggcucccuccagugccgcaucugcaucuga

SEQ ID NO: 104808 - RNA, 1701 nt, Artificial Sequence
  derived and/or modified CDS sequence (opt2) from hemagglutinin__InfluenzaA__AFJ74470
augaagaccaucaucgcccucuccuacauccucugccucgucuucgcccagaagcuccccggcaacgacaacuccaccgccacccucugccucggccaccacgccguccccaacggcacccucgucaagaccaucaccaacgaccagaucgaggucaccaacgccaccgagcucguccaguccuccuccaccggccgcaucugcgacuccccccaccgcauccucgacggcaagaacugcacccucaucgacgcccuccucggcgacccccacugcgacggcuuccagaacaaggagugggaccucuucgucgagcgcuccaaggccuacuccaacugcuaccccuacgacguccccgacuacgccucccuccgcucccucgucgccuccuccggcacccucgaguucaacaacgaguccuucaacuggaccggcgucgcccagaacggcaccuccuacgccugcaagcgccgcuccgucaaguccuucuucucccgccucaacuggcuccacaagcucgaguacaaguaccccgcccucaacgucaccaugcccaacaacgacaaguucgacaagcucuacaucuggggcguccaccaccccuccaccgacuccgaccagaucucccucuacgcccagaccuccggccgcgucaccgucuccaccaagcgcucccagcagaccgucauccccaacaucggcucccgccccuggguccgcggcgucuccucccgcaucuccaucuacuggaccaucgucaagcccggcgacauccuccucaucaacuccaccggcaaccucaucgccccccgcggcuacuucaagauccgcuccggcaaguccuccaucaugcgcuccgacgcccccaucggcaacugcuccuccgagugcaucacccccaacggcuccauccccaacgacaagcccuuccagaacgucaaccgcaucaccuacggcgccugcccccgcuacgucaagcagaacacccucaagcucgccaccggcaugcgcaacguccccgagaagcagacccgcggcaucuucggcgccaucgccggcuucaucgagaacggcugggagggcauggucgacggcugguacggcuuccgccaccagaacuccgagggcaccggccaggccgccgaccucaaguccacccaggccgccaucaaccagaucaacggcaagcucaaccgccucaucgagaagaccaacgagaaguuccaccagaucgagaaggaguucuccgaggucgagggccgcauccaggaccucgagaaguacgucgaggacaccaagaucgaccucugguccuacaacgccgagcuccucgucgcccucgagaaccagcacaccaucgaccucaccgacuccgagaugaacaagcucuucgagcgcacccgcaagcagcuccgcgagaacgccgaggacaugggcaacggcugcuucaagaucuaccacaagugcgacaacgccugcaucggcuccauccgcaacggcaccuacaaccacgacgucuaccgcgacgaggcccucaacaaccgcuuccagaucaagggcgucgagcucaaguccggcuacaaggacuggauccucuggaucuccuucgccaucuccugcuuccuccucugcgucguccuccucggcuucaucaugugggccugccagaagggcaacauccgcugcaacaucugcaucuga

SEQ ID NO: 104809 - RNA, 1701 nt, Artificial Sequence
  derived and/or modified CDS sequence (opt2) from hemagglutinin__InfluenzaA__AFJ74492
augaagaccaucaucgcccucuccuacauccucugccucgucuucgcccagaagcuccccggcaacgacaacuccaccgccacccucugccucggccaccacgccguccccaacggcacccucgucaagaccaucaccaacgaccagaucgaggucaccaacgccaccgagcucguccaguccuccuccaccggccgcaucugcgacuccccccaccagauccucgacggcgagaacugcacccucaucgacgcccuccucggcgacccccacugcgacggcuuccagaacaaggagugggaccucuucgucgagcgcuccaaggccuacuccaacugcuaccccuacgacguccccgacuacgccucccuccgcucccucgucgccuccuccggcacccucgaguucaacaacgaguccuucaacuggaccggcgucgcccagaacggcaccuccuccgccugcaagcgccgcuccaacaaguccuucuucucccgccucaacuggcuccaccagcucaaguacaaguaccccgcccucaacgucaccaugcccaacaacaagaaguucgacaagcucuacaucuggggcguccaccaccccuccaccgacuccgaccagaucucccucuacgcccaggccuccggccgcgucaccgucuccaccaagcgcucccagcagaccgucauccccaacaucggcucccgccccuggguccgcggcgucuccuccaucaucuccaucuacuggaccaucgucaagcccggcgacauccuccucaucaacuccaccggcaaccucaucgccccccgcggcuacuucaagauccgcaacggcaaguccuccaucaugcgcuccgacgcccccaucggcaagugcaacuccgagugcaucacccccaacggcuccauccccaacgacaagcccuuccagaacgucaaccgcaucaccuacggcgccugcccccgcuacgucaagcagaacacccucaagcucgccaccggcaugcgcaacguccccgagaagcagacccgcggcaucuucggcgccaucgccggcuucaucgagaacggcugggagggcauggucgacggcugguacggcuuccgccaccagaacuccgagggcaccggccaggccgccgaccucaaguccacccaggccgccaucaaccagaucaacggcaagcucaaccgccucaucggcaagaccaacgagaaguuccaccagaucgagaaggaguucuccgaggucgagggccgcauccaggaccucgagaaguacgucgaggacaccaagaucgaccucugguccuacaacgccgagcuccucgucgcccucgagaaccagcacaccaucgaccucaccgacuccgagaugaacaagcucuucgagcgcaccaagaagcagcuccgcgagaacgccgaggacaugggcaacggcugcuucaagaucuaccacaagugcgacaacgccugcaucggcuccauccgcaacggcaccuacgaccacgacgucuaccgcgacgaggcccucaacaaccgcuucaagaucaagggcgucgagcucaaguccggcuacaaggacuggauccucuggaucuccuucgccaucuccugcuuccuccucugcgucguccuccucggcuucaucaugugggccugccagaagggcaacauccgcugcaacaucugcaucuga

SEQ ID NO: 104810 - RNA, 1701 nt, Artificial Sequence
  derived and/or modified CDS sequence (opt2) from hemagglutinin__InfluenzaA__AFJ74525
augaagaccaucaucgcccucuccuacauccucugccucgucuucgcccagaagcuccccggcaacgacaacuccaccgccacccucugccucggccaccacgccguccccaacggcacccucgucaagaccaucaccaacgaccagaucgaggucaccaacgccaccgagcucguccaguccuccuccaccggccgcaucugcgacuccccccaccgcauccucgacggcgagaacugcacccucaucgacgcccuccucggcgacccccacugcgacggcuuccagaacaaggagugggaccucuucgucgagcgcuccaaggccuacuccaacugcuaccccuacgacguccccgacuacgccucccuccgcucccucgucgccuccuccggcacccucgaguucaacaacgaguccuucaacuggaccggcgucgcccaggacggcaccuccuccgccugcaagcgccgcuccaucaaguccuucuucucccgccucaacuggcuccaccagcucaaguacaaguaccccgcccucaacgucaccaugcccaacaacgacaaguucgacaagcucuacaucuggggcguccaccaccccuccaccgacuccgaccagaccucccucuacgcccaggccuccggccgcgucaccgucuccaccaagcgcucccagcagaccgucauccccaacaucggcucccgccccuggguccgcggcgucuccuccaucaucuccaucuacuggaccaucgucaagcccggcgacauccuccucaucaacuccaccggcaaccucaucgccccccgcggcuacuucaagauccgcuccggcaaguccuccaucaugcgcuccgacgcccccaucggcaagugcaacuccgagugcaucacccccaacggcuccauccccaacgacaagcccuuccagaacgucaaccgcaucaccuacggcaccugcccccgcuacgucaagcagaacacccucaagcucgccaccggcaugcgcaacguccccgagaagcagacccgcggcaucuucggcgccaucgccggcuucaucgagaacggcugggagggcauggucgacggcugguacggcuuccgccaccagaacuccgagggcaccggccaggccgccgaccucaaguccacccaggccgccaucaaccagaucaacggcaagcucaaccgccucaucgagaagaccaacgagaaguuccaccagaucgagaaggaguucuccgaggucgagggccgcauccaggaccucgagaaguacgucgaggacaccaagaucgaccucugguccuacaacgccgagcuccucgucgcccucgagaaccagcacaccaucgaccucaccgacuccgagaugaacaagcucuucgagcgcacccgcaagcagcuccgcgagaacgccgaggacaugggcaacggcugcuucaagaucuaccacaagugcgacaacgccugcaucggcuccauccgcaacggcaccuacgaccacgacgucuaccgcgacgaggcccucaacaaccgcuuccagaucaagggcgucgagcucaaguccggcuacaaggacuggauccucuggaucuccuucgccaucuccugcuuccuccucugcgucguccuccucggcuucaucaugugggccugccagaagggcaacauccgcugcaacaucugcaucuga

SEQ ID NO: 104811 - RNA, 1701 nt, Artificial Sequence; identical to SEQ ID NO: 104809
  derived and/or modified CDS sequence (opt2) from hemagglutinin__InfluenzaA__AFJ74535

SEQ ID NO: 104812 - RNA, 1701 nt, Artificial Sequence
  derived and/or modified CDS sequence (opt2) from hemagglutinin__InfluenzaA__AFJ74560
augaagaccaucaucgcccucuccuacauccucugccucgucuucgcccagaagcuccccggcaacgacaacuccaccgccacccucugccucggccaccacgccguccccaacggcacccucgucaagaccaucaccaacgaccagaucgaggucaccaacgccaccgagcucguccaguccuccuccaccggccgcaucugcgacuccccccaccagauccucgacggcgagaacugcacccucaucgacgcccuccucggcgacccccacugcgacggcuuccagaacaaggagugggaccucuucgucgagcgcuccaaggccuacuccaacugcuaccccuacgacguccccgacuacgucucccuccgcucccucgucgccuccuccggcacccucgaguucaacaacgaguccuucaacuggaccggcgucgcccagaacggcaccuccuccgccugcaagcgccgcuccgacaaguccuucuucucccgccucaacuggcuccaccagcucaaguacaaguaccccgcccucaacgucaccaugcccaacaacgagaaguucgacaagcucuacaucuggggcguccaccaccccggcaccgacuccgaccagaucucccucuacgcccagaccuccggccgcgucaccgucuccaccaagcgcucccagcagaccgucauccccaacaucggcuccggccccuggguccgcggcgucuccucccgcaucuccaucuacuggaccaucgucaagcccggcgacauccuccucaucaacuccaccggcaaccucaucgccccccgcggcuacuucaagauccgcuccggcaaguccuccaucaugcgcuccgacgcccccaucggcaagugcaacuccgagugcaucacccccaacggcuccauccccaacgacaagcccuuccagaacgucaaccgcaucaccuacggccccugcccccgcuacgucaagcagaacacccucaagcucgccaccggcaugcgcaacguccccgagaagcagacccgcggcaucuucggcgccaucgccggcuucaucgagaacggcugggagggcaugauggacggcugguacggcuuccgccaccagaacuccgagggcaccggccaggccgccgaccucaaguccacccaggccgccaucaaccagaucaacggcaagcucaaccgccucgucgagaagaccaacgagaaguuccaccagaucgagaaggaguucuccgaggucgagggccgcauccaggaccucgagaaguacgucgaggacaccaagaucgaccucugguccuacaacgccgagcuccucgucgcccucgagaaccagcacaccaucgaccucaccgacuccgagaugaacaagcucuucgagcgcaccaagaagcagcuccgcgagaacgccgaggacaugggcaacggcugcuucaagaucuaccacaagugcgacaacgccugcaucggcuccauccgcaacggcaccuacgaccacgacgucuaccgcgacgaggcccucaacaaccgcuuccagaucaagggcgucgagcucaaguccggcuacaaggacuggauccucuggaucuccuucgccaucuccugcuuccuccucugcaucguccuccucggcuucaucaugugggccugccagaagggcaacauccgcugcaacaucugcaucuga

SEQ ID NO: 104813 - RNA, 1701 nt, Artificial Sequence
  derived and/or modified CDS sequence (opt2) from hemagglutinin__InfluenzaA__AFJ74634
augaagaccaucaucgcccucuccuacauccucugccucgucuucgcccagaagcuccccggcaacgacaacuccaccgccacccucugccucggccaccacgccguccccaacggcaccaucgucaagaccaucaccaacgaccagaucgaggucaccaacgccaccgagcucguccaguccuccuccaccggcggcaucugcgacuccccccaccagauccucgacggcgagaacugcacccucaucgacgcccuccucggcgacccccagugcgacggcuuccagaacaagaagugggaccucuucgucgagcgcuccaaggccuacuccaacugcuaccccuacgacguccccgacuacgccucccuccgcucccucgucgccuccuccggcacccucgaguucaacaacgaguccuucaacuggaccggcgucacccagaacggcaccuccuccgccugcaagcgccgcuccaacaaguccuucuucucccgccucaacuggcucacccagcucaaguacaaguaccccgcccucaacgucaccaugcccaacaacgagaaguucgacaagcucuacaucuggggcguccaccaccccggcaccgacuccgaccagaucucccucuacgcccaggccuccggccgcaucaccgucuccaccaagcgcucccagcagaccgucauccccaacaucggcucccgcccccgcguccgcgacgucuccucccgcaucuccaucuacuggaccaucgucaagcccggcgacauccuccucaucaacuccaccggcaaccucaucgccccccgcggcuacuucaagauccgcuccggcaaguccuccaucaugcgcuccgacgcccccaucggcaagugcaacuccgagugcaucacccccaacggcuccauccccaacgacaagcccuuccagaacgucaaccgcaucaccuacggcgccugcccccgcuacgucaagcagaacacccucaagcucgccaccggcaugcgcaacguccccgagaagcagacccgcggcaucuucggcgccaucgccggcuucaucgagaacggcugggagggcauggucgacggcugguacggcuuccgccaccagaacuccgagggcaccggccaggccgccgaccucaaguccacccaggccgccaucaaccagaucaacggcaagcucaaccgccucaucggcaagaccaacgagaaguuccaccagaucgagaaggaguucuccgaggucgagggccgcauccaggaccucgagaaguacgucgaggacaccaagaucgaccucugguccuacaacgccgagcuccucgucgcccucgagaaccagcacaccaucgaccucaccgacuccgagaugaacaagcucuucgagcgcaccaagaagcagcuccgcgagaacgccgaggacaugggcaacggcugcuucaagaucuaccacaagugcgacaacgccugcaucggcuccauccgcaacggcaccuacgaccacgacgucuaccgcgacgaggcccucaacaaccgcuuccagaucaagggcgucgagcucaaguccggcuacaaggacuggauccucuggaucuccuucgccaucuccugcuuccuccucugcgucgcccuccucggcuucaucaugugggccugccagaagggcaacauccgcugcaacaucugcaucuga

SEQ ID NO: 104814 - RNA, 1698 nt, Artificial Sequence
  derived and/or modified CDS sequence (opt2) from hemagglutinin__InfluenzaA__AFJ74653
augaaggucaagcuccucguccuccucugcaccuucaccgccaccuacgccgacaccaucugcaucggcuaccacgccaacaacuccaccgacaccgucgacaccguccucgagaagaacgucaccgucacccacuccgucaaccuccucgaggacucccacaacggcaagcucugccuccucaagggcaucgccccccuccagcucggcaacugcuccgucgccggcuggauccucggcaaccccgagugcgagcuccucaucuccaaggaguccugguccuacaucgucgagaagcccaaccccgagaacggcaccugcuaccccggcuacuucgccgacuacgaggagcuccgcgagcagcucuccuccgucuccuccuucgagcgcuucgagaucuuccccaaggaguccuccuggcccaaccacaccgucaccggcgucuccgccuccugcucccacaacggcaaguccuccuucuacaagaaccuccucuggcucaccggcaagaacggccucuaccccaaccucuccaaguccuacgccaacaacaaggagaaggagguccucguccucuggggcguccaccacccccccaacaucggcgaccagcgcgcccucuaccacaccgacaacgccuacgucuccgucgucuccucccacuacucccgcaaguucacccccgagaucgccaagcgccccaagguccgcgaccaggagggccgcaucaacuacuacuggacccuccucgagcccggcgacaccaucaucuucgaggccaacggcaaccucaucgccccccgcuacgccuucgcccucucccgcggcuucggcuccggcaucaucaacuccaacgcccccauggacgagugcgacgccaagugccagaccccccagggcgccaucaacuccucccuccccuuccagaacguccaccccgucaccaucggcgagugccccaaguacguccgcuccgccaagcuccgcauggucaccggccuccgcaacauccccuccauccagucccgcggccucuucggcgccaucgccggcuucaucgagggcggcuggaccggcauggucgacggcugguacggcuaccaccaccagaacgagcagggcuccggcuacgccgccgaccagaaguccacccagaacgccaucaacggcaucaccaacaaggucaacuccgucaucgagaagaugaacacccaguucaccgccgucggcaaggaguucaacaagcucgagcgccgcauggagaaccucaacaagaaggucgacgacggcuucaucgacaucuggaccuacaacgccgagcuccucguccuccucgagaacgagcgcacccucgacuuccacgacuccaacgucaagaaccucuacgagaaggucaagucccagcucaagaacaacgccaaggagaucggcaacggcugcuucgaguucuaccacaagugcaacgacgagugcauggaguccgucaagaacggcaccuacgacuaccccaaguacuccgaggaguccaagcucaaccgcgagaagaucgacggcgucaagcucgaguccaugggcgucuaccagauccucgccaucuacuccaccgucgccuccucccucguccuccucgucucccucggcgccaucuccuucuggaugugcuccaacggcucccuccagugccgcaucugcaucuga

SEQ ID NO: 104815 - RNA, 1698 nt, Artificial Sequence
  derived and/or modified CDS sequence (opt2) from hemagglutinin__InfluenzaA__AFJ74673
augaaggucaagcuccucguccuccucugcaccuucaccgccaccuacgccgacaccaucugcaucggcuaccacgccaacaacuccaccgacaccgucgacaccguccucgagaagaacgucaccgucacccacuccgucaaccuccucgaggacucccacaacggcaagcucugccuccucaagggcaucgccccccuccagcucggcaacugcuccgucgccggcuggauccucggcaaccccgagugcgagcuccucaucuccaaggaguccugguccuacaucgucgagaagcccaaccccgagaacggcaccugcuaccccggcuacuucgccgacuacgaggagcuccgcgagcagcucuccuccgucuccuccuucgagcgcuucgagaucuuccccaaggaguccuccuggcccaaccacaccgucaccggcgucuccgccuccugcucccacaacggcaaguccuccuucuacaagaaccuccucuggcucaccggcaagaacggccucuaccccaaccuccgcaaguccuacgccaacaacaaggagaaggagguccucguccucuggggcguccaccacccccccaacaucggcgaccagcgcgcccucuaccacaccgacaacgccuacgucuccgucgucuccucccacuacucccgcaaguucacccccgagaucgccaagcgccccaagguccgcgaccaggagggccgcaucaacuacuacuggacccuccucgagcccggcgacaccaucaucuucgaggccaacggcaaccucaucgccccccgcuacgccuucgcccucucccgcggcuucggcuccggcaucaucaacuccaacgcccccauggacgagugcgacgccaagugccagaccccccagggcgccaucaacuccucccuccccuuccagaacguccaccccgucaccaucggcgagugccccaaguacguccgcuccgccaagcuccgcauggucaccggccuccgcaacauccccuccauccagucccgcggccucuucggcgccaucgccggcuucaucgagggcggcuggaccggcauggucgacggcugguacggcuaccaccaccagaacgagcagggcuccggcuacgccgccgaccagaaguccacccagaacgccaucaacggcaucaccaacaaggucaacuccgucaucgagaagaugaacacccaguucaccgccgucggcaaggaguucaacaagcucgagcgccgcauggagaaccucaacaagaaggucgacgacggcuucaucgacaucuggaccuacaacgccgagcuccucguccuccucgagaacgagcgcacccucgacuuccacgacuccaacgucaagaaccucuacgagaaggucaagucccagcucaagaacaacgccaaggagaucggcaacggcugcuucgaguucuaccacaagugcaacgacgagugcauggaguccgucaagaacggcaccuacgacuaccccaaguacuccgaggaguccaagcucaaccgcgagaagaucgacggcgucaagcucgaguccaugggcgucuaccagauccucgccaucuacuccaccgucgccuccucccucguccuccucgucucccucggcgccaucuccuucuggaugugcuccaacggcucccuccagugccgcaucugcaucuga

SEQ ID NO: 104816 - RNA, 1701 nt, Artificial Sequence
  derived and/or modified CDS sequence (opt2) from hemagglutinin__InfluenzaA__AFJ74674
augaagaccaucaucgcccucuccuacauccucugccucgucuucgcccagaagcuccccggcaacgacaacuccaccgccacccucugccucggccaccacgccguccccaacggcacccucgucaagaccaucaccaacgaccagaucgaggucaccaacgccaccgagcucguccaguccuccuccaccggcggcaucugcgacuccccccaccagauccucgacggcgagaacugcacccucaucgacgcccuccucggcgacccccacugcgacggcuuccagaacaagaagugggaccucuucgucgagcgcuccaaggccuacuccaacugcuaccccuacgacguccccgacuacgccucccuccgcucccucgucgccuccuccggcacccucgaguucaacaacgaguccuucaacuggaccggcgucgcccagaacggcaccuccuccgccugcaagcgccgcuccaacaaguccuucuucucccgccucaacuggcuccaccagcucaaguacaaguaccccgcccucaacgucaccaugcccaacaacgagaaguucgacaagcucuacaucuggggcguccaccaccccggcaccgacuccgaccagaucucccucuacgcccaggccuccggccgcaucaccgucuccaccaagcgcucccagcagaccgucauccccaacaucggcucccgcccccgcguccgcgacgucuccucccgcaucuccaucuacuggaccaucgucaagcccggcgacauccuccucaucaacuccaccggcaaccucaucgccccccgcggcuacuucaagauccgcuccggccgcuccuccaucaugcgcuccgacgcccccaucggcaagugcaacuccgagugcaucacccccaacggcuccauccccaacgacaagcccuuccagaacgucaaccgcaucaccuacggcgccugcccccgcuacgucaagcagaacacccucaagcucgccaccggcaugcgcaacguccccgagaagcagccccgcggcaucuucggcgccaucgccggcuucaucgagaacggcugggagggcauggucgacggcugguacggcuuccgccaccagaacuccgagggcaccggccaggccgccgaccucaaguccacccaggccgccaucaaccagaucaacggcaagcucaaccgccucaucggcaagaccaacgagaaguuccaccagaucgagaaggaguucuccgaggucgagggccgcauccaggaccucgagaaguacgucgaggacaccaagaucgaccucugguccuacaacgccgagcuccucgucgcccucgagaaccagcacaccaucgaccucaccgacuccgagaugaacaagcucuucgagcgcaccaagaagcagcuccgcgagaacgccgaggacaugggcaacggcugcuucaagaucuaccacaagugcgacaacgccugcaucggcuccauccgcaacggcaccuacgaccacgacgucuaccgcgacgaggcccucaacaaccgcuuccagaucaagggcgucgagcucaaguccggcuacaaggacuggauccucuggaucuccuucgccaucuccugcuuccuccucugcgucgcccuccucggcuucaucaugugggccugccagaagggcaacauccgcugcaacaucugcaucuga

SEQ ID NO: 104817 - RNA, 1698 nt, Artificial Sequence; identical to SEQ ID NO: 104814
  derived and/or modified CDS sequence (opt2) from hemagglutinin__InfluenzaA__AFJ74694

SEQ ID NO: 104818 - RNA, 1701 nt, Artificial Sequence
  derived and/or modified CDS sequence (opt2) from hemagglutinin__InfluenzaA__AFJ74695
augaagaccaucaucgcccucuccuacauccucugccucgucuucgcccagaagcuccccggcaacgacaacuccaccgccacccucugccucggccaccacgccguccccaacggcacccucgucaagaccaucaccaacgaccagaucgaggucaccaacgccaccgagcucguccagaacuccuccaccggccgcaucugcgacuccccccaccagauccucgacggcgagaacugcacccucaucgacgcccuccucggcgacccccacugcgacggcuuccagaacaaggagugggaccucuucgucgagcgcuccaaggccuacuccaacugcuaccccuacgacguccccgacuacgucucccuccgcucccucgucgccuccuccggcacccucgaguucaacaacgaguccuucaacuggaccggcgucgcccaggacggcaccuccuccgccugcaagcgccgcuccgacaaguccuucuucucccgccucaacuggcuccaccagcucaaguacaaguaccccgcccucaacgucaccaugcccaacaacgagaaguucgacaagcucuacaucuggggcguccaccaccccggcaccgacuccgaccagaucucccucuacgcccgcgccuccggccgcgucaccgucuccaccaagcgcucccagcagaccgucauccccaacaucggcucccgccccuggguccgcggcgucuccuccaagaucuccaucuacuggaccaucgucaagcccggcgacauccuccucaucaacuccaccggcaaccucaucgccccccgcggcuacuucaagauccgcuccggcaaguccuccaucaugcgcuccgacgcccccaucggcaagugcaacuccgagugcaucacccccaacggcuccauccccaacgacaagcccuuccagaacgucaaccgcaucaccuacggccccugcccccgcuacgucaagcagaacacccucaagcucgccaccggcaugcgcaacguccccgagaagcagacccgcggcaucuucggcgccaucgccggcuucaucgagaacggcugggagggcauggucgacggcugguacggcuuccgccaccagaacuccgagggcaccggccaggccgccgaccucaaguccacccaggccgccaucaaccagaucaacggcaagcucaaccgccucaucgagaagaccaacgagaaguuccaccagaucgagaaggaguucuccgaggucgagggccgcauccaggaccucgagaaguacgucgaggacaccaagaucgaccucugguccuacaacgccgagcuccucgucgcccucgagaaccagcacaccaucgaccucaccgacuccgagaugaacaagcucuucgagcgcaccaagaagcagcuccgcgagaacgccgaggacaugggcaacggcugcuucaagaucuaccacaagugcgacaacgccugcaucggcuccauccgcaacggcaccuacgaccacgacgucuaccgcgacgaggcccucaacaaccgcuuccagaucaagggcgucgagcucaaguccggcuacaaggacuggauccucuggaucuccuucgccaucuccugcuuccuccucugcaucguccuccucggcuucaucaugugggccugccagaagggcaacauccgcugcaacaucugcaucuga

SEQ ID NO: 104819 - RNA, 1701 nt, Artificial Sequence
  derived and/or modified CDS sequence (opt2) from hemagglutinin__InfluenzaA__AFJ74727
augaagaccaucaucgcccucuccuacauccucugccucgucuucgcccagaagcuccccggcaacgacaacuccaccgccacccucugccucggccaccacgccguccccaacggcaccaucgucaagaccaucaccaacgaccagaucgaggucaccaacgccaccgagcucguccaguccuccuccaccggcggcaucugcgacuccccccaccagauccucgacggcgagaacugcacccucaucgacgcccuccucggcgacccccagugcgacggcuuccagaacaagaagugggaccucuucgucgagcgcuccaaggccuacuccaacugcuaccccuacgacguccccgacuacgccucccuccgcucccucgucgccuccuccggcacccucgaguucaacaacgaguccuucaacuggaccggcgucacccagaacggcaccuccuccgccugcaagcgccgcuccaacaaguccuucuucucccgccucaacuggcucacccagcucaaguacaaguaccccgcccucaacgucaccaugcccaacaacgagaaguucgacaagcucuacaucuggggcguccaccaccccggcaccgacuccgaccagaucucccucuacgcccaggccuccggccgcaucaccgucuccaccaagcgcucccagcagaccgucauccccaacaucggcucccgcccccgcguccgcgacaucuccucccgcaucuccaucuacuggaccaucgucaagcccggcgacauccuccucaucaacuccaccggcaaccucaucgccccccgcggcuacuucaagauccgcuccggcaaguccuccaucaugcgcuccgacgcccccaucggcaagugcaacuccgagugcaucacccccaacggcuccauccccaacgacaagcccuuccagaacgucaaccgcaucaccuacggcgccugcccccgcuacgucaagcagaacacccucaagcucgccaccggcaugcgcaacguccccgagaagcagacccgcggcaucuucggcgccaucgccggcuucaucgagaacggcugggagggcauggucgacggcugguacggcuuccgccaccagaacuccgagggcaccggccaggccgccgaccucaaguccacccaggccgccaucaaccagaucaacggcaagcucaaccgccucaucggcaagaccaacgagaaguuccaccagaucgagaaggaguucuccgaggucgagggccgcauccaggaccucgagaaguacgucgaggacaccaagaucgaccucugguccuacaacgccgagcuccucgucgcccucgagaaccagcacaccaucgaccucaccgacuccgagaugaacaagcucuucgagcgcaccaagaagcagcuccgcgagaacgccgaggacaugggcaacggcugcuucaagaucuaccacaagugcgacaacgccugcaucggcuccauccgcuccggcaccuacgaccacgacgucuaccgcgacgaggcccucaacaaccgcuuccagaucaagggcgucgagcucaaguccggcuacaaggacuggauccucuggaucuccuucgccaucuccugcuuccuccucugcgucgcccuccucggcuucaucaugugggccugccagaagggcaacauccgcugcaacaucugcaucuga

SEQ ID NO: 104820 - RNA, 1698 nt, Artificial Sequence; identical to SEQ ID NO: 104814
  derived and/or modified CDS sequence (opt2) from hemagglutinin__InfluenzaA__AFJ74743

SEQ ID NO: 104821 - RNA, 1701 nt, Artificial Sequence; identical to SEQ ID NO: 104813
  derived and/or modified CDS sequence (opt2) from hemagglutinin__InfluenzaA__AFJ74744

SEQ ID NO: 104822 - RNA, 1698 nt, Artificial Sequence; identical to SEQ ID NO: 104814
  derived and/or modified CDS sequence (opt2) from hemagglutinin__InfluenzaA__AFJ74760

SEQ ID NO: 104823 - RNA, 1701 nt, Artificial Sequence
  derived and/or modified CDS sequence (opt2) from hemagglutinin__InfluenzaA__AFJ74761
augaagaccaucaucgcccucuccuacauccucugccucgucuucgcccagaagcuccccggcaacgacaacuccaccgccacccucugccucggccaccacgccguccccaacggcaccaucgucaagaccaucaccaacgaccagaucgaggucaccaacgccaccgagcucguccaguccuccuccaccggcggcaucugcgacuccccccaccagauccucgacggcgagaacugcacccucaucgacgcccuccucggcgacccccagugcgacggcuuccagaacaagaagugggaccucuucgucgagcgcuccaaggccuacuccaacugcuaccccuacgacguccccgacuacgccucccuccgcucccucgucgccuccuccggcacccucgaguucaacaacgaguccuucaacuggaccggcgucacccagaacggcaccuccuccgccugcaagcgccgcuccaacaaguccuucuucucccgccucaacuggcucacccagcucaaguacaaguaccccgcccucaacgucaccaugcccaacaacgagaaguucgacaagcucuacaucuggggcguccaccaccccggcaccgacuccgaccagaucucccucuacgcccaggccuccggccgcaucaccgucuccaccaagcgcucccagcagaccgucauccccaacaucggcucccgcccccgcguccgcgacaucuccucccgcaucuccaucuacuggaccaucgucaagcccggcgacauccuccucaucaacuccaccggcaaccucaucgccccccgcggcuacuucaagauccgcuccggcaaguccuccaucaugcgcuccgacgcccccaucggcaagugcaacuccgagugcaucacccccaacggcuccauccccaacgacaagcccuuccagaacgucaaccgcaucaccuacggcgccugcccccgcuacgucaagcagaacacccucaagcucgccaccggcaugcgcaacguccccgagaagcagacccgcggcaucuucggcgccaucgccggcuucaucgagaacggcugggagggcauggucgacggcugguacggcuuccgccaccagaacuccgagggcaccggccaggccgccgaccucaaguccacccaggccgccaucaaccagaucaacggcaagcucaaccgccucaucggcaagaccaacgagaaguuccaccagaucgagaaggaguucuccgaggucgagggccgcauccaggaccucgagaaguacgucgaggacaccaagaucgaccucugguccuacaacgccgagcuccucgucgcccucgagaaccagcacaccaucgaccucaccgacuccgagaugaacaagcucuucgagcgcaccaagaagcagcuccgcgagaacgccgaggacaugggcaacggcugcuucaagaucuaccacaagugcgacaacgccugcaucggcuccauccgcaacggcaccuacgaccacgacgucuaccgcgacgaggcccucaacaaccgcuuccagaucaagggcgucgagcucaaguccggcuacaaggacuggauccucuggaucuccuucgccaucuccugcuuccuccucugcgucgcccuccucggcuucaucaugugggccugccagaagggcaacauccgcugcaacaucugcaucuga

SEQ ID NO: 104824 - RNA, 1698 nt, Artificial Sequence; identical to SEQ ID NO: 104814
  derived and/or modified CDS sequence (opt2) from hemagglutinin__InfluenzaA__AFJ74779

SEQ ID NO: 104825 - RNA, 1701 nt, Artificial Sequence; identical to SEQ ID NO: 104813
  derived and/or modified CDS sequence (opt2) from hemagglutinin__InfluenzaA__AFJ74780

SEQ ID NO: 104826 - RNA, 1701 nt, Artificial Sequence
  derived and/or modified CDS sequence (opt2) from hemagglutinin__InfluenzaA__AFJ74804
augaagaccaucaucgcccucuccuacauccucugccucgucuucgcccagaagcuccccggcaacgacaacuccaccgccacccucugccucggccaccacgccguccccaacggcaccaucgucaagaccaucaccaacgaccagaucgaggucaccaacgccaccgagcucguccaguccuccuccaccggcggcaucugcgacuccccccaccagauccucgacggcgagaacugcacccucaucgacgcccuccucggcgacccccagugcgacggcuuccagaaccgcaagugggaccucuucgucgagcgcuccaaggccuacuccaacugcuaccccuacgacguccccgacuacgccucccuccgcucccucgucgccuccuccggcacccucgaguucaacaacgaguccuucgacuggaccggcgucacccagaacggcaccuccuccgccugcaagcgccgcuccaacaaguccuucuucucccgccucaacuggcucacccaccucaaguacaaguaccccgcccucaacgucaccaugcccaacaacgagaaguucgacaagcucuacaucuggggcguccaccaccccggcaccgacuccgaccagaucucccucuacgcccaggccuccggccgcaucaccgucuccaccaagcgcucccagcagaccgucauccccaacaucggcucccgcccccgcguccgcgacgucuccucccgcaucuccaucuacuggaccaucgucaagcccggcgacauccuccucaucaacuccaccggcaaccucaucgccccccgcggcuacuucaagauccgcuccggcaaguccuccaucaugcgcuccgacgcccccaucggcaagugcaacuccgagugcaucacccccaacggcuccauccccaacgacaagcccuuccagaacgucaaccgcaucaccuacggcgccugcccccgcuacgucaagcagaacacccucaagcucgccaccggcaugcgcaacguccccgagaagcagacccgcggcaucuucggcgccaucgccggcuucaucgagaacggcugggagggcauggucgacggcugguacggcuuccgccaccagaacuccgagggcaccggccaggccgccgaccucaaguccacccaggccgccaucaaccagaucaacggcaagcucaaccgccucaucggcaagaccaacgagaaguuccaccagaucgagaaggaguucuccgaggucgagggccgcauccaggaccucgagaaguacgucgaggacaccaagaucgaccucugguccuacaacgccgagcuccucgucgcccucgagaaccagcacaccaucgaccucaccgacuccgagaugaacaagcucuucgagcgcaccaagaagcagcuccgcgagaacgccgaggacaugggcaacggcugcuucaagaucuaccacaagugcgacaacgccugcaucggcuccauccgcaacggcaccuacgaccacgacgucuaccgcgacgaggcccucaacaaccgcuuccagaucaagggcgucgagcucaaguccggcuacaaggacuggauccucuggaucuccuucgccaucuccugcuuccuccucugcgucgcccuccucggcuucaucaugugggccugccagaagggcaacauccgcugcaacaucugcaucuga

SEQ ID NO: 104827 - RNA, 1701 nt, Artificial Sequence
  derived and/or modified CDS sequence (opt2) from hemagglutinin__InfluenzaA__AFJ74819
augaagaccaucaucgcccucuccuacauccucugccucgucuucgcccagaagcuccccggcaacgacaacuccaccgccacccucugccucggccaccacgccguccccaacggcaccaucgucaagaccaucaccaacgaccagaucgaggucaccaacgccaccgagcucguccaguccuccuccaccggcggcaucugcgacuccccccaccagauccucgacggcgagaacugcacccucaucgacgcccuccucggcgacccccagugcgacggcuuccagaacaagaagugggaccucuucgucgagcgcuccaaggccuacuccaacugcuaccccuacgacguccccgacuacgccucccuccgcucccucgucgccuccuccggcacccucgaguucaacaacgaguccuucgacuggaccggcgucacccagaacggcaccuccuccgccugcaagcgccgcuccaacaaguccuucuucucccgccucaacuggcucacccaccucaaguacaaguaccccgcccucaacgucaccaugcccaacaacgagaaguucgacaagcucuacaucuggggcguccaccaccccggcaccgacuccgaccagaucaaccucuacgcccaggccuccggccgcaucaccgucuccaccaagcgcucccagcagaccgucauccccaacaucggcucccgcccccgcguccgcgacgucuccucccgcaucuccaucuacuggaccaucgucaagcccggcgacauccuccucaucaacuccaccggcaaccucaucgccccccgcggcuacuucaagauccgcuccggcaaguccuccaucaugcgcuccgacgcccccaucggcaagugcaacuccgagugcaucacccccaacggcuccauccccaacgacaagcccuuccagaacgucaaccgcaucaccuacggcgccugcccccgcuacgucaagcagaacacccucaagcucgccaccggcaugcgcaacguccccgagaagcagacccgcggcaucuucggcgccaucgccggcuucaucgagaacggcugggagggcauggucgacggcugguacggcuuccgccaccagaacuccgagggcaccggccaggccgccgaccucaaguccacccaggccgccaucaaccagaucaacggcaagcucaaccgccucaucggcaagaccaacgagaaguuccaccagaucgagaaggaguucuccgaggucgagggccgcauccaggaccucgagaaguacgucgaggacaccaagaucgaccucugguccuacaacgccgagcuccucgucgcccucgagaaccagcacaccaucgaccucaccgacuccgagaugaacaagcucuucgagcgcaccaagaagcagcuccgcgagaacgccgaggacaugggcaacggcugcuucaagaucuaccacaagugcgacaacgccugcaucggcuccauccgcaacggcaccuacgaccacgacgucuaccgcgacgaggcccucaacaaccgcuuccagaucaagggcgucgagcucaaguccggcuacaaggacuggauccucuggaucuccuucgccaucuccugcuuccuccucugcgucgcccuccucggcuucaucaugugggccugccagaagggcaacauccgcugcaacaucugcaucuga

SEQ ID NO: 104828 - RNA, 1701 nt, Artificial Sequence; identical to SEQ ID NO: 98681
  derived and/or modified CDS sequence (opt2) from hemagglutinin__InfluenzaA__AFJ74842

SEQ ID NO: 104829 - RNA, 1698 nt, Artificial Sequence
  derived and/or modified CDS sequence (opt2) from hemagglutinin__InfluenzaA__AFJ75036
augaaggucaagcuccucguccuccucugcaccuucaccgccaccuacgccgacaccaucugcaucggcuaccacgccaacaacuccaccgacaccgucgacaccguccucgagaagaacgucaccgucacccacuccgucaaccuccucgaggacucccacaacggcaagcucugccuccucaagggcaucgccccccuccagcucggcaacugcuccgucgccggcuggauccucggcaaccccgagugcgagcuccucaucucccgcgaguccugguccuacaucgucgagaagcccaaccccgagaacggcaccugcuaccccggccacuucgccgacuacgaggagcuccgcgagcagcucuccuccgucuccuccuucgagcgcuucgagaucuuccccaaggagaacuccuggcccaaccacaccgucaccggcgucuccgccuccugcucccacaacggcaaguccuccuucuacaagaaccuccucuggcucaccggcaagaacggccucuaccccaaccucuccaaguccuacgccaacaacaaggagaaggagguccucguccucuggggcguccaccacccccccaacaucggcgaccagcgcgcccucuaccacaccgagaacgccuacgucuccgucgucuccucccacuacucccgcaaguucacccccgagaucgccaagcgccccaagguccgcgaccaggagggccgcaucaacuacuacuggacccuccucgagcccggcgacaccaucaucuucgaggccaacggcaaccucaucgccccccgcuacgccuucgcccucucccgcggcuucggcuccggcaucaucaacuccaacgcccccauggacgagugcgacgccaagugccagaccccccagggcgccaucaacuccucccuccccuuccagaacguccaccccgucaccaucggcgagugccccaaguacguccgcuccgccaagcuccgcauggucaccggccuccgcaacauccccuccauccagucccgcggccucuucggcgccaucgccggcuucaucgagggcggcuggaccggcauggucgacggcugguacggcuaccaccaccagaacgagcagggcuccggcuacgccgccgaccagaaguccacccagaacgccaucaacggcaucaccaacaaggucaacuccgucaucgagaagaugaacacccaguucaccgccgucggcaaggaguucaacaagcucgagcgccgcauggagaaccucaacaagaaggucgacgacggcuucaucgacaucuggaccuacaacgccgagcuccucguccuccucgagaacgagcgcacccucgacuuccacgacuccaacgucaagaaccucuacgagaaggucaagucccagcucaagaacaacgccaaggagaucggcaacggcugcuucgaguucuaccacaagugcaacgacgagugcauggaguccgucaagaacggcaccuacgacuaccccaaguacuccgaggaguccaagcucaaccgcgagaagaucgacggcgucaagcucgaguccaugggcgucuaccagauccucgccaucuacuccaccgucgccuccucccucguccuccucgucucccucggcgccaucuccuucuggaugugcuccaacggcucccuccagugccgcaucugcaucuga

SEQ ID NO: 104830 - RNA, 1701 nt, Artificial Sequence; identical to SEQ ID NO: 96666
  derived and/or modified CDS sequence (opt2) from hemagglutinin__InfluenzaA__AFJ75047

SEQ ID NO: 104831 - RNA, 1698 nt, Artificial Sequence
  derived and/or modified CDS sequence (opt2) from hemagglutinin__InfluenzaA__AFJ75058
augaaggucaagcuccucguccuccucugcaccuucaccgccaccuacgccgacaccaucugcaucggcuaccacgccaacaacuccaccgacaccgucgacaccguccucgagaagaacgucaccgucacccacuccgucaaccuccucgaggacucccacaacggcaagcucugccuccucaagggcaucgccccccuccagcucggcaacugcuccgucgccggcuggauccucggcaaccccgagugcgagcuccucaucucccgcgaguccugguccuacaucgucgagaagcccaaccccgagaacggcaccugcuaccccggccacuucgccgacuacgaggagcuccgcgagcagcucuccuccgucuccuccuucgagcgcuucgagaucuuccccaaggaguccuccuggcccaaccacaccgucaccggcgucuccgccuccugcucccacaacggcaaguccuccuucuacaagaaccuccucuggcucaccggcaagaacggccucuaccccaaccucuccaaguccuacgccaacaacaaggagaaggagguccucguccucuggggcguccaccacccccccaacaucggcgaccagcgcgcccucuaccacaccgagaacgccuacgucuccgucgucuccucccacuacucccgcaaguucacccccgagaucgccaagcgccccaagguccgcgaccaggagggccgcaucaacuacuacuggacccuccucgagcccggcgacaccaucaucuucgaggccaacggcaaccucaucgccccccgcuacgccuucgcccucucccgcggcuucggcuccggcaucaucaacuccaacgcccccauggacgagugcgacgccaagugccagaccccccagggcgccaucaacuccucccuccccuuccagaacguccaccccgucaccaucggcgagugccccaaguacguccgcuccgccaagcuccgcauggucaccggccuccgcaacauccccuccauccagucccgcggccucuucggcgccaucgccggcuucaucgagggcggcuggaccggcauggucgacggcugguacggcuaccaccaccagaacgagcagggcuccggcuacgccgccgaccagaaguccacccagaacgccaucaacggcaucaccaacaaggucaacuccgucaucgagaagaugaacacccaguucaccgccgucggcaaggaguucaacaagcucgagcgccgcauggagaaccucaacaagaaggucgacgacggcuucaucgacaucuggaccuacaacgccgagcuccucguccuccucgagaacgagcgcacccucgacuuccacgacuccaacgucaagaaccucuacgagaaggucaagucccagcucaagaacaacgccaaggagaucggcaacggcugcuucgaguucuaccacaagugcaacgacgagugcauggaguccgucaagaacggcaccuacgacuaccccaaguacuccgaggaguccaagcucaaccgcgagaagaucgacggcgucaagcucgaguccaugggcgucuaccagauccucgccaucuacuccaccgucgccuccucccucguccuccucgucucccucggcgccaucuccuucuggaugugcuccaacggcucccuccagugccgcaucugcaucuga

SEQ ID NO: 104832 - RNA, 1698 nt, Artificial Sequence
  derived and/or modified CDS sequence (opt2) from hemagglutinin__InfluenzaA__AFJ75069
augaaggucaagcuccucguccuccucugcaccuucaccgccaccuacgccgacaccaucugcaucggcuaccacgccaacaacuccaccgacaccgucgacaccguccucgagaagaacgucaccgucacccacuccgucaaccuccucgaggacucccacaacggcaagcucugccuccucaagggcaucgccccccuccagcucggcaacugcuccgucgccggcuggauccucggcaaccccgagugcgagcuccucaucucccgcgaguccugguccuacaucgucgagaaguccaaccccgagaacggcaccugcuaccccggccacuucgccgacuacgaggagcuccgcgagcagcucuccuccgucuccuccuucgagcgcuucgagaucuuccccaaggaguccuccuggcccaaccacaccaccaccggcgucuccgccuccugcucccacaacggcgaguccuccuucuacaagaaccuccucuggcucaccggcaagaacggccucuaccccaaccucuccaaguccuacgccaacaacaaggagaaggagguccucguccucuggggcguccaccacccccccaacaucggcgaccagcgcgcccucuaccacaccgagaacgccuacgucuccgucgucuccucccacuacucccgcaaguucacccccgagaucgccaagcgccccaagguccgcgaccaggagggccgcaucaacuacuacuggacccuccucgagcccggcgacaccaucaucuucgaggccaacggcaaccucaucgccccccgcuacgccuucgcccucucccgcggcuucggcuccggcaucaucaacuccaacgcccccauggacgagugcgacgccaagugccagaccccccagggcgccaucaacuccucccuccccuuccagaacguccaccccgucaccaucggcgagugccccaaguacguccgcuccgccaagcuccgcauggucaccggccuccgcaacauccccuccauccagucccgcggccucuucggcgccaucgccggcuucaucgagggcggcuggaccggcauggucgacggcugguacggcuaccaccaccagaacgagcagggcuccggcuacgccgccgaccagaaguccacccagaacgccaucaacggcaucaccaacaaggucaacuccgucaucgagaagaugaacacccaguucaccgccgucggcaaggaguucaacaagcucgagcgccgcauggagaaccucaacaagaaggucgacgacggcuucaucgacaucuggaccuacaacgccgagcuccucguccuccucgagaacgagcgcacccucgacuuccacgacuccaacgucaagaaccucuacgagaaggucaagucccagcucaagaacaacgccaaggagaucggcaacggcugcuucgaguucuaccacaagugcaacgacgagugcauggaguccgucaagaacggcaccuacgacuaccccaaguacuccgaggaguccaagcucaaccgcgagaagaucgacggcgucaagcucgaguccaugggcgucuaccagauccucgccaucuacuccaccgucgccuccucccucguccuccucgucucccucggcgccaucuccuucuggaugugcuccaacggcucccuccagugccgcaucugcaucuga

SEQ ID NO: 104833 - RNA, 1701 nt, Artificial Sequence
  derived and/or modified CDS sequence (opt2) from hemagglutinin__InfluenzaA__AFJ75091
augaagaccaucaucgcccucuccuacauccucugccucgucuucgcccagaagcuccccggcaacgacaacuccaccgccacccucugccucggccaccacgccguccccaacggcaccaucgucaagaccaucaccaacgaccagaucgaggucaccaacgccaccgagcucguccaguccuccuccaccggcggcaucugcgacuccccccaccagauccucgacggcgagaacugcacccucaucgacgcccuccucggcgacccccagugcgacggcuuccagaacaagaagugggaccucuucgucgagcgcuccaaggccuacuccaacugcuaccccuacgacguccccgacuacgccucccuccgcucccucgucgccuccuccggcacccucgaguucaacaacgaguccuucaacuggaccggcgucacccagaacggcaccuccuccgccugcaagcgccgcuccaacaacuccuucuucucccgccucaacuggcucacccaccucaaguucaaguaccccgcccucaacgucaccaugcccaacaacgagaaguucgacaagcucuacaucuggggcguccaccaccccggcaccgacaacgaccagaucuuccucuacgcccaggccuccggccgcaucaccgucuccaccaagaucucccagcagaccgucauccccaacaucggcucccgcccccgcguccgcaacauccccucccgcaucuccaucuacuggaccaucgucaagcccggcgacauccuccucaucaacuccaccggcaaccucaucgccccccgcggcuacuucaagauccgcuccggcaaguccuccaucaugcgcuccgacgcccccaucggcaagugcaacuccgagugcaucacccccaacggcuccauccccaacgacaagcccuuccagaacgucaaccgcaucaccuacggcgccugcccccgcuacgucaagcagaacacccucaagcucgccaccggcaugcgcaacguccccgagaagcagacccgcggcaucuucggcgccaucgccggcuucaucgagaacggcugggagggcauggucgacggcugguacggcuuccgccaccagaacuccgagggcaucggccaggccgccgaccucaaguccacccaggccgccaucgaccagaucaacggcaagcucaaccgccucaucggcaagaccaacgagaaguuccaccagaucgagaaggaguucuccgaggucgagggccgcauccaggaccucgagaaguacgucgaggacaccaagaucgaccucugguccuacaacgccgaccuccucgucgcccucgagaaccagcacaccaucgaccucaccgacuccgagaugaacaagcucuucgagaagaccaagaagcagcuccgcgagaacgccgaggacaugggcaacggcugcuucaagaucuaccacaagugcgacaacgccugcaucggcuccauccgcaacggcaccuacgaccacgacgucuaccgcgacgaggcccucaacaaccgcuuccagaucaagggcgucgagcucaaguccggcuacaaggacuggauccucuggaucuccuucgccaucuccugcuuccuccucugcgucgcccuccucggcuucaucaugugggccugccagaagggcaacauccgcugcaacaucugcaucuga

SEQ ID NO: 104834 - RNA, 1701 nt, Artificial Sequence
  derived and/or modified CDS sequence (opt2) from hemagglutinin__InfluenzaA__AFJ75449
augaagaccaucaucgcccucuccuacauccucugccucgucuucgcccagaagcuccccggcaacgacaacuccaccgccacccucugccucggccaccacgccguccccaacggcaccaucgucaagaccaucaccaacgaccagaucgaggucaccaacgccaccgagcucguccaguccuccuccaccggcgagaucugcgacuccccccaccagauccucgacggcgagaacugcacccucaucgacgcccuccucggcgacccccagugcgacggcuuccagaacaagaagugggaccucuucgucgagcgcuccaaggccuacuccaacugcuaccccuacgacguccccgacuacgccucccuccgcucccucgucgccuccuccggcacccucgaguucaacaacgaguccuucaacuggaccggcgucacccagaacggcaccuccuccgccugcauccgccgcuccaacaacuccuucuucucccgccucaacuggcucacccaccucaaguucaaguaccccgcccucaacgucaccaugcccaacaacgagaaguucgacaagcucuacaucuggggcguccaccaccccggcaccgacaacgaccagaucuuccucuacgcccaggccuccggcaagaucaccgucuccaccaagcgcucccagcagaccgucauccccaacaucggcucccgcccccgcguccgcaacauccccucccgcaucuccaucuacuggaccaucgucaagcccggcgacauccuccucaucaacuccaccggcaaccucaucgccccccgcggcuacuucaagauccgcuccggcaaguccuccaucaugcgcuccgacgcccccaucggcaagugcaacuccgagugcaucacccccaacggcuccauccccaacgacaagcccuuccagaacgucaaccgcaucaccuacggcgccugcccccgcuacgucaagcagaacacccucaagcucgccaccggcaugcgcaacguccccgagaagcagacccgcggcaucuucggcgccaucgccggcuucaucgagaacggcugggagggcauggucgacggcugguacggcuuccgccaccagaacuccgagggcaccggccaggccgccgaccucaaguccacccaggccgccaucgaccagaucaacggcaagcucaaccgccucaucggcaagaccaacgagaaguuccaccagaucgagaaggaguucuccgaggucgagggccgcauccaggaccucgagaaguacgucgaggacaccaagaucgaccucugguccuacaacgccgagcuccucgucgcccucgagaaccagcacaccaucgaccucaccgacuccgagaugaacaagcucuucgagaagaccaagaagcagcuccgcgagaacgccgaggacaugggcaacggcugcuucaagaucuaccacaagugcgacaacgccugcaucggcuccauccgcaacggcaccuacgaccacgacgucuaccgcgacgaggcccucaacaaccgcuuccagaucaagggcgucgagcucaaguccggcuacaaggacuggauccucuggaucuccuucgccaucuccugcuuccuccucugcgucgcccuccucggcuucaucaugugggccugccagaagggcaacauccgcugcaacaucugcaucuga

SEQ ID NO: 104835 - RNA, 1701 nt, Artificial Sequence
  derived and/or modified CDS sequence (opt2) from hemagglutinin__InfluenzaA__AFJ75460
augaagaccaucaucgcccucuccuacauccucugccucgucuucacccagaagcuccccggcaacgacaacuccaccgccacccucugccucggccaccacgccguccccaacggcaccaucgucaagaccaucaccaacgaccagaucgaggucaccaacgccaccgagcucguccaguccuccuccaccggcgagaucugcgacuccccccaccagauccucgacggcgagaacugcacccucaucgacgcccuccucggcgacccccagugcgacggcuuccagaacaagaagugggaccucuucgucgagcgcuccaaggccuacuccaacugcuaccccuacgacguccccgacuacgccucccuccgcucccucgucgccuccuccggcacccucgaguucaacaacgaguccuucaacuggaccggcgucacccagaacggcaccuccuccgccugcauccgccgcuccaacaacuccuucuucucccgccucaacuggcucacccaccucaaguucaaguaccccgcccucaacgucaccaugcccaacaacgagaacuucgacaagcucuacaucuggggcguccaccaccccggcaccgacaacgaccagaucuuccucuacgcccaggccuccggccgcaucaccgucuccaccaagcgcucccagcagaccgucauccccaacaucggcucccgcccccgcguccgcaacauccccucccgcaucuccaucuacuggaccaucgucaagcccggcgacauccuccucaucaacuccaccggcaaccucaucgccccccgcggcuacuucaagauccgcuccggcaaguccuccaucaugcgcuccgacgcccccaucggcaagugcaacuccgagugcaucacccccaacggcuccauccccaacgacaagcccuuccagaacgucaaccgcaucaccuacggcgccugcccccgcuacgucaagcagaacacccucaagcucgccaccggcaugcgcaacguccccgagaagcagacccgcggcaucuucggcgccaucgccggcuucaucgagaacggcugggagggcauggucgacggcugguacggcuuccgccaccagaacuccgagggcaucggccaggccgccgaccucaaguccacccaggccgccgucgaccagaucaacggcaagcucaaccgccucaucggcaagaccaacgagaaguuccaccagaucgagaaggaguucuccgaggucgagggccgcauccaggaccucgagaaguacgucgaggacaccaagaucgaccucugguccuacaacgccgagcuccucgucgcccucgagaaccagcacaccaucgaccucaccgacuccgagaugaacaagcucuucgagaagaccaagaagcagcuccgcgagaacgccgaggacaugggcaacggcugcuucaagaucuaccacaagugcgacaacgccugcaucggcuccauccgcaacggcaccuacgaccacgacgucuaccgcgacgaggcccucaacaaccgcuuccagaucaagggcgucgagcucaaguccggcuacaaggacuggauccucuggaucuccuucgccaucuccugcuuccuccucugcgucgcccuccucggcuucaucaugugggccugccagaagggcaacauccgcugcaacaucugcaucuga

SEQ ID NO: 104836 - RNA, 1698 nt, Artificial Sequence
  derived and/or modified CDS sequence (opt2) from hemagglutinin__InfluenzaA__AFJ75517
augaaggucaagcuccucguccuccucugcaccuucaccgccaccuacgccgacaccaucugcaucggcuaccacgccaacaacuccaccgacaccgucgacaccguccucgagaagaacgucaccgucaccuacuccgucaaccuccucgaggacaaccacaacggcaagcucugccuccucaagggcaucgccccccuccagcucggcaacugcuccgucgccggcuggauccucggcaaccccgagugcgagcuccucaucuccaaggaguccugguccuacaucgucgagcgccccaaccccgagaacggcaccugcuaccccggccacuucgccgacuacgaggagcuccgcgagcagcucuccuccgucuccuccuucgagcgcuucgagaucuuccccaaggaguccuccuggcccaaccacaccgucaccggcgucuccgccuccugcucccacaacggcgaguccuccuucuacaagaaccuccucuggcucaccggcaagaacggccucuaccccaaccucuccaaguccuacgccaacaacaaggagaaggagguccucguccucuggggcguccaccacccccccaacaucggcgaccagaugacccucuaccacaagaagaacgccuacgucuccgucgucuccucccacuacucccgcaaguucacccccgagaucgccaagcgccccaagguccgcgaccaggagggccgcaucaacuacuacuggacccuccucgagcccggcgacaccaucaucuucgaggccaacggcaaccucaucgccccccgcuacgccuucgcccucaaccgcggcuucggcuccggcaucaucaacuccaacgcccccauggacgagugcgacgccaagugccagaccccccagggcgccaucaacuccucccuccccuuccagaacguccaccccgucaccaucggcgagugccccaaguacguccgcuccgccaagcuccgcauggucaccggccuccgcaacauccccuccauccagucccgcggccucuucggcgccaucgccggcuucaucgagggcggcuggaccggcauggucgacggcugguacggcuaccaccaccagaacgagcagggcuccggcuacgccgccgaccagaaguccacccagaacgccaucaacggcaucaccaacaaggucaacuccgucaucgagaagaugaacacccaguucaccgccgucggcaaggaguucaacaagcucgagcgccgcauggagaaccucaacaagaaggucgacgacggcuucaucgacgucuggaccuacaacgccgagcuccucguccuccucgagaacgagcgcacccucgacuuccacgacuccaacgucaagaaccucuacgagaaggucaagacccagcucaagaacaacgccaaggagaucggcaacggcugcuucgaguucuaccacaagugcaacgacgagugcauggaguccgucaagaacggcaccuacgacuaccccaaguacuccgaggaguccaagcucucccgcgagaagaucgacggcgucaagcucgaguccaugggcgucuaccagauccucgccaucuacuccaccgucgccuccucccucguccuccucgucucccucggcgccaucuccuucuggaugugcuccaacggcucccuccagugccgcaucugcaucuga

SEQ ID NO: 104837 - RNA, 1698 nt, Artificial Sequence
  derived and/or modified CDS sequence (opt2) from hemagglutinin__InfluenzaA__AFJ75560
augaaggucaagcuccucguccuccucugcaccuucaccgccaccuacgccgacaccaucugcaucggcuaccacgccaacaacuccaccgacaccgucgacaccguccucgagaagaacgucaccgucacccacuccgucaaccuccucgaggacaaccacaacggcaagcucugccuccucaagggcaucgccccccuccagcucggcaacugcuccgucgccggcuggauccucggcaaccccgagugcgagcuccucaucuccaaggaguccugguccuacaucgucgagcgccccaaccccgagaacggcaccugcuaccccggccacuucgccgacuacgaggagcuccgcgagcagcucuccuccgucuccuccuucgagcgcuucgagaucuuccccaaggaguccuccuggcccaaccacaccgucaccggcgucuccgccuccugcucccacaacggcgaguccuccuucuacaagaaccuccucuggcucaccggcaagaacggccucuaccccaaccucuccaaguccuacgccaacaacaaggagaaggagguccucguccucuggggcguccaccacccccccaacaucggcgaccagaugacccucuaccacaaggagaacgccuacgucuccgucgucuccucccacuacucccgcaaguucacccccgagaucgccaagcgccccaagguccgcgaccaggagggccgcaucaacuacuacuggacccuccucgagcccggcgacaccaucaucuucgaggccaacggcaaccucaucgccccccgcuacgccuucgcccucucccgcggcuucggcuccggcaucaucaacuccaacgcccccauggacgagugcgacgccaagugccagaccccccagggcgccaucaacuccucccuccccuuccagaacguccaccccgucaccaucggcgagugccccaaguucguccgcuccgccaagcuccgcauggucaccggccuccgcaacauccccuccauccagucccgcggccucuucggcgccaucgccggcuucaucgagggcggcuggaccggcauggucgacggcugguacggcuaccaccaccagaacgagcagggcuccggcuacgccgccgaccagaaguccacccagaacgccaucaacggcaucaccaacaaggucaacuccgucaucgagaagaugaacacccaguucaccgccgucggcaaggaguucaacaagcucgagcgccgcauggagaaccucaacaagaaggucgacgacggcuucaucgacgucuggaccuacaacgccgagcuccucguccuccucgagaacgagcgcacccucgacuuccacgacuccaacgucaagaaccucuacgagaaggucaagaaccagcuccgcaacaacgccaaggagaucggcaacggcugcuucgaguucuaccacaagugcaacgacgagugcauggaguccgucaagaacggcaccuacgacuaccccaaguacuccgaggaguccaagcucucccgcgagaagaucgacggcgucaagcucgaguccaugggcgucuaccagauccucgccaucuacuccaccgucgccuccucccucguccuccucgucucccucggcgccaucuccuucuggaugugcuccaacggcucccuccagugccgcaucugcaucuga

SEQ ID NO: 104838 - RNA, 1698 nt, Artificial Sequence
  derived and/or modified CDS sequence (opt2) from hemagglutinin__InfluenzaA__AFJ75571
augaaggucaagcuccucguccuccucugcaccuucaccgccaccuacgccgacaccaucugcaucggcuaccacgccaacaacuccaccgacaccgucgacaccguccucgagaagaacgucaccgucacccacuccgucaaccuccucgaggacaaccacaacggcaagcucugccuccucaagggcaucgccccccuccagcucggcaacugcuccgucgccggcuggauccucggcaaccccgagugcgagcuccucaucuccaaggaguccugguccuacaucgucgagcgccccaaccccgagaacggcaccugcuaccccggccacuucgccgacuacgaggagcuccgcgagcagcucuccuccgucuccuccuucgagcgcuucgagaucuuccccaaggaguccuccuggcccaaccacaccgucaccggcgucuccgccuccugcucccacaacggcgagaacuccuucuacaagaaccuccucuggcucaccggcaagaacggccucuaccccaaccucuccaaguccuacgccaacaacaaggagaaggagguccucguccucuggggcguccaccacccccccaacaucggcgaccagaugacccucuaccacaaggagaacgccuacgucuccgucgucuccucccacuacucccgcaaguucacccccgagaucgccaagcgccccaagguccgcgaccaggagggccgcaucaacuacuacuggacccuccucgagcccggcgacaccaucaucuucgaggccaacggcaaccucaucgccccccgcuacgccuucgcccucucccgcggcuucggcuccggcaucaucaacuccaacgcccccauggacgagugcgacgccaagugccagaccccccagggcgccaucaacuccucccuccccuuccagaacguccaccccgucaccaucggcgagugccccaaguacguccgcuccgccaagcuccgcauggucaccggccuccgcaacauccccuccauccagucccgcggccucuucggcgccaucgccggcuucaucgagggcggcuggaccggcauggucgacggcugguacggcuaccaccaccagaacgagcagggcuccggcuacgccgccgaccagaaguccacccagaacgccaucaacggcaucaccaacaaggucaacuccgucaucgagaagaugaacacccaguucaccgccgucggcaaggaguucaacaagcucgagcgccgcauggagaaccucaacaagaaggucgacgacggcuucaucgacgucuggaccuacaacgccgagcuccucguccuccucgagaacgagcgcacccucgacuuccacgacuccaacgucaagaaccucuacgagaaggucaagaaccagcucaagaacaacgccaaggagaucggcaacggcugcuucgaguucuaccacaagugcaacgacgagugcauggaguccgucaagaacggcaccuacgacuaccccaaguacuccgaggaguccaagcucucccgcgagcgcaucgacggcgucaagcucgaguccaugggcgucuaccagauccucgccaucuacuccaccgucgccuccucccucguccuccucgucucccucggcgccaucuccuucuggaugugcuccaacggcucccuccagugccgcaucugcaucuga

SEQ ID NO: 104839 - RNA, 1701 nt, Artificial Sequence
  derived and/or modified CDS sequence (opt2) from hemagglutinin__InfluenzaA__AFJ75593
augaagaccaucaucgcccucuccuacauccucugccucgucuucgcccagaagcuccccggcaacgacuccuccaccgccacccucugccucggccaccacgccguccccaacggcaccaucgucaagaccaucaccaacgaccagaucgaggucaccaacgccaccgagcucguccaguccuccuccaccggcgagaucugcaacuccccccaccagauccucgacggcgagaacugcacccucaucgacgcccuccucggcgacccccagugcgacggcuuccagaacaagaagugggaccucuucgucgagcgcuccaaggccuacuccaacugcuaccccuacgacguccccgacuacgccucccuccgcucccucgucgccuccuccggcacccucgaguucaacaacgaguccuucaacuggaccggcgucacccagaacggcaccuccuccgccugcauccgccgcuccaacaacuccuucuucucccgccucaacuggcucacccaccucaaguucaaguaccccgcccucaacgucaccaugcccaacaacgagaaguucgacaagcucuacaucuggggcguccaccaccccggcaccgacaacgaccagaucuuccucuacgcccaggccuccggccgcaucaccgucuccaccaagcgcucccagcagaccgucauccccaacaucggcucccgcccccgcguccgcaacauccccucccgcaucuccaucuacuggaccaucgucaagcccggcgacauccuccucaucaacuccaccggcaaccucaucgccccccgcggcuacuucaagauccgcuccggcaaguccuccaucaugcgcuccgacgcccccaucggcaagugcaacuccgagugcaucacccccaacggcuccauccccaacgacaagcccuuccagaacgucaaccgcaucaccuacggcgccugcccccgcuacgucaagcagaacacccucaagcucgccaccggcaugcgcaacguccccgagaagcagacccgcggcaucuucggcgccaucgccggcuucaucgagaacggcugggagggcauggucgacggcugguacggcuuccgccaccagaacuccgagggcaucggccaggccgccgaccucaaguccacccaggccgccaucgaccagaucaacggcaagcucaaccgccucaucggcaagaccaacgagaaguuccaccagaucgagaaggaguucuccgaggucgagggccgcauccaggaccucgagaaguacgucgaggacaccaaggucgaccucugguccuacaacgccgagcuccucgucgcccucgagaaccagcacaccaucgaccucaccgacuccgagaugaacaagcucuucgagaagaccaagaagcagcuccgcgagaacgccgaggacaugggcaacggcugcuucaagaucuaccacaagugcgacaacgccugcaucggcuccauccgcaacggcaccuacgaccacgacgucuaccgcgacgaggcccucaacaaccgcuuccagaucaagggcgucgagcucaaguccggcuacaaggacuggauccucuggaucuccuucgccaucuccugcuuccuccucugcgucgcccuccucggcuucaucaugugggccugccagaagggcaacauccgcugcaacaucugcaucuga

SEQ ID NO: 104840 - RNA, 1698 nt, Artificial Sequence
  derived and/or modified CDS sequence (opt2) from hemagglutinin__InfluenzaA__AFJ75615
augaaggucaagcuccucguccuccucugcaccuucaccgccaccuacgccgacaccaucugcgucggcuaccacgccaacaacuccaccgacaccgucgacaccguccucgagaagaacgucaccgucacccacuccgucaaccuccucgagaacucccacaacggcaagcucugccuccucaagggcaucgccccccuccagcucggcaacugcuccgucgccggcuggauccucggcaaccccgagugcgagcuccucaucuccaaggaguccugguccuacaucgucgagaagcccaaccccgagaacggcaccugcuaccccggccacuucgccgacuacgaggagcuccgcgagcagcucuccuccgucuccuccuucgagcgcuucgagaucuuccccaaggaguccuccuggcccaaccacaccgucaccggcgucuccgccuccugcucccacaacggcgaguccuccuucuaccgcaaccuccucuggcucaccggcaagaacggccucuaccccaaccucuccaaguccuacgccaacaacaaggagaaggagguccucguccucuggggcguccaccacccccccaacaucggcgaccagaaggcccucuaccacaccgagaacgccuacgucuccgucgucuccucccacuacucccgcaaguucacccccgagaucgccaagcgccccaagguccgcgaccaggagggccgcaucaacuacuacuggacccuccucgagcccggcgacaccaucaucuucgaggccaacggcaaccucaucgccccccgcuacgccuucgcccucucccgcggcuucggcuccggcaucaucaacuccaacgcccccauggacaagugcgacgccaagugccagaccccccagggcgccaucaacuccucccuccccuuccagaacguccaccccgucaccaucggcgagugccccaaguacguccgcuccgccaagcuccgcauggucaccggccuccgcaacauccccuccauccagucccgcggccucuucggcgccaucgccggcuucaucgagggcggcuggaccggcauggucgacggcugguacggcuaccaccaccagaacgagcagggcuccggcuacgccgccgaccagaaguccacccagaacgccaucaacggcaucaccaacaaggucaacuccgucaucgagaagaugaacacccaguucaccgaggucggcaaggaguucaacaagcucgagcgccgcauggagaaccucaacaagaaggucgacgacggcuucaucgacaucuggaccuacaacgccgagcuccucguccuccucgagaacgagcgcacccucgacuuccacgacuccaacgucaagaaccucuacgagaaggucaagucccagcucaagaacaacgccaaggagaucggcaacggcugcuucgaguucuaccacaagugcaacgacgagugcauggaguccgucaagaacggcaccuacgacuaccccaaguacuccgaggaguccaagcucaaccgcgagaagaucgacggcgucaagcucgaguccaugggcgucuaccagauccucgccaucuacuccaccgucgccuccucccucguccuccucgucucccucggcgccaucuccuucuggaugugcuccaacggcucccuccagugccgcaucugcaucuga

SEQ ID NO: 104841 - RNA, 1701 nt, Artificial Sequence; identical to SEQ ID NO: 101388
  derived and/or modified CDS sequence (opt2) from hemagglutinin__InfluenzaA__AFJ75630

SEQ ID NO: 104842 - RNA, 1701 nt, Artificial Sequence; identical to SEQ ID NO: 101388
  derived and/or modified CDS sequence (opt2) from hemagglutinin__InfluenzaA__AFJ75641

SEQ ID NO: 104843 - RNA, 1698 nt, Artificial Sequence
  derived and/or modified CDS sequence (opt2) from hemagglutinin__InfluenzaA__AFJ75651
augaaggucaagcuccucguccuccucugcaccuucaccgccaccuacgccgacaccaucugcaucggcuaccacgccaacaacuccaccgacaccgucgacaccguccucgagaagaacgucaccgucacccacuccgucaaccuccucgagaacucccacaacggcaagcucugccuccucaagggcaucgccccccuccagcucggcaacugcuccgucgccggcuggauccucggcaaccccgagugcgagcuccucaucuccaaggaguccugguccuacaucgucgagaagcccaaccccgagaacggcaccugcuaccccggccacuucgccgacuacgaggagcuccgcgagcagcucuccuccgucuccuccuucgagcgcuucgagaucuuccccaaggaguccuccuggcccaaccacaccgucaccggcgucuccgccuccugcucccacaacggcgaguccuccuucuaccgcaaccuccucuggcucaccggcaagaacggccucuaccccaaccucuccaaguccuacgccaacaacaaggagaaggagguccucguccucuggggcguccaccacccccccaacaucggcgaccagaaggcccucuaccgcaccgagaacgccuacgucuccgucgucuccucccacuacucccgcaaguucacccccgagaucgccaagcgccccaagguccgcgaccaggagggccgcaucaacuacuacuggacccuccucgagcccggcgacaccaucaucuucgaggccaacggcaaccucaucgccccccgcuacgccuucgcccucucccgcggcuucggcuccggcaucaucaacuccgacgcccccauggacaagugcgacgccaagugccagaccccccagggcgccaucaacuccucccuccccuuccagaacguccaccccgucaccaucggcgagugccccaaguacguccgcuccgccaagcuccgcauggucaccggccuccgcaacauccccuccauccagucccgcggccucuucggcgccaucgccggcuucaucgagggcggcuggaccggcauggucgacggcugguacggcuaccaccaccagaacgagcagggcuccggcuacgccgccgaccagaaguccacccagaacgccaucaacggcaucaccaacaaggucaacuccgucaucgagaagaugaacacccaguucaccgccgucggcaaggaguucaacaagcucgagcgccgcauggagaaccucaacaagaaggucgacgacggcuucaucgacaucuggaccuacaacgccgagcuccucguccuccucgagaacgagcgcacccucgacuuccacgacuccaacgucaagaaccucuacgagaaggucaagucccagcucaagaacaacgccaaggagaucggcaacggcugcuucgaguucuaccacaagugcaacgacgagugcauggaguccgucaagaacggcaccuacgacuaccccaaguacuccgaggaguccaagcucaaccgcgagaagaucgacggcgucaagcucgaguccaugggcgucuaccagauccucgccaucuacuccaccgucgccuccucccucguccuccucgucucccucggcgccaucuccuucuggaugugcuccaacggcucccuccagugccgcaucugcaucuga

SEQ ID NO: 104844 - RNA, 1701 nt, Artificial Sequence
  derived and/or modified CDS sequence (opt2) from hemagglutinin__InfluenzaA__AFJ75662
augaagaccaucaucgcccucuccuacauccucugccucgucuucgcccagaagcuccccggcaacgacaacuccaccgccacccucugccucggccaccacgccguccccaacggcaccaucgucaagaccaucaccaacgaccagaucgaggucaccaacgccaccgagcucguccaguccuccuccaccggcgagaucugcgacuccccccaccagauccucgacggcgagaacugcacccucaucgacgcccuccucggcgacccccagugcgacggcuuccagaacaagaagugggaccucuucgucgagcgcuccaaggccuacuccaacugcuaccccuacgacguccccgacuacgccucccuccgcucccucgucgccuccuccggcacccucgaguucaacaacgaguccuucaacuggaccggcgucacccagaacggcaccuccuccgccugcauccgccgcuccaacaacuccuucuucucccgccucaacuggcucacccaccucaaguucaaguaccccgcccucaacgucaccaugcccaacaacgaggaguucgacaagcucuacaucuggggcguccaccaccccggcaccgacaacgaccagaucuuccucuacgcccaggccuccggccgcaucaccgucuccaccaagcgcucccagcagaccgucauccccaacaucggcucccgcccccgcguccgcaacauccccucccgcaucuccaucuacuggaccaucgucaagcccggcgacauccuccucaucaacuccaccggcaaccucaucgccccccgcggcuacuucaagauccgcuccggcaaguccuccaucaugcgcuccgacgcccccaucggcaagugcaacuccgagugcaucacccccaacggcuccauccccaacgacaagcccuuccagaacgucaaccgcaucaccuacggcgccugcccccgcuacgucaagcagaacacccucaagcucgccaccggcaugcgcaacguccccgagaagcagacccgcggcaucuucggcgccaucgccggcuucaucgagaacggcugggagggcauggucgacggcugguacggcuuccgccaccagaacuccgagggcaccggccaggccgccgaccucaaguccacccaggccgccaucgaccagaucaacggcaagcucaaccgccucaucggcaagaccaacgagaaguuccaccagaucgagaaggaguucuccgaggucgagggccgcauccaggaccucgagaaguacgucgaggacaccaagaucgaccucugguccuacaacgccgagcuccucgucgcccucgagaaccagcacaccaucgaccucaccgacuccgagaugaacaagcucuucgagaagaccaagaagcagcuccgcgagaacgccgaggacaugggcaacggcugcuucaagaucuaccacaagugcgacaacgccugcaucggcuccauccgcaacggcaccuacgaccacgacgucuaccgcgacgaggcccucaacaaccgcuuccagaucaagggcgucgagcucaaguccggcuacaaggacuggauccucuggaucuccuucgccaucuccugcuuccuccucugcgucgcccuccucggcuucaucaugugggccugccagaagggcaacauccgcugcaacaucugcaucuga

SEQ ID NO: 104845 - RNA, 1698 nt, Artificial Sequence
  derived and/or modified CDS sequence (opt2) from hemagglutinin__InfluenzaA__AFJ75673
augaaggucaagcuccucguccuccucugcaccuucaccgccaccuacgccgacaccaucugcaucggcuaccacgccaacaacuccaccgacaccgucgacaccguccucgagaagaacgucaccgucaccuacuccgucaaccuccucgaggacaaccacaacggcaagcucugccuccucaagggcaucgccccccuccagcucggcaacugcuccgucgccggcuggauccucggcaaccccgagugcgagcuccucaucuccaaggaguccugguccuacaucgucgagcgccccaaccccgagaacggcaccugcuaccccggccacuucgccgacuacgaggagcuccgcgagcagcucuccuccgucuccuccuucgagcgcuucgagaucuuccccaaggaguccuccuggcccaaccacaccgucaccggcgucuccgccuccugcucccacaacggcgaguccuccuucuacaagaaccuccucuggcucaccggcaagaacggccucuaccccaaccucuccaaguccuacgccaacaacaaggagaaggagguccucguccucuggggcguccaccacccccccaacaucggcaaccagaugacccucuaccacaaggagaacgccuacgucuccgucgucuccucccacuacucccgcaaguucacccccgagaucgccaagcgccccaagguccgcgaccaggagggccgcaucaacuacuacuggacccuccucgagcccggcgacaccaucaucuucgaggccaacggcaaccucaucgccccccgcuacgccuucgcccucaaccgcggcuucggcuccggcaucaucaacuccaacgcccccauggacgagugcgacgccaagugccagaccccccagggcgccaucaacuccucccuccccuuccagaacguccaccccgucaccaucggcgagugccccaaguacguccgcuccgccaagcuccgcauggucaccggccuccgcaacauccccuccauccagucccgcggccucuucggcgccaucgccggcuucaucgagggcggcuggaccggcauggucgacggcugguacggcuaccaccaccagaacgagcagggcuccggcuacgccgccgaccagaaguccacccagaacgccaucaacggcaucaccaacaaggucaacuccgucaucgagaagaugaacacccaguucaccgccgucggcaaggaguucaacaagcucgagcgccgcauggagaaccucaacaagaaggucgacgacggcuucaucgacgucuggaccuacaacgccgagcuccucguccuccucgagaacgagcgcacccucgacuuccacgacuccaacgucaagaaccucuacgagaaggucaagacccagcucaagaacaacgccaaggagaucggcaacggcugcuucgaguucuaccacaagugcaacgacgagugcauggaguccgucaagaacggcaccuacgacuaccccaaguacuccgaggaguccaagcucucccgcgagaagaucgacggcgucaagcucgaguccaugggcgucuaccagauccucgccaucuacuccaccgucgccuccucccucguccuccucgucucccucggcgccaucuccuucuggaugugcuccaacggcucccuccagugccgcaucugcaucuga

SEQ ID NO: 104846 - RNA, 1701 nt, Artificial Sequence; identical to SEQ ID NO: 98705
  derived and/or modified CDS sequence (opt2) from hemagglutinin__InfluenzaA__AFJ76119

SEQ ID NO: 104847 - RNA, 1701 nt, Artificial Sequence; identical to SEQ ID NO: 99058
  derived and/or modified CDS sequence (opt2) from hemagglutinin__InfluenzaA__AFJ76131

SEQ ID NO: 104848 - RNA, 1701 nt, Artificial Sequence
  derived and/or modified CDS sequence (opt2) from hemagglutinin__InfluenzaA__AFJ76155
augaaggccauccucgucguccuccucuacaccuucgccaccgccaacgccgacacccucugcaucggcuaccacgccaacaacuccaccgacaccgucgacaccguccucgagaagaacgucaccgucacccacuccgucaaccuccucgaggacaagcacaacggcaagcucugcaagcuccgcggcaucgccccccuccaccucggcaagugcaacaucgccggcuggauccucggcaaccccgagugcgagucccucuccaccgccuccuccugguccuacaucgucgagaccuccuccuccgacaacggcaccugcuaccccggcgacuucaucgacuacgaggagcuccgcgagcagcucuccuccgucuccuccuucgagcgcuucgagaucuuccccaagaccuccuccuggcccaaccacgacuccaacaagggcgucaccgccgccugcccccacgccggcgccaaguccuucuacaagaaccucaucuggcucgucaagaagggcaacuccuaccccaagcucuccaaguccuacaucaacgacaagggcaaggagguccucguccucuggggcauccaccaccccuccaccuccgccgaccagcagucccucuaccagaacgccgacgccuacgucuucgucggcaccucccgcuacuccaagaaguucaagcccgagaucgccauccgccccaagguccgcgagcaggagggccgcaugaacuacuacuggacccucgucgagcccggcgacaagaucaccuucgaggccaccggcaaccucgucgucccccgcuacgccuucgccauggagcgcaaggccggcuccggcaucaucaucuccgacacccccguccacgacugcaacaccaccugccagacccccaagggcgccaucaacaccucccuccccuuccagaacauccacuccaucaccaucggcaagugccccaaguacgucaaguccaccaagcuccgccucgccaccggccuccgcaacguccccuccauccagucccgcggccucuucggcgccaucgccggcuucaucgagggcggcuggaccggcauggucgacggcugguacggcuaccaccaccagaacgagcagggcuccggcuacgccgccgaccucaaguccacccagaacgccaucgacgagaucaccaacaaggucaacuccgucaucgagaagaugaacacccaguucaccgccgucggcaaggaguucaaccaccucgagaagcgcaucgagaaccucaacaagaaggucgacgacggcuuccucgacaucuggaccuacaacgccgagcuccucguccuccucgagaacgagcgcacccucgacuaccacgacuccaacgucaagaaccucuacgagaagguccgcucccagcucaagaacaacgccaaggagaucggcaacggcugcuucgaguucuaccacaagugcgacaacaccugcauggaguccgucaagaacggcaccuacgacuaccccaaguacuccgaggaggccaagcucaaccgcgaggagaucgacggcgucaagcucgaguccacccgcaucuaccagauccucgccaucuacuccaccgucgccuccucccucguccucgucgucucccucggcgccaucuccuucuggaugugcuccaacggcucccuccagugccgcaucugcaucuga

SEQ ID NO: 104849 - RNA, 1698 nt, Artificial Sequence
  derived and/or modified CDS sequence (opt2) from hemagglutinin__InfluenzaA__AFJ76186
augaaggucaagcuccucguccuccucugcaccuucaccgccaccuacgccgacaccaucugcaucggcuaccacgccaacaacuccaccgacaccgucgacaccguccucgagaagaacgucaccgucacccacuccgucaaccuccucgagaacucccacaacggcaagcucugccuccucaagggcaucgccccccuccagcucggcaacugcuccgucgccggcuggauccucggcaaccccgagugcgagcuccucaucuccaaggaguccugguccuacaucgucgagaagcccaaccccgagaacggcaccugcuaccccggccacuucgccgacuacgaggagcuccgcgagcagcucuccuccgucuccuccuucgagcgcuucgagaucuuccccaaggaguccuccuggcccaaccacaccgucaccggcgucuccgccuccugcucccacaacggcgaguccuccuucuaccgcaaccuccucuggcucaccggcaagaacggccucuaccccaaccucuccaaguccuacgccaacaacaaggagaaggagguccucguccucuggggcguccaccacccccccaacaucggcgaccagaaggcccucuaccacaccgagaacgccuacgucuccgucgucuccucccacuacucccgcaaguucacccccgagaucaccaagcgccccaagguccgcgaccaggagggccgcaucaacuacuacuggacccuccucgagcccggcgacaccaucaucuucgaggccaacggcaaccucaucgccccccgcuacgccuucgcccucucccgcggcuucggcuccggcaucaucaacuccgacgcccccauggacaagugcgacgccaagugccagaccccccagggcgccaucaacuccucccuccccuuccagaacguccaccccgucaccaucggcgagugccccaaguacguccgcuccgccaagcuccgcauggucaccggccuccgcaacauccccuccauccagucccgcggccucuucggcgccaucgccggcuucaucgagggcggcuggaccggcauggucgacggcugguacggcuaccaccaccagaacgagcagggcuccggcuacgccgccgaccagaaguccacccagaacgccaucaacggcaucaccaacaaggucaacuccgucaucgagaagaugaacacccaguucaccgccgucggcaaggaguucaacaagcucgagcgccgcauggagaaccucaacaagaaggucgacgacggcuucaucgacaucuggaccuacaacgccgagcuccucguccuccucgagaacgagcgcacccucgacuuccacgacuccaacgucaagaaccucuacgagaaggucaagucccagcucaagaacaacgccaaggagaucggcaacggcugcuucgaguucuaccacaagugcaacgacgagugcauggaguccgucaagaacggcaccuacgacuaccccaaguacuccgaggaguccaagcucaaccgcgagaagaucgacggcgucaagcucgaguccaugggcgucuaccagauccucgccaucuacuccaccgucgccuccucccucguccuccucgucucccucggcgccaucuccuucuggaugugcuccaacggcucccuccagugccgcaucugcaucuga

SEQ ID NO: 104850 - RNA, 1701 nt, Artificial Sequence; identical to SEQ ID NO: 98705
  derived and/or modified CDS sequence (opt2) from hemagglutinin__InfluenzaA__AFJ76203

SEQ ID NO: 104851 - RNA, 1701 nt, Artificial Sequence
  derived and/or modified CDS sequence (opt2) from hemagglutinin__InfluenzaA__AFJ76213
augaagaccaucaucgcccucuccuacauccucugccucgucuucgcccagaagcuccccggcaacgacaacuccaccgccacccucugccucggccaccacgccguccccaacggcaccaucgucaagaccaucaccaacgaccagaucgaggucaccaacgccaccgagcucguccaguccuccuccaccggcggcaucugcgacuccccccaccagauccucgacggcgagaacugcacccucaucgacgcccuccucggcgacccccagugcgacggcuuccagaacaagaagugggaccucuucgucgagcgcuccaaggccuacuccaacugcuaccccuacgacguccccgacuacgccucccuccgcucccucgucgccuccuccggcacccucgaguucaacaacgaguccuucgacuggaccggcgucacccagaacggcaccuccuccgccugcaagcgccgcuccaacaaguccuucuucucccgccucaacuggcucacccacuccaaguacaaguaccccgcccucaacgucaccaugcccaacaacgagaaguucgacaagcucuacaucuggggcguccaccaccccggcaccgacuccgaccagaucucccucuacgcccaggccuccggccgcaucaccgucuccaccaagcgcucccagcagaccgucauccccaacaucggcucccgcccccgcguccgcgacgucuccucccgcaucuccaucuacuggaccaucgucaagcccggcgacauccuccucaucaacuccaccggcaaccucaucgccccccgcggcuacuucaagauccgcuccggcaaguccuccaucaugcgcuccgacgcccccaucggcaagugcaacuccgagugcaucacccccaacggcuccauccccaacgacaagcccuuccagaacgucaaccgcaucaccuacggcgccugcccccgcuacgucaagcagaacacccucaagcucgccaccggcaugcgcaacguccccgagaagcagacccgcggcaucuucggcgccaucgccggcuucaucgagaacggcugggagggcauggucgacggcugguacggcuuccgccaccagaacuccgagggcaccggccaggccgccgaccucaaguccacccaggccgccaucaaccagaucaacggcaagcucaaccgccucaucggcaagaccaacgagaaguuccaccagaucgagaaggaguucuccgaggucgagggccgcauccaggaccucgagaaguacgucgaggacaccaagaucgaccucugguccuacaacgccgagcuccucgucgcccucgagaaccagcacaccaucgaccucaccgacuccgagaugaacaagcucuucgagcgcaccaagaagcagcuccgcgagaacgccgaggacaugggcaacggcugcuucaagaucuaccacaagugcgacaacgccugcaucggcuccauccgcaacggcaccuacgaccacgacgucuaccgcgacgaggcccucaacaaccgcuuccagaucaagggcgucgagcucaaguccggcuacaaggacuggauccucuggaucuccuucgccaucuccugcuuccuccucugcgucgcccuccucggcuucaucaugugggccugccagaagggcaacauccgcugcaacaucugcaucuga

SEQ ID NO: 104852 - RNA, 1701 nt, Artificial Sequence
  derived and/or modified CDS sequence (opt2) from hemagglutinin__InfluenzaA__AFJ77408
augaagaccaucaucgcccucuccuacauccucugccucaucuucgcccagaagcuccccggcaacgacaacuccaccgccacccucugccucggccaccacgccguccccaacggcacccucgucaagaccaucaccaacgaccagaucgaggucaccaacgccaccgagcucguccaguccuccuccaccggccgcaucugcaacuccccccaccgcauccucgacggcgagaacugcacccucaucgacgcccuccucggcgacccccacugcgacggcuuccagaacaaggagugggaccucuucgucgagcgcuccaaggccuacuccaacugcuaccccuacgacguccccgacuacgccucccuccgcucccucgucgccuccuccggcacccucgaguucaccaaggagggcuucaacuggaccggcgucgcccaggacggcaaguccuacuccugcaagcgcggcuccgucaacuccuucuucucccgccucaacuggcuccacaagcucgaguacaaguaccccgcccucaacgucaccaugcccaacaacgacaaguucgacaagcucuacaucuggggcguccaccaccccuccaccgacuccgaccagaccucccucuacguccaggccuccggccgcgucaccgucuccaccaagcgcucccagcagaccgucauccccaacaucggcucccgccccuggguccgcggcaucuccucccgcaucuccaucuacuggaccaucgucaagcccggcgacauccuccucaucaacuccaccggcaaccucaucgccccccgcggcuacuucaagauccgcaacggcaaguccuccaucaugcgcuccgacgcccccaucggcaacugcaacuccgagugcaucacccccaacggcuccauccccaacgacaagcccuuccagaacgucaaccgcaucaccuacggcgccugcccccgcuacgucaagcagaacacccucaagcucgccaccggcaugcgcaacguccccgagaagcagacccgcggcaucuucggcgccaucgccggcuucaucgagaacggcugggagggcauggucgacggcugguacggcuuccgccaccagaacuccgagggcaccggccaggccgccgaccucaaguccacccaggccgccaucaaccagaucaacggcaagcucaaccgccucaucgagaagaccaacgagaaguuccaccagaucgagaaggaguucuccgaggucgagggccgcauccaggaccucgagaaguacgucgaggacaccaagaucgaccucugguccuacaacgccgagcuccucgucgcccucgagaaccagcacaccaucgaccucaccgacuccgagaugaacaagcucuucgagcgcacccgcaagcagcuccgcgagaacgccgaggacaugggcaacggcugcuucaagaucuaccacaagugcgacaacgccugcaucggcuccauccgcaacggcaccuacgaccacgacgucuaccgcgacgaggcccucaacaaccgcuuccagaucaagggcgucgagcucaaguccggcuacaaggacuggauccucuggaucuccuucgccaucuccugcuuccuccucugcgucguccuccucggcuucaucaugugggccugccagaagggcaacauccgcugcaacaucugcaucuga

SEQ ID NO: 104853 - RNA, 1701 nt, Artificial Sequence
  derived and/or modified CDS sequence (opt2) from hemagglutinin__InfluenzaA__AFJ77430
augaagaccaucaucgcccucuccuacauccucugccucaucuucgcccagaagcuccccggcaacgacaacuccaccgccacccucugccucggccaccacgccguccccaacggcacccucgucaagaccaucaccaacgaccagaucgaggucaccaacgccaccgagcucguccaguccuccuccaccggccgcaucugcgacuccccccaccgcauccucgacggcgagaacugcacccucaucgacgcccuccucggcgaccccaacugcgacggcuuccagaacaaggagugggaccucuucgucgagcgcuccaaggccuacuccaacugcuaccccuacgacguccccgacuacgccucccuccgcucccucgucgccuccuccggcacccucgaguucaccaaggagggcuucaacuggaccggcgucgcccaggacggcaaguccuacuccugcaagcgcggcuccgucaacuccuucuucucccgccucaacuggcuccacaagcucgaguacaaguaccccgcccucaacgucaccaugcccaacaacgacaaguucgacaagcucuacaucuggggcguccaccaccccuccaccgacuccgaccagaucucccucuacgcccaggccuccggccgcgucaccgucuccaccaagcgcucccagcagaccgucauccccaacaucggcucccgccccuggguccgcggcaucuccucccgcaucuccaucuacuggaccaucgucaagcccggcgacauccuccucaucaacuccaccggcaaccucaucgccccccgcggcuacuucaagauccgcaacggcaaguccuccaucaugcgcuccgacgcccccaucggcaacugcaacuccgagugcaucacccccaacggcuccauccccaacgacaagcccuuccagaacgucaaccgcaucaccuacggcgccugcccccgcuacgucaagcagaacacccucaagcucgccaccggcaugcgcaacguccccgagaagcagacccgcggcaucuucggcgccaucgccggcuucaucgagaacggcugggagggcauggucgacggcugguacggcuuccgccaccagaacuccgagggcaccggccaggccgccgaccucaaguccacccaggccgccaucaaccagaucaacggcaagcucaaccgccucaucgagaagaccaacgagaaguuccaccagaucgagaaggaguucuccgaggucgagggccgcauccaggaccucgagaaguacgucgaggacaccaagaucgaccucugguccuacaacgccgagcuccucgucgcccucgagaaccagcacaccaucgaccucaccgacuccgagaugaacaagcucuucgagcgcacccgccgccagcuccgcgagaacgccgaggacaugggcaacggcugcuucaagaucuaccacaagugcgacaacgccugcaucggcuccauccgcaacggcaccuacgaccacgacgucuaccgcgacgaggcccucaacaaccgcuuccagaucaagggcgucgagcucaaguccggcuacaaggacuggauccucuggaucuccuucgccaucuccugcuuccuccucugcgucguccuccucggcuucaucaugugggccugccagaagggcaacauccgcugcaacaucugcaucuga

SEQ ID NO: 104854 - RNA, 1701 nt, Artificial Sequence
  derived and/or modified CDS sequence (opt2) from hemagglutinin__InfluenzaA__AFJ77440
augaagaccaucaucgcccucuccuacauccucugccucgucuucgcccagaagcuccccggcaacgacaacuccaccgccacccucugccucggccaccacgccguccccaacggcacccucgucaagaccaucaccaacgaccagaucgaggucaccaacgccaccgagcucguccaguccuccuccaccggccgcaucugcgacuccccccaccgcauccucgacggcaagaacugcacccucaucgacgcccuccucggcgacccccacugcgacggcuuccagaacaaggagugggaccucuucgucgagcgcuccaaggccuacuccaacugcuaccccuacgacguccccgacuacgccucccuccgcucccucgucgccuccuccggcacccucgaguucaccuccgagggcuucaacuggaccggcgucgcccaggacggcaccuccuacgccugcaagcgcggcuccgucaaguccuucuucucccgccucaacuggcuccacaagcucgaguacaaguaccccgcccucaacgucaccaugcccaacaacgacaaguucgacaagcucuacaucuggggcguccaccaccccuccaccgacuccgaccagaccucccucuacguccaggccuccggccgcgucaccgucuccaccaagcgcucccagcagaccgucauccccaacaucggcucccgccccuggguccgcggcgucuccucccgcaucuccaucuacuggaccaucgucaagcccggcgacauccuccucaucaacuccaccggcaaccucaucgccccccgcggcuacuucaagauccgcuccggcaaguccuccaucaugcgcuccgacgcccccaucggcaacugcaacuccgagugcaucacccccaacggcuccauccccaacgacaagcccuuccagaacgucaaccgcaucaccuacggcgccugcccccgcuacgucaagcagaacacccucaagcucgccaccggcaugcgcaacguccccgagaagcagacccgcggcaucuucggcgccaucgccggcuucaucgagaacggcugggagggcauggucgacggcugguacggcuuccgccaccagaacuccgagggcaccggccaggccgccgaccucaaguccacccaggccgccaucaaccagaucaacggcaagcucaaccgccucaucgagaagaccaacgagaaguuccaccagaucgagaaggaguucuccgaggucgagggccgcauccaggaccucgagaaguacgucgaggacaccaagaucgaccucugguccuacaacgccgagcuccucgucgcccucgagaaccagcacaccaucgaccucaccgacuccgagaugaacaagcucuucgagcgcacccgcaagcagcuccgcgagaacgccgaggacaugggcaacggcugcuucaagaucuaccacaagugcgacaacgccugcaucggcuccauccgcaacggcaccuacgaccacgacgucuaccgcgacgaggcccucaacaaccgcuuccagaucaagggcgucgagcucaaguccggcuacaaggacuggauccucuggaucuccuucgccaucuccugcuuccuccucugcgucguccuccucggcuucaucaugugggccugccagaagggcaacauccgcugcaacaucugcaucuga

SEQ ID NO: 104855 - RNA, 1701 nt, Artificial Sequence
  derived and/or modified CDS sequence (opt2) from hemagglutinin__InfluenzaA__AFJ77451
augaagaccaucaucgcccucuccuacauccucugccucgucuucgcccagaagcuccccggcaacgacaacuccaccgccacccucugccucggccaccacgccguccccaacggcacccucgucaagaccaucaccaacgaccagaucgaggucaccaacgccaccgagcucguccaguccuccuccaccggccgcaucugcgacuccccccaccgcauccucgacggcaagaacugcacccucaucgacgcccuccucggcgacccccacugcgacggcuuccagaacaaggagugggaccucuucgucgagcgcuccaaggccuacuccaacugcuaccccuacgacguccccgacuacgccucccuccgcucccucgucgccuccuccggcacccucgaguucaacaacgaguccuucaacuggaccggcgucgcccagaacggcaccuccuacgccugcaagcgccgcuccgucaaguccuucuucucccgccucaacuggcuccacaagcucgaguacaaguaccccgcccucaacgucaccaugcccaacaacgacaaguucgacaagcucuacaucuggggcguccaccaccccuccaccgacuccgaccagaccucccucuacguccaggccuccggccgcgucaccgucuccaccaagcgcucccagcagaccgucauccccaacaucggcucccgccccuggguccgcggcgucuccucccgcaucuccaucuacuggaccaucgucaagcccggcgacauccuccucaucaacuccaccggcaaccucaucgccccccgcggcuacuucaagauccgcuccggcaaguccuccaucaugcgcuccgacgcccccaucggcaacugcaacuccgagugcaucacccccaacggcuccauccccaacgacaagcccuuccagaacgucaaccgcaucaccuacggcgccugcccccgcuacgucaagcagaacacccucaagcucgccaccggcaugcgcaacguccccgagaagcagacccgcggcaucuucggcgccaucgccggcuucaucgagaacggcugggagggcauggucgacggcugguacggcuuccgccaccagaacuccgagggcaccggccaggccgccgaccucaaguccacccaggccgccaucaaccagaucaacggcaagcucaaccgccucaucgagaagaccaacggcaaguuccaccagaucgagaaggaguucuccgaggucgagggccgcauccaggaccucgagaaguacgucgaggacaccaagaucgaccucugguccuacaacgccgagcuccucgucgcccucgagaaccagcacaccaucgaccucaccgacuccgagaugaacaagcucuucgagcgcacccgcaagcagcuccgcgagaacgccgaggacaugggcaacggcugcuucaagaucuaccacaagugcgacaacgccugcaucggcuccauccgcaacggcaccuacgaccacgacgucuaccgcgacgaggcccucaacaaccgcuuccagaucaagggcgucgagcucaaguccggcuacaaggacuggauccucuggaucuccuucgccaucuccugcuuccuccucugcgucguccuccucggcuucaucaugugggccugccagaagggcaacauccgcugcaacaucugcaucuga

SEQ ID NO: 104856 - RNA, 1701 nt, Artificial Sequence
  derived and/or modified CDS sequence (opt2) from hemagglutinin__InfluenzaA__AFJ77462
augaagaccaucaucgcccucuccuacauccucugccucgucuucgcccagaagcuccccggcaacgacaacuccaccgccacccucugccucggccaccacgccguccccaacggcacccucgucaagaccaucaccaacgaccagaucgaggucaccaacgccaccgagcucguccaguccuccuccaccggccgcaucugcgacuccccccaccgcauccucgacggcaagaacugcacccucaucgacgcccuccucggcgacccccacugcgacggcuuccagaacaaggagugggaccucuucgucgagcgcuccaaggccuacuccaacugcuaccccuacgacguccccgacuacgccucccuccgcucccucgucgccuccuccggcacccucgaguucaccaacgagggcuucaacuggaccggcgucgcccaggacggcaccuccuacgccugcaagcgcggcuccgucaaguccuucuucucccgccucaacuggcuccacaagcucgaguacaaguaccccgcccucaacgucaccaugcccaacaacgacaaguucgacaagcucuacaucuggggcguccaccaccccuccaccgacuccgaccagaccucccucuacguccaggccuccggccgcgucaccgucuccaccaagcgcucccagcagaccgucauccccaacaucggcucccgccccuggguccgcggcgucuccucccgcaucuccaucuacuggaccaucgucaagcccggcgacauccuccucaucaacuccaccggcaaccucaucgccccccgcggcuacuucaagauccgcuccggcaaguccuccaucaugcgcuccgacgcccccaucggcaacugcaacuccgagugcaucacccccaacggcuccauccccaacgacaagcccuuccagaacgucaaccgcaucaccuacggcgccugcccccgcuacgucaagcagaacacccucaagcucgccaccggcaugcgcaacguccccgagaagcagacccgcggcaucuucggcgccaucgccggcuucaucgagaacggcugggagggcauggucgacggcugguacggcuuccgccaccagaacuccgagggcaccggccaggccgccgaccucaaguccacccaggccgccaucaaccagaucaacggcaagcucaaccgccucaucgagaagaccaacgagaaguuccaccagaucgagaaggaguucuccgaggucgagggccgcauccaggaccucgagaaguacgucgaggacaccaagaucgaccucugguccuacaacgccgagcuccucgucgcccucgagaaccagcacaccaucgaccucaccgacuccgagaugaacaagcucuucgagcgcacccgcaagcagcuccgcgagaacgccgaggacaugggcaacggcugcuucaagaucuaccacaagugcgacaacgccugcaucggcuccauccgcaacggcaccuacgaccacgacgucuaccgcgacgaggcccucaacaaccgcuuccagaucaagggcgucgagcucaaguccggcuacaaggacuggauccucuggaucuccuucgccaucuccugcuuccuccucugcgucguccuccucggcuucaucaugugggccugccagaagggcaacauccgcugcaacaucugcaucuga

SEQ ID NO: 104857 - RNA, 1701 nt, Artificial Sequence
  derived and/or modified CDS sequence (opt2) from hemagglutinin__InfluenzaA__AFJ77473
augaagaccaucaucgcccucuccuacauccucugccaggucuucgcccagaagcuccccggcaacgacaacuccaccgccacccucugccucggccaccacgccguccccaacggcacccucgucaagaccaucaccaacgaccagaucgaggucaccaacgccaccgagcucguccaguccuccuccaccggccgcaucugcgacuccccccaccagauccucgacggcgagaacugcacccucaucgacgcccuccucggcgacccccacugcgacggcuuccagaacaaggagugggaccucuucgucgagcgcuccaaggccuacuccaacugcuaccccuacgacguccccgacuacgccucccuccgcucccucgucgccuccuccggcacccucgaguucaacaacgaguccuucaacuggaccggcgucgcccagaacggcaccuccuccgccugcaagcgccgcuccaucaaguccuucuucucccgccucaacuggcuccaccagcucaaguacaaguaccccgcccucaacgucaccaugcccaacaacgagaaguucgacaagcucuacaucuggggcguccaccaccccuccaccgacuccgaccagaucucccucuacgcccaggccuccggccgcgucaccgucuccaccaagcgcucccagcagaccgucauccccaacaucggcucccgccccuggguccgcggcgucuccucccgcaucuccaucuacuggaccaucgucaagcccggcgacauccuccucaucaacuccaccggcaaccucaucgccccccgcggcuacuucaagauccgcuccggcaaguccuccaucaugcgcuccgacgcccccaucggcaagugcaacuccgagugcaucacccccaacggcuccauccccaacgacaagcccuuccagaacgucaaccgcaucaccuacggcgccugcccccgcuacgucaagcagaacacccucaagcucgccaccggcaugcgcaacguccccgagaagcagacccgcggcaucuucggcgccaucgccggcuucaucgagaacggcugggagggcauggucgacggcugguacggcuuccgccaccagaacuccgagggcaccggccaggccgccgaccucaaguccacccaggccgccaucaaccagaucaacggcaagcucaaccgccucaucgagaagaccaacgagaaguuccaccagaucgagaaggaguucuccgaggucgagggccgcauccaggaccucgagaaguacgucgaggacaccaagaucgaccucugguccuacaacgccgagcuccucgucgcccucgagaaccagcacaccaucgaccucaccgacuccgagaugaacaagcucuucgagcgcaccaagaagcagcuccgcgagaacgccgaggacaugggcaacggcugcuucaagaucuaccacaagugcgacaacgccugcaucggcuccauccgcaacggcaccuacgaccacgacgucuaccgcgacgaggcccucaacaaccgcuuccagaucaagggcgucgagcucaaguccggcuacaaggacuggauccucuggaucuccuucgccaucuccugcuuccuccucugcgucguccuccucggcuucaucaugugggccugccagaagggcaacauccgcugcaacaucugcaucuga

SEQ ID NO: 104858 - RNA, 1701 nt, Artificial Sequence; identical to SEQ ID NO: 96222
  derived and/or modified CDS sequence (opt2) from hemagglutinin__InfluenzaA__AFJ77484

SEQ ID NO: 104859 - RNA, 1701 nt, Artificial Sequence; identical to SEQ ID NO: 96224
  derived and/or modified CDS sequence (opt2) from hemagglutinin__InfluenzaA__AFJ77495

SEQ ID NO: 104860 - RNA, 1701 nt, Artificial Sequence; identical to SEQ ID NO: 96222
  derived and/or modified CDS sequence (opt2) from hemagglutinin__InfluenzaA__AFJ77506

SEQ ID NO: 104861 - RNA, 1701 nt, Artificial Sequence
  derived and/or modified CDS sequence (opt2) from hemagglutinin__InfluenzaA__AFJ77517
augaagaccaucaucgcccucuccuacauccucugccucgucuucgcccagaagauccccggcaacgacaacuccaccgccacccucugccucggccaccacgccguccccaacggcacccucgucaagaccaucaccaacgaccagaucgaggucaccaacgccaccgagcucguccaguccuccuccaccggccgcaucugcgacuccccccaccgcauccucgacggcgagaacugcacccucaucgacgcccuccucggcgacccccacugcgacggcuuccagaacaaggagugggaccucuucgucgagcgcuccaaggccuacuccaacugcuaccccuacgacguccccgacuacgccucccuccgcucccucgucgccuccuccggcacccucgaguucaacaacgaguccuucaacuggaccggcgucgcccagaacggcaccuccaacgccugcaagcgccgcuccaugaaguccuucuucucccgccucaacuggcuccaccagcucaaguacaaguaccccgcccucaacgucaccaugcccaacaacgacaaguucgacaagcucuacaucuggggcguccaccaccccuccaccgacuccgaccagaccucccucuacgcccaggccuccggccgcgucaccgucuccacccagcgcucccagcagaccgucauccccaacaucggcucccgccccuggguccgcggcgucuccucccgcaucuccaucuacuggaccaucgucaagcccggcgacauccuccucaucaacuccaccggcaaccucaucgccccccgcggcuacuucaagauccgcuccggcaaguccuccaucauccgcuccgacgcccccaucggcaagugcaacuccgagugcaucacccccaacggcuccauccccaacgacaagcccuuccagaacgucaaccgcaucaccuacggcgccugcccccgcuacgucaagcagaacacccucaagcucgccaccggcaugcgcaacguccccgagaagcagacccgcggcaucuucggcgccaucgccggcuucaucgagaacggcugggagggcauggucgacggcugguacggcuuccgccaccagaacuccgagggcaccggccaggccgccgaccucaaguccacccaggccgccaucaaccagaucaacggcaagcucaaccgccucaucgagaagaccaacgagaaguuccaccagaucgagaaggaguucuccgaggucgagggccgcauccaggaccucgagaaguacgucgaggacaccaagaucgaccucugguccuacaacgccgagcuccucgucgcccucgagaaccagcacaccaucgaccucaccgacuccgagaugaacaagcucuucgagcgcacccgcaagcagcuccgcgagaacgccgaggacaugggcaacggcugcuucaagaucuaccacaagugcgacaacgccugcaucggcuccauccgcaacggcaccuacgaccacgacgucuaccgcgacgaggcccucaacaaccgcuuccagaucaagggcgucgagcucaaguccggcuacaaggacuggauccucuggaucuccuucgccauguccugcuuccuccucugcgucguccuccucggcuucaucaugugggccugccagaagggcaacauccgcugcaacaucugcaucuga

SEQ ID NO: 104862 - RNA, 1701 nt, Artificial Sequence; identical to SEQ ID NO: 96059
  derived and/or modified CDS sequence (opt2) from hemagglutinin__InfluenzaA__AFJ77528

SEQ ID NO: 104863 - RNA, 1698 nt, Artificial Sequence
  derived and/or modified CDS sequence (opt2) from hemagglutinin__InfluenzaA__AFJ77550
augaagaccaucaucgcccucuccuacauccucugccaggucuucgcccagaagcuccccggcaacgacaacuccaccgccacccucugccucggccaccacgccguccccaacggcacccucgucaagaccaucaccaacgaccagaucgaggucaccaacgccaccgagcucguccaguccuccuccaccggccgcaucugcgacuccccccaccagauccucgacggcgagaacugcacccucaucgacgcccuccucggcgacccccacugcgacggcuuccagaacaaggagugggaccucuucgucgagcgcuccaaggccuacuccaacugcuaccccuacgacguccccgacuacgccucccuccgcucccucgucgccuccuccggcacccucgaguucaacaacgaguccuucaacuggaccggcgucgcccagaacggcaccuccuccgccugcaagcgccgcuccaucaaguccuucuucucccgccucaacuggcuccaccagcucaaguacaaguaccccgcccucaacgucaccaugcccaacaacgagaaguucgacaagcucuacaucuggggcguccaccaccccuccaccgacuccgaccagaucucccucuacgcccaggccuccggccgcgucaccgucuccaccaagcgcucccagcagaccgucauccccaacaucggcucccgccccuggguccgcggcgucuccucccgcaucuccaucuacuggaccaucgucaagcccggcgacauccuccucaucaacuccaccggcaaccucaucgccccccgcggcuacuucaagauccgcuccggcaaguccuccaucaugcgcuccgacgcccccaucggcaagugcaacuccgagugcaucacccccaacggcuccauccccaacgacaagcccuuccagaacgucaaccgcaucaccuacggcgccugcccccgcuacgucaagcagaacacccucaagcucgccaccggcaugcgcaacguccccgagaagacccgcggcaucuucggcgccaucgccggcuucaucgagaacggcugggagggcauggucgacggcugguacggcuuccgccaccagaacuccgagggcaccggccaggccgccgaccucaaguccacccaggccgccaucaaccagaucaacggcaagcucaaccgccucaucgagaagaccaacgagaaguuccaccagaucgagaaggaguucuccgaggucgagggccgcauccaggaccucgagaaguacgucgaggacaccaagaucgaccucugguccuacaacgccgagcuccucgucgcccucgagaaccagcacaccaucgaccucaccgacuccgagaugaacaagcucuucgagcgcaccaagaagcagcuccgcgagaacgccgaggacaugggcaacggcugcuucaagaucuaccacaagugcgacaacgccugcaucggcuccauccgcaacggcaccuacgaccacgacgucuaccgcgacgaggcccucaacaaccgcuuccagaucaagggcgucgagcucaaguccggcuacaaggacuggauccucuggaucuccuucgccaucuccugcuuccuccucugcgucguccuccucggcuucaucaugugggccugccagaagggcaacauccgcugcuccaucugcaucuga

SEQ ID NO: 104864 - RNA, 1701 nt, Artificial Sequence
  derived and/or modified CDS sequence (opt2) from hemagglutinin__InfluenzaA__AFJ77561
augaagaccaucaucgcccucuccuacauccucugccucgucuucgcccagaagcuccccggcaacgacaacuccaccgccacccucugccucggccaccacgccguccccaacggcacccucgucaagaccaucaccaacgaccagaucgaggucaccaacgccaccgagcucguccaguccuccuccaccggccgcaucugcgacuccccccaccgcauccucgacggcaagaacugcacccucaucgacgcccuccucggcgacccccacugcgacggcuuccagaacaaggagugggaccucuucgucgagcgcuccaaggccuacuccaacugcuaccccuacgacguccccgacuacgccucccuccgcucccucgucgccuccuccggcacccucgaguucaacaacgaguccuucaacuggaccggcgucgcccagaacggcaccuccuacgccugcaagcgccgcuccgucaaguccuucuucucccgccucaacuggcuccacaagcucgaguacaaguaccccgcccucaacgucaccaugcccaacaacgacaaguucgacaagcucuacaucuggggcguccaccaccccuccaccgacuccgaccagaccucccucuacgcccaggccuccggccgcgucaccgucuccaccaagcgcucccagcagaccgucauccccaacaucggcucccgccccuggguccgcggcgucuccucccgcaucuccaucuacuggaccaucgucaagcccggcgacauccuccucaucuacuccaccggcaaccucaucgccccccgcggcuacuucaagauccgcuccggcaaguccuccaucaugcgcuccgacgcccccaucggcaacugcuccuccgagugcaucacccccaacggcuccauccccaacgacaagcccuuccagaacgucaaccgcaucaccuacggcgccugcccccgcuacgucaagcagaacacccucaagcucgccaccggcaugcgcaacguccccgagaagcagacccgcggcaucuucggcgccaucgccggcuucaucgagaacggcugggagggcauggucgacggcugguacggcuuccgccaccagaacuccgagggcaccggccaggccgccgaccucaaguccacccaggccgccaucaaccagaucaacggcaagcucaaccgccucaucgagaagaccaacgagaaguuccaccagaucgagaaggaguucuccgaggucgagggccgcauccaggaccucgagaaguacgucgaggacaccaagaucgaccucugguccuacaacgccgagcuccucgucgcccucgagaaccagcacaccaucgaccucaccgacuccgagaugaacaagcucuucgagcgcacccgcaagcagcuccgcgagaacgccgaggacaugggcaacggcugcuucaagaucuaccacaagugcgacaacgccugcaucggcuccauccgcaacggcaccuacgaccacgacgucuaccgcgacgaggcccucaacaaccgcuuccagaucaagggcgucgagcucaaguccggcuacaaggacuggauccucuggaucuccuucgccaucuccugcuuccuccucugcgucguccuccucggcuucaucaugugggccugccagaagggcaacauccgcugcaacaucugcaucuga

SEQ ID NO: 104865 - RNA, 1698 nt, Artificial Sequence
  derived and/or modified CDS sequence (opt2) from hemagglutinin__InfluenzaA__AFJ77572
augaagaccaucaucgcccucuccuacauccucugccaggucuucgcccagaagcuccccggcaacgacaacuccaccgccacccucugccucggccaccacgccguccccaacggcacccucgucaagaccaucaccaacgaccagaucgaggucaccaacgccaccgagcucguccaguccuccuccaccggccgcaucugcgacuccccccaccagauccucgacggcgagaacugcacccucaucgacgcccuccucggcgacccccacugcgacggcuuccagaacaaggagugggaccucuucgucgagcgcuccaaggccuacuccaacugcuaccccuacgacguccccgacuacgccucccuccgcucccucgucgccuccuccggcacccucgaguucaacaacgaguccuucaacuggaccggcgucgcccagaacggcaccuccuccgccugcaagcgccgcuccaucaaguccuucuucucccgccucaacuggcuccaccagcucaaguacaaguaccccgcccucaacgucaccaugcccaacaacgagaaguucgacaagcucuacaucuggggcguccaccaccccuccaccgacuccgaccagaucucccucuacgcccaggccuccggccgcgucaccgucuccaccaagcgcucccagcagaccgucauccccaacaucggcuccggccccuggguccgcggcgucuccucccgcaucuccaucuacuggaccaucgucaagcccggcgacauccuccucaucaacuccaccggcaaccucaucgccccccgcggcuacuucaagauccgcuccggcaaguccuccaucaugcgcuccgacgcccccaucggcaagugcaacuccgagugcaucacccccaacggcuccauccccaacgacaagcccuuccagaacgucaaccgcaucaccuacggcgccugcccccgcuacgucaagcagaacacccucaagcucgccaccggcaugcgcaacguccccgagaagacccgcggcaucuucggcgccaucgccggcuucaucgagaacggcugggagggcauggucgacggcugguacggcuuccgccaccagaacuccgagggcaccggccaggccgccgaccucaaguccacccaggccgccaucaaccagaucaacggcaagcucaaccgccucaucgagaagaccaacgagaaguuccaccagaucgagaaggaguucuccgaggucgagggccgcauccaggaccucgagaaguacgucgaggacaccaagaucgaccucugguccuacaacgccgagcuccucgucgcccucgagaaccagcacaccaucgaccucaccgacuccgagaugaacaagcucuucgagcgcaccaagaagcagcuccgcgagaacgccgaggacaugggcaacggcugcuucaagaucuaccacaagugcgacaacgccugcaucggcuccauccgcaacggcaccuacgaccacgacgucuaccgcgacgaggcccucaacaaccgcuuccagaucaagggcgucgagcucaaguccggcuacaaggacuggauccucuggaucuccuucgccaucuccugcuuccuccucugcgucguccuccucggcuucaucaugugggccugccagaagggcaacauccgcugcuccaucugcaucuga

SEQ ID NO: 104866 - RNA, 1701 nt, Artificial Sequence
  derived and/or modified CDS sequence (opt2) from hemagglutinin__InfluenzaA__AFJ77583
augaagaccaucaucacccucuccuacauccucugccucgucuucgcccagaagcuccccgucaaggacaacuccaccgccacccucugccucggccaccacgccguccccaacggcacccucgucaagaccaucaccaacgaccacaucgaggucaccaacgccaccgagcucguccaguccuccuccaccggccgcaucugcgacuccccccaccagauccucgacggcgagaacugcacccucaucgacgcccuccucggcgacccccacugcgacggcuuccagaacaaggagugggaccucuucgucgagcgcuccaccgccuacuccaacugcuaccccuacgacguccccgacuacgccucccuccgcucccucgucgccuccuccggcacccucgaguucaacaacgaguccuucaacuggaccggcgucgcccagaacggcaccuccuccgccugcaagcgccgcuccaucaaguccuucuucucccgccucaacuggcuccaccagcucaaguacaaguaccccgcccucaacgucaccaugcccaacaacgagaaguucgacaagcucuacaucuggggcguccaccaccccuccaccgacuccgaccagaucucccucuacgcccaggccuccggccgcgucaccgucuccaccaagcgcucccagcagaccgucauccccaacaucggcucccgccccuggguccgcggcgucuccucccgcaucuccaucuacuggaccaucgucaagcccggcgacauccuccucaucaacuccaccggcaaccucaucgccccccgcggcuacuucaagauccgcuccggcaaguccuccaucaugcgcuccaacgcccccaucggcaagugcaacuccgagugcaucacccccaacggcuccauccccaacgacaagcccuuccagaacgucaaccgcaucaccuacggcgccugcccccgcuacgucaagcagaacacccucaagcucgccaccggcaugcgcaacguccccgagaagcagacccgcggcaucuucggcgccaucgccggcuucaucgagaacggcugggagggcauggucgacggcugguacggcuuccgccaccagaacuccgagggcaccggccaggccgccgaccucaaguccacccaggccgccaucaaccagaucaacggcaagcucaaccgccucaucgagaagaccaacgagaaguuccaccagaucgagaaggaguucuccgaggucgagggccgcauccaggaccucgagaaguacgucgaggacaccaagaucgaccucugguccuacaacgccgagcuccucgucgcccucgagaaccagcacaccaucgaccucaccgacuccgagaugaacaagcucuucgagcgcacccgcaagcagcuccgcgagaacgccgaggacaugggcaacggcugcuucaagaucuaccacaagugcgacaacgccugcaucggcuccauccgcaacggcaccuacgaccacgacgucuaccgcgacgaggcccucaacaaccgcuuccagaucaagggcgucgagcucaaguccggcuacaaggacuggauccucuggaucuccuucgccaucuccugcuuccuccucugcgucguccuccucggcuucaucaugugggccugccagaagggcaacauccgcugcaacaucugcaucuga

SEQ ID NO: 104867 - RNA, 1701 nt, Artificial Sequence
  derived and/or modified CDS sequence (opt2) from hemagglutinin__InfluenzaA__AFJ77594
augaagaccaucaucgcccucuccuacauccucugccucgucuucgcccagaagcuccccgucaaggacaacuccaccgccacccucugccucggccaccacgccguccccaacggcacccucgucaagaccaucaccaacgaccacaucgaggucaccaacgccaccgagcucguccaguccuccuccaccggccgcaucugcgacuccccccaccagauccucgacggcgagaacugcacccucaucgacgcccuccucggcgacccccacugcgacggcuuccagaacaaggagugggaccucuucgucgagcgcuccaccgccuacuccaacugcuaccccuacgacguccccgacuacgccucccuccgcucccucgucgccuccuccggcacccucgaguucaacaacgaguccuucaacuggaccggcgucgcccagaacggcaccuccuccgccugcaagcgccgcuccaucaaguccuucuucucccgccucaacuggcuccaccagcucaaguacaaguaccccgcccucaacgucaccaugcccaacaacgagaaguucgacaagcucuacaucuggggcguccaccaccccuccaccgacuccgaccagaucucccucuacgcccaggccuccggccgcgucaccgucuccaccaagcgcucccagcagaccgucauccccaacaucggcucccgccccuggguccgcggcgucuccucccgcaucuccaucuacuggaccaucgucaagcccggcgacauccuccucaucaacuccaccggcaaccucaucgccccccgcggcuacuucaagauccgcuccggcaaguccuccaucaugcgcuccaacgcccccaucggcaagugcaacuccgagugcaucacccccaacggcuccauccccaacgacaagcccuuccagaacgucaaccgcaucaccuacggcgccugcccccgcuacgucaagcagaacacccucaagcucgccaccggcaugcgcaacguccccgagaagcagacccgcggcaucuucggcgccaucgccggcuucaucgagaacggcugggagggcauggucgacggcugguacggcuuccgccaccagaacuccgagggcaccggccaggccgccgaccucaaguccacccaggccgccaucaaccagaucaacggcaagcucaaccgccucaucgagaagaccaacgagaaguuccaccagaucgagaaggaguucuccgaggucgagggccgcauccaggaccucgagaaguacgucgaggacaccaagaucgaccucugguccuacaacgccgagcuccucgucgcccucgagaaccagcacaccaucgaccucaccgacuccgagaugaacaagcucuucgagcgcacccgcaagcagcuccgcgagaacgccgaggacaugggcaacggcugcuucaagaucuaccacaagugcgacaacgccugcaucggcuccauccgcaacggcaccuacgaccacgacgucuaccgcgacgaggcccucaacaaccgcuuccagaucaagggcgucgagcucaaguccggcuacaaggacuggauccucuggaucuccuucgccaucuccugcuuccuccucugcgucguccuccucggcuucaucaugugggccugccagaagggcaacauccgcugcaacaucugcaucuga

SEQ ID NO: 104868 - RNA, 1701 nt, Artificial Sequence
  derived and/or modified CDS sequence (opt2) from hemagglutinin__InfluenzaA__AFJ77605
augaagaccaucaucgcccucuccuacauccucugccucaucuucgcccagaagcuccccggcaacgacaacuccaccgccacccucugccucggccaccacgccguccccaacggcacccucgucaagaccaucaccaacgaccagaucgaggucaccaacgccaccgagcucguccaguccuccuccaccggcaagaucugcgacuccccccaccagauccucgacggcgagaacugcacccucaucgacgcccuccucggcgacccccacugcgacggcuuccagaacaaggagugggaccucuucgucgagcgcuccaaggccuacuccaacugcuaccccuacgacguccccgacuacgccucccuccgcucccucgucgccuccuccggcacccucgaguucaacaacgaguccuucaacuggaccggcgucgcccagaacggcaccuccuccgccugcaagcgccgcuccaacaaguccuucuucucccgccucaacuggcuccaccagcucaaguacaaguaccccgcccucaacgucaccaugcccaacaacgagaaguucgacaagcucuacaucuggggcguccaccaccccuccaccgacuccgaccagaucucccucuacgcccaggccuccggccgcgucaccgucuccaccaagcgcucccagcagaccgucauccccaacaucggcucccgccccuggguccgcggcgucuccucccgcaucuccaucuacuggaccaucgucaagcccggcgacauccuccucaucaacuccaccggcaaccucaucgccccccgcggcuacuucaagauccgcuccggcaaguccuccaucaugcgcuccgacgcccccaucggcaagugcaacuccgagugcaucacccccaacggcuccauccccaacgacaagcccuuccagaacgucaaccgcaucaccuacggcgccugcccccgcuacgucaagcagaacacccucaagcucgccaccggcaugcgcaacguccccgagaagcagacccgcggcaucuucggcgccaucgccggcuucaucgagaacggcugggagggcauggucgacggcugguacggcuuccgccaccagaacuccgagggcaccggccaggccgccgaccucaaguccacccaggccgccaucaaccagaucaacggcaagcucaaccgccucaucgagaagaccaacgagaaguuccaccagaucgagaaggaguucuccgaggucgagggccgcauccaggaccucgagaaguacgucgaggacaccaagaucgaccucugguccuacaacgccgagcuccucgucgcccucgagaaccagcacaccaucgaccucaccgacuccgagaugaacaagcucuucgagcgcaccaagaagcagcuccgcgagaacgccgaggacaugggcaacggcugcuucaagaucuaccacaagugcgacaacgccugcaucggcuccauccgcaacggcaccuacgaccacgacgucuaccgcgacgaggccgucaacaaccgcuuccagaucaagggcgucgagcucaaguccggcuacaaggacuggauccucuggaucuccuucgccaucuccugcuuccuccucugcgucguccuccucggcuucaucaugugggccugccagaagggcaacauccgcugcaacaucugcaucuga

SEQ ID NO: 104869 - RNA, 1701 nt, Artificial Sequence
  derived and/or modified CDS sequence (opt2) from hemagglutinin__InfluenzaA__AFJ77616
augaagaccaucaucgcccucuccuacauccucugcaugguccucgcccagaagcuccccgucaaggacaacuccaccgccacccucugccucggccaccacgccguccccaacggcacccucgucaagaccaucaccaacgaccacaucgaggucaccaacgccaccgagcucguccaguccuccuccaccggccgcaucugcgacuccccccaccagauccucgacggcgagaacugcacccucaucgacgcccuccucggcgacccccacugcgacggcuuccagaacaaggagugggaccucuucgucgagcgcuccaccgccuacuccaacugcuaccccuacgacguccccgacuacgccucccuccgcucccucgucgccuccuccggcacccucgaguucaacaacgaguccuucaacuggaccggcgucgcccagaacggcaccuccuccgccugcaagcgccgcuccaucaaguccuucuucucccgccucaacuggcuccaccagcucaaguacaaguaccccgcccucaacgucaccaugcccaacaacgagaaguucgacaagcucuacaucuggggcguccaccaccccuccaccgacuccgaccagaucucccucuacgcccaggccuccggccgcgucaccgucuccaccaagcgcucccagcagaccgucauccccaacaucggcucccgccccuggguccgcggcgucuccucccgcaucuccaucuacuggaccaucgucaagcccggcgacauccuccucaucaacuccaccggcaaccucaucgccccccgcggcuacuucaagauccgcuccggcaaguccuccaucaugcgcuccaacgccuccaucggcaagugcaacuccgagugcaucacccccaacggcuccauccccaacgacaagcccuuccagaacgucaaccgcaucaccuacggcgccugcccccgcuacgucaagcagaacacccucaagcucgccaccggcaugcgcaacguccccgagaagcagacccgcggcaucuucggcgccaucgccggcuucaucgagaacggcugggagggcauggucgacggcugguacggcuuccgccaccagaacuccgagggcaccggccaggccgccgaccucaaguccacccaggccgccaucaaccagaucaacggcaagcucaaccgccucaucgagaagaccaacgagaaguuccaccagaucgagaaggaguucuccgaggucgagggccgcauccaggaccucgagaaguacgucgaggacaccaagaucgaccucugguccuacaacgccgagcuccucgucgcccucgagaaccagcacaccaucgaccucaccgacuccgagaugaacaagcucuucgagcgcacccgcaagcagcuccgcgagaacgccgaggacaugggcaacggcugcuucaagaucuaccacaagugcgacaacgccugcaucggcuccauccgcaacggcaccuacgaccacgacgucuaccgcgacgaggcccucaacaaccgcuuccagaucaagggcgucgagcucaaguccggcuacaaggacuggauccucuggaucuccuucgccaucuccugcuuccuccucugcgucguccuccucggcuucaucaugugggccugccagaagggcaacauccgcugcaacaucugcaucuga

SEQ ID NO: 104870 - RNA, 1701 nt, Artificial Sequence
  derived and/or modified CDS sequence (opt2) from hemagglutinin__InfluenzaA__AFJ77627
augaagaccaucaucgcccucuccuacauccucugccucguccucgcccagaagcuccccgucaaggacaacuccaccgccacccucugccucggccaccacgccguccccaacggcacccucgucaagaccaucaccaacgaccacaucgaggucaccaacgccaccgagcucguccaguccuccuccaccggccgcaucugcgacuccccccaccagauccucgacggcgagaacugcacccucaucgacgcccuccucggcgacccccacugcgacggcuuccagaacaaggagugggaccucuucgucgagcgcuccaccgccuacuccaacugcuaccccuacgacguccccgacuacgccucccuccgcucccucgucgccuccuccggcacccucgaguucaacaacgaguccuucaacuggaccggcgucgcccagaacggcaccuccuccgccugcaagcgccgcuccaucaaguccuucuucucccgccucaacuggcuccaccagcucaaguacaaguaccccgcccucaacgucaccaugcccaacaacgagaaguucgacaagcucuacaucuggggcguccaccaccccuccaccgacuccgaccagaucucccucuacgcccaggccuccggccgcgucaccgucuccaccaagcgcucccagcagaccgucauccccaacaucggcucccgccccuggguccgcggcgucuccucccgcaucuccaucuacuggaccaucgucaagcccggcgacauccuccucaucaacuccaccggcaaccucaucgccccccgcggcuacuucaagauccgcuccggcaaguccuccaucaugcgcuccaacgccuccaucggcaagugcaacuccgagugcaucacccccaacggcuccauccccaacgacaagcccuuccagaacgucaaccgcaucaccuacggcgccugcccccgcuacgucaagcagaacacccucaagcucgccaccggcaugcgcaacguccccgagaagcagacccgcggcaucuucggcgccaucgccggcuucaucgagaacggcugggagggcauggucgacggcugguacggcuuccgccaccagaacuccgagggcaccggccaggccgccgaccucaaguccacccaggccgccaucaaccagaucaacggcaagcucaaccgccucaucgagaagaccaacgagaaguuccaccagaucgagaaggaguucuccgaggucgagggccgcauccaggaccucgagaaguacgucgaggacaccaagaucgaccucugguccuacaacgccgagcuccucgucgcccucgagaaccagcacaccaucgaccucaccgacuccgagaugaacaagcucuucgagcgcacccgcaagcagcuccgcgagaacgccgaggacaugggcaacggcugcuucaagaucuaccacaagugcgacaacgccugcaucggcuccauccgcaacggcaccuacgaccacgacgucuaccgcgacgaggcccucaacaaccgcuuccagaucaagggcgucgagcucaaguccggcuacaaggacuggauccucuggaucuccuucgccaucuccugcuuccuccucugcgucguccuccucggcuucaucaugugggccugccagaagggcaacauccgcugcaacaucugcaucuga

SEQ ID NO: 104871 - RNA, 1701 nt, Artificial Sequence
  derived and/or modified CDS sequence (opt2) from hemagglutinin__InfluenzaA__AFJ77638
augaagaccaucaucgcccucuccuacauccucugccucgucuucgcccagaagcuccccggcaacgacaacuccaccgccacccucugccucggccaccacgccguccccaacggcacccucgucaagaccaucaccaacgaccagaucgaggucaccaacgccaccgagcucguccaguccuccuccaccggccgcaucugcgacuccccccaccagauccucgacggcgagaacugcacccucaucgacgcccuccucggcgacccccacugcgacggcuuccagaacaaggagugggaccucuucgucgagcgcuccaaggccuacuccaacugcuaccccuacgacguccccgacuacgccucccuccgcucccucgucgccuccuccggcacccucgaguucaacaacgaguccuucaacuggaccggcgucgcccagaacggcaccuccuccgccugcaagcgccgcuccaacaaguccuucuucucccgccucaacuggcuccaccagcucaaguacaaguaccccgcccucaacgucaccaugcccaacaacgagaaguucgacaagcucuacaucuggggcguccaccaccccuccaccgacuccgaccagaucucccucuacgcccaggccuccggccgcgucaccgucuccaccaagcgcucccagcagaccgucauccccaacaucggcucccgccccuggguccgcggcgucuccucccgcaucuccaucuacuggaccaucgucaagcccggcgacauccuccucaucaacuccaccggcaaccucaucgccccccgcggcuacuucaagauccgcuccggcaaguccuccaucaugcgcuccgacgcccccaucggcaagugcaacuccgagugcaccacccccaacggcuccauccccaacgacaagcccuuccagaacgucaaccgcaucaccuacggcgccugcccccgcuacgucaagcagaacacccucaagcucgccaccggcaugcgcaacguccccgagaagcagacccgcggcaucuucggcgccaucgccggcuucaucgagaacggcugggagggcauggucgacggcugguacggcuuccgccaccagaacuccgagggcaccggccaggccgccgaccucaaguccacccaggccgccaucaaccagaucaacggcaagcucaaccgccucaucggcaagaccaacgagaaguuccaccagaucgagaaggaguucuccgaggucgagggccgcauccaggaccucgagaaguacgucgaggacaccaagaucgaccucugguccuacaacgccgagcuccucgucgcccucgagaaccagcacaccaucgaccucaccgacuccgagaugaacaagcucuucgagcgcaccaagaagcagcuccgcgagaacgccgaggacaugggcaacggcugcuucaagaucuaccacaagugcgacaacgccugcaucggcuccauccgcaacggcaccuacgaccacgacgucuaccgcgacgaggcccucaacaaccgcuuccagaucaagggcgucgagcucaaguccggcuacaaggacuggauccucuggaucuccuucgccaucuccugcuuccuccucugcgucguccuccucggcuucaucaugugggccugccagaagggcaacauccgcugcaacaucugcaucuga

SEQ ID NO: 104872 - RNA, 1701 nt, Artificial Sequence
  derived and/or modified CDS sequence (opt2) from hemagglutinin__InfluenzaA__AFJ77649
augaagaccaucaucgcccucuccuacauccucugccucgucuucgcccagaagcuccccggcaacgacaacuccaccgccacccucugccucggccaccacgccguccccaacggcacccucgucaagaccaucaccaacgaccagaucgaggucaccaacgccaccgagcucguccaguccuccuccaccggccgcaucugcgacuccccccaccagauccucgacggcgagaacugcacccucaucgacgcccuccucggcgacccccacugcgacggcuuccagaacaaggagugggaccucuucgucgagcgcuccaaggccuacuccaacugcuaccccuacgacguccccgacuacgccucccuccgcucccucgucgccuccuccggcacccucgaguucaacaacgaguccuucaacuggaccggcgucgcccagaacggcaccuccuccgccugcaagcgccgcuccaacaaguccuucuucucccgccucaacuggcuccaccagcucaaguacaaguaccccgcccucaacgucaccaugcccaacaacgagaaguucgacaagcucuacaucuggggcguccaccaccccuccaccgacuccgaccagaucucccucuacgcccaggccuccggccgcgucaccgucuccaccaagcgcucccagcagaccgucauccccaacaucggcucccgccccuggguccgcggcgucuccucccgcaucuccaucuacuggaccaucgucaagcccggcgacauccuccucaucaacaacaccggcaaccucaucgccccccgcggcuacuucaagauccgcaacggcaaguccuccaucaugcgcuccgacgcccccaucggcaagugcaacuccgagugcaucacccccaacggcuccauccccaacgacaagcccuuccagaacgucaaccgcaucaccuacggcgccugcccccgcuacgucaagcagaacacccucaagcucgccaccggcaugcgcaacguccccgagaagcagacccgcggcaucuucggcgccaucgccggcuucaucgagaacggcugggagggcauggucgacggcugguacggcuuccgccaccagaacuccgagggcaccggccaggccgccgaccucaaguccacccaggccgccaucaaccagaucaacggcaagcucaaccgccucaucggcaagaccaacgagaaguuccaccagaucgagaaggaguucuccgaggucgagggccgcauccaggaccucgagaaguacgucgaggacaccaagaucgaccucugguccuacaacgccgagcuccucgucgcccucgagaaccagcacaccaucgaccucaccgacuccgagaugaacaagcucuucgagcgcaccaagaagcagcuccgcgagaacgccgaggacaugggcaacggcugcuucaagaucuaccacaagugcgacaacgccugcaucggcuccauccgcaacggcaccuacgaccacgacgucuaccgcgacgaggcccucaacaaccgcuucaagaucaagggcgucgagcucaaguccggcuacaaggacuggauccucuggaucuccuucgccaucuccugcuuccuccucugcgucguccuccucggcuucaucaugugggccugccagaagggcaacauccgcugcaacaucugcaucuga

SEQ ID NO: 104873 - RNA, 1701 nt, Artificial Sequence; identical to SEQ ID NO: 96239
  derived and/or modified CDS sequence (opt2) from hemagglutinin__InfluenzaA__AFJ77660

SEQ ID NO: 104874 - RNA, 1701 nt, Artificial Sequence; identical to SEQ ID NO: 96239
  derived and/or modified CDS sequence (opt2) from hemagglutinin__InfluenzaA__AFJ77671

SEQ ID NO: 104875 - RNA, 1701 nt, Artificial Sequence; identical to SEQ ID NO: 96239
  derived and/or modified CDS sequence (opt2) from hemagglutinin__InfluenzaA__AFJ77682

SEQ ID NO: 104876 - RNA, 1701 nt, Artificial Sequence
  derived and/or modified CDS sequence (opt2) from hemagglutinin__InfluenzaA__AFJ77693
augaagaccaucaucgcccucuccuacauccucugccucgucuucgcccagaagcuccccgucaacgacaacuccaccgccacccucugccucggccaccacaccguccccaacggcacccucgucaagaccaucaccaacgacaacaucgaggucaccaacgccaccgagcucguccaguccuccuccaccggccgcaucugcgacuccccccaccagauccucgacggcgagaacugcacccucaucgacgcccuccucggcgacccccacugcgacggcuuccagaacaaggagugggaccucuucgucgagcgcuccaccgccuacuccaacugcuaccccuacgacguccccgacuacgccucccuccgcucccucgucgccuccuccggcacccucgaguucaacaacgaguccuucaacuggaccggcgucgaccagaacggcaccuccuccgccugcaagcgccgcuccaacaaguccuucuucucccgccucaacuggcuccaccagcucaaguacaaguaccccgcccucaacgucaccaugcccaacaacgagaaguucgacaagcucuacaucuggggcguccaccaccccuccaccgacuccgaccagaucucccucuacgcccaggccuccggccgcgucaccgucuccaccaagcgcucccagcagaccgucauccccaacaucggcucccgccccuggguccgcggcgucuccucccgcaucuccaucuacuggaccaucgucaagcccggcgacauccuccucaucaacuccaccggcaaccucaucgccccccgcggcuacuucaagauccgcuccggcaaguccuccaucaugcgcuccaacgcccccaucggcaagugcaacuccgagugcaucacccccaacggcuccauccccaacgacaagcccuuccagaacgucaaccgcaucaccuacggcgccugcccccgcuacgucaagcagaacacccucaagcucgccaccggcaugcgcaacguccccgagaagcagacccgcggcaucuucggcgccaucgccggcuucaucgagaacggcugggagggcauggucgacggcugguacggcuuccgccaccagaacuucgagggcaccggccaggccgccgaccucaaguccacccaggccgccaucaaccagaucaacggcaagcucaaccgccucaucgagaagaccaacgagaaguuccaccagaucgagaaggaguucuccgaggucgagggccgcauccaggaccucgagaaguacgucgaggacaccaagaucgaccucugguccuacaacgccgagcuccucgucgcccucgagaaccagcacaccaucgaccucaccgacuccgagaugaacaagcucuucgagcgcacccgcaagcagcuccgcgagaacgccgaggacaugggcaacggcugcuucaagaucuaccacaagugcgacaacgccugcaucggcuccauccgcaacggcaccuacgaccacgacgucuaccgcgacgaggcccucaacaaccgcuuccagaucaagggcgucgagcucaaguccggcuacaaggacuggauccucuggaucuccuucgccaucuccugcuuccuccucugcgucguccuccucggcuucaucaugugggccugccagaagggcaacauccgcugcaacaucugcaucuga

SEQ ID NO: 104877 - RNA, 1701 nt, Artificial Sequence; identical to SEQ ID NO: 96239
  derived and/or modified CDS sequence (opt2) from hemagglutinin__InfluenzaA__AFJ77704

SEQ ID NO: 104878 - RNA, 1701 nt, Artificial Sequence; identical to SEQ ID NO: 104717
  derived and/or modified CDS sequence (opt2) from hemagglutinin__InfluenzaA__AFJ77715

SEQ ID NO: 104879 - RNA, 1701 nt, Artificial Sequence; identical to SEQ ID NO: 104717
  derived and/or modified CDS sequence (opt2) from hemagglutinin__InfluenzaA__AFJ77726

SEQ ID NO: 104880 - RNA, 1701 nt, Artificial Sequence; identical to SEQ ID NO: 104813
  derived and/or modified CDS sequence (opt2) from hemagglutinin__InfluenzaA__AFJ77737

SEQ ID NO: 104881 - RNA, 1701 nt, Artificial Sequence; identical to SEQ ID NO: 96068
  derived and/or modified CDS sequence (opt2) from hemagglutinin__InfluenzaA__AFJ77748

SEQ ID NO: 104882 - RNA, 1701 nt, Artificial Sequence; identical to SEQ ID NO: 96068
  derived and/or modified CDS sequence (opt2) from hemagglutinin__InfluenzaA__AFJ77759

SEQ ID NO: 104883 - RNA, 1701 nt, Artificial Sequence
  derived and/or modified CDS sequence (opt2) from hemagglutinin__InfluenzaA__AFJ77781
augaagaccaucaucgcccucuccuacauccucugccucgucuucgcccagaagcuccccggcaacgacaacuccaccgccacccucugccucggccaccacgccguccccaacggcaccaucgucaagaccaucaccaacgaccagaucgaggucaccaacgccaccgagcucguccaguccuccuccaccggcggcaucugcgacuccccccaccagauccucgacggcgagaacugcacccucaucgacgcccuccucggcgacccccagugcgacggcuuccagaacaagaagugggaccucuucgucgagcgcuccaaggccuacuccaacugcuaccccuacgacguccccgacuacgccucccuccgcucccucgucgccuccuccggcacccucgaguucaacuccgaguccuucgacuggaccggcgucacccagaacggcaccuccuccgccugcaagcgccgcuccaacaaguccuucuucucccgccucaacuggcucacccaccucaaguacaaguaccccgcccucaacgucaccaugcccaacaacgagaaguucgacaagcucuacaucuggggcguccaccaccccggcaccgacuccgaccagaucucccucuacgcccaggccuccggccgcaucaccgucuccaccaagcgcucccagcagaccgucauccccaacaucggcucccgcccccgcguccgcgacgucuccucccgcaucuccaucuacuggaccaucgucaagcccggcgacauccuccucaucaacuccaccggcaaccucaucgccccccgcggcuacuucaagauccgcuccggcaaguccuccaucaugcgcuccgacgcccccaucggcaagugcaacuccgagugcaucacccccaacggcuccauccccaacgacaagcccuuccagaacgucaaccgcaucaccuacggcgccugcccccgcuacgucaagcagaacacccucaagcucgccaccggcaugcgcaacguccccgagaagcagacccgcggcaucuucggcgccaucgccggcuucaucgagaacggcugggagggcauggucgacggcugguacggcuuccgccaccagaacuccgagggcaccggccaggccgccgaccucaaguccacccaggccgccaucaaccagaucaacggcaagcucaaccgccucaucggcaagaccaacgagaaguuccaccagaucgagaaggaguucuccgaggucgagggccgcauccaggaccucgagaaguacgucgaggacaccaagaucgaccucugguccuacaacgccgagcuccucgucgcccucgagaaccagcacaccaucgaccucaccgacuccgagaugaacaagcucuucgagcgcaccaagaagcagcuccgcgagaacgccgaggacaugggcaacggcugcuucaagaucuaccacaagugcgacaacgccugcaucggcuccauccgcaacggcaccuacgaccacgacgucuaccgcgacgaggcccucaacaaccgcuuccagaucaagggcgucgagcucaaguccggcuacaaggacuggauccucuggaucuccuucgccaucuccugcuuccuccucugcgucgcccuccucggcuucaucaugugggccugccagaagggcaacauccgcugcaacaucugcaucuga

SEQ ID NO: 104884 - RNA, 1701 nt, Artificial Sequence; identical to SEQ ID NO: 97831
  derived and/or modified CDS sequence (opt2) from hemagglutinin__InfluenzaA__AFJ77792

SEQ ID NO: 104885 - RNA, 1701 nt, Artificial Sequence; identical to SEQ ID NO: 97831
  derived and/or modified CDS sequence (opt2) from hemagglutinin__InfluenzaA__AFJ77803

SEQ ID NO: 104886 - RNA, 1701 nt, Artificial Sequence; identical to SEQ ID NO: 97831
  derived and/or modified CDS sequence (opt2) from hemagglutinin__InfluenzaA__AFJ77814

SEQ ID NO: 104887 - RNA, 1701 nt, Artificial Sequence; identical to SEQ ID NO: 97831
  derived and/or modified CDS sequence (opt2) from hemagglutinin__InfluenzaA__AFJ77825

SEQ ID NO: 104888 - RNA, 1701 nt, Artificial Sequence; identical to SEQ ID NO: 97831
  derived and/or modified CDS sequence (opt2) from hemagglutinin__InfluenzaA__AFJ77836

SEQ ID NO: 104889 - RNA, 1701 nt, Artificial Sequence; identical to SEQ ID NO: 97831
  derived and/or modified CDS sequence (opt2) from hemagglutinin__InfluenzaA__AFJ77847

SEQ ID NO: 104890 - RNA, 1701 nt, Artificial Sequence
  derived and/or modified CDS sequence (opt2) from hemagglutinin__InfluenzaA__AFJ77858
augaagaccaucaucgcccucuccuacauccucugccucgucuucgcccagaagcuccccggcaacgacaacuccaccgccacccucugccucggccaccacgccguccccaacggcaccaucgucaagaccaucaccaacgaccagaucgaggucaccaacgccaccgagcucguccaguccuccuccaccggcggcaucugcgacuccccccaccagauccucgacggcgagaacugcacccucaucgacgcccuccucggcgacccccagugcgacggcuuccagaacaagaagugggaccucuucgucgagcgcuccaaggccuacuccaacugcuaccccuacgacguccccgacuacgccucccuccgcucccucgucgccuccuccggcacccucgaguucaacaacgaguccuucaacuggaccggcgucacccagaacggcaccuccuccgccugcaagcgccgcuccaacaacuccuucuucucccgccucaacuggcucacccaccucaaguucaaguaccccgcccucaacgucaccaugcccaacaacgagaaguucgacaagcucuacaucuggggcguccaccaccccggcaccgacaacgaccagaucucccucuacgcccaggccuccggccgcaucaccgucuccacccagcgcucccagcagaccgucauccccaacaucggcucccgcccccgcguccgcgacauccccucccgcaucuccaucuacuggaccaucgucaagcccggcgacaugcuccucaucaacuccaccggcaaccucaucgccccccgcggcuacuucaagauccgcuccggcaaguccuccaucaugcgcuccgacgcccccaucggcaagugcaacuccgagugcaucacccccaacggcuccauccccaacgacaagcccuuccagaacgucaaccgcaucaccuacggcgccugcccccgcuacgucaagcagaacacccucaagcucgccaccggcaugcgcaacguccccgagaagcagacccgcggcaucuucggcgccaucgccggcuucaucgagaacggcugggagggcauggucgacggcugguacggcuuccgccaccagaacuccgagggcaccggccaggccgccgaccucaaguccacccaggccgccaucaaccagaucaacggcaagcucaacaagcucaucggcaagaccaacgagaaguuccaccagaucgagaaggaguucuccgaggucgagggccgcauccaggaccucgagaaguacgucgaggacaccaagaucgaccucugguccuacaacgccgagcuccucgucgcccucgagaaccagcacaccaucgaccucaccgacuccgagaugaacaagcucuucgagcgcaccaagaagcagcuccgcgagaacgccgaggacaugggcaacggcugcuucaagaucuaccacaagugcgacaacgccugcaucggcuccauccgcaacggcaccuacgaccacgacgucuaccgcgacgaggcccucaacaaccgcuuccagaucaagggcgucgagcucaaguccggcuacaaggacuggauccucuggaucuccuucgccaucuccugcuuccucuucugcgucgcccuccucggcuucaucaugugggccugccagaagggcaacauccgcugcaacaucugcaucuga

SEQ ID NO: 104891 - RNA, 1701 nt, Artificial Sequence
  derived and/or modified CDS sequence (opt2) from hemagglutinin__InfluenzaA__AFJ77869
augaagaccaucaucgccuucuccuacauccucugccucgucuucgcccagaagcuccccggcaacgacaacuccaccgccacccucugccucggccaccacgccguccccaacggcaccaucgucaagaccaucaccaacgaccagaucgaggucaccaacgccaccgagcucguccaguccuccuccaccggcggcaucugcgacuccccccaccagauccucgacggcgagaacugcacccucaucgacgcccuccucggcgacccccagugcgacggcuuccagaacaagaagugggaccucuucgucgagcgcuccaaggccuacuccaacugcuaccccuacgacguccccgacuacgccucccuccgcucccucgucgccuccuccggcacccucgaguucaacaacgaguccuucaacuggaccggcgucacccagaacggcaccuccuccgccugcaagcgccgcuccaacaacuccuucuucucccgccucaacuggcucacccaccucaaguucaaguaccccgcccucaacgucaccaugcccaacaacgagaaguucgacaagcucuacaucuggggcguccaccaccccggcaccgacaacgaccagaucucccucuacgcccaggccuccggccgcaucaccgucuccaccaagcgcucccagcagaccgucauccccaacaucggcucccgcccccgcguccgcgacauccccucccgcaucuccaucuacuggaccaucgucaagcccggcgacauccuccucaucaacuccaccggcaaccucaucgccccccgcggcuacuucaagauccgcuccggcaaguccuccaucaugcgcuccgacgcccccaucggcaagugcaacuccgagugcaucacccccaacggcuccauccccaacgacaagcccuuccagaacgucaaccgcaucaccuacggcgccugcccccgcuacgucaagcagaacacccucaagcucgccaccggcaugcgcaacguccccgagaagcagacccgcggcaucuucggcgccaucgccggcuucaucgagaacggcugggagggcauggucgacggcugguacggcuuccgccaccagaacuccgagggcaccggccaggccgccgaccucaaguccacccaggccgccaucaaccagaucaacggcaagcucaaccgccucaucggcaagaccaacgagaaguuccaccagaucgagaaggaguucuccgaggucgagggccgcauccaggaccucgagaaguacgucgaggacaccaagaucgaccucugguccuacaacgccgagcuccucgucgcccucgagaaccagcacaccaucgaccucaccgacuccgagaugaacaagcucuucgagcgcaccaagaagcagcuccgcgagaacgccgaggacaugggcaacggcugcuucaagaucuaccacaagugcgacaacgccugcaucggcuccauccgcaacggcaccuacgaccacgacgucuaccgcgacgaggcccucaacaaccgcuuccagaucaagggcgucgagcucaaguccggcuacaaggacuggauccucuggaucuccuucgccaucuccugcuuccuccucugcgucgcccuccucggcuucaucaugugggccugccagaagggcaacauccgcugcaacaucugcaucuga

SEQ ID NO: 104892 - RNA, 1701 nt, Artificial Sequence
  derived and/or modified CDS sequence (opt2) from hemagglutinin__InfluenzaA__AFJ77880
augaagaccaucaucgcccucuccuacauccucugccucgucuucgcccagaagcuccccggcaacgacaacuccaccgccacccucugccucggccaccacgccguccccaacggcaccaucgucaagaccaucaccaacgaccagaucgaggucaccaacgccaccgagcucguccaguccuccuccaccggcggcaucugcaacuccccccaccagauccucgacggcgagaacugcacccucaucgacgcccuccucggcgacccccagugcgacggcuuccagaacaagaagugggaccucuucgucgagcgcuccaaggccuacuccaacugcuaccccuacgacguccccgacuacgccucccuccgcucccucgucgccuccuccggcacccucgaguucaacaacgaguccuucaacuggaccggcgucacccagaacggcaccuccuccgccugcaagcgccgcuccaacaaguccuucuucucccgccucaacuggcucacccaccucaaguucaaguaccccgcccucaacgucaccaugcccaacaacgagaaguucgacaagcucuacaucuggggcguccaccaccccggcaccgacaacgaccagaucucccucuacgcccaggccuccggccgcaucaccgucuccaccaagcgcucccagcagaccgucauccccaacaucggcucccgcccccgcguccgcgacguccccucccgcaucuccaucuacuggaccaucgucaagcccggcgacauccuccucaucaacuccaccggcaaccucaucgccccccgcggcuacuucaagauccgcuccggcaaguccuccaucaugcgcuccgacgcccccaucggcaagugcaacuccgagugcaucacccccaacggcuccauccccaacgacaagcccuuccagaacgucaaccgcaucaccuacggcgccugcccccgcuacgucaagcagaacacccucaagcucgccaccggcaugcgcaacguccccgagaagcagacccgcggcaucuucggcgccaucgccggcuucaucgagaacggcugggagggcauggucgacggcugguacggcuuccgccaccagaacuccgagggcaccggccaggccgccgaccucaaguccacccaggccgccaucaaccagaucaacggcaagcucaaccgccucaucggcaagaccaacgagaaguuccaccagaucgagaaggaguucuccgaggucgagggccgcauccaggaccucgagaaguacgucgaggacaccaagaucgaccucugguccuacaacgccgagcuccucgucgcccucgagaaccagcacaccaucgaccucaccgacuccgagaugaacaagcucuucgagcgcaccaagaagcagcuccgcgagaacgccgaggacaugggcaacggcugcuucaagaucuaccacaagugcgacaacgccugcaucggcuccauccgcaacggcaccuacgaccacgacgucuaccgcgacgaggcccucaacaaccgcuuccagaucaagggcgucgagcucaaguccggcuacaaggacuggauccucuggaucuccuucgccaucuccugcuuccuccucugcgucgcccuccucggcuucaucaugugggccugccagaagggcaacauccgcugcaacaucugcaucuga

SEQ ID NO: 104893 - RNA, 1701 nt, Artificial Sequence
  derived and/or modified CDS sequence (opt2) from hemagglutinin__InfluenzaA__AFJ77902
augaagaccaucaucgcccucuccuacauccucugccucgucuucgcccagaagcuccccggcaacgacaacuccaccgccacccucugccucggccaccacgccguccccaacggcaccaucgucaagaccaucaccaacgaccagaucgaggucaccaacgccaccgagcucguccaguccuccuccaccggcggcaucugcgacuccccccaccagauccucgacggcgagaacugcacccucaucgacgcccuccucggcgacccccagugcgacggcuuccagaacaagaagugggaccucuucgucgagcgcuccaaggccuacuccaacugcuaccccuacgacguccccgacuacgccucccuccgcucccucgucgccuccuccggcacccucgaguucaacaacgaguccuucaacuggaccggcgucacccagaacggcaccuccuccgccugcaagcgccgcuccaacaacuccuucuucucccgccucaacuggcucacccaccucaaguucaaguaccccgcccucaacgucaccaugcccaacaacgagaaguucgacaagcucuacaucuggggcguccaccaccccggcaccgacaacgaccagaucggccucuacgcccaggccuccggccgcaucaccgucuccaccaagcgcucccagcagaccgucauccccaacaucggcucccgcccccgcguccgcgacauccccucccgcaucuccaucuacuggaccaucgucaagcccggcgacaugcuccucaucaacuccaccggcaaccucaucgccccccgcggcuacuucaagauccgcuccggcaaguccuccaucaugcgcuccgacgcccccaucggcaagugcaacuccgagugcaucacccccaacggcuccauccccaacgacaagcccuuccagaacgucaaccgcaucaccuacggcgccugcccccgcuacgucaagcagaacacccucaagcucgccaccggcaugcgcaacguccccgagaagcagacccgcggcaucuucggcgccaucgccggcuucaucgagaacggcugggagggcauggucgacggcugguacggcuuccgccaccagaacuccgagggcaccggccaggccgccgaccucaaguccacccaggccgccaucaaccagaucaacggcaagcucaaccgccucaucggcaagaccaacgagaaguuccaccagaucgagaaggaguucuccgaggucgagggccgcauccaggaccucgagaaguacgucgaggacaccaagaucgaccucugguccuacaacgccgagcuccucgucgcccucgagaaccagcacaccaucgaccucaccgacuccgagaugaacaagcucuucgagcgcaccaagaagcagcuccgcgagaacgccgaggacaugggcaacggcugcuucaagaucuaccacaagugcgacaacgccugcaucggcuccauccgcaacggcaccuacgaccacgacgucuaccgcgacgaggcccucaacaaccgcuuccagaucaagggcgucgagcucaaguccggcuacaaggacuggauccucuggaucuccuucgccaucuccugcuuccuccucugcgucgcccuccucggcuucaucaugugggccugccagaagggcaacauccgcugcaacaucugcaucuga

SEQ ID NO: 104894 - RNA, 1701 nt, Artificial Sequence
  derived and/or modified CDS sequence (opt2) from hemagglutinin__InfluenzaA__AFJ77913
augaagaccaucaucgcccucuccuacauccucugccucgucuucgcccagaagcuccccggcaacgacaacuccaccgccacccucugccucggccaccacgccguccccaacggcaccaucgucaagaccaucaccaacgaccagaucgaggucaccaacgccaccgagcucguccaguccuccuccaccggcggcaucugcgacuccccccaccagauccucgacggcgagaacugcacccucaucgacgcccuccucggcgacccccagugcgacggcuuccagaacaagaagugggaccucuucgucgagcgcuccaaggccuacuccaacugcuaccccuacgacguccaggacuacgccucccuccgcucccucgucgccuccuccggcacccucgaguucaacaacgaguccuucaacuggaccggcgucacccagaacggcaccuccuccgccugcaagcgccgcuccaacaacuccuucuucucccgccucaacuggcucacccaccucaaguucaaguaccccgcccucaacgucaccaugcccaacaacgagaaguucgacaagcucuacaucuggggcguccaccaccccggcaccgacaacgaccagaucucccucuacgcccaggccuccggccgcaucaccgucuccaccaagcgcucccagcagaccgucauccccaacaucggcucccgcccccgcguccgcgacauccccucccgcaucuccaucuacuggaccaucgucaagcccggcgacaugcuccucaucaacuccaccggcaaccucaucgccccccgcggcuacuucaagauccgcuccggcaaguccuccaucaugcgcuccgacgcccccaucggcaagugcaacuccgagugcaucacccccaacggcuccauccccaacgacaagcccuuccagaacgucaaccgcaucaccuacggcgccugcccccgcuacgucaagcagaacacccucaagcucgccaccggcaugcgcaacguccccgagaagcagacccgcggcaucuucggcgccaucgccggcuucaucgagaacggcugggagggcauggucgacggcugguacggcuuccgccaccagaacuccgagggcaccggccaggccgccgaccucaaguccacccaggccgccaucaaccagaucaacggcaagcucaaccgccucaucggcaagaccaacgagaaguuccaccagaucgagaaggaguucuccgaggucgagggccgcauccaggaccucgagaaguacgucgaggacaccaagaucgaccucugguccuacaacgccgagcuccucgucgcccucgagaaccagcacaccaucgaccucaccgacuccgagaugaacaagcucuucgagcgcaccaagaagcagcuccgcgagaacgccgaggacaugggcaacggcugcuucaagaucuaccacaagugcgacaacgccugcaucggcuccauccgcaacggcaccuacgaccacgacgucuaccgcgacgaggcccucaacaaccgcuuccagaucaagggcgucgagcucaaguccggcuacaaggacuggauccucuggaucuccuucgccaucuccugcuuccuccucugcgucgcccuccucggcuucaucaugugggccugccagaagggcaacauccgcugcaacaucugcaucuga

SEQ ID NO: 104895 - RNA, 1701 nt, Artificial Sequence; identical to SEQ ID NO: 97149
  derived and/or modified CDS sequence (opt2) from hemagglutinin__InfluenzaA__AFJ77924

SEQ ID NO: 104896 - RNA, 1701 nt, Artificial Sequence
  derived and/or modified CDS sequence (opt2) from hemagglutinin__InfluenzaA__AFJ77935
augaagaccaucaucgcccucuccuacauccucugccucgucuucgcccagaagcuccccggcaacgacaacuccaccgccacccucugccucggccaccacgccguccccaacggcaccgucgucaagaccaucaccaacgaccagaucgaggucaccaacgccaccgagcucguccaguccuccuccaccggcggcaucugcgacuccccccaccagauccucgacggcgagaacugcacccucauggacgcccuccucggcgacccccagugcgacggcuuccagaacaagaagugggaccucuucgucgagcgcuccaaggccuacuccaacugcuaccccuacgacguccccgaccacgccucccuccgcucccucgucgccuccuccggcacccucgaguucaacaacgaguccuucaacuggaccggcgucacccagaacggcaccuccuccgccugcaagcgccgcuccaacaacuccuucuucucccgccucaacuggcucacccaccucaaguucaaguaccccgcccucaacgucaccaugcccaacaacgagaccuucgacaagcucuacaucuggggcguccaccaccccggcaccgacaacgaccagaucucccucuacgcccaggccuccggccgcaucaccgucuccaccaagcgcucccagcagaccgucauccccaacaucggcucccgcccccgcguccgcgacauccccucccgcaucuccaucuacuggaccaucgucaagcccggcgacauccuccucaucaacuccaccggcaaccucaucgccccccgcggcuacuucaagauccgcuccggcaaguccuccaucaugcgcuccgacgcccccaucggcaagugcaacuccgagugcaucacccccaacggcuccauccccaacgacaagcccuuccagaacgucaaccgcaucaccuacggcgccugcccccgcuacgucaagcagaacacccucaagcucgccaccggcaugcgcaacguccccgagaagcagacccgcggcaucuucggcgccaucgccggcuucaucgagaacggcugggagggcauggucgacggcugguacggcuuccgccaccagaacuccgagggcaccggccaggccgccgaccucaaguccacccaggccgccaucaaccagaucaacggcaagcucaaccgccucaucggcaagaccaacgagaaguuccaccagaucgagaaggaguucuccgaggucgagggccgcauccaggaccucgagaaguacgucgaggacaccaagaucgaccucugguccuacaacgccgagcuccucgucgcccucgagaaccagcacaccaucgaccucaccgacuccgagaugaacaagcucuucgagcgcaccaagaagcagcuccgcgagaacgccgaggacaugggcaacggcugcuucaagaucuaccacaagugcgacaacgccugcaucggcuccauccgcaacggcaccuacgaccacgacgucuaccgcgacgaggcccucaacaaccgcuuccagaucaagggcgucgagcucaaguccggcuacaaggacuggauccucuggaucuccuucgccaucuccugcuuccuccucugcgucgcccuccucggcuucaucaugugggccugccagaagggcaacauccgcugcaacaucugcaucuga

SEQ ID NO: 104897 - RNA, 1701 nt, Artificial Sequence
  derived and/or modified CDS sequence (opt2) from hemagglutinin__InfluenzaA__AFJ77946
augaagaccaucaucgcccucuccuacauccucugccucgucuucgcccagaagcuccccggcaacgacaacuccaccgccacccucugccucggccaccacgccguccccaacggcaccaucgucaagaccaucaccaacgaccagaucgaggucaccaacgccaccgagcucguccaguccuccuccaccggcggcaucugcgacuccccccaccagauccucgacggcgagaacugcacccucaucgacgcccuccucggcgacccccagugcgacggcuuccagaacaagaagugggaccucuucgucgagcgcuccaaggccuacuccaacugcuaccccuacgacguccccgacuacgccucccuccgcucccucgucgccuccuccggcacccucgaguucaacaacgaguccuucaacuggaccggcgucacccagaacggcaccuccuccgccugcaagcgccgcuccaacaacuccuucuucucccgccucaacuggcucacccaccucaaguucaaguaccccgcccucaacgucaccaugcccaacaacgagaaguucgacaagcucuacaucuggggcguccaccaccccggcaccgacaacgaccagaucucccucuacgcccaggccuccggccgcaucaccgucuccaccaagcgcucccagcagaccgucauccccaacaucggcucccgcccccgcguccgcgacauccccucccgcaucuccaucuacuggaccaucgucaagcccggcgacaugcuccucaucaacuccaccggcaaccucaucgccccccgcggcuacuucaagauccgcuccggcaaguccuccaucaugcgcuccgacgcccccaucggcaagugcaacuccgagugcaucacccccaacggcuccauccccaacgacaagcccuuccagaacgucaaccgcaucaccuacggcgccugcccccgcuacaucaagcagaacacccucaagcucgccaccggcaugcgcaacguccccgagaagcagacccgcggcaucuucggcgccaucgccggcuucaucgagaacggcugggagggcauggucgacggcugguacggcuuccgccaccagaacuccgagggcaccggccaggccgccgaccucaaguccacccaggccgccaucaaccagaucaacggcaagcucaaccgccucaucggcaagaccaacgagaaguuccaccagaucgagaaggaguucuccgaggucgagggccgcauccaggaccucgagaaguacgucgaggacaccaagaucgaccucugguccuacaacgccgagcuccucgucgcccucgagaaccagcacaccaucgaccucaccgacuccgagaugaacaagcucuucgagcgcaccaagaagcagcuccgcgagaacgccgaggacaugggcaacggcugcuucaagaucuaccacaagugcgacaacgccugcaucggcuccauccgcaacggcaccuacgaccacgacgucuaccgcgacgaggcccucaacaaccgcuuccagaucaagggcgucgagcucaaguccggcuacaaggacuggaucaucuggaucuccuucgccaucuccugcuuccuccucugcgucgcccuccucggcuucaucaugugggccugccagaagggcaacauccgcugcaacaucugcaucuga

SEQ ID NO: 104898 - RNA, 1701 nt, Artificial Sequence; identical to SEQ ID NO: 97789
  derived and/or modified CDS sequence (opt2) from hemagglutinin__InfluenzaA__AFJ77957

SEQ ID NO: 104899 - RNA, 1701 nt, Artificial Sequence; identical to SEQ ID NO: 96666
  derived and/or modified CDS sequence (opt2) from hemagglutinin__InfluenzaA__AFJ77968

SEQ ID NO: 104900 - RNA, 1701 nt, Artificial Sequence
  derived and/or modified CDS sequence (opt2) from hemagglutinin__InfluenzaA__AFJ77979
augaagaccaucaucgcccucuccuacauccucugccucgucuucgcccagaagcuccccggcaacgacaacuccaccgccacccucugccucggccaccacgccguccccaacggcaccaucgucaagaccaucaccaacgaccagaucgaggucaccaacgccaccgagcucguccaguccuccuccaccggcggcaucugcgacuccccccaccagauccucgacggcgagaacugcacccucaucgacgcccuccucggcgacccccagugcgacggcuuccagaacaagaagugggaccucuucgucgagcgcuccaaggccuacuccaacugcuaccccuacgacguccccgacuacgccucccuccgcucccucgucgccuccuccggcacccucgaguucaacaacgaguccuucaacuggaccggcgucacccagaacggcaccuccuccgccugcaagcgccgcuccaacaacuccuucuucucccgccucaacuggcucacccaccucaaguucaaguaccccgcccucaacgucaccaugcccaacaacgagaaguucgacaagcucuacaucuggggcguccaccaccccggcaccgacaacgaccagaucuuccucuacgcccaggccuccggccgcaucaccgucuccaccaagcgcucccagcagaccgucauccccaacaucggcucccgcccccgcguccgcaacauccccucccgcaucuccaucuacuggaccaucgucaagcccggcgacauccuccucaucaacuccaccggcaaccucaucgccccccgcggcuacuucaagauccgcuccggcaaguccuccaucaugcgcuccgacgcccccaucggcaagugcaacuccgagugcaucacccccaacggcuccauccccaacgacaagcccuuccagaacgucaaccgcaucaccuacggcgccugcccccgcuacgucaagcagaacacccucaagcucgccaccggcaugcgcaacguccccgagaagcagacccgcggcaucuucggcgccaucgccggcuucaucgagaacggcugggagggcauggucgacggcugguacggcuuccgccaccagaacuccgagggcaucggccaggccgccgaccucaaguccacccaggccgccaucaaccagaucaacggcaagcucaaccgccucaucggcaagaccaacgagaaguuccaccagaucgagaaggaguucuccgaggucgagggccgcauccaggaccucgagaaguacgucgaggacaccaagaucgaccucugguccuacaacgccgagcuccucgucgcccucgagaaccagcacaccaucgaccucaccgacuccgagaugaacaagcucuucgagcgcaccaagaagcagcuccgcgagaacgccgaggacaugggcaacggcugcuucaagaucuaccacaagugcgacaacgccugcaucggcuccauccgcaacggcaccuacgaccacgacgucuaccgcgacgaggcccucaacaaccgcuuccagaucaagggcgucgagcuccgcuccggcuacaaggacuggauccucuggaucuccuucgccaucuccugcuuccuccucugcgucgcccuccucggcuucaucaugugggccugccagaagggcaacauccgcugcaacaucugcaucuga

SEQ ID NO: 104901 - RNA, 1701 nt, Artificial Sequence
  derived and/or modified CDS sequence (opt2) from hemagglutinin__InfluenzaA__AFJ77990
augaagaccaucaucgcccucuccuacauccucugccucgucuucgcccagaagcuccccggcaacgacaacuccaccgccacccucugccucggccaccacgccguccccaacggcaccaucgucaagaccaucaccaacgaccagaucgaggucaccaacgccaccgagcucguccaguccuccuccaccggcggcaucugcgacuccccccaccagauccucgacggcgagaacugcacccucaucgacgcccuccucggcgacccccagugcgacggcuuccagaacaagaagugggaccucuucgucgagcgcuccaaggccuacuccaacugcuaccccuacgacguccccgacuacgccucccuccgcucccucgucgccuccuccggcacccucgaguucaacaacgaguccuucaacuggaccggcgucacccagaacggcaccuccuccgccugcaagcgccgcuccaacaacuccuucuucucccgccucaacuggcucacccaccucaaguucaaguaccccgcccucaacgucaccaugcccaacaacgagaaguucgacaagcucuacaucuggggcguccaccaccccggcaccgacaacgaccagaucuuccucuacgcccaggccuccggccgcaucaccgucuccaccaagcgcucccagcagaccgucauccccaacaucggcucccgcccccgcguccgcaacauccccucccgcaucuccaucuacuggaccaucgucaagcccggcgacauccuccucaucaacuccaccggcaaccucaucgccccccgcggcuacuucaagauccgcuccggcaaguccuccaucaugcgcuccgacgcccccaucggcaagugcaacuccgagugcaucacccccaacggcuccauccccaacgacaagcccuuccagaacgucaaccgcaucaccuacggcgccugcccccgcuacgucaagcagaacacccucaagcucgccaccggcaugcgcaacguccccgagaagcagacccgcggcaucuucggcgccaucgccggcuucaucgagaacggcugggagggcauggucgacggcugguacggcuuccgccaccagaacuccgagggcaucggccaggccgccgaccucaaguccacccaggccgccaucaaccagaucaacggcaagcucaaccgccucaucggcaagaccaacgagaaguuccaccagaucgagaaggaguucuccgaggucgagggccgcauccaggaccucgagaaguacgucgaggacaccaagaucgaccucugguccuacaacgccgagcuccucgucgcccucgagaaccagcacaccaucgaccucaccgacuccgagaugaacaagcucuucgagcgcaccaagaagcagcuccgcgagaacgccgaggacaugggcaacggcugcuucaagaucuaccacaagugcgacaacgccugcaucggcuccauccgcaacggcaccuacgaccacgacgaguaccgcgacgaggcccucaacaaccgcuuccagaucaagggcgucgagcucaaguccggcuacaaggacuggauccucuggaucuccuucgccaucuccugcuuccuccucugcgucacccuccucggcuucaucaugugggccugccagaagggcaacauccgcugcaacaucugcaucuga

SEQ ID NO: 104902 - RNA, 1701 nt, Artificial Sequence
  derived and/or modified CDS sequence (opt2) from hemagglutinin__InfluenzaA__AFJ78001
augaagaccaucaucgcccucuccuacauccucugccucgucuucgcccagaagcuccccggcaacgacaacuccaccgccacccucugccucggccaccacgccguccccaacggcaccaucgucaagaccaucaccaacgaccagaucgaggucaccaacgccaccgagcucguccaguccuccuccaccggcggcaucugcgacuccccccaccagauccucgacggcaagaacugcacccucaucgacgcccuccucggcgacccccagugcgacgacuuccagaacaagaagugggaccucuucgucgagcgcuccaaggccuacuccaacugcuaccccuacgacguccccgacuacgccucccuccgcucccucgucgccuccuccggcacccucgaguucaacaacgaguccuucaacuggaccggcgucacccagaacggcaccuccuccgccugcaagcgccgcuccaacaacuccuucuucucccgccucaacuggcucacccaccucaaguucaaguaccccgcccucaacgucaccaugcccaacaacgagaaguucgacaagcucuacaucuggggcguccaccaccccggcaccgacaacgaccagaucuuccucuacgcccaggccuccggccgcaucaccgucuccaccaagcgcucccagcagaccgucauccccaacaucggcucccgcccccgcguccgcaacauccccucccgcaucuccaucuacuggaccaucgucaagcccggcgacauccuccucaucaacuccaccggcaaccucaucgccccccgcggcuacuucaagauccgcuccggcaaguccuccaucaugcgcuccgacgcccccaucggcaagugcaacuccgagugcaucacccccaacggcuccauccccaacgacaagcccuuccagaacgucaaccgcaucaccuacggcgccugcccccgcuacgucaagcagaacacccucaagcucgccaccggcaugcgcaacguccccgagaagcagacccgcggcaucuucggcgccaucgccggcuucaucgagaacggcugggagggcauggucgacggcugguacggcuuccgccaccagaacuccgagggcaucggccaggccgccgaccucaaguccacccaggccgccaucaaccagaucaacggcaagcucaaccgccucaucggcaagaccaacgagaaguuccaccagaucgagaaggaguucuccgaggucgagggccgcauccaggaccucgagaaguacgucgaggacaccaagaucgaccucugguccuacaacgccgagcuccucgucgcccucgagaaccagcacaccaucgaccucaccgacuccgagaugaacaagcucuucgagcgcaccaagaagcagcuccgcgagaacgccgaggacaugggcaacggcugcuucaagaucuaccacaagugcgacaacgccugcaucggcuccauccgcaacggcaccuacgaccacgacgucuaccgcgacgaggcccucaacaaccgcuuccagaucaagggcgucgagcucaaguccggcuacaaggacuggauccucuggaucuccuucgccaucuccugcuuccuccucugcgucacccuccucggcuucaucaugugggccugccagaagggcaacauccgcugcaacaucugcaucuga

SEQ ID NO: 104903 - RNA, 1701 nt, Artificial Sequence
  derived and/or modified CDS sequence (opt2) from hemagglutinin__InfluenzaA__AFJ78012
augaagaccaucaucgcccucuccuacauccucugccucgucuucgcccagaagcuccccggcaacgacaacuccaccgccacccucugccucggccaccacgccguccccaacggcaccaucgucaagaccaucaccaacgaccagaucgaggucaccaacgccaccgagcucguccaguccuccuccaccggcggcaucugcgacuccccccaccagauccucgacggcgagaacugcacccucaucgacgcccuccucggcgacccccagugcgacggcuuccagaacaagaagugggaccucuucgucgagcgcuccaaggcccacuccaacugcuaccccuacgacguccccgacuacgccucccuccgcucccucgucgccuccuccggcacccucgaguucaacaacgaguccuucaacuggaccggcgucacccagaacggcaccuccuccgccugcaagcgccgcuccaacaacuccuucuucucccgccucaacuggcucacccaccucaaguucaaguaccccgcccucaacgucaccaugcccaacaacgagaaguucgacaagcucuacaucuggggcguccaccaccccggcaccgacaacgaccagaucuuccucuacgcccaggccuccggccgcaucaccgucuccaccaagcgcucccagcagaccgucauccccaacaucggcucccgcccccgcguccgcaacauccccucccgcaucuccaucuacuggaccaucgucaagcccggcgacauccuccucaucaacuccaccggcaaccucaucgccccccgcggcuacuucaagauccgcuccggcaaguccuccaucaugcgcuccgacgcccccaucggcaagugcaacuccgagugcaucacccccaacggcuccauccccaacgacaagcccuuccagaacgucaaccgcaucaccuacggcgccugcccccgcuacgucaagcagaacacccucaagcucgccaccggcaugcgcaacguccccgagaagcagacccgcggcaucuucggcgccaucgccggcuucaucgagaacggcugggagggcauggucgacggcugguacggcuuccgccaccagaacuccgagggcaucggccaggccgccgaccucaaguccacccaggccgccaucgaccagaucaacggcaagcucaaccgccucaucggcaagaccaacgagaaguuccaccagaucgagaaggaguucuccgaggucgagggccgcauccaggaccucgagaaguacgucgaggacaccaagaucgaccucugguccuacaacgccgagcuccucgucgcccucgagaaccagcacaccaucgaccucaccgacuccgagaugaacaagcucuucgagcgcaccaagaagcagcuccgcgagaacgccgaggacaugggcaacggcugcuucaagaucuaccacaagugcgacaacgccugcaucggcuccauccgcaacggcaccuacgaccacgacgucuaccgcgacgaggcccucaacaaccgcuuccagaucaagggcgucgagcucaaguccggcuacaaggacuggauccucuggaucuccuucgccaucuccugcuuccuccucugcgucgcccuccucggcuucaucaugugggccugccagaagggcaacauccgcugcaacaucugcaucuga

SEQ ID NO: 104904 - RNA, 1701 nt, Artificial Sequence
  derived and/or modified CDS sequence (opt2) from hemagglutinin__InfluenzaA__AFJ78023
augaagaccaucaucgcccucuccuacauccucugccucgucuucgcccagaagcuccccggcaacgacaacuccaccgccacccucugccucggccaccacgccguccccaacggcaccaucgucaagaccaucaccaacgaccagaucgaggucaccaacgccaccgagcucguccaguccuccuccaccggcggcaucugcgacuccccccaccagauccucgacggcgagaacugcacccucaucgacgcccuccucggcgacccccagugcgacggcuuccagaacaagaagugggaccucuucgucgagcgcuccaaggccuacuccaacugcuaccccuacgacguccccgacuacgccucccuccgcucccucgucgccuccuccggcacccucgaguucaacaacgaguccuucaacuggaccggcgucacccagaacggcaccuccuccgccugcaagcgcaaguccaacaacuccuucuucucccgccucaacuggcucacccaccucaaguucaaguaccccgcccucaacgucaccaugcccaacaacgagaaguucgacaagcucuacaucuggggcguccaccaccccggcaccgacaacgaccagaucuuccucuacgcccaggccuccggccgcaucaccgucuccaccaagcgcucccagcagaccgucauccccaacaucggcucccgcccccgcguccgcaacauccccucccgcaucuccaucuacuggaccaucgucaagcccggcgacauccuccucaucaacuccaccggcaaccucaucgccccccgcggcuacuucaagauccgcuccggcaaguccuccaucaugcgcuccgacgcccccaucggcaagugcaacuccgagugcaucacccccaacggcuccauccccaacgacaagcccuuccagaacgucaaccgcaucaccuacggcgccugcccccgcuacgucaagcagaacacccucaagcucgccaccggcaugcgcaacguccccgagaagcagacccgcggcaucuucggcgccaucgccggcuucaucgagaacggcugggagggcauggucgacggcugguacggcuuccgccaccagaacuccgagggcaucggccaggccgccgaccucaaguccacccaggccgccaucaaccagaucaacggcaagcucaaccgccucaucggcaagaccaacgagaaguuccaccagaucgagaaggaguucuccgaggucgagggccgcauccaggaccucgagaaguacgucgaggacaccaagaucgaccucugguccuacaacgccgagcuccucgucgcccucgagaaccagcacaccaucgaccucaccgacuccgagaugaacaagcucuucgagcgcaccaagaagcagcuccgcgagaacgccgaggacaugggcaacggcugcuucaagaucuaccacaagugcgacaacgccugcaucggcuccauccgcaacggcaccuacgaccacgacgucuaccgcgacgaggcccucaacaaccgcuuccagaucaagggcgucgagcucaaguccggcuacaaggacuggauccucuggaucuccuucgccaucuccugcuuccuccucugcgucgcccuccucggcuucaucaugugggccugccagaagggcaacauccgcugcaacaucugcaucuga

SEQ ID NO: 104905 - RNA, 1701 nt, Artificial Sequence; identical to SEQ ID NO: 96666
  derived and/or modified CDS sequence (opt2) from hemagglutinin__InfluenzaA__AFJ78034

SEQ ID NO: 104906 - RNA, 1701 nt, Artificial Sequence
  derived and/or modified CDS sequence (opt2) from hemagglutinin__InfluenzaA__AFJ78045
augaagaccaucaucgcccucuccuacauccucugccucgucuucgcccagaagcuccccggcaacgacaacuccaccgccacccucugccucggccaccacgccguccccaacggcaccaucgucaagaccaucaccaacgaccagaucgaggucaccaacgccaccgagcucguccaguccuccuccaccggcggcaucugcgacuccccccaccagauccucgacggcgagaacugcacccucaucgacgcccuccucggcgacccccagugcgacggcuuccagaacaagaagugggaccucuucgucgagcgcucccgcgccuacuccaacugcuaccccuacgacguccccgacuacgccucccuccgcucccucgucgccuccuccggcacccucgaguucaacaacgaguccuucaacuggaccggcgucacccagaacggcaccuccuccgccugcaagcgccgcuccaacaacuccuucuucucccgccucaacuggcucacccaccucaaguucaaguaccccgcccucaacgucaccaugcccaacaacgagaaguucgacaagcucuacaucuggggcguccaccaccccggcaccgacaacgaccagaucuuccucuacgcccaggccuccggccgcaucaccgucuccaccaagcgcucccagcagaccgucauccccaacaucggcucccgcccccgcguccgcaacauccccucccgcaucuccaucuacuggaccaucgucaagcccggcgacauccuccucaucaacuccaccggcaaccucaucgccccccgcggcuacuucaagauccgcuccggcaaguccuccaucaugcgcuccgacgcccccaucggcaagugcaacuccgagugcaucacccccaacggcuccauccccaacgacaagcccuuccagaacgucaaccgcaucaccuacggcgccugcccccgcuacgucaagcagaacacccucaagcucgccaccggcaugcgcaacguccccgagaagcagacccgcggcaucuucggcgccaucgccggcuucaucgagaacggcugggagggcauggucgacggcugguacggcuuccgccaccagaacuccgagggcaugggccaggccgccgaccucaaguccacccaggccgccaucaaccagaucaacggcaagcucaaccgccucaucggcaagaccaacgagaaguuccaccagaucgagaaggaguucuccgaggucgagggccgcauccaggaccucgagaaguacgucgaggacaccaagaucgaccucugguccuacaacgccgagcuccucgucgcccucgagaaccagcacaccaucgaccucaccgacuccgagaugaacaagcucuucgagcgcaccaagaagcagcuccgcgagaacgccgaggacaugggcaacggcugcuucaagaucuaccacaagugcgacaacgccugcaucggcuccauccgcaacggcaccuacgaccacgacgucuaccgcgacgaggcccucaacaaccgcuuccagaucaagggcgucgagcucaaguccggcuacaaggacuggauccucuggaucuccuucgccaucuccugcuuccuccucugcgucgcccuccucggcuucaucaugugggccugccagaagggcaacaucaagugcaacaucugcaucuga

SEQ ID NO: 104907 - RNA, 1701 nt, Artificial Sequence; identical to SEQ ID NO: 96666
  derived and/or modified CDS sequence (opt2) from hemagglutinin__InfluenzaA__AFJ78056

SEQ ID NO: 104908 - RNA, 1701 nt, Artificial Sequence
  derived and/or modified CDS sequence (opt2) from hemagglutinin__InfluenzaA__AFJ78067
augaagaccaucaucgcccucuccuacauccucugccucgucuucgcccagaagcuccccggcaacgacaacuccaccgccacccucugccucggccaccacgccguccccaacggcaccaucgucaagaccaucaccaacgaccagaucgaggucaccaacgccaccgagcucguccaguccuccuccaccggcggcaucugcgacuccccccaccagauccucgacggcgagaacugcacccucaucgacgcccuccucggcgacccccagugcgacggcuuccagaacaagaagugggaccucuucgucgagcgcuccaaggccuacuccaacugcuaccccuacgacguccccgacuacgccucccuccgcucccucgucgccuccuccggcacccucgaguucaacaacgaguccuucaacuggaccggcgucacccagaacggcaccuccuccgccugcaagcgccgcuccaacaacuccuucuucucccgccucaacuggcucacccaccucaaguucaaguaccccgcccucaacgucaccaugcccaacaacgagaaguucgacaagcucuacaucuggggcguccaccaccccggcaccgacaacgaccagaucuuccucuacgcccaggccuccggccgcaucaccgucuccaccaagcgcucccagcagaccgucauccccaacaucggcucccgcccccgcguccgcaacauccccucccgcaucuccaucuacuggaccaucgucaagcccggcgacauccuccucaucaacuccaccggcaaccucaucgccccccgcggcuacuucaagauccgcuccggccgcuccuccaucaugcgcuccgacgcccccaucggcaagugcaacuccgagugcaucacccccaacggcuccauccccaacgacaagcccuuccagaacgucaaccgcaucaccuacggcgccugcccccgcuacgucaagcagaacacccucaagcucgccaccggcaugcgcaacguccccgagaagcagacccgcggcaucuucggcgccaucgccggcuucaucgagaacggcugggagggcauggucgacggcugguacggcuuccgccaccagaacuccgagggcaucggccaggccgccgaccucaaguccacccaggccgccaucaaccagaucaacggcaagcucaaccgccucaucggcaagaccaacgagaaguuccaccagaucgagaaggaguucuccgaggucgagggccgcauccaggaccucgagaaguacgucgaggacaccaagaucgaccucugguccuacaacgccgagcuccucgucgcccucgagaaccagcacaccaucgaccucaccgacuccgagaugaacaagcucuucgagcgcaccaagaagcagcuccgcgagaacgccgaggacaugggcaacggcugcuucaagaucuaccacaagugcgacaacgccugcaucggcuccauccgcaacggcaccuacgaccacgacgucuaccgcgacgaggcccucaacaaccgcuuccagaucaagggcgucgagcucaaguccggcuacaaggacuggauccucuggaucuccuucgccaucuccugcuuccuccucugcgucgcccuccucggcuucaucaugugggccugccagaagggcaacauccgcugcaacaucugcaucuga

SEQ ID NO: 104909 - RNA, 1701 nt, Artificial Sequence
  derived and/or modified CDS sequence (opt2) from hemagglutinin__InfluenzaA__AFJ78078
augaagaccaucaucgcccucuccuacauccucugccucgucuucgcccagaagcuccccggcaacgacaacuccaccgccacccucugccucggccaccacgccguccccaacggcaccaucgucaagaccaucaccaacgaccagaucgaggucaccaacgccaccgagcucguccaguccuccuccaccggcggcaucugcgacuccccccaccagauccucgacggcgagaacugcacccucaucgacgcccuccucggcgacccccagugcgacggcuuccagaacaagaagugggaccucuucgucgagcgcuccaaggccuacuccaacugcuaccccuacgacguccccgacuacgccucccuccgcucccucgucgccuccuccggcacccucgaguucaacaacgaguccuucaacuggaccggcgucacccagaacggcaccuccuccgccugcaagcgccgcuccaacaacuccuucuucucccgccucaacuggcucacccaccucaaguucaaguaccccgcccucaacgucaccaugcccaacaacgagaaguucgacaagcucuacaucuggggcguccaccaccccggcaccgacaacgaccagaucuuccucuacgcccaggccuccggccgcaucaccgucuccaccaagcgcucccagcagaccgucauccccaacaucggcucccgcccccgcguccgcaacauccccucccgcaucuccaucuacuggaccaucgucaagcccggcgacauccuccucaucaacuccaccggcaaccucaucgccccccgcggcuacuucaagauccgcuccggcaaguccuccaucaugcgcuccgacgcccccaucgacaagugcaacuccgagugcaucacccccaacggcuccauccccaacgacaagcccuuccagaacgucaaccgcaucaccuacggcgccugcccccgcuacgucaagcagaacacccucaagcucgccaccggcaugcgcaacguccccgagaagcagacccgcggcaucuucggcgccaucgccggcuucaucgagaacggcugggagggcauggucgacggcugguacggcuuccgccaccagaacuccgagggcaucggccaggccgccgaccucaaguccacccaggccgccaucgaccagaucaacggcaagcucaaccgccucaucggcaagaccaacgagaaguuccaccagaucgagaaggaguucuccgaggucgagggccgcauccaggaccucgagaaguacgucgaggacaccaagaucgaccucugguccuacaacgccgagcuccucgucgcccucgagaaccagcacaccaucgaccucaccgacuccgagaugaacaagcucuucgagaagaccaagaagcagcuccgcgagaacgccgaggacaugggcaacggcugcuucaagaucuaccacaagugcgacaacgccugcaucggcuccauccgcaacggcaccuacgaccacgacgucuaccgcgacgaggcccucaacaaccgcuuccagaucaagggcgucgagcucaaguccggcuacaaggacuggauccucuggaucuccuucgccaucuccugcuuccuccucugcgucgcccuccucggcuucaucaugugggccugccagaagggcaacauccgcugcaacaucugcaucuga

SEQ ID NO: 104910 - RNA, 1701 nt, Artificial Sequence; identical to SEQ ID NO: 104833
  derived and/or modified CDS sequence (opt2) from hemagglutinin__InfluenzaA__AFJ78089

SEQ ID NO: 104911 - RNA, 1701 nt, Artificial Sequence; identical to SEQ ID NO: 97864
  derived and/or modified CDS sequence (opt2) from hemagglutinin__InfluenzaA__AFJ78100

SEQ ID NO: 104912 - RNA, 1701 nt, Artificial Sequence
  derived and/or modified CDS sequence (opt2) from hemagglutinin__InfluenzaA__AFJ78111
augaagaccaucaucgcccucuccuacauccucugccucgucuucgcccagaagcuccccggcaacgacaacuccaccgccacccucugccucggccaccacgccguccccaacggcaccaucgucaagaccaucaccaacgaccagaucgaggucaccaacgccaccgagcucguccaguccuccuccaccggcggcaucugcgacuccccccaccagauccucgacggcgagaacugcacccucaucgacgcccuccucggcgacccccagugcgacggcuuccagaacaagaagugggaccucuucgucgagcgcuccaaggccuacuccaacugcuaccccuacgacguccccgacuacgccucccuccgcucccucgucgccuccuccggcacccucgaguucaacaacgaguccuucaacuggaccggcgucacccagaacggcaccuccuccgccugcaagcgccgcuccaacaacuccuucuucucccgccucaacuggcucacccaccucaaguucaaguaccccgcccucaacgucaccaugcccaacaacgagaacuucgacaagcucuacaucuggggcguccaccaccccggcaccgacaacgaccagaucuuccucuacgcccaggccuccggccgcaucaccgucuccaccaagcgcucccagcagaccgucauccccaacaucggcucccgcccccgcguccgcaacauccccucccgcaucuccaucuacuggaccaucgucaagcccggcgacauccuccucaucaacuccaccggcaaccucaucgccccccgcggcuacuucaagauccgcuccggcaaguccuccaucaugcgcuccgacgcccccaucggcaagugcaacuccgagugcaucacccccaacggcuccauccccaacgacaagcccuuccagaacgucaaccgcaucaccuacggcgccugcccccgcuacgucaagcagaacacccucaagcucgccaccggcaugcgcaacguccccgagaagcagacccgcggcaucuucggcgccaucgccggcuucaucgagaacggcugggagggcauggucgacggcugguacggcuuccgccaccagaacuccgagggcaucggccaggccgccgaccucaaguccacccaggccgccaucgaccagaucaacggcaagcucaaccgccucaucggcaagaccaacgagaaguuccaccagaucgagaaggaguucuccgaggucgagggccgcauccaggaccucgagaaguacgucgaggacaccaagaucgaccucugguccuacaacgccgagcuccucgucgcccucgagaaccagcacaccaucgaccucaccgacuccgagaugaacaagcucuucgagaagaccaagaagcagcuccgcgagaacgccgaggacaugggcaacggcugcuucaagaucuaccacaagugcgacaacgccugcaucggcuccauccgcaacggcaccuacgaccacgacgucuaccgcgacgaggcccucaacaaccgcuuccagaucaagggcgucgagcucaaguccggcuacaaggacuggauccucuggaucuccuucgccaucuccugcuuccuccucugcgucgcccuccucggcuucaucaugugggccugccagaagggcaacauccgcugcaacaucugcaucuga

SEQ ID NO: 104913 - RNA, 1701 nt, Artificial Sequence
  derived and/or modified CDS sequence (opt2) from hemagglutinin__InfluenzaA__AFJ78122
augaagaccaucaucgcccucuccuacauccucugccucaucuucgcccagaagcuccccggcaacgacaacuccaccgccacccucugccucggccaccacgccguccccaacggcaccaucgucaagaccaucaccaacgaccagaucgaggucaccaacgccaccgagcucguccaguccuccuccaccggcggcaucugcgacuccccccaccagauccucgacggcgagaacugcacccucaucgacgcccuccucggcgacccccagugcgacggcuuccagaacaagaagugggaccucuucgucgagcgcuccaaggccuacuccaacugcuaccccuacgacguccccgacuacgccucccuccgcucccucgucgccuccuccggcacccucgaguucaacaacgaguccuucaacuggaccggcgucacccagaacggcaccuccuccgccugcaagcgccgcuccaacaacuccuucuucucccgccucaacuggcucacccaccucaaguucaaguaccccgcccucaacgucaccaugcccaacaacgagaaguucgacaagcucuacaucuggggcguccaccaccccggcaccgacaacgaccagaucuuccucuacgcccaggccuccggccgcaucaccgucuccaccaagcgcucccagcagaccgucauccccaacaucggcucccgcccccgcguccgcaacauccccucccgcaucuccaucuacuggaccaucgucaagcccggcgacauccuccucaucaacuccaccggcaaccucaucgccccccgcggcuacuucaagauccgcuccggccgcuccuccaucaugcgcuccgacgcccccaucgacaagugcaacuccgagugcaucacccccaacggcuccauccccaacgacaagcccuuccagaacgucaaccgcaucaccuacggcgccugcccccgcuacgucaagcagaacacccucaagcucgccaccggcaugcgcaacguccccgagaagcagacccgcggcaucuucggcgccaucgccggcuucaucgagaacggcugggagggcauggucgacggcugguacggcuuccgccaccagaacuccgagggcaucggccaggccgccgaccucaaguccacccaggccgccaucgaccagaucaacggcaagcucaaccgccucauccgcaagaccaacgagaaguuccaccagaucgagaaggaguucuccgaggucgagggccgcauccaggaccucgagaaguacgucgaggacaccaagaucgaccucugguccuacaacgccgagcuccucgucgcccucgagaaccagcacaccaucgaccucaccgacuccgagaugaacaagcucuucgagaagaccaagaagcagcuccgcgagaacgccgaggacaugggcaacggcugcuucaagaucuaccacaagugcgacaacgccugcaucggcuccauccgcaacggcaccuacgaccacgacgucuaccgcgacgaggcccucaacaaccgcuuccagaucaagggcgucgagcucaaguccggcuacaaggacuggauccucuggaucuccuucgccaucuccugcuuccuccucugcgucgcccuccucggcuucaucaugugggccugccagaagggcaacauccgcugcaacaucugcaucuga

SEQ ID NO: 104914 - RNA, 1701 nt, Artificial Sequence
  derived and/or modified CDS sequence (opt2) from hemagglutinin__InfluenzaA__AFJ78144
augaagaccaucaucgcccucuccuacauccucugccucgucuucgcccagaagcuccccggcaacgacaacuccaccgccacccucugccucggccaccacgccguccccaacggcaccaucgucaagaccaucaccaacgaccagaucgaggucaccaacgccaccgagcucguccaguccuccuccaccggcgagaucugcgacuccccccaccagauccucgacggcgagaacugcacccucaucgacgcccuccucggcgacccccagugcgacggcuuccagaacaagaagugggaccucuucgucgagcgcuccaaggccuacuccaacugcuaccccuacgacguccccgacuacgccucccuccgcucccucgucgccuccuccggcacccucgaguucaacaacgaguccuucaacuggaccggcgucacccagaacggcaccuccuccuccugcauccgccgcuccaacaacuccuucuucucccgccucaacuggcucacccaccucaaguucaaguaccccgcccucaacgucaccaugcccaacaacgagaaguucgacaagcucuacaucuggggcguccaccaccccggcaccgacaacgaccagaucuuccucuacgcccaggccuccggccgcaucaccgucuccaccaagcgcucccagcagaccgucauccccaacaucggcucccgcccccgcguccgcaacauccccucccgcaucuccaucuacuggaccaucgucaagcccggcgacauccuccucaucaacuccaccggcaaccucaucgccccccgcggcuacuucaagauccgcuccggcaaguccuccaucaugcgcuccgacgcccccaucggcaagugcaacuccgagugcaucacccccaacggcuccauccccaacgacaagcccuuccagaacgucaaccgcaucaccuacggcgccugcccccgcuacgucaagcagaacacccucaagcucgccaccggcaugcgcaacguccccgagaagcagacccgcggcaucuucggcgccaucgccggcuucaucgagaacggcugggagggcauggucgacggcugguacggcuuccgccaccagaacuccgagggcaucggccaggccgccgaccucaaguccacccaggccgccaucgaccagaucaacggcaagcucaaccgccucaucggcaagaccaacgagaaguuccaccagaucgagaaggaguucuccgaggucgagggccgcauccaggaccucgagaaguacgucgaggacaccaaggucgaccucugguccuacaacgccgagcuccucgucgcccucgagaaccagcacaccaucgaccucaccgacuccgagaugaacaagcucuucgagaagaccaagaagcagcuccgcgagaacgccgaggacaugggcaacggcugcuucaagaucuaccacaagugcgacaacgccugcaucggcuccauccgcaacggcaccuacgaccacgacgucuaccgcgacgaggcccucaacaaccgcuuccagaucaagggcgucgagcucaaguccggcuacaaggacuggauccucuggaucuccuucgccaucuccugcuuccuccucugcgucgcccuccucggcuucaucaugugggccugccagaagggcaacauccgcugcaacaucugcaucuga

SEQ ID NO: 104915 - RNA, 1701 nt, Artificial Sequence; identical to SEQ ID NO: 104914
  derived and/or modified CDS sequence (opt2) from hemagglutinin__InfluenzaA__AFJ78155

SEQ ID NO: 104916 - RNA, 1701 nt, Artificial Sequence
  derived and/or modified CDS sequence (opt2) from hemagglutinin__InfluenzaA__AFJ78166
augaagaccaucaucgcccucuccuacauccucugccucgucuucgcccagaagcuccccggcaacgacaacuccaccgccacccucugccucggccaccacgccguccccaacggcaccaucgucaagaccaucaccaacgaccagaucgaggucaccaacgccaccgagcucguccaguccuccuccaccggcgagaucugcgacuccccccaccagauccucgacggcgagaacugcacccucaucgacgcccuccucggcgacccccagugcgacggcuuccagaacaagaagugggaccucuucgucgagcgcuccaaggccuacuccaacugcuaccccuacgacguccccgacuacgccucccuccgcucccucgucgccuccuccggcacccucgaguucaacaacgaguccuucaacuggaccggcgucacccagaacggcaccuccuccgccugcauccgccgcuccaacaacuccuucuucucccgccucaacuggcucacccaccucaaguucaaguaccccgcccucaacgucaccaugcccaacaacgaggaguucgacaagcucuacaucuggggcguccaccaccccggcaccgacaacgaccagaucuuccucuacgcccaggccuccggccgcaucaccgucuccaccaagcgcucccagcagaccgucauccccaacaucggcucccgcccccgcguccgcaacauccccucccgcaucuccaucuacuggaccaucgucaagcccggcgacauccuccucaucaacuccaccggcaaccucaucgccccccgcggcuacuucaagauccgcuccggcaaguccuccaucaugcgcuccgacgcccccaucggcaagugcaacuccgagugcaucacccccaacggcuccauccccaacgacaagcccuuccagaacgucaaccgcaucaccuacggcgccugcccccgcuacgucaagcagaacacccucaagcucgccaccggcaugcgcaacguccccgagaagcagacccgcggcaucuucggcgccaucgccggcuucaucgagaacggcugggagggcauggucgacggcugguacggcuuccgccaccagaacuccgagggcaucggccaggccgccgaccucaaguccacccaggccgccaucgaccagaucaacggcaagcucaaccgccucaucggcaagaccaacgagaaguuccaccagaucgagaaggaguucuccgaggucgagggccgcauccaggaccucgagaaguacgucgaggacaccaagaucgaccucugguccuacaacgccgagcuccucgucgcccucgagaaccagcacaccaucgaccucaccgacuccgagaugaacaagcucuucgagaagaccaagcgccagcuccgcgagaacgccgaggacaugggcaacggcugcuucaagaucuaccacaagugcgacaacgccugcaucggcuccauccgcaacggcaccuacgaccacgacgucuaccgcgacgaggcccucaacaaccgcuuccagaucaagggcgucgagcucaaguccggcuacaaggacuggauccucuggaucuccuucgccaucuccugcuuccuccucugcgucgcccuccucggcuucaucaugugggccugccagaagggcaacauccgcugcaacaucugcaucuga

SEQ ID NO: 104917 - RNA, 1701 nt, Artificial Sequence; identical to SEQ ID NO: 97765
  derived and/or modified CDS sequence (opt2) from hemagglutinin__InfluenzaA__AFJ78177

SEQ ID NO: 104918 - RNA, 1701 nt, Artificial Sequence
  derived and/or modified CDS sequence (opt2) from hemagglutinin__InfluenzaA__AFJ78188
augaagaccaucaucgcccucuccuacauccucugccucgucuucgcccagaagcuccccggcaacgacaacuccaccgccacccucugccucggccaccacgccguccccaacggcaccaucgucaagaccaucaccaacgaccagaucgaggucaccaacgccaccgagcucguccaguccuccuccaccggcgagaucugcgacuccccccaccagauccucgacggcgagaacugcacccucaucgacgcccuccucggcgacccccagugcgacggcuuccagaacaagaagugggaccucuucgucgagcgcuccaaggccuacuccaacugcuaccccuacgacguccccgacuacgccucccuccgcucccucgucgccuccuccggcacccucgaguucaacaacgaguccuucaacuggaccggcgucacccagaacggcaccuccuccgccugcauccgccgcuccaacaacuccuucuucucccgccucaacuggcucacccaccucaaguucaaguaccccgcccucaacgucaccaugcccaacaacgagaaguucgacaagcucuacaucuggggcguccaccaccccggcaccgacaacgaccagaucuuccucuacgcccaggccuccggccgcaucaccgucuccaccaagcgcucccagcagaccgucauccccaacaucggcucccgcccccgcauccgcaacauccccucccgcaucuccaucuacuggaccaucgucaagcccggcgacauccuccucaucaacuccaccggcaaccucaucgccccccgcggcuacuucaagauccgcuccggcaaguccuccaucaugcgcuccgacgcccccaucggcaagugcaacuccgagugcaucacccccaacggcuccauccccaacgacaagcccuuccagaacgucaaccgcaucaccuacggcgccugcccccgcuacgucaagcagaacacccucaagcucgccaccggcaugcgcaacguccccgagaagcagacccgcggcaucuucggcgccaucgccggcuucaucgagaacggcugggagggcauggucgacggcugguacggcuuccgccaccagaacuccgagggcaccggccaggccgccgaccucaaguccacccaggccgccaucgaccagaucaacggcaagcucaaccgccucaucggcaagaccaacgagaaguuccaccagaucgagaaggaguucuccgaggucgagggccgcauccaggaccucgagaaguacgucgaggacaccaagaucgaccucugguccuacaacgccgagcuccucgucgcccucgagaaccagcacaccaucgaccucaccgacuccgagaugaacaagcucuucgagaagaccaagaagcagcuccgcgagaacgccgaggacaugggcaacggcugcuucaagaucuaccacaagugcgacaacgccugcaucggcuccauccgcaacggcaccuacgaccacgacgucuaccgcgacgaggcccucaacaaccgcuuccagaucaagggcgucgagcucaaguccggcuacaaggacuggauccucuggaucuccuucgccaucuccugcuuccuccucugcgucgcccuccucggcuucaucaugugggccugccagaagggcaacauccgcugcaacaucugcaucuga

SEQ ID NO: 104919 - RNA, 1701 nt, Artificial Sequence
  derived and/or modified CDS sequence (opt2) from hemagglutinin__InfluenzaA__AFJ78210
augaagaccaucaucgcccucuccuacauccucugccucgucuucgcccagaagcuccccggcaacgacaacuccaccgccacccucugccucggccaccacgccguccccaacggcaccaucgucaagaccaucaccaacgaccagaucgaggucaccaacgccaccgagcucguccaguccuccuccaccggcgagaucugcgacuccccccaccagauccucgacggcgagaacugcacccucaucgacgcccuccucggcgacccccagugcgacggcuuccagaacaagaagugggaccucuucgucgagcgcuccaaggccuacuccaacugcuaccccuacgacguccccgacuacgccucccuccgcucccucgucgccuccuccggcacccucgaguucaacaacgaguccuucaacuggaccggcgucacccagaacggcaccuccuccgccugcauccgccgcuccaacaacuccuucuucucccgccucaacuggcucacccaccucaaguucaaguaccccgcccucaacgucaccaugcccaacaacgagaaguucgacaagcucuacaucuggggcguccaccaccccggcaccgacaacgaccagaucuuccucuacgcccaggccuccggccgcaucaccgucuccaccaagcgcucccagcagaccgucauccccaacaucggcucccgcccccgcguccgcaacauccccucccgcaucuccaucuacuggaccaucgucaagcccggcgacauccuccucaucaacuccaccggcaaccucaucgccccccgcggcuacuucaagauccgcuccggcaaguccuccaucaugcgcuccgacgcccccaucggcaagugcaacuccgagugcaucacccccaacggcuccauccccaacgacaagcccuuccagaacgucaaccgcaucaccuacggcgccugcccccgcuacgucaagcagaacacccucaagcucgccaccggcaugcgcaacguccccgagaagcagacccgcggcaucuucggcgccaucgccggcuucaucgagaacggcugggagggcauggucgacggcugguacggcuuccgccaccagaacuccgagggcaccggccaggccgccgaccucaaguccacccaggccgccaucgaccagaucaacggcaagcucaaccgccucaucggcaagaccaacgagaaguuccaccagaucgagaaggaguucuccgaggucgagggccgcauccaggaccucgagaaguacgucgaggacaccaagaucgaccucugguccuacaacgccgagcuccucgucgcccucgagaaccagcacaccaucgaccucaccgacuccgagaugaacaagcucuucgagaagaccaagaagcagcuccgcgagaacgccgaggacaugggcaacggcugcuucaagaucuaccacaagugcgacaacgccugcaucggcuccauccgcaacggcaccuacgaccacgacgucuaccgcgacgaggcccucaacaaccgcuuccagaucaagggcaucgagcucaaguccggcuacaaggacuggauccucuggaucuccuucgccaucuccugcuuccuccucugcgucgcccuccucggcuucaucaugugggccugccagaagggcaacauccgcugcaacaucugcaucuga

SEQ ID NO: 104920 - RNA, 1701 nt, Artificial Sequence; identical to SEQ ID NO: 104844
  derived and/or modified CDS sequence (opt2) from hemagglutinin__InfluenzaA__AFJ78221

SEQ ID NO: 104921 - RNA, 1701 nt, Artificial Sequence
  derived and/or modified CDS sequence (opt2) from hemagglutinin__InfluenzaA__AFJ78232
augaagaccaucaucgcccucuccuacauccucugccucgucuucgcccagaagcuccccggcaacgacaacuccaccgccacccucugccucggccaccacgccguccccaacggcaccaucgucaagaccaucaccaacgaccagaucgaggucaccaacgccaccgagcucguccaguccuccuccaccggcaagaucugcgacuccccccaccagauccucgacggcgagaacugcacccucaucgacgcccuccucggcgacccccagugcgacggcuuccagaacaagaagugggaccucuucgucgagcgcuccaaggccuacuccaacugcuaccccuacgacguccccgacuacgccucccuccgcucccucgucgccuccuccggcacccucgaguucaacaacgaguccuucaacuggaccggcgucacccagaacggcaccuccuccgccugcauccgccgcuccaacaacuccuucuucucccgccucaacuggcucacccaccucaaguucaaguaccccgcccucaacgucaccaugcccaacaacgaggaguucgacaagcucuacaucuggggcguccaccaccccggcaccgacaacgaccagaucuuccucuacgcccaggccuccggccgcaucaccgucuccaccaagcgcucccagcagaccgucauccccaacaucggcucccgcccccgcguccgcaacauccccucccgcaucuccaucuacuggaccaucgucaagcccggcgacauccuccucaucaacuccaccggcaaccucaucgccccccgcggcuacuucaagauccgcuccggcaaguccuccaucaugcgcuccgacgcccccaucggcaagugcaacuccgagugcaucacccccaacggcuccauccccaacgacaagcccuuccagaacgucaaccgcaucaccuacggcgccugcccccgcuacgucaagcagaacacccucaagcucgccaccggcaugcgcaacguccccgagaagcagacccgcggcaucuucggcgccaucgccggcuucaucgagaacggcugggagggcauggucgacggcugguacggcuuccgccaccagaacuccgagggcaccggccaggccgccgaccucaaguccacccaggccgccaucgaccagaucaacggcaagcucaaccgccucaucggcaagaccaacgagaaguuccaccagaucgagaacgaguucuccgaggucgagggccgcauccaggaccucgagaaguacgucgaggacaccaagaucgaccucugguccuacaacgccgagcuccucgucgcccucgagaaccagcacaccaucgaccucaccgacuccgagaugaacaagcucuucgagaagaccaagaagcagcuccgcgagaacgccgaggacaugggcaacggcugcuucaagaucuaccacaagugcgacaacgccugcaucggcuccauccgcaacggcaccuacgaccacgacgucuaccgcgacgaggcccucaacaaccgcuuccagaucaagggcgucgagcucaaguccggcuacaaggacuggauccucuggaucuccuucgccaucuccugcuuccuccucugcgucgcccuccucggcuucaucaugugggccugccagaagggcaacauccgcugcaacaucugcaucuga

SEQ ID NO: 104922 - RNA, 1701 nt, Artificial Sequence
  derived and/or modified CDS sequence (opt2) from hemagglutinin__InfluenzaA__AFJ78243
augaagaccaucaucgcccucuccuacauccucugccucgucuucgcccagaagcuccccggcaacgacaacuccaccgccacccucugccucggccaccacgccguccccaacggcaccaucgucaagaccaucaccaacgaccagaucgaggucaccaacgccaccgagcucguccaguccuccuccaccggcgagaucugcgacuccccccaccagauccucgacggcgagaacugcacccucaucgacgcccuccucggcgacccccagugcgacggcuuccagaacaagaagugggaccucuucgucgagcgcuccaaggccuacuccaacugcuaccccuacgacguccccgacuacgccucccuccgcucccucgucgccuccuccggcacccucgaguucaacaacgaguccuucaacuggaccggcgucacccagaacggcaccuccuccgccugcauccgccgcuccaacaacuccuucuucucccgccucaacuggcucacccaccucaaguucaaguaccccgcccucaacgucaccaugcccaacaacgaggaguucgacaagcucuacaucuggggcguccaccaccccggcaccgacaacgaccagaucuuccucuacgccaaggccuccggccgcaucaccgucuccaccaagcgcucccagcagaccgucauccccaacaucggcucccgcccccgcguccgcaacauccccucccgcaucuccaucuacuggaccaucgucaagcccggcgacauccuccucaucaacuccaccggcaaccucaucgccccccgcggcuacuucaagauccgcuccggcaaguccuccaucaugcgcuccgacgcccccgucggcaagugcaacuccgagugcaucacccccaacggcuccauccccaacgacaagcccuuccagaacgucaaccgcaucaccuacggcgccugcccccgcuacgucaagcagaacacccucaagcucgccaccggcaugcgcaacguccccgagaagcagacccgcggcaucuucggcgccaucgccggcuucaucgagaacggcugggagggcauggucgacggcugguacggcuuccgccacaagaacuccgagggcaccggccaggccgccgaccucaaguccacccaggccgccaucgaccagaucaacggcaagcucaaccgccucaucggcaagaccaacgagaaguuccaccagaucgagaaggaguucuccgaggucgagggccgcauccaggaccucgagaaguacgucgaggacaccaagaucgaccucugguccuacaacgccgagcuccucgucgcccucgagaaccagcacaccaucgaccucaccgacuccgagaugaacaagcucuucgagaagaccaagaagcagcuccgcgagaacgccgaggacaugggcaacggcugcuucaagaucuaccacaagugcgacaacgccugcaucggcuccauccgcaacggcaccuacgaccacgacgucuaccgcgacgaggcccucaacaaccgcuuccagaucaagggcgucgagcucaaguccggcuacaaggacuggauccucuggaucuccuucgccaucuccugcuuccuccucugcgucgcccuccucggcuucaucaugugggccugccagaagggcaacauccgcugcaacaucugcaucuga

SEQ ID NO: 104923 - RNA, 1701 nt, Artificial Sequence
  derived and/or modified CDS sequence (opt2) from hemagglutinin__InfluenzaA__AFJ78254
augaagaccaucaucgcccucuccuacauccucugccucgucuucgcccagaagcuccccggcaacgacaacuccaccgccacccucugccucggccaccacgccguccccaacggcaccaucgucaagaccaucaccaacgaccagaucgaggucaccaacgccaccgagcucguccaguccuccuccaccggcgagaucugcgacuccccccaccagauccucgacggcgagaacugcacccucaucgacgcccuccucggcgacccccagugcgacggcuuccagaacaagaagugggaccucuucgucgagcgcuccaaggccuacuccaacugcuaccccuacgacguccccgacuacgccucccuccgcucccucgucgccuccuccggcacccucgaguucaacaacgaguccuucaacuggaccggcgucacccagaacggcaccuccuccgccugcauccgccgcuccaacaacuccuucuucucccgccucaacuggcucacccaccucaaguucaaguaccccgcccucaacgucaccaugcccaacaacgaggaguucgacaagcucuacaucuggggcguccaccaccccggcaccgacaacgaccagaucuuccucuacgcccaggccuccggccgcaucaccgucuccaccaagcgcucccagcagaccgucauccccaacaucggcucccgcccccgcguccgcaacauccccucccgcaucuccaucuacuggaccaucgucaagcccggcgacauccuccucaucaacuccaccggcaaccucaucgccccccgcggcuacuucaagauccgcuccggcaaguccuccaucaugcgcuccgacgcccccaucggcaagugcaacuccgagugcaucacccccaacggcuccauccccaacgacaagcccuuccagaacgucaaccgcaucaccuacggcgccugcccccgcuacgucaagcagaacacccucaagcucgccaccggcaugcgcaacguccccgagaagcagacccgcggcaucuucggcgccaucgccggcuucaucgagaacggcugggagggcauggucgacggcugguacggcuuccgccaccagaacuccgagggcaucggccaggccgccgaccucaaguccacccaggccgccaucgaccagaucaacggcaagcucaaccgccucaucggcaagaccaacgagaaguuccaccagaucgagaaggaguucuccgaggucgagggccgcauccaggaccucgagaaguacgucgaggacaccaaggucgaccucugguccuacaacgccgagcuccucgucgcccucgagaaccagcacaccaucgaccucaccgacuccgagaugaacaagcucuucgagaagaccaagaagcagcuccgcgagaacgccgaggacaugggcaacggcugcuucaagaucuaccacaagugcgacaacgccugcaucggcuccauccgcaacggcaccuacgaccacgacgucuaccgcgacgaggcccucaacaaccgcuuccagaucaagggcgucgagcucaaguccggcuacaaggacuggauccucuggaucuccuucgccaucuccugcuuccuccucugcgucgcccuccucggcuucaucaugugggccugccagaagggcaacauccgcugcaacaucugcaucuga

SEQ ID NO: 104924 - RNA, 1701 nt, Artificial Sequence; identical to SEQ ID NO: 104923
  derived and/or modified CDS sequence (opt2) from hemagglutinin__InfluenzaA__AFJ78265

SEQ ID NO: 104925 - RNA, 1701 nt, Artificial Sequence
  derived and/or modified CDS sequence (opt2) from hemagglutinin__InfluenzaA__AFJ78276
augaagaccaucaucgcccucuccuacauccucugccucgucuucgcccagaagcuccccggcaacgacaacuccaccgccacccucugccucggccaccacgccguccccaacggcaccaucgucaagaccaucaccaacgaccagaucgaggucaccaacgccaccgagcucguccaguccuccuccaccggcgagaucugcgacuccccccaccagauccucgacggcgagaacugcacccucaucgacgcccuccucggcgacccccagugcgacggcuuccagaacaagaagugggaccucuucgucgagcgcuccaaggccuacuccaacugcuaccccuacgacguccccgacuacgccucccuccgcucccucgucgccuccuccggcacccucgaguucaacaacgaguccuucaacuggaccggcgucacccagaacggcaccuccuccgccugcauccgccgcuccaacaacuccuucuucucccgccucaacuggcucacccaccucaaguucaaguaccccgcccucaacgucaccaugcccaacaacgagaaguucgacaagcucuacaucuggggcguccaccaccccggcaccgacaacgaccagaucuuccucuacgcccaggccuccggccgcaucaccgucuccaccaagcgcucccagcagaccgucauccccaacaucggcucccgcccccgcguccgcaacauccccucccgcaucuccaucuacuggaccaucgucaagcccggcgacauccuccucaucaacuccaccggcaaccucaucgccccccgcggcuacuucaagauccgcuccggcaaguccuccaucaugcgcuccgacgcccccaucggcaagugcaacuccgagugcaucacccccaacggcuccauccccaacgacaagcccuuccagaacgucaaccgcaucaccuacggcgccugcccccgcuacgucaagcagaacacccucaagcucgccaccggcaugcgcaacguccccgagaagcagacccgcggcaucuucggcgccaucgccggcuucaucgagaacggcugggagggcauggucgacggcugguacggcuuccgccaccagaacuccgagggcaucggccaggccgccgaccucaaguccacccaggccgccaucgaccagaucaacggcaagcucaaccgccucaucggcaagaccaacgagaaguuccaccagaucgagaaggaguucuccgaggucgagggccgcauccaggaccucgagaaguacgucgaggacaccaaggucgaccucugguccuacaacgccgagcuccucgucgcccucgagaaccagcacaccaucgaccucaccgacuccgagaugaacaagcucuucgagaagaccaagaagcagcuccgcgagaacgccgaggacaugggcaacggcugcuucaagaucuaccacaagugcgacaacgccugcaucggcuccauccgcaacggcaccuacgaccacgacgucuaccgcgacgaggcccucaacaaccgcuuccagaucaagggcgucgagcucaaguccggcuacaaggacuggauccucuggaucuccuucgccaucuccugcuuccuccucugcgucgcccuccucggcuucaucaugugggccugccagaagggcaacauccgcugcaacaucugcaucuga

SEQ ID NO: 104926 - RNA, 1701 nt, Artificial Sequence
  derived and/or modified CDS sequence (opt2) from hemagglutinin__InfluenzaA__AFJ78287
augaagaccaucaucgcccucuccuacauccucugccucgucuucgcccagaagcuccccggcaacgacaacuccaccgccacccucugccucggccaccacgccguccccaacggcaccaucgucaagaccaucaccaacgaccagaucgaggucaccaacgccaccgagcucguccaguccuccuccaccggcgagaucugcgacuccccccaccagauccucgacggcaagaacugcacccucauggacgcccuccucggcgacccccagugcgacggcuuccagaacaagaagugggaccucuucgucgagcgcuccaaggccuacuccaacugcuaccccuacgacguccccgacuacgccucccuccgcucccucgucgccuccuccggcacccucgaguucaacaacgaguccuucaacuggaccggcgucacccagaacggcaccuccuccgccugcauccgccgcuccaagaacuccuucuucucccgccucaacuggcucacccaccucaacuucaaguaccccgcccucaacgucaccaugcccaacaacgagcaguucgacaagcucuacaucuggggcguccaccaccccggcaccgacaaggaccagaucuuccccuacgcccaggccuccggccgcaucaccgucuccaccaagcgcucccagcagaccgucauccccaacaucggcucccgcccccgcguccgcaacauccccucccgcaucuccaucuacuggaccaucgucaagcccggcgacauccuccucaucaacuccaccggcaaccucaucgccccccgcggcuacuucaagauccgcuccggcaaguccuccaucaugcgcuccgacgcccccaucggcaagugcaacuccgagugcaucacccccaacggcuccauccccaacgacaagcccuuccagaacgucaaccgcaucaccuacggcgccugcccccgcuacgucaagcagaacacccucaagcucgccaccggcaugcgcaacguccccgagaagcagacccgcggcaucuucggcgccaucgccggcuucaucgagaacggcugggagggcauggucgacggcugguacggcuuccgccaccagaacuccgagggccgcggccaggccgccgaccucaaguccacccaggccgccaucgaccagaucaacggcaagcucaaccgccucaucggcaagaccaacgagaaguuccaccagaucgagaaggaguucuccgaggucgagggccgcauccaggaccucgagaaguacgucgaggacaccaagaucgaccucugguccuacaacgccgagcuccucgucgcccucgagaaccagcacaccaucgaccucaccgacuccgagaugaacaagcucuucgagaagaccaagaagcagcuccgcgagaacgccgaggacaugggcaacggcugcuucaagaucuaccacaagugcgacaacgccugcaucggcuccauccgcaacggcaccuacgaccacgacgucuaccgcgacgaggcccucaacaaccgcuuccagaucaagggcgucgagcucaaguccggcuacaaggacuggauccucuggaucuccuucgccaucuccugcuuccuccucugcgucgcccuccucggcuucaucaugugggccugccagaagggcaacauccgcugcaacaucugcaucuga

SEQ ID NO: 104927 - RNA, 1698 nt, Artificial Sequence
  derived and/or modified CDS sequence (opt2) from hemagglutinin__InfluenzaA__AFJ78309
augaaggccaagcuccucguccuccucugcaccuucaccgccaccuacgccgacaccaucugcaucggcuaccacgccaacaacuccaccgacaccgucgacaccguccucgagaagaacgucaccgucacccacuccgucaaccuccucgaggacucccacaacggcaagcucugccuccucaagggcaucgccccccuccagcucggcaacugcuccgucgccggcuggauccucggcaaccccgagugcgagucccucaucuccaaggaguccugguccuacaucgucgagacccccaaccccgagaacggcaccugcuaccccggcuacuucgccgacuacgaggagcuccgcgagcagcucuccuccgucuccuccuucgagcgcuucgagaucuuccccaaggaguccuccuggcccaaccacaccgucaccggcgucuccgccuccugcucccacaacggcaaguccuccuucuaccgcaaccuccucuggcucaccgagaagaacggccucuaccccaaccucuccaaguccuacgucaacaacaaggagaaggagguccucguccucuggggcguccaccaccccuccaacaucggcgaccagcgcgccaucuaccacaccgagaacgccuacgucuccgucgucuccucccacuacucccgccgcuucacccccgagaucgccaagcgccccaagguccgcgaccaggagggccgcaucaacuacuacuggacccuccucgagcccggcgacaccaucaucuucgaggccaacggcaaccucaucgcccccugguacgccuucgcccucucccgcggcuucggcuccggcaucaucaccuccaacgcccccauggacgagugcgacgccaagugccagaccccccagggcgccaucaacuccucccuccccuuccagaacguccaccccaucaccaucggcgagugccccaaguacguccgcuccgccaagcuccgcauggucaccggccuccgcaacauccccuccauccagucccgcggccucuucggcgccaucgccggcuucaucgagggcggcuggaccggcaugaucgacggcugguacggcuaccaccaccagaacgagcagggcuccggcuacgccgccgaccagaaguccacccagaacgccaucaacggcaucaccaacaaggucaacuccgucaucgagaagaugaacacccaguucaccgccgucggcaaggaguucaacaagcucgagcgccgcauggagaaccucaacaagaaggucgacgacggcuuccucgacaucuggaccuacaacgccgagcuccucguccuccucgagaacgagcgcacccucgacuuccacgacuccaacgucaagaaccucuacgagaaggucaagucccagcucaagaacaacgccaaggagaucggcaacggcugcuucgaguucuaccacaagugcaacaacgagugcauggaguccgucaagaacggcaccuacgacuaccccaaguacuccgaggaguccaagcucaaccgcgagaagaucgacggcgucaagcucgaguccaugggcgucuaccagauccucgccaucuacuccaccgucgccuccucccucguccuccucgucucccucggcgccaucuccuucuggaugugcuccaacggcucccuccagugccgcaucugcaucuga

SEQ ID NO: 104928 - RNA, 1701 nt, Artificial Sequence
  derived and/or modified CDS sequence (opt2) from hemagglutinin__InfluenzaA__AFJ78320
augaagaccaucaucgcccucuccuacauccucugccucgucuucgcccagaagcuccccggcaacgacaacuccaccgccacccucugccucggccaccacgccguccccaacggcacccucgucaagaccaucaccaacgaccagaucgaggucaccaacgccaccgagcucguccaguccuccuccaccggccgcaucugcgacuccccccaccagauccucgacggcgagaacugcacccucaucgacgcccuccucggcgacccccacugcgacggcuuccagaacaaggagugggaccucuucgucgagcgcuccaaggccuacuccaacugcuaccccuacgacguccccgacuacgccucccuccgcucccucgucgccuccuccggcacccucgaguucaacaacgaguccuucaacuggaccggcgucgcccagaacggcaccuccuccgccugcaagcgccgcuccaacaaguccuucuucucccgccucaacuggcuccaccagcucaaguacaaguaccccgcccucaacgucaccaugcccaacaacgagaaguucgacaagcucuacaucuggggcguccaccaccccuccaccgacuccgaccagaucucccucuacgcccaggccuccggccgcgucaccgucuccaccaagcgcucccagcagaccgucauccccaacaucggcucccgccccuggguccgcggcgucuccucccgcaucuccaucuacuggaccaucgucaagcccggcgacauccuccucaucaacuccaccggcaaccucaucgccccccgcggcuacuucaagauccgcuccggcaaguccuccaucaugcgcuccgacgcccccaucggcaagugcaacuccgagugcaucacccccaacggcuccauccccaacgacaagcccuuccagaacgucaaccgcaucaccuacggcgccugcccccgcuacgucaagcagaacacccucaagcucgccaccggcaugcgcaacguccccgagaagcagacccgcggcaucuucggcgccaucgccggcuucaucgagaacggcugggagggcauggucgacggcugguacggcuuccgccaccagaacuccgagggcaccggccaggccgccgaccucaaguccacccaggccgccaucaaccagaucaacggcaagcucaaccgccucaucggcaagaccaacgagaaguuccaccagaucgagaaggaguucuccgaggucgagggccgcauccaggaccucgagaaguacgucgaggacaccaagaucgaccucugguccuacaacgccgagcuccucgucgcccucgagaaccagcacaccaucgaccucaccgacuccgagaugaacaagcucuucgagcgcaccaagaagcagcuccgcgagaacgccgaggacaugggcaacggcugcuucaagaucuaccacaagugcgacaacgccugcaucggcuccauccgcaacggcaccuacgaccacgacgucuaccgcgacgaggcccucaacaaccgcuuccagaucaagggcgucgagcucaaguccggcuacaaggacuggauccucuggaucuccuucgccaucuccugcuuccuccucugcgucguccuccucggcuucaucaugugggccugccagaagggcaacauccgcugcaacaucugcaucuga

SEQ ID NO: 104929 - RNA, 1698 nt, Artificial Sequence
  derived and/or modified CDS sequence (opt2) from hemagglutinin__InfluenzaA__AFJ78331
augaaggccaagcuccucguccuccucugcaccuucaccgccaccuacgccgacaccaucugcaucggcuaccacgccaacaacuccaccgacaccgucgacaccguccucgagaagaacgucaccgucacccacuccgucaaccuccucgaggacucccacaacggcaagcucugccuccucaagggcaucgccccccuccagcucggcaacugcuccgucgccggcuggauccucggcaaccccgagugcgagcuccucaucuccaaggaguccugguccuacaucgucgagacccccaaccccgagaacggcaccugcuaccccggcuacuucgccgacuacgaggagcuccgcgagcagcucuccuccgucuccuccuucgagcgcuucgagaucuuccccaaggaguccuccuggcccaaccacaccgucaccggcgucuccgccuccugcucccacaacggcaaguccuccuucuaccgcaaccuccucuggcucaccggcaagaacggccucuaccccaaccucuccaaguccuacgucaacaacaaggagaaggagguccucguccucuggggcguccaccacccccccaacaucggcgaccagcgcgcccucuaccacaccgagaacgccuacgucuccgucgucuccucccacuacucccgccgcuucacccccgagaucgccaagcgccccaagguccgcgaccaggagggccgcaucaacuacuacuggacccuccucgagcccggcgacaccaucaucuucgaggccaacggcaaccucaucgcccccugguacgccuucgcccucucccgcggcuucggcuccggcaucaucaccuccaacgcccccauggacgagugcgacgccaagugccagaccccccagggcgccaucaacuccucccuccccuuccagaacguccaccccgucaccaucggcgagugccccaaguacguccgcuccgccaagcuccgcauggucaccggccuccgcaacauccccuccauccagucccgcggccucuucggcgccaucgccggcuucaucgagggcggcuggaccggcauggucgacggcugguacggcuaccaccaccagaacgagcagggcuccggcuacgccgccgaccagaaguccacccagaacgccaucaacggcaucaccaacaaggucaacuccgucaucgagaagaugaacacccaguucaccgccgucggcaaggaguucaacaagcucgagcgccgcauggagaaccucaacaagaaggucgacgacggcuuccucgacaucuggaccuacaacgccgagcuccucguccuccucgagaacgagcgcacccucgacuuccacgacuccaacgucaagaaccucuacgagaaggucaagucccagcucaagaacaacgccaaggagaucggcaacggcugcuucgaguucuaccacaagugcaacaacgagugcauggaguccgucaagaacggcaccuacgacuaccccaaguacuccgaggaguccaagcucaaccgcgagaagaucgacggcgucaagcucgaguccaugggcgucuaccagauccucgccaucuacuccaccgucgccuccucccucguccuccucgucucccucggcgccaucuccuucuggaugugcuccaacggcucccuccagugccgcaucugcaucuga

SEQ ID NO: 104930 - RNA, 1698 nt, Artificial Sequence; identical to SEQ ID NO: 104929
  derived and/or modified CDS sequence (opt2) from hemagglutinin__InfluenzaA__AFJ78342

SEQ ID NO: 104931 - RNA, 1698 nt, Artificial Sequence; identical to SEQ ID NO: 104929
  derived and/or modified CDS sequence (opt2) from hemagglutinin__InfluenzaA__AFJ78353

SEQ ID NO: 104932 - RNA, 1698 nt, Artificial Sequence
  derived and/or modified CDS sequence (opt2) from hemagglutinin__InfluenzaA__AFJ78364
augaaggccaagcuccucguccuccucugcaccuucaccgccaccuacgccgacaccaucugcaucggcuaccacgccaacaacuccaccgacaccgucgacaccguccucgagaagaacgucaccgucacccacuccgucaaccuccucgaggacucccacaacggcaagcucugccuccucaagggcaucgccccccuccagcucggcaacugcuccgucgccggcuggauccucggcaaccccgagugcgagucccucaucuccaaggaguccugguccuacaucgucgagacccccaaccccgagaacggcaccugcuaccccggcuacuucgccgacuacgaggagcuccgcgagcagcucuccuccgucuccuccuucgagcgcuucgagaucuuccccaaggaguccuccuggcccaaccacaccgucaccggcgucuccgccuccugcucccacaacggcaaguccuccuucuaccgcaaccuccucuggcucaccgagaagaacggccucuaccccaaccucuccaaguccuacgucaacaacaaggagaaggagguccucguccucuggggcguccaccaccccuccaacaucggcgaccagcgcgccaucuaccacaccgagaacgccuacgucuccgucgucuccucccacuacaaccgccgcuucacccccgagaucgccaagcgccccaagguccgcaaccaggagggccgcaucaacuacuacuggacccuccucgagcccggcgacaccaucaucuucgaggccaacggcaaccucaucgcccccugguacgccuucgcccucucccgcggcuucggcuccggcaucaucaccuccaacgcccccauggacgagugcgacgccaagugccagaccccccagggcgccaucaacuccucccuccccuuccagaacguccaccccaucaccaucggcgagugccccaaguacguccgcuccgccaagcuccgcauggucaccggccuccgcaacauccccuccauccagucccgcggccucuucggcgccaucgccggcuucaucgagggcggcuggaccggcaugaucgacggcugguacggcuaccaccaccagaacgagcagggcuccggcuacgccgccgaccagaaguccacccagaacgccaucaacggcaucaccaacaaggucaacuccgucaucgagaagaugaacacccaguucaccgccgucggcaaggaguucaacaagcucgagcgccgcauggagaaccucaacaagaaggucgacgacggcuuccucgacaucuggaccuacaacgccgagcuccucguccuccucgagaacgagcgcacccucgacuuccacgacuccaacgucaagaaccucuacgagaaggucaagucccagcucaagaacaacgccaaggagaucggcaacggcugcuucgaguucuaccacaagugcaacaacgagugcauggaguccgucaagaacggcaccuacgacuaccccaaguacuccgaggaguccaagcucaaccgcgagaagaucgacggcgucaagcucgaguccaugggcgucuaccagauccucgccaucuacuccaccgucgccuccucccucguccuccucgucucccucggcgccaucuccuucuggaugugcuccaacggcucccuccagugccgcaucugcaucuga

SEQ ID NO: 104933 - RNA, 1698 nt, Artificial Sequence
  derived and/or modified CDS sequence (opt2) from hemagglutinin__InfluenzaA__AFJ78375
augaaggccaagcuccucguccuccucugcaccuucaccgccaccuacgccgacaccaucugcaucggcuaccacgccaacaacuccaccgacaccgucgacaccguccucgagaagaacgucaccgucacccacuccaucaaccuccucgagaacucccacaacggcaagcucugccuccucaagggcaucgccccccuccagcucggcaacugcuccgucgccggcuggauccucggcaaccccgagugcgagcuccucaucuccaaggaguccugguccuacaucgucgagacccccaaccccgagaacggcaccugcuaccccggccacuucgccgacuacgaggagcuccgcgagcagcucuccuccgucuccuccuucgagcgcuucgagaucuuccccaaggaguccuccuggcccaaccacaccgucaccggcgucuccgccuccugcucccacaacggcaaguccuccuucuaccgcaaccuccucuggcucaccgagaagaacggccucuaccccaaccucuccaaguccuacgucaacaacaaggagaaggagguccucguccucuggggcguccaccaccccuccaacaucggcgaccagcgcgccaucuaccacaccgagaacgccuacgucuccgucgucuccucccacuacucccgccgcuucacccccgagaucgucaagcgccccaagguccgcgaccaggagggccgcaucaacuacuacuggacccuccucgagcccggcgacaccaucaucuucgaggccaacggcaaccucaucgcccccugguacgccuucgcccucucccgcggcuucggcuccggcaucaucaccuccaacgcccccauggacgagugcgacgccaagugccagaccccccagggcgccaucaacuccucccuccccuuccagaacguccaccccgucaccaucggcgagugccccaaguacguccgcuccgccaagcuccgcauggucaccggccuccgcaacauccccuccauccagucccgcggccucuucggcgccaucgccggcuucaucgagggcggcuggaccggcaugaucgacggcugguacggcuaccaccaccagaacgagcagggcuccggcuacgccgccgaccagaaguccacccagaacgccaucaacggcaucaccaacaaggucaacuccaucaucgagaagaugaacacccaguucaccgccgucggcaaggaguucaacaagcucgagcgccgcauggagaaccucaacaagaaggucgacgacggcuuccucgacaucuggaccuacaacgccgagcuccucguccuccucgagaacgagcgcacccucgacuuccacgacuccaacgucaagaaccucuacgagaaggucaagucccagcucaagaacaacgccaaggagaucggcaacggcugcuucgaguucuaccacaagugcaacaacgagugcauggaguccgucaagaacggcaccuacgacuaccccaaguacuccgaggaguccaagcucaaccgcgagaagaucgacggcgucaagcucgaguccaugggcgucuaccagauccucgccaucuacuccaccgucgccuccucccucguccuccucgucucccucggcgccaucuccuucuggaugugcuccaacggcucccuccagugccgcaucugcaucuga

SEQ ID NO: 104934 - RNA, 1698 nt, Artificial Sequence; identical to SEQ ID NO: 97421
  derived and/or modified CDS sequence (opt2) from hemagglutinin__InfluenzaA__AFJ78386

SEQ ID NO: 104935 - RNA, 1698 nt, Artificial Sequence; identical to SEQ ID NO: 97421
  derived and/or modified CDS sequence (opt2) from hemagglutinin__InfluenzaA__AFJ78397

SEQ ID NO: 104936 - RNA, 1698 nt, Artificial Sequence; identical to SEQ ID NO: 104113
  derived and/or modified CDS sequence (opt2) from hemagglutinin__InfluenzaA__AFJ78408

SEQ ID NO: 104937 - RNA, 1698 nt, Artificial Sequence
  derived and/or modified CDS sequence (opt2) from hemagglutinin__InfluenzaA__AFJ78419
augaaggucaagcuccucguccuccucugcaccuucaccgccaccuacgccgacaccaucugcaucggcuaccacgccaacaacuccaccgacaccgucgacaccguccucgagaagaacgucaccgucacccacuccgucaaccuccucgaggacucccacaacggcaagcucugccuccucaagggcaucgccccccuccagcucggcaacugcuccgucgccggcuggauccucggcaaccccgagugcgagcuccucaucuccaaggaguccugguccuacaucgucgagaagcccaaccccgagaacggcaccugcuaccccggcuacuucgccgacuacgaggagcuccgcgagcagcucuccuccgucuccuccuucgagcgcuucgagaucuuccccaaggaguccuccuggcccaaccacaccgucaccggcgucuccgccuccugcucccacaacggcaaguccuccuucuacaagaaccuccucuggcucaccggcaagaacggccucuaccccaaccucuccaaguccuacgccaacaacaaggagaaggagguccucguccucuggggcguccaccacccccccaacaucggcgaccagcgcgcccucuaccacaccgagaacgccuacgucuccgucgucuccucccacuacucccgcaaguucacccccgagaucgccaagcgccccaagguccgcgaccaggagggccgcaucaacuacuacuggacccuccucgagcccggcgacaccgucaucuucgaggccaacggcaaccucaucgccccccgcuacgccuucgcccucucccgcggcuucggcuccggcaucaucaacuccaacgcccccauggacgagugcgacgccaagugccagaccccccagggcgccaucaacuccucccuccccuuccagaacguccaccccgucaccaucggcgagugccccaaguacguccgcuccgccaagcuccgcauggucaccggccuccgcaacauccccuccauccagucccgcggccucuucggcgccaucgccggcuucaucgagggcggcuggaccggcauggucgacggcugguacggcuaccaccaccagaacgagcagggcuccggcuacgccgccgaccagaaguccacccagaacgccaucaacggcaucaccaacaaggucaacuccgucaucgagaagaugaacacccaguucaccgccgucggcaaggaguucaacaagcucgagcgccgcauggagaaccucaacaagaaggucgacgacggcuucaucgacaucuggaccuacaacgccgagcuccucguccuccucgagaacgagcgcacccucgacuuccacgacuccaacgucaagaaccucuacgagaaggucaagucccagcucaagaacaacgccaaggagaucggcaacggcugcuucgaguucuaccacaagugcaacgacgagugcauggaguccgucaagaacggcaccuacgacuaccccaaguacuccgaggaguccaagcucaaccgcgagaagaucgacggcgucaagcucgaguccaugggcgucuaccagauccucgccaucuacuccaccgucgccuccucccucguccuccucgucucccucggcgccaucuccuucuggaugugcuccaacggcucccuccagugccgcaucugcaucuga

SEQ ID NO: 104938 - RNA, 1698 nt, Artificial Sequence
  derived and/or modified CDS sequence (opt2) from hemagglutinin__InfluenzaA__AFJ78430
augaaggucaagcuccucguccuccucugcaccuucaccgccaccuacgccgacaccaucugcaucggcuaccacgccaacaacuccaccgacaccgucgacaccguccucgagaagaacgucaccgucacccacuccgucaaccuccucgaggacucccacaacggcaagcucugccuccucaagggcaucgccccccuccagcucggcaacugcuccgucgccggcuggauccucggcaaccccgagugcgagcuccucaucucccgcgaguccugguccuacaucgucgagaaccccaaccccgagaacggcaccugcuaccccggccacuucgccgacuacgaggagcuccgcgagcagcucuccuccgucuccuccuucgagcgcuucgagaucuuccccaaggaguccuccuggcccaaccacaccgucaccggcgucuccgccuccugcucccacaacggcaaguccuccuucuacaagaaccuccucuggcucaccggcaagaacggccucuaccccaaccucuccaaguccuacgccaacaacaaggagaaggagguccucguccucuggggcguccaccacccccccaacaucggcgaccagcgcgcccucuaccacaccgagaacgccuacgucuccgucgucuccucccacuacucccgcaaguucacccccgagaucgccaagcgccccaagguccgcgaccaggagggccgcaucaacuacuacuggacccuccucggccccggcgacaccaucaucuucgaggccaacggcaaccucaucgccccccgcuacgccuucgcccucucccgcggcuucggcuccggcaucaucaacuccaacgcccccauggacgagugcgacgccaagugccagaccccccagggcgccaucaacuccucccuccccuuccagaacguccaccccgucaccaucggcgagugccccaaguacguccgcuccgccaagcuccgcauggucaccggccuccgcaacauccccuccauccagucccgcggccucuucggcgccaucgccggcuucaucgagggcggcuggaccggcauggucgacggcugguacggcuaccaccaccagaacgagcagggcuccggcuacgccgccgaccagaaguccacccagaacgccaucaacggcaucaccaacaaggucaacuccgucaucgagaagaugaacacccaguucaccgccgucggcaaggaguucaacaagcucgagcgccgcauggagaaccucaacaagaaggucgacgacggcuucaucgacaucuggaccuacaacgccgagcuccucguccuccucgagaacgagcgcacccucgacuuccacgacuccaacgucaagaaccucuacgagaaggucaagucccagcucaagaacaacgccaaggagaucggcaacggcugcuucgaguucuaccacaagugcaacgacgagugcauggaguccgucaagaacggcaccuacgacuaccccaaguacuccgaggaguccaagcucaaccgcgagaagaucgacggcgucaagcucgaguccaugggcgucuaccagauccucgccaucuacuccaccgucgccuccucccucguccuccucgucucccucggcgccaucuccuucuggaugugcuccaacggcucccuccagugccgcaucugcaucuga

SEQ ID NO: 104939 - RNA, 1698 nt, Artificial Sequence
  derived and/or modified CDS sequence (opt2) from hemagglutinin__InfluenzaA__AFJ78441
augaaggucaagcucaugguccuccucugcaccuucaccgccaccuacgccgacaccaucugcaucggcuaccacgccaacaacuccaccgacaccgucgacaccguccucgagaagaacgucaccgucacccacuccgucaaccuccucgaggacucccacaacggcaagcucugccuccucaagggcaucgccccccuccagcucggcaacugcuccgucgccggcuggauccucggcaaccccgagugcgagcuccucaucucccgcgaguccugguccuacaucgucgagaagcccaaccccgagaacggcaccugcuaccccggccacuucgccgacuacgaggagcuccgcgagcagcucuccuccgucuccuccuucgagcgcuucgagaucuuccccaaggaguccuccuggcccaaccacaccgucaccggcgucuccgccuccugcucccacaacggcaaguccuccuucuacaagaaccuccucuggcucaccggcaagaacggccucuaccccaaccucuccaaguccuacgccaacaacaaggagaaggagguccucguccucuggggcguccaccacccccccaacaucggcgaccagaaggcccucuaccacaccgagaacgccuacgucuccgucgucuccucccacuacucccgcaaguucacccccgagaucgccaagcgccccaagguccgcgaccaggagggccgcaucaacuacuacuggacccuccucgagcccggcgacaccaucaucuucgaggccaacggcaaccucaucgccccccgcuacgccuucgcccucucccgcggcuucggcuccggcaucaucaacuccaacgcccccauggacgagugcgacgccaagugccagaccccccagggcgccaucaacuccucccuccccuuccagaacguccaccccgucaccaucggcgagugccccaaguacguccgcuccgccaagcuccgcauggucaccggccuccgcaacauccccuccauccagucccgcggccucuucggcgccaucgccggcuucaucgagggcggcuggaccggcauggucgacggcugguacggcuaccaccaccagaacgagcagggcuccggcuacgccgccgaccagaaguccacccagaacgccaucaacggcaucaccaacaaggucaacuccgucaucgagaagaugaacacccaguucaccgccgucgacaaggaguucaacaagcucgagcgccgcauggagaaccucaacaagaaggucgacgacggcuucaucgacaucuggaccuacaacgccgagcuccucguccuccucgagaacgagcgcacccucgacuuccacgacuccaacgucaagaaccucuacgagaaggucaagucccagcucaagaacaacgccaaggagaucggcaacggcugcuucgaguucuaccacaagugcaacgacgagugcauggaguccgucaagaacggcaccuacgacuaccccaaguacuccgaggaguccaagcucaaccgcgagaagaucgacggcgucaagcucgaguccaugggcgucuaccagauccucgccaucuacuccaccgucgccuccucccucguccuccucgucucccucggcgccaucuccuucuggaugugcuccaacggcucccuccagugccgcaucugcaucuga

SEQ ID NO: 104940 - RNA, 1698 nt, Artificial Sequence
  derived and/or modified CDS sequence (opt2) from hemagglutinin__InfluenzaA__AFJ78452
augaaggucaagcuccucguccuccucugcaccuucaccgccaccuacgccgacaccaucugcaucggcuaccacgccaacaacuccaccgacaccgucgacaccguccucgagaagaacgucaccgucacccacuccgucaaccuccucgaggacucccacaacggcaagcucugccuccucaagggcaucgccccccuccagcucggcaacugcuccgucgccggcuggauccucggcaaccccgagugcgagcuccucaucuccaaggaguccugguccuacaucgucgagaagcccaaccccgagaacggcaccugcuaccccggccacuucgccgacuacgaggagcuccgcgagcagcucuccuccgucuccuccuucgagcgcuucgagaucuuccccaaggaguccuccuggcccaaccacaccgucaccggcgucuccgccuccugcucccacaacggcaaguccuccuucuacaagaaccuccucuggcucaccggcaagaacggccucuaccccaaccucuccaaguccuacgccaacaacaaggagaaggagguccucguccucuggggcguccaccacccccccaacaucggcgaccagaaggcccucuaccacaccgagaacgccuacgucuccgucgucuccucccacuacucccgcaaguucauccccgagaucgccaagcgccccaagguccgcgaccaggagggccgcaucaacuacuacuggacccuccucgagcccggcgacaccaucaucuucgaggccaacggcaaccucaucgccccccgcuacgccuucgcccucucccgcggcuucggcuccggcaucaucaacuccaacgcccccauggacgagugcgacgccaagugccagaccccccagggcgccaucaacuccucccuccccuuccagaacguccaccccgucaccaucggcgagugccccaaguacguccgcuccgccaagcuccgcauggucaccggccuccgcaacauccccuccauccagucccgcggccucuucggcgccaucgccggcuucaucgagggcggcuggaccggcauggucgacggcugguacggcuaccaccaccagaacgagcagggcuccggcuacgccgccgaccagaaguccacccagaacgccaucaacggcaucaccaacaaggucaacuccgucaucgagaagaugaacacccaguucaccgccgucggcaaggaguucaacaagcucgagcgccgcauggagaaccucaacaagaaggucgacgacggcuucaucgacaucuggaccuacaacgccgagcuccucguccuccucgagaacgagcgcacccucgacuuccacgacuccaacgucaagaaccucuacgagaaggucaagucccagcucaagaacaacgccaaggagaucggcaacggcugcuucgaguucuaccacaagugcaacgacgagugcauggaguccgucaagaacggcaccuacgacuaccccaaguacuccgaggaguccaagcucaaccgcgagaagaucgacggcgucaagcucgaguccaugggcgucuaccagauccucgccaucuacuccaccgucgccuccucccucguccuccucgucucccucggcgccaucuccuucuggaugugcuccaacggcucccuccagugccgcaucugcaucuga

SEQ ID NO: 104941 - RNA, 1698 nt, Artificial Sequence
  derived and/or modified CDS sequence (opt2) from hemagglutinin__InfluenzaA__AFJ78463
augaaggucaagcuccucguccuccucugcaccuucaccgccaccuacgccgacaccaucugcaucggcuaccacgccaacaacuccaccgacaccgucgacaccguccucgagaagaacgucaccgucacccacuccgucaaccuccucgaggacucccacaacggcaagcucugccuccucaagggcaucgccccccuccagcucggcaacugcuccgucgccggcuggauccucggcaaccccgagugcgagcuccucaucuccaaggaguccugguccuacaucgucgagaagcccaaccccgagaacggcaccugcuaccccggccacuucgccgacuacgaggagcuccgcgagcagcucuccuccgucuccuccuucgagcgcuucgagaucuuccccaaggaguccuccuggcccaaccacaccgucaccggcgucuccgccuccugcucccacaacggcaaguccuccuucuacaagaaccuccucuggcucaccggcaagaacggccucuaccccaaccucggcaaguccuacgccaacaacaaggagaaggagguccucguccucuggggcguccaccacccccccaacaucggcgaccagaaggcccucuaccacaccgagaacgccuacgucuccgucgucuccucccacuacucccgcaaguucauccccgagaucgccaagcgccccaagguccgcgaccaggagggccgcaucaacuacuacuggacccuccucgagcccggcgacaccaucaucuucgaggccaacggcaaccucaucgccccccgcuacgccuucgcccucucccgcggcuucggcuccggcaucaucaacuccaacgcccccauggacgagugcgacgccaagugccagaccccccagggcgccaucaacuccucccuccccuuccagaacguccaccccgucaccaucggcgagugccccaaguacguccgcuccgccaagcuccgcauggucaccggccuccgcaacauccccuccauccagucccgcggccucuucggcgccaucgccggcuucaucgagggcggcuggaccggcauggucgacggcugguacggcuaccaccaccagaacgagcagggcuccggcuacgccgccgaccagaaguccacccagaacgccaucaacggcaucaccaacaaggucaacuccgucaucgagaagaugaacacccaguucaccgccgucggcaaggaguucaacaagcucgagcgccgcauggagaaccucaacaagaaggucgacgacggcuucaucgacaucuggaccuacaacgccgagcuccucguccuccucgagaacgagcgcacccucgacuuccacgacuccaacgucaagaaccucuacgagaaggucaagucccagcucaagaacaacgccaaggagaucggcaacggcugcuucgaguucuaccacaagugcaacgacgagugcauggaguccgucaagaacggcaccuacgacuaccccaaguacuccgaggaguccaagcucaaccgcgagaagaucgacggcgucaagcucgaguccaugggcgucuaccagauccucgccaucuacuccaccgucgccuccucccucguccuccucgucucccucggcgccaucuccuucuggaugugcuccaacggcucccuccagugccgcaucugcaucuga

SEQ ID NO: 104942 - RNA, 1698 nt, Artificial Sequence
  derived and/or modified CDS sequence (opt2) from hemagglutinin__InfluenzaA__AFJ78474
augaaggucaagcuccucguccuccucugcaccuucaccgccaccuacgccgacaccaucugcaucggcuaccacgccaacaacuccaccgacaccgucgacaccguccucgagaagaacgucaccgucacccacuccgucaaccuccucgaggacucccacaacggcaagcucugccuccucaagggcaucgccccccuccagcucggcaacugcuccgucgccggcuggauccucggcaaccccgagugcgagcuccucaucucccgcgaguccugguccuacaucgucgagaagcccaaccccgagaacggcaccugcuaccccggccacuucgccgacuacgaggagcuccgcgagcagcucuccuccgucuccuccuucgagcgcuucgagaucuuccccaaggaguccuccuggcccaaccacaccgucaccggcgucuccgccuccugcuccuacaacggcaaguccuccuucuacaagaaccuccucuggcucaccggcaagaacggccucuaccccaaccucuccaaguccuacgccaacaacaaggagaaggagguccucguccucuggggcguccaccacccccccaacaucggcgaccagcgcgcccucuaccacaccgagaacgccuacgucuccgucgucuccucccacuacucccgcaaguucacccccgagaucgccaagcgccccaagguccgcgaccaggagggccgcaucaacuacuacuggacccuccucgagcccggcgacaccaucaucuucgaggccaacggcaaccucaucgccccccgcuacgccuucgcccucucccgcggcuucggcuccggcaucaucaacuccaacgcccccauggacgagugcgacgccaagugccagaccccccagggcgccaucaacuccucccuccccuuccagaacguccaccccgucaccaucggcgagugccccaaguacguccgcuccgccaagcuccgcauggucaccggccuccgcaacauccccuccauccagucccgcggccucuucggcgccaucgccggcuucaucgagggcggcuggaccggcauggucgacggcugguacggcuaccaccaccagaacgagcagggcuccggcuacgccgccgaccagaaguccacccagaacgccaucaacggcaucaccaacaaggucaacuccgucaucgagaagaugaacacccaguucaccgccgucggcaaggaguucaacaagcucgagcgccgcauggagaaccucaacaagaaggucgacgacggcuucaucgacaucuggaccuacaacgccgagcuccucguccuccucgagaacgagcgcacccucgacuuccacgacuccaacgucaagaaccucuacgagaaggucaagucccagcucaagaacaacgccaaggagaucggcaacggcugcuucgaguucuaccacaagugcaacgacgagugcauggaguccgucaagaacggcaccuacgacuaccccaaguacuccgaggaguccaagcucaaccgcgagaagaucgacggcgucaagcucgaguccaugggcgucuaccagauccucgccaucuacuccaccgucgccuccucccucguccuccucgucucccucggcgccaucuccuucuggaugugcuccaacggcucccuccagugccgcaucugcaucuga

SEQ ID NO: 104943 - RNA, 1698 nt, Artificial Sequence
  derived and/or modified CDS sequence (opt2) from hemagglutinin__InfluenzaA__AFJ78485
augaaggucaagcuccucguccuccucugcaccuucaccgccaccuacgccgacaccaucugcaucggcuaccacgccaacaacuccaccgacaccgucgacaccguccucgagaagaacgucaccgucacccacuccgucaaccuccucgaggacucccacaacggcaagcucugccuccucaagggcaucgccccccuccagcucggcaacugcuccgucgccggcuggauccucggcaaccccgagugcgagcuccucaucucccgcgaguccugguccuacaucgucgagaagcccaaccccgagaacggcaccugcuaccccggccacuucgccgacuacgaggagcuccgcgagcagcucuccuccgucuccuccuucgagcgcuucgagaucuuccccaaggaguccuccuggcccaaccacaccaccaccggcgucuccgccuccugcucccacaacggcgaguccuccuucuacaagaaccuccucuggcucaccggcaagaacggccucuaccccaaccucuccaaguccuacgccaacaacaaggagaaggagguccucguccucuggggcguccaccacccccccaacaucggcgaccagcgcgcccucuaccacaccgagaacgccuacgucuccgucgucuccucccacuacucccgcaaguucacccccgagaucgccaagcgccccaagguccgcgaccaggagggccgcaucaacuacuacuggacccuccucgagcccggcgacaccaucaucuucgaggccaacggcaaccucaucgccccccgcuacgccuucgcccucucccgcggcuucggcuccggcaucaucaacuccaacgcccccauggacgagugcgacgccaagugccagaccccccagggcgccaucaacuccucccuccccuuccagaacguccaccccgucaccaucggcgagugccccaaguacguccgcuccgccaagcuccgcauggucaccggccuccgcaacauccccuccauccagucccgcggccucuucggcgccaucgccggcuucaucgagggcggcuggaccggcauggucgacggcugguacggcuaccaccaccagaacgagcagggcuccggcuacgccgccgaccagaaguccacccagaacgccaucaacggcaucaccaacaaggucaacuccgucaucgagaagaugaacacccaguucaccgccgucggcaaggaguucaacaagcucgagcgccgcauggagaaccucaacaagaaggucgaggacggcuucaucgacaucuggaccuacaacgccgagcuccucguccuccucgagaacgagcgcacccucgacuuccacgacuccaacgucaagaaccucuacgagaaggucaagucccagcucaagaacaacgccaaggagaucggcaacggcugcuucgaguucuaccacaagugcaacgacgagugcauggaguccgucaagaacggcaccuacgacuaccccaaguacuccgaggaguccaagcucaaccgcgagaagaucgacggcgucaagcucgaguccaugggcgucuaccagauccucgccaucuacuccaccgucgccuccucccucguccuccucgucucccucggcgccaucuccuucuggaugugcuccaacggcucccuccagugccgcaucugcaucuga

SEQ ID NO: 104944 - RNA, 1698 nt, Artificial Sequence
  derived and/or modified CDS sequence (opt2) from hemagglutinin__InfluenzaA__AFJ78496
augaaggucaagcuccucguccuccucugcaccuucaccgccaccuacgccgacaccaucugcaucggcuaccacgccaacaacuccaccgacaccgucgacaccguccucgagaagaacgucaccgucacccacuccgucaaccuccucgaggacucccacaacggcaagcucugccuccucaagggcaucgccccccuccagcucggcaacugcuccgucgccggcuggauccucggcaaccccgagugcgagcuccucaucucccgcgaguccugguccuacaucgucgagaagcccaaccccgagaacggcaccugcuaccccggccacuucgccgacuacgaggagcuccgcgagcagcucuccuccgucuccuccuucgagcgcuucgagaucuuccccaaggaguccuccuggcccaaccacaccaccaccggcgucuccgccuccugcucccacaacggcgaguccuccuucuacaagaaccuccucuggcucaccggcaagaacggccucuaccccaaccucuccaaguccuacgccaacaacaaggagaaggagguccucguccucuggggcguccaccacccccccaacaucggcggccagcgcgcccucuaccacaccgagaacgccuacgucuccgucgucuccucccacuacucccgcaaguucacccccgagaucgccaagcgccccaagguccgcgaccaggagggccgcaucaacuacuacuggacccuccucgagcccggcgacaccaucaucuucgaggccaacggcaaccucaucgccccccgcuacgccuucgcccucucccgcggcuucggcuccggcaucaucaacuccaacgcccccauggacgagugcgacgccaagugccagaccccccagggcgccaucaacuccucccuccccuuccagaacguccaccccgucaccaucggcgagugccccaaguacguccgcuccgccaagcuccgcauggucaccggccuccgcaacauccccuccauccagucccgcggccucuucggcgccaucgccggcuucaucgagggcggcuggaccggcauggucgacggcugguacggcuaccaccaccagaacgagcagggcuccggcuacgccgccgaccagaaguccacccagaacgccaucaacggcaucaccaacaaggucaacuccgucaucgagaagaugaacacccaguucaccgccgucggcaaggaguucaacaagcucgagcgccgcauggagaaccucaacaagaaggucgacgacggcuucaucgacaucuggaccuacaacgccgagcuccucguccuccucgagaacgagcgcacccucgacuuccacgacuccaacgucaagaaccucuacgagaaggucaagucccagcucaagaacaacgccaaggagaucggcaacggcugcuucgaguucuaccacaagugcaacgacgagugcauggaguccgucaagaacggcaccuacgacuaccccaaguacuccgaggaguccaagcucaaccgcgagaagaucgacggcgucaagcucgaguccaugggcgucuaccagauccucgccaucuacuccaccgucgccuccucccucguccuccucgucucccucggcgccaucuccuucuggaugugcuccaacggcucccuccagugccgcaucugcaucuga

SEQ ID NO: 104945 - RNA, 1698 nt, Artificial Sequence
  derived and/or modified CDS sequence (opt2) from hemagglutinin__InfluenzaA__AFJ78518
augaaggucaagcuccucguccuccucugcaccuucaccgccaccuacgccgacaccaucugcaucggcuaccacgccaacaacuccaccgacaccgucgacaccguccucgagaagaacgucaccgucacccacuccgucaaccuccucgaggacucccacaacggcaagcucugccuccucaagggcaucgccccccuccagcucggcaacugcuccgucgccggcuggauccucggcaaccccgagugcgagcuccucaucucccgcgaguccugguccuacaucgucgagaagcccaaccccgagaacggcaccugcuaccccggccacuucgccgacuacgaggagcuccgcgagcagcucuccuccgucuccuccuucgagcgcuucgagaucuuccccaaggaguccuccuggcccaaccacaccaccaccggcgucuccgccuccugcucccacaacggcgaguccuccuucuacaagaaccuccucuggcucaccggcaagaacggccucuaccccaaccucuccaaguccuacgccaacaacaaggagaaggagguccucguccucuggggcguccaccacccccccaacaucggcgaccagcgcgcccucuaccacaccgagaacgccuacgucuccgucgucuccucccacuacucccgcaaguucacccccgagaucgccaagcgccccaagguccgcgaccaggagggccgcaucaacuacuacuggacccuccucgagcccggcgacaccaucaucuucgaggccaacggcaaccucaucgccccccgcuacgccuucgcccucucccgcggcuucggcuccggcaucaucaacuccaacgcccccauggacgagugcgacgccaagugccagaccccccagggcgccaucaacuccucccuccccuuccagaacguccaccccgucaccaucggcgagugccccaaguacguccgcuccgccaagcuccgcauggucaccggccuccgcaacauccccuccauccagucccgcggccucuucggcgccaucgccggcuucaucgagggcggcuggaccggcauggucgacggcugguacggcuaccaccaccagaacgagcagggcuccggcuacgccgccgaccagaaguccacccagaacgccaucaacggcaucaccaacaaggucaacuccgucaucgagaagaugaacacccaguucaccgccgucggcaaggaguucaacaagcucgagcgccgcauggagaaccucaacaagaaggucgacgacggcuucaucgacaucuggaccuacaacgccgagcuccucguccuccucgagaacgagcgcacccucgacuuccacgacuccaacgucaagaaccucuacgagaaggucaagucccagcucaagaacaacgccaaggagaucggcaacggcugcuucgaguucuaccacaagugcaacgacgagugcauggaguccgucaagaacggcaccuacgacuaccccaaguacuccgaggaguccaagcucaaccgcgagaagaucgacggcgucaagcucgaguccaugggcgucuaccagauccucgccaucuacuccaccgucgccuccucccucguccuccucgucucccucggcgccaucuccuucuggaugugcuccaacggcucccuccagugccgcaucugcaucuga

SEQ ID NO: 104946 - RNA, 1698 nt, Artificial Sequence
  derived and/or modified CDS sequence (opt2) from hemagglutinin__InfluenzaA__AFJ78529
augaaggucaagcuccucguccuccucugcaccuucaccgccaccuacgccgacaccaucugcaucggcuaccacgccaacaacuccaccgacaccgucgacaccguccucgagaagaacgucaccgucacccacuccgucaaccuccucgaggacaaccacaacggcaagcucugccuccucaagggcaucgccccccuccagcucggcaacugcuccgucgccggcuggauccucggcaaccccgagugcgagcuccucaucuccaaggaguccugguccuacaucgucgagcgccccaaccccgagaacggcaccugcuaccccggccacuucgccgacuacgaggagcuccgcgagcagcucuccuccgucuccuccuucgagcgcuucgagaucuuccccaaggaguccuccuggcccaaccacaccgucaccggcgucuccgccuccugcucccacaacggcgaguccuccuucuacaagaaccuccucuggcucaccggcaagaacggccucuaccccaaccucuccaaguccuacgccaacaacaaggagaaggagguccucguccucuggggcguccaccacccccccaacaucggcgaccagaugacccucuaccacaaggagaacgccuacgucuccgucgucuccucccacuacucccgcaaguucacccccgagaucgccaagcgccccaagguccgcgaccaggagggccgcaucaacuacuacuggacccuccucgagcccggcgacaccaucaucuucgaggccaacggcaaccucaucgccccccgcuacgccuucgcccucucccgcggcuucggcuccggcaucaucaacuccaacgcccccauggacgagugcgacgccaagugccagaccccccagggcgccaucaacuccucccuccccuuccagaacguccaccccgucaccaucggcgagugccccaaguacguccgcuccgccaagcuccgcauggucaccggccuccgcaacauccccuccauccagucccgcggccucuucggcgccaucgccggcuucaucgagggcggcuggaccggcauggucgacggcugguacggcuaccaccaccagaacgagcagggcuccggcuacgccgccgaccagaaguccacccagaacgccaucaacggcaucaccaacaaggucaacuccgucaucgagaagaugaacacccaguucaccgccgucggcaaggaguucaacaagcucgagcgccgcauggagaaccucaacaagaaggucgacgacggcuucaucgacgucuggaccuacaacgccgagcuccucguccuccucgagaacgagcgcacccucgacuuccacgacuccaacgucaagaaccucuacgagaaggucaagaaccagcucaagaacaacgccaaggagaucggcaacggcugcuucgaguucuaccacaagugcaacgacgagugcauggaguccgucaagaacggcaccuacgacuaccccaaguacuccgaggaguccaagcucucccgcgagaagaucgacggcgucaagcucgaguccaugggcgucuaccagauccucgccaucuacuccaccgucgccuccucccucguccuccucgucucccucggcgccaucuccuucuggaugugcuccaacggcucccuccagugccgcaucugcaucuga

SEQ ID NO: 104947 - RNA, 1698 nt, Artificial Sequence; identical to SEQ ID NO: 104946
  derived and/or modified CDS sequence (opt2) from hemagglutinin__InfluenzaA__AFJ78540

SEQ ID NO: 104948 - RNA, 1698 nt, Artificial Sequence; identical to SEQ ID NO: 104946
  derived and/or modified CDS sequence (opt2) from hemagglutinin__InfluenzaA__AFJ78551

SEQ ID NO: 104949 - RNA, 1698 nt, Artificial Sequence
  derived and/or modified CDS sequence (opt2) from hemagglutinin__InfluenzaA__AFJ78562
augaaggucaagcuccucguccuccucugcaccuucaccgccaccuacgccgacaccaucugcaucggcuaccacgccaacaacuccaccgacaccgucgacaccguccucgagaagaacgucaccgucacccacuccgucaaccuccucgaggacaaccacaacggcaagcucugccuccucaagggcaucgccccccuccagcucggcaacugcuccgucgccggcuggauccucggcaaccccgagugcgagcuccucaucuccaaggaguccugguccuacaucgucgagcgccccaaccccgagaacggcaccugcuaccccggccacuucgccgacuacgaggagcuccgcgagcagcucuccuccgucuccuccuucgagcgcuucgagaucuuccccaaggaguccuccuggcccaaccacaccgucaccggcgucuccgccuccugcucccacaacggcgaguccuccuucuacaagaaccuccucuggcucaccggcaagaacggccucuaccccacccucuccaaguccuacgccaacaacaaggagaaggagguccucguccucuggggcguccaccacccccccaacaucggcgaccagaugacccucuaccacaaggagaacgccuacgucuccgucgucuccucccacuacucccgcaaguucacccccgagaucgccaagcgccucaagguccgcgaccaggagggccgcaucaacuacuacuggacccuccucgagcccggcgacaccaucaucuucgaggccaacggcaaccucaucgccccccgcuacgccuucgcccucucccgcggccucggcuccggcaucaucaacuccaacgcccccauggacgagugcgacgccaagugccagaccccccagggcgccaucaacuccucccuccccuuccagaacguccaccccgucaccaucggcgagugccccaaguacguccgcuccgccaagcuccgcauggucaccggccuccgcaacauccccuccauccagucccgcggccucuucggcgccaucgccggcuucaucgagggcggcuggaccggcauggucgacggcugguacggcuaccaccaccagaacgagcagggcuccggcuacgccgccgaccagaaguccacccagaacgccaucaacggcaucaccaacaaggucaacuccgucaucgagaagaugaacacccaguucaccgccgucggcaaggaguucaacaagcucgagcgccgcauggagaaccucaacaagaaggucgacgacggcuucaucgacgucuggaccuacaacgccgagcuccucguccuccucgagaacgagcgcacccucgacuuccacgacuccaacgucaagaaccucuacgagaaggucaagaaccagcucaagaacaacgccaaggagaucggcaacggcugcuucgaguucuaccacaagugcaacgacgagugcauggaguccgucaagaacggcaccuacgacuaccccaaguacuccgaggaguccaagcucucccgcgagaagaucgacggcgucaagcucgaguccaugggcgucuaccagauccucgccaucuacuccaccgucgccuccucccucguccuccucgucucccucggcgccaucuccuucuggaugugcuccaacggcucccuccagugccgcaucugcaucuga

SEQ ID NO: 104950 - RNA, 1698 nt, Artificial Sequence
  derived and/or modified CDS sequence (opt2) from hemagglutinin__InfluenzaA__AFJ78573
augaaggucaagcuccucguccuccucugcaccuucaccgccaccuacgccgacaccaucugcaucggcuaccacgccaacaacuccaccgacaccgucgacaccguccucgagaagaacgucaccgucacccacuccgucaaccuccucgaggacaaccacaacggcaagcucugccuccucaagggcaucgccccccuccagcucggcaacugcuccgucgccggcuggauccucggcaaccccgagugcgagcuccucaucuccaaggaguccugguccuacaucgucgagcgccccaaccccgagaacggcaccugcuaccccggccacuucgccgacuacgaggagcuccgcgagcagcucuccuccgucuccuccuucgagcgcuucgagaucuuccccaaggaguccuccuggcccaaccacaccgucaccggcgucuccgccuccugcucccacaacggcgaguccuccuucuacaagaaccuccucuggcucaccggcaagaacggccucuaccccaaccucuccaaguccuacgccaacaacaaggagaaggagguccucguccucuggggcguccaccacccccccaacaucggcgaccagaugacccucuaccacaaggagaacgccuacgucuccgucgucuccucccacuacucccgcaaguucacccccgagaucgccaagcgccccaagguccgcgaccaggagggccgcaucaacuacuacuggacccuccucgagcccggcgacaccaucaucuucgaggccaacggcaaccucaucgccccccgcuacgccuucgcccucucccgcggcuucggcuccggcaucaucaacuccaacgccuccauggacgagugcgacgccaagugccagaccccccagggcgccaucaacuccucccuccccuuccagaacguccaccccgucaccaucggcgagugccccaaguacguccgcuccgccaagcuccgcauggucaccggccuccgcaacauccccuccauccagucccgcggccucuucggcgccaucgccggcuucaucgagggcggcuggaccggcauggucgacggcugguacggcuaccaccaccagaacgagcagggcuccggcuacgccgccgaccagaaguccacccagaacgccaucaacggcaucaccaacaaggucaacuccgucaucgagaagaugaacacccaguucaccgccgucggcaaggaguucaacaagcucgagcgccgcauggagaaccucaacaagaaggucgacgacggcuucaucgacgucuggaccuacaacgccgagcuccucguccuccucgagaacgagcgcacccucgacuuccacgacuccaacgucaagaaccucuacgagaaggucaagaaccagcucaagaacaacgccaaggagaucggcaacggcugcuucgaguucuaccacaagugcaacgacgagugcauggaguccgucaagaacggcaccuacgacuaccccaaguacuccgaggaggccaagcucucccgcgagaagaucgacggcgucaagcucgaguccaugggcgucuaccagauccucgccaucuacuccaccgucgccuccucccucguccuccucgucucccucggcgccaucuccuucuggaugugcuccaacggcucccuccagugccgcaucugcaucuga

SEQ ID NO: 104951 - RNA, 1698 nt, Artificial Sequence
  derived and/or modified CDS sequence (opt2) from hemagglutinin__InfluenzaA__AFJ78584
augaaggucaagcuccucguccuccucugcaccuucaccgccaccuacgccgacaccaucugcaucggcuaccacgccaacaacuccaccgacaccgucgacaccguccucgagaagaacgucaccgucacccacuccgucaaccuccucgagaacucccacaacggcaagcucugccuccucaagggcaucgccccccuccagcucggcaacugcuccgucgccggcuggauccucggcaaccccgagugcgagcuccucaucuccaaggaguccugguccuacaucgucgagaagcccaaccccgagaacggcaccugcuaccccggccacuucgccgacuacgaggagcuccgcgagcagcucuccuccgucuccuccuucgagcgcuucgagaucuuccccaaggaguccuccuggcccaaccacaccgucaccggcgucuccgccuccugcucccacaacggcgagaacuccuucuaccgcaaccuccucuggcucacccgcaagaacggccucuaccccaaccucuccaaguccuacgccaacaacaaggagaaggagguccucguccucuggggcguccaccacccccccaacaucggcgaccagaaggcccucuaccacaccgagaacgccuacgucuccgucgucuccucccacuacucccgcaaguucacccccgagaucgccaagcgccccaagguccgcgaccaggagggccgcaucaacuacuacuggacccuccucgagcccggcgacaccaucaucuucgaggccaacggcaaccucaucgccccccgcuacgccuucgcccucucccgcggcuucggcuccggcaucaucaacuccaacgcccccauggacaagugcgacgccaagugccagaccccccagggcgccaucaacuccucccuccccuuccagaacguccaccccgucgccaucggcgagugccccaaguacguccgcuccgccaagcuccgcauggucaccggccuccgcaacauccccuccauccagucccgcggccucuucggcgccaucgccggcuucaucgagggcggcuggaccggcauggucgacggcugguacggcuaccaccaccagaacgagcagggcuccggcuacgccgccgaccagaaguccacccagaacgccaucaacggcaucaccaacaaggucaacuccgucaucgagaagaugaacacccaguucaccgccgucggcaaggaguucaacaagcucgagcgccgcauggagaaccucaacaagaaggucgacgacggcuucaucgacaucuggaccuacaacgccgagcuccucguccuccucgagaacgagcgcacccucgacuuccacgacuccaacgucaagaaccucuacgagaaggucaagucccagcucaagaacaacgccaaggagaucggcaacggcugcuucgaguucuaccacaagugcaacgacgagugcauggaguccgucaagaacggcaccuacgacuaccccaaguacuccgaggaguccaagcucaaccgcgagaagaucgacggcgucaagcucgaguccaugggcgucuaccagauccucgccaucuacuccaccgucgccuccucccucguccuccucgucucccucggcgccaucuccuucuggaugugcuccaacggcucccuccagugccgcaucugcaucuga

SEQ ID NO: 104952 - RNA, 1698 nt, Artificial Sequence
  derived and/or modified CDS sequence (opt2) from hemagglutinin__InfluenzaA__AFJ78595
augaaggucaagcuccucguccuccucugcaccuucaccgccaccuacgccgacaccaucugcaucggcuaccacgccaacaacuccaccgacaccgucgacaccguccucgagaagaacgucaccgucacccacuccgucaaccuccucgagaacucccacaacggcaagcucugccuccucaagggcaucgccccccuccagcucggcaacugcuccgucgccggcuggauccucggcaaccccgagugcgagcuccucaucuccaaggaguccugguccuacaucgucgagaagcccaaccccgagaacggcaccugcuaccccggccacuucgccgacuacgaggagcuccgcgagcagcucuccuccgucuccuccuucgagcgcuucgagaucuuccccaaggaguccuccuggcccaaccacaccgucaccggcgucuccgccuccugcucccacaacggcgaguccuccuucuaccgcaaccuccucuggcucaccggcaagaacggccucuaccccaaccucuccaaguccuacgccaacaaccgcgagaaggagguccucguccucuggggcguccaccacccccccaacaucggcgaccagaaggcccucuaccacaccgagaacgccuacgucuccgucgucuccucccacuacucccgcaaguucacccccgagaucgccaagcgccccaagguccgcgaccaggagggccgcaucaacuacuacuggacccuccucgagcccggcgacaccaucaucuucgaggccaacggcaaccucaucgccccccgcuacgccuucgcccucucccgcggcuucggcuccggcaucaucaacuccaacgcccccauggacaagugcgacgccaagugccagaccccccagggcgccaucaacuccucccuccccuuccagaacguccaccccgucaccaucggcgagugccccaaguacguccgcuccgccaagcuccgcauggucaccggccuccgcaacauccccuccauccagucccgcggccucuucggcgccaucgccggcuucaucgagggcggcuggaccggcauggucgacggcugguacggcuaccaccaccagaacgagcagggcuccggcuacgccgccgaccagaaguccacccagaacgccaucaacggcaucaccaacaaggucaacuccgucaucgagaagaugaacacccaguucaccgccgucggcaaggaguucaacaagcucgagcgccgcauggagaaccucaacaagaaggucgacgacggcuucaucgacaucuggaccuacaacgccgagcuccucguccuccucgagaacgagcgcacccucgacuuccacgacuccaacgucaagaaccucuacgagaaggucaagucccagcucaagaacaacgccaaggagaucggcaacggcugcuucgaguucuaccacaagugcaacgacgagugcauggaguccgucaagaacggcaccuacgacuaccccaaguacuccgaggaguccaagcucaaccgcgagaagaucgacggcgucaagcucgaguccaugggcgucuaccagauccucgccaucuacuccaccgucgccuccucccucguccuccucgucucccucggcgccaucuccuucuggaugugcuccaacggcucccuccagugccgcaucugcaucuga

SEQ ID NO: 104953 - RNA, 1698 nt, Artificial Sequence
  derived and/or modified CDS sequence (opt2) from hemagglutinin__InfluenzaA__AFJ78617
augaaggucaagcuccucguccuccucugcaccuucaccgccaccuacgccgacaccaucugcaucggcuaccacgccaacaacuccaccgacaccgucgacaccguccucgagaagaacgucaccgucacccacuccgucaaccuccucgagaacucccacaacggcaagcucugccuccucaagggcaucgccccccuccagcucggcaacugcuccgucgccggcuggauccucggcaaccccgagugcgagcuccucaucuccaaggaguccugguccuacaucgucgagaagcccaaccccgagaacggcaccugcuaccccggccacuucgccgacuacgaggagcuccgcgagcagcucuccuccgucuccuccuucgagcgcuucgagaucuuccccaaggaguccuccuggcccaaccacaccgucaccggcgucuccgccuccugcucccacgacggcgaguccuccuucuaccgcaaccuccucuggcucaccggcaagaacggccucuaccccaaccucuccaaguccuacgccaacaacaaggagaaggagguccucguccucuggggcguccaccacccccccuccaucuccgaccagaagacccucuaccacaccgagaacgcccacgucuccgucgucuccucccacuacucccgcaaguucacccccgagaucgccaagcgccccaagguccgcgaccaggagggccgcaucaacuacuacuggacccuccucgagcccggcgacaccaucaucuucgaggccaacggcaaccucaucgccccccgcuacgccuucgcccucucccgcggcuucggcuccggcaucaucaacuccaacgcccccauggacaagugcgacgccaagugccagaccccccagggcgccaucaacuccucccuccccuuccagaacguccaccccgucaccaucggcgagugccccaaguacguccgcuccgccaagcuccgcauggucaccggccuccgcaacauccccuccauccagucccgcggccucuucggcgccaucgccggcuucaucgagggcggcuggaccggcauggucgacggcugguacggcuaccaccaccagaacgagcagggcuccggcuacgccgccgaccagaaguccacccagaacgccaucaacggcaucaccaacaaggucaacuccgucaucgagaagaugaacacccaguucaccgccgucuccaaggaguucaacaagcucgagcgccgcauggagaaccucaacaagaaggucgacgacggcuucaucgacaucuggaccuacaacgccgagcuccucguccuccucgagaacgagcgcacccucgacuuccacgacuccaacgucaagaaccucuacgagaaggucaagucccagcucaagaacaacgccaaggagaucggcaacggcugcuucgaguucuaccacaagugcaacgacgagugcauggaguccgucaagaacggcaccuacgacuaccccaaguacuccgaggaguccaagcucaaccgcgagaagaucgacggcgucaagcucgaguccaugggcgucuaccagauccucgccaucuacuccaccgucgccuccucccucguccuccucgucucccucggcgccaucuccuucuggaugugcuccaacggcucccuccagugccgcaucugcaucuga

SEQ ID NO: 104954 - RNA, 1698 nt, Artificial Sequence
  derived and/or modified CDS sequence (opt2) from hemagglutinin__InfluenzaA__AFJ78628
augaaggucaagcuccucguccuccucugcaccuucaccgccaccuacgccgacaccaucugcaucggcuaccacgccaacaacuccaccgacaccgucgacaccguccucgagaagaacgucaccgucacccacuccgucaaccuccucgaggacaaccacaacggcaagcucugccuccucaagggcaucgccccccuccagcucggcaacugcuccgucgccggcuggauccucggcaaccccgagugcgagcuccucaucuccaaggaguccugguccuacaucgucgagcgccccaaccccgagaacggcaccugcuaccccggccacuucgccgacuacgaggagcuccgcgagcagcucuccuccgucuccuccuucgagcgcuucgagaucuuccccaaggaguccuccuggcccaaccacaccgucaccggcgucuccgccuccugcucccacaacggcgaguccuccuucuacaagaaccuccucuggcucaccggcaagaacggccucuaccccaaccucuccaaguccuacgccaacaacaaggagaaggagguccucguccucuggggcguccaccacccccccaacaucggcaaccagaugacccucuaccacaaggagaacgccuacgucuccgucgucuccucccacuacucccgcaaguucacccccgagaucgccaagcgccccaagguccgcgaccaggagggccgcaucaacuacuacuggacccuccucgagcccggcgacaccaucaucuucgaggccaacggcaaccucaucgccccccgcuacgccuucgcccucucccgcggcuucggcuccggcaucaucaacuccaacgcccccauggacgagugcgacgccaagugccagaccccccagggcgccaucaacuccucccuccccuuccagaacguccaccccgucaccaucggcgagugccccaaguacguccgcuccgccaagcuccgcauggucaccggccuccgcaacauccccuccauccagucccgcggccucuucggcgccaucgccggcuucaucgagggcggcuggaccggcauggucgacggcugguacggcuaccaccaccagaacgagcagggcuccggcuacgccgccgaccagaaguccacccagaacgccaucaacggcaucaccaacaaggucaacuccgucaucgagaagaugaacacccaguucaccgccgucggcaaggaguucaacaagcucgagcgccgcauggagaaccucaacaagaaggucgacgacggcuucaucgacgucuggaccuacaacgccgagcuccucguccuccucgagaacgagcgcacccucgacuuccacgacuccaacgucaagaaccucuacgagaaggucaagaaccagcucaagaacaacgccaaggagaucggcaacggcugcuucgaguucuaccacaagugcaacgacgagugcauggaguccgucaagaacggcaccuacgacuaccccaaguacuccgaggaguccaagcucucccgcgagaagaucgacggcgucaagcucgaguccaugggcgucuaccagauccucgccaucuacuccaccgucgccuccucccucguccuccucgucucccucggcgccaucuccuucuggaugugcuccaacggcucccuccagugccgcaucugcaucuga

SEQ ID NO: 104955 - RNA, 1698 nt, Artificial Sequence
  derived and/or modified CDS sequence (opt2) from hemagglutinin__InfluenzaA__AFJ78639
augaaggucaagcuccucguccuccucugcaccuucaccgccaccuacgccgacaccaucugcaucggcuaccacgccaacaacuccaccgacaccgucgacaccguccucgagaagaacgucaccgucacccacuccgucaaccuccucgagaacucccacaacggcaagcucugccuccucaagggcaucgccccccuccagcucggcaacugcuccgucgccggcuggauccucggcaaccccgagugcgagcuccucaucuccaaggaguccugguccuacaucgucgagaagcccaaccccgagaacggcaccugcuaccccggccacuucgccgacuacgaggagcuccgcgagcagcucuccuccgucuccuccuucgagcgcuucgagaucuuccccaaggaguccuccuggcccaaccacaccgucaccggcgucuccgccuccugcucccacaacggcgaguccuccuucuaccgcaaccuccucuggcucaccggcaagaacggccucuaccccaaccucuccaaguccuacgccaacaacaaggagaaggagguccucguccucuggggcguccaccacccccccuccaucuccaaccagaagacccucuaccacaccgagaacgccuacgucuccgucgucuccucccacuacucccgcaaguucacccccgagaucgccaagcgccccaagguccgcgaccaggagggccgcaucaacuacuacuggacccuccucgagcccggcgacaccaucaucuucgaggccaacggcaaccucaucgccccccgcuacgccuucgcccucucccgcggcuucggcuccggcaucaucaacuccaacgcccccauggacaagugcgacgccaagugccagaccccccagggcgccaucaacuccucccuccccuuccagaacguccaccccgucaccaucggcgagugccccaaguacguccgcuccgccaagcuccgcauggucaccggccuccgcaacauccccuccauccagucccgcggccucuucggcgccaucgccggcuucaucgagggcggcuggaccggcauggucgacggcugguacggcuaccaccaccagaacgagcagggcuccggcuacgccgccgaccagaaguccacccagaacgccaucaacggcaucaccaacaaggucaacuccgucaucgagaagaugaacacccaguucaccgccgucggcaaggaguucaacaagcucgagcgccgcauggagaaccucaacaagaaggucgacgacggcuucaucgacaucuggaccuacaacgccgagcuccucguccuccucgagaacgagcgcacccucgacuuccacgacuccaacgucaagaaccucuacgagaaggucaagucccagcucaagaacaacgccaaggagaucggcaacggcugcuucgaguucuaccacaagugcaacgacgagugcauggaguccgucaagaacggcaccuacgacuaccccaaguacuccgaggaguccaagcucaaccgcgagaagaucgacggcgucaagcucgaguccaugggcgucuaccagauccucgccaucuacuccaccgucgccuccucccucguccuccucgucucccucggcgccaucuccuucuggaugugcuccaacggcucccuccagugccgcaucugcaucuga

SEQ ID NO: 104956 - RNA, 1698 nt, Artificial Sequence; identical to SEQ ID NO: 104955
  derived and/or modified CDS sequence (opt2) from hemagglutinin__InfluenzaA__AFJ78650

SEQ ID NO: 104957 - RNA, 1701 nt, Artificial Sequence; identical to SEQ ID NO: 98705
  derived and/or modified CDS sequence (opt2) from hemagglutinin__InfluenzaA__AFJ78661

SEQ ID NO: 104958 - RNA, 1701 nt, Artificial Sequence
  derived and/or modified CDS sequence (opt2) from hemagglutinin__InfluenzaA__AFJ78681
augaaggccauccucgucguccuccucuacaccuucgccaccgucaacgccgacacccucugcaucggcuaccacgccaacaacuccaccgacaccgucgacaccguccucgagaagaacgucaccgucacccacuccgucaaccuccucgaggacaagcacaacggcaagcucugcaagcuccgcggcgucgccccccuccaccucggcaagugcaacaucgccggcuggauccucggcaaccccgagugcgagucccucuccaccgccuccuccugguccuacaucgucgagaccuccuccuccgacaacggcaccugcuaccccggcgacuucaucgacuacgaggagcuccgcgagcagcucuccuccgucuccuccuucgagcgcuucgagaucuuccccaagaccuccuccuggcccaaccacgacuccaacaagggcgucaccgccgccugcccccacgccggcgccaaguccuucuacaagaaccucaucuggcucgucaagaagggcaacuccuaccccaagcucuccaaguccuacaucaacgacaagggcaaggagguccucguccucuggggcauccaccaccccuccaccuccgccgaccagcagucccucuaccagaacgccgacgccuacgucuucgucggcaccucccgcuacuccaagaaguucaagcccgagaucgccauccgccccaagguccgcgaccaggagggccgcaugaacuacuacuggacccucgucgagcccggcgacaagaucaccuucgaggccaccggcaaccucgucgucccccgcuacgccuucgccauggagcgcaacgccggcuccggcaucaucaucuccgacacccccguccacgacugcaacaccaccugccagacccccaagggcgccaucaacaccucccuccccuuccagaacauccaccccaucaccaucggcaagugccccaaguacgucaaguccaccaagcuccgccucgccaccggccuccgcaacguccccuccauccagucccgcggccucuucggcgccaucgccggcuucaucgagggcggcuggaccggcauggucgacggcugguacggcuaccaccaccagaacgagcagggcuccggcuacgccgccgaccucaaguccacccagaacgccaucgacgagaucaccaacaaggucaacuccgucaucgagaagaugaacacccaguucaccgccgucggcaaggaguucaaccaccucgagaagcgcaucgagaaccucaacaagaaggucgacgacggcuuccucgacaucuggaccuacaacgccgagcuccucguccuccucgagaacgagcgcacccucgacuaccacgacuccaacgucaagaaccucuacgagaagguccgcucccagcucaagaacaacgccaaggagaucggcaacggcugcuucgaguucuaccacaagugcgacaacaccugcauggaguccgucaagaacggcaccuacgacuaccccaaguacuccgaggaggccaagcucaaccgcgaggagaucgacggcgucaagcucgaguccacccgcaucuaccagauccucgccaucuacuccaccgucgccuccucccucguccucgucgucucccucggcgccaucuccuucuggaugugcuccaacggcucccuccagugccgcaucugcaucuga

SEQ ID NO: 104959 - RNA, 1701 nt, Artificial Sequence; identical to SEQ ID NO: 98705
  derived and/or modified CDS sequence (opt2) from hemagglutinin__InfluenzaA__AFJ78691

SEQ ID NO: 104960 - RNA, 1701 nt, Artificial Sequence; identical to SEQ ID NO: 98705
  derived and/or modified CDS sequence (opt2) from hemagglutinin__InfluenzaA__AFJ78701

SEQ ID NO: 104961 - RNA, 1701 nt, Artificial Sequence; identical to SEQ ID NO: 103233
  derived and/or modified CDS sequence (opt2) from hemagglutinin__InfluenzaA__AFJ78711

SEQ ID NO: 104962 - RNA, 1701 nt, Artificial Sequence; identical to SEQ ID NO: 98705
  derived and/or modified CDS sequence (opt2) from hemagglutinin__InfluenzaA__AFJ78721

SEQ ID NO: 104963 - RNA, 1701 nt, Artificial Sequence
  derived and/or modified CDS sequence (opt2) from hemagglutinin__InfluenzaA__AFJ78731
augaaggccauccucgucguccuccucuacaccuucgccaccgccaacgccgacacccucugcaucggcuaccacgccaacaacuccaccgacaccgucgacaccguccucgagaagaacgucaccgucacccacuccgucaaccuccucgaggacaagcacaacggcaagcucugcaagcuccgcggcgucgccccccuccaccucggcaagugcaacaucgccggcuggauccucggcaaccccgagugcgagucccucuccaccgccuccuccugguccuacaucgucgagaccuccuccuccgacaacggcaccugcuaccccggcgacuucaucgacuacgaggagcuccgcgagcagcucuccuccgucuccuccuucgagcgcuucgagaucuuccccaagaccuccuccuggcccaaccacgacuccaacaagggcgucaccgccgccugcccccacgccggcgccaaguccuucuacaagaaccucaucuggcucgucaagaagggcaacuccuaccccaagcucuccaaguccuacaucaacgacaagggcaaggagguccucguccucuggggcauccaccaccccuccaccuccgccgaccagcagucccucuaccagaacgccgacgccuacgucuucgucggcaccucccgcuacuccaagaaguucaagcccgagaucgccauccgccccaagguccgcgaccaggagggccgcaugaacuacuacuggacccucgucgagcccggcgacaagaucaccuucgaggccaccggcaaccucgucgucccccgcuacgccuucgccauggagcgcaacgccggcuccggcaucaucaucuccgacacccccguccacgacugcaacaccaccugccagacccccaagggcuccaucaacaccucccuccccuuccagaacauccaccccaucaccaucggcaagugccccaaguacgucaaguccaccaagcuccgccucgccaccggccuccgcaacguccccuccauccagucccgcggccucuucggcgccaucgccggcuucaucgagggcggcuggaccggcauggucgacggcugguacggcuaccaccaccagaacgagcagggcuccggcuacgccgccgaccucaaguccacccagaacgccaucgacgagaucaccaacaaggucaacuccgucaucgagaagaugaacacccaguucaccgccgucggcaaggaguucaaccaccucgagaagcgcaucgagaaccucaacaagaaggucgacgacggcuuccucgacaucuggaccuacaacgccgagcuccucguccuccucgagaacgagcgcacccucgacuaccacgacuccaacgucaagaaccucuacgagaagguccgcucccagcucaagaacaacgccaaggagaucggcaacggcugcuucgaguucuaccacaagugcgacaacaccugcauggaguccgucaagaacggcaccuacgacuaccccaaguacuccgaggaggccaagcucaaccgcgaggagaucgacggcgucaagcucgaguccacccgcaucuaccagauccucgccaucuacuccaccgucgccuccucccucguccucgucgucucccucggcgccaucuccuucuggaugugcuccaacggcucccuccagugccgcaucugcaucuga

SEQ ID NO: 104964 - RNA, 1701 nt, Artificial Sequence; identical to SEQ ID NO: 99869
  derived and/or modified CDS sequence (opt2) from hemagglutinin__InfluenzaA__AFJ78741

SEQ ID NO: 104965 - RNA, 1701 nt, Artificial Sequence; identical to SEQ ID NO: 98705
  derived and/or modified CDS sequence (opt2) from hemagglutinin__InfluenzaA__AFJ78751

SEQ ID NO: 104966 - RNA, 1701 nt, Artificial Sequence; identical to SEQ ID NO: 98705
  derived and/or modified CDS sequence (opt2) from hemagglutinin__InfluenzaA__AFJ78761

SEQ ID NO: 104967 - RNA, 1701 nt, Artificial Sequence; identical to SEQ ID NO: 98705
  derived and/or modified CDS sequence (opt2) from hemagglutinin__InfluenzaA__AFJ78771

SEQ ID NO: 104968 - RNA, 1701 nt, Artificial Sequence; identical to SEQ ID NO: 98705
  derived and/or modified CDS sequence (opt2) from hemagglutinin__InfluenzaA__AFJ78781

SEQ ID NO: 104969 - RNA, 1701 nt, Artificial Sequence; identical to SEQ ID NO: 98705
  derived and/or modified CDS sequence (opt2) from hemagglutinin__InfluenzaA__AFJ78791

SEQ ID NO: 104970 - RNA, 1701 nt, Artificial Sequence; identical to SEQ ID NO: 98705
  derived and/or modified CDS sequence (opt2) from hemagglutinin__InfluenzaA__AFJ78801

SEQ ID NO: 104971 - RNA, 1701 nt, Artificial Sequence; identical to SEQ ID NO: 99566
  derived and/or modified CDS sequence (opt2) from hemagglutinin__InfluenzaA__AFJ78811

SEQ ID NO: 104972 - RNA, 1701 nt, Artificial Sequence; identical to SEQ ID NO: 98705
  derived and/or modified CDS sequence (opt2) from hemagglutinin__InfluenzaA__AFJ78821

SEQ ID NO: 104973 - RNA, 1701 nt, Artificial Sequence; identical to SEQ ID NO: 98705
  derived and/or modified CDS sequence (opt2) from hemagglutinin__InfluenzaA__AFJ78831

SEQ ID NO: 104974 - RNA, 1701 nt, Artificial Sequence; identical to SEQ ID NO: 99903
  derived and/or modified CDS sequence (opt2) from hemagglutinin__InfluenzaA__AFJ78841

SEQ ID NO: 104975 - RNA, 1701 nt, Artificial Sequence; identical to SEQ ID NO: 98705
  derived and/or modified CDS sequence (opt2) from hemagglutinin__InfluenzaA__AFJ78851

SEQ ID NO: 104976 - RNA, 1701 nt, Artificial Sequence
  derived and/or modified CDS sequence (opt2) from hemagglutinin__InfluenzaA__AFJ78861
augaaggccauccucgucguccuccucuacaccuucgccaccgccaacgccgacacccucugcaucggcuaccacgccaacaacuccaccgacaccgucgacaccguccucgagaagaacgucaccgucacccacuccgucaaccuccucgaggacaagcacaacggcaagcucugccgccuccgcggcgucgccccccuccaccucggcaagugcaacaucgccggcuggauccucggcaaccccgagugcgagucccucuccaccgccuccuccugguccuacaucgucgagaccuccuccuccgacaacggcaccugcuaccccggcgacuucaucgacuacgaggagcuccgcgagcagcucuccuccgucuccuccuucgagcgcuucgagaucuuccccaagaccuccuccuggcccaaccacgacuccaacaagggcgucaccgccgccugcccccacgccggcgccaaguccuucuacaagaaccucaucuggcucgucaagaagggcaacuccuaccccaagcucuccaaguccuacaucaacgacaagggcaaggagguccucguccucuggggcauccaccaccccuccaccuccgccgaccagcagucccucuaccagaacgccgacgccuacgucuucgucggcaccucccgcuacuccaagaaguucaagcccgagaucgccauccgccccaagguccgcgaccaggagggccgcaugaacuacuacuggacccucgucgagcccggcgacaagaucaccuucgaggccaccggcaaccucgucgucccccgcuacgccuucgccauggagcgcaacgccggcuccggcaucaucaucuccgacacccccguccacgacugcaacaccaccugccagacccccaagggcgccaucaacaccucccuccccuuccagaacauccaccccaucaccaucggcaagugccccaaguacgucaaguccaccaagcuccgccucgccaccggccuccgcaacguccccuccauccagucccgcggccucuucggcgccaucgccggcuucaucgagggcggcuggaccggcauggucgacggcugguacggcuaccaccaccagaacgagcagggcuccggcuacgccgccgaccucaaguccacccagaacgccaucgacgagaucaccaacaaggucaacuccgucaucgagaagaugaacacccaguucaccgccgucggcaaggaguucaaccaccucgagaagcgcaucgagaaccucaacaagaaggucgacgacggcuuccucgacaucuggaccuacaacgccgagcuccucguccuccucgagaacgagcgcacccucgacuaccacgacuccaacgucaagaaccucuacgagaagguccgcucccagcucaagaacaacgccaaggagaucggcaacggcugcuucgaguucuaccacaagugcgacaacaccugcauggaguccgucaagaacggcaccuacgacuaccccaaguacuccgaggaggccaagcucaaccgcgaggagaucgacggcgucaagcucgaguccacccgcaucuaccagauccucgccaucuacuccaccgucgccuccucccucguccucgucgucucccucggcgccaucuccuucuggaugugcuccaacggcucccuccagugccgcaucugcaucuga

SEQ ID NO: 104977 - RNA, 1701 nt, Artificial Sequence
  derived and/or modified CDS sequence (opt2) from hemagglutinin__InfluenzaA__AFJ78881
augaaggccauccucgucguccuccucuacaccuucgccaccgccaacgccgacacccucugcaucggcuaccacgccaacaacuccaccgacaccgucgacaccguccucgagaagaacgucaccgucacccacuccgucaaccuccucgaggacaagcacaacggcaagcucugcaagcuccgcggcgucgccccccuccaccucggcaagugcaacaucgccggcuggauccucggcaaccccgagugcgagucccucuccaccuccuccuccugguccuacaucgucgagaccuccuccuccgacaacggcaccugcuaccccggcgacuucaucgacuacgaggagcuccgcgagcagcucuccuccgucuccuccuucgagcgcuucgagaucuuccccaagaccuccuccuggcccaaccacgacuccaacaagggcgucaccgccgccugcccccacgccggcgccaaguccuucuacaagaaccucaucuggcucgucaagaagggcaacuccuaccccaagcucuccaaguccuacaucaacgacaagggcaaggagguccucguccucuggggcauccaccaccccuccaccuccgccgaccagcagucccucuaccagaacgccgacgccuacgucuucgucggcaccucccgcuacuccaagaaguucaagcccgagaucgccauccgccccaagguccgcgaccaggagggccgcaugaacuacuacuggacccucgucgagcccggcgacaagaucaccuucgaggccaccggcaaccucgucgucccccgcuacgccuucgccauggagcgcaacgccggcuccggcaucaucaucuccgacacccccguccacgacugcaacaccaccugccagacccccaagggcgccaucaacaccucccuccccuuccagaacauccaccccaucaccaucggcaagugccccaaguacgucaaguccaccaagcuccgccucgccaccggccuccgcaacguccccuccauccagucccgcggccucuucggcgccaucgccggcuucaucgagggcggcuggaccggcauggucgacggcugguacggcuaccaccaccagaacgagcagggcuccggcuacgccgccgaccucaaguccacccagaacgccaucgacgagaucaccaacaaggucaacuccgucaucgagaagaugaacacccaguucaccgccgucggcaaggaguucaaccaccucgagaagcgcaucgagaaccucaacaagaaggucgacgacggcuuccucgacaucuggaccuacaacgccgagcuccucguccuccucgagaacgagcgcacccucgacuaccacgacuccaacgucaagaaccucuacgagaagguccgcucccagcucaagaacaacgccaaggagaucggcaacggcugcuucgaguucuaccacaagugcgacaacaccugcauggaguccgucaagaacggcaccuacgacuaccccaaguacuccgaggaggccaagcucaaccgcgaggagaucaacggcgucaagcucgaguccacccgcaucuaccagauccucgccaucuacuccaccgccgccuccucccucguccucgucgucucccucggcgccaucuccuucuggaugugcuccaacggcucccuccagugccgcaucugcaucuga

SEQ ID NO: 104978 - RNA, 1701 nt, Artificial Sequence; identical to SEQ ID NO: 98705
  derived and/or modified CDS sequence (opt2) from hemagglutinin__InfluenzaA__AFJ78891

SEQ ID NO: 104979 - RNA, 1701 nt, Artificial Sequence; identical to SEQ ID NO: 98705
  derived and/or modified CDS sequence (opt2) from hemagglutinin__InfluenzaA__AFJ78901

SEQ ID NO: 104980 - RNA, 1701 nt, Artificial Sequence; identical to SEQ ID NO: 98705
  derived and/or modified CDS sequence (opt2) from hemagglutinin__InfluenzaA__AFJ78911

SEQ ID NO: 104981 - RNA, 1701 nt, Artificial Sequence; identical to SEQ ID NO: 98705
  derived and/or modified CDS sequence (opt2) from hemagglutinin__InfluenzaA__AFJ78921

SEQ ID NO: 104982 - RNA, 1701 nt, Artificial Sequence
  derived and/or modified CDS sequence (opt2) from hemagglutinin__InfluenzaA__AFJ97567
augaaggccauccucgucguccuccucuacaccuucgccaccgccaacgccgacacccucugcaucggcuaccacgccaacaacuccaccgacaccgucgacaccguccucgagaagaacgucaccgucacccacuccgucgaccuccucgaggacaagcacaacggcaagcucugcaagcuccgcggcgucgccccccuccaccucggcaagugcaacaucgccggcuggauccucggcaaccccgagugcgagucccucuccaccgccuccuccugguccuacaucgucgagaccuccuccuccgacaacggcaccugcuaccccggcgacuucaucgacuacgaggagcuccgcgagcagcucuccuccgucuccuccuucgagcgcuucgagaucuuccccaagaccuccuccuggcccaaccacgacuccaacaagggcgucaccgccgccugcccccacgccggcgccaaguccuucuacaagaaccucaucuggcucgucaagaagggcaacuccuaccccaagcucaacaaguccuacaucaacgacaagggcaaggagguccucguccucuggggcauccaccaccccuccaccuccaccgaccagcagucccucuaccagaacgccgacgccuacgucuucgucggcaccucccgcuacuccaagaaguucaagcccgagaucgccauccgccccaagguccgcgaccaggagggccgcaugaacuacuacuggacccucgucgagcccggcgacaagaucaccuucgaggccaccggcaaccucgucgucccccgcuacgccuucaccauggagcgcaacgccggcuccggcaucaucaucuccgacacccccguccacgacugcaacaccaccugccagacccccaagggcgccaucaacaccuccuuccccuuccagaacauccaccccaucaccaucggcaagugccccaaguacgucaaguccaccaagcuccgccucgccaccggccuccgcaacguccccuccauccagucccgcggccucuucggcgccaucgccggcuucaucgagggcggcuggaccggcauggucgacggcugguacggcuaccaccaccagaacgagcagggcuccggcuacgccgccgaccucaaguccacccagaacgccaucgacgagaucaccaacaaggucaacuccgucaucgagaagaugaacacccaguucaccgccgucggcaaggaguucaaccaccucgagaagcgcaucgagaaccucaacaagaaggucgacgacggcuuccucgacaucuggaccuacaacgccgagcuccucguccuccucgagaacgagcgcacccucgacuaccacgacuccaacgucaagaaccucuacgagaagguccgcucccagcucaagaacaacgccaaggagaucggcaacggcugcuucgaguucuaccacaagugcgacaacaccugcauggaguccgucaagaacggcaccuacgacuaccccaaguacuccgaggaggccaagcucaaccgcgaggagaucgacggcgucaagcucgaguccacccgcaucuaccagauccucgccaucuacuccaccgucgccuccucccucguccucgucgucucccucggcgccaucuccuucuggaugugcuccaacggcucccuccagugccgcaucugcaucuga

SEQ ID NO: 104983 - RNA, 1701 nt, Artificial Sequence; identical to SEQ ID NO: 98705
  derived and/or modified CDS sequence (opt2) from hemagglutinin__InfluenzaA__AFK14115

SEQ ID NO: 104984 - RNA, 1701 nt, Artificial Sequence; identical to SEQ ID NO: 98705
  derived and/or modified CDS sequence (opt2) from hemagglutinin__InfluenzaA__AFK14131

SEQ ID NO: 104985 - RNA, 1701 nt, Artificial Sequence; identical to SEQ ID NO: 100387
  derived and/or modified CDS sequence (opt2) from hemagglutinin__InfluenzaA__AFK14139

SEQ ID NO: 104986 - RNA, 1701 nt, Artificial Sequence
  derived and/or modified CDS sequence (opt2) from hemagglutinin__InfluenzaA__AFK14148
augaaggccauccucgucguccuccucuacaccuucgccaccgccaacgccgacacccucugcaucggcuaccacgccaacaacuccaccgacaccgucgacaccguccucgagaagaacgucaccgucacccacuccgucaaccuccucgaggacaagcacaacggcaagcucugcaagcuccgcggcgucgccccccuccaccucggcaagugcaacaucgccggcuggauccucggcaaccccgagugcgagucccucuccaccgccuccuccugguccuacaucgucgagaccuccuccuccgacaacggcaccugcuaccccggcgacuucaucgacuacgaggagcuccgcgagcagcucuccuccgucuccuccuucgagcgcuucgagaucuuccccaagaccuccuccuggcccaaccacgacuccaacaagggcgucaccgccgccugcccccacgccggcgccaaguccuucuacaagaaccucaucuggcucgucaagaagggcaacuccuaccccaagcucuccaaguccuacaucaacgacaagggcaaggagguccucguccucuggggcauccaccaccccuccaccuccgccgaccagcagucccucuaccagaacgccgacgccuacgucuucgucggcaccucccgcuacuccaagaaguucaagcccgagaucgccauccgccccaagguccgcgaccaggagggccgcaugaacuacuacuggacccucgucgagcccggcgacaagaucaccuucgaggccaccggcaaccucgucgucccccgcuacgccuucgccauggagcgcaacgccggcuccggcaucaucaucuccgacacccccguccacgacugcaacaccaccugccagacccccaagggcgccaucaacaccucccuccccuuccagaacauccaccccaucaccaucggcaagugccccaaguacgucaaguccaccaagcuccgccucgccaccggccuccgcaacguccccuccauccagucccgcggccucuucggcgccaucgccggcuucaucgagggcggcuggaccggcauggucgacggcugguacggcuaccaccaccagaacgagcagggcuccggcuacgccgccgaccucaaguccacccagaacgccaucgacaagaucaccaacaaggucaacuccgucaucgagaagaugaacacccaguucaccgccgucggcaaggaguucaaccaccucgagaagcgcaucgagaaccucaacaagaaggucgacgacggcuuccucgacaucuggaccuacaacgccgagcuccucguccuccucgagaacgagcgcacccucgacuaccacgacuccaacgucaagaaccucuacgagaagguccgcaaccagcucaagaacaacgccaaggagaucggcaacggcugcuucgaguucuaccacaagugcgacaacaccugcauggaguccgucaagaacggcaccuacgacuaccccaaguacuccgaggaggccaagcucaaccgcgaggagaucgacggcgucaagcucgaguccacccgcaucuaccagauccucgccaucuacuccaccgucgccuccucccucguccucgucgucucccucggcgccaucuccuucuggaugugcuccaacggcucccuccagugccgcaucugcaucuga

SEQ ID NO: 104987 - RNA, 1701 nt, Artificial Sequence; identical to SEQ ID NO: 100332
  derived and/or modified CDS sequence (opt2) from hemagglutinin__InfluenzaA__AFK14157

SEQ ID NO: 104988 - RNA, 1701 nt, Artificial Sequence; identical to SEQ ID NO: 98705
  derived and/or modified CDS sequence (opt2) from hemagglutinin__InfluenzaA__AFK14166

SEQ ID NO: 104989 - RNA, 1701 nt, Artificial Sequence; identical to SEQ ID NO: 100033
  derived and/or modified CDS sequence (opt2) from hemagglutinin__InfluenzaA__AFK14175

SEQ ID NO: 104990 - RNA, 1701 nt, Artificial Sequence; identical to SEQ ID NO: 101610
  derived and/or modified CDS sequence (opt2) from hemagglutinin__InfluenzaA__AFK14184

SEQ ID NO: 104991 - RNA, 1701 nt, Artificial Sequence; identical to SEQ ID NO: 99058
  derived and/or modified CDS sequence (opt2) from hemagglutinin__InfluenzaA__AFK14193

SEQ ID NO: 104992 - RNA, 1701 nt, Artificial Sequence; identical to SEQ ID NO: 100302
  derived and/or modified CDS sequence (opt2) from hemagglutinin__InfluenzaA__AFK14202

SEQ ID NO: 104993 - RNA, 1701 nt, Artificial Sequence; identical to SEQ ID NO: 99058
  derived and/or modified CDS sequence (opt2) from hemagglutinin__InfluenzaA__AFK14211

SEQ ID NO: 104994 - RNA, 1701 nt, Artificial Sequence
  derived and/or modified CDS sequence (opt2) from hemagglutinin__InfluenzaA__AFK14220
augaaggccauccucgucguccuccucuacaccuucgccaccgccaacgccgacacccucugcaucggcuaccacgccaacaacuccaccgacaccgucgacaccguccucgagaagaacgucaccgucacccacuccgucaaccuccucgaggacaagcacaacggcaagcucugcaagcuccgcggcgucgccccccuccaccucggcaagugcaacaucgccggcuggauccucggcaaccccgagugcgagucccucuccaccgccuccuccugguccuacaucgucgagaccuccuccuccgacaacggcaccugcuaccccggcgacuucaucgacuacgaggagcuccgcgagcagcucuccuccgccuccuccuucgagcgcuacgagaucuuccccaagaccuccuccuggcccaaccacgacuccaacaagggcgucaccgccgccugcccccacgccggcgccaaguccuucuacaagaaccucaucuggcucgucaagaagggcaacuccuaccccaagcucuccaaguccuacaucaacgacaagggcaaggagguccucguccucuggggcauccaccaccccuccaccuccgccgaccagcagucccucuaccagaacgccgacgccuacgucuucgucggcaccucccgcuacuccaagaaguucaagcccgagaucgccauccgccccaagguccgcgaccaggagggccgcaugaacuacuacuggacccucgucgagcccggcgacaagaucaccuucgaggccaccggcaaccucgucgucccccgcuacgccuucgccauggagcgcaacgccggcuccggcaucaucaucuccgacacccccguccacgacugcaacaccaccugccagacccccaagggcgccaucaacaccucccuccccuuccagaacauccaccccaucaccaucggcaagugccccaaguacgucaaguccaccaagcuccgccucgccaccggccuccgcaacguccccuccauccagucccgcggccucuucggcgccaucgccggcuucaucgagggcggcuggaccggcauggucgacggcugguacggcuaccaccaccagaacgagcagggcuccggcuacgccgccgaccucaaguccacccagaacgccaucgacaagaucaccaacaaggucaacuccgucaucgagaagaugaacacccaguucaccgccgucggcaaggaguucaaccaccucgagaagcgcaucgagaaccucaacaagaaggucgacgacggcuuccucgacaucuggaccuacaacgccgagcuccucguccuccucgagaacgagcgcacccucgacuaccacgacuccaacgucaagaaccucuacgagaagguccgcaaccagcucaagaacaacgccaaggagaucggcaacggcugcuucgaguucuaccacaagugcgacaacaccugcauggaguccgucaagaacggcaccuacgacuaccccaaguacuccgaggaggccaagcucaaccgcgaggagaucgacggcgucaagcucgaguccacccgcaucuaccagauccucgccaucuacuccaccgucgccuccucccucguccucgucgucucccucggcgccaucuccuucuggaugugcuccaacggcucccuccagugccgcaucugcaucuga

SEQ ID NO: 104995 - RNA, 1701 nt, Artificial Sequence; identical to SEQ ID NO: 100332
  derived and/or modified CDS sequence (opt2) from hemagglutinin__InfluenzaA__AFK14229

SEQ ID NO: 104996 - RNA, 1701 nt, Artificial Sequence; identical to SEQ ID NO: 103470
  derived and/or modified CDS sequence (opt2) from hemagglutinin__InfluenzaA__AFK14238

SEQ ID NO: 104997 - RNA, 1701 nt, Artificial Sequence
  derived and/or modified CDS sequence (opt2) from hemagglutinin__InfluenzaA__AFK14247
augaaggccauccucgucguccuccucuacaccuucgccaccgccaacgccgacacccucugcaucggcuaccacgccaacaacuccaccgacaccgucgacaccguccucgagaagaacgucaccgucacccacuccgucaaccuccucgaggacaagcacaacggcaagcucugcaagcuccgcggcgucgccccccuccaccucggcaagugcaacaucgccggcuggauccucggcaaccccgagugcgagucccucuccaccgccuccuccugguccuacaucgucgagaccuccuccuccgacaacggcaccugcuaccccggcgacuucaucgacuacgaggagcuccgcgagcagcucuccuccgucuccuccuucgagcgcuucgagaucuuccccaagaccuccuccuggcccaaccacgacuccaacaagggcgucaccgccgccugcccccacgccggcgccaaguccuucuacaagaaccucaucuggcucgucaagaagggcaacuccuaccccaagcucuccaaguccuacaucaacgacaagggcaaggagguccucguccucuggggcauccaccaccccuccaccuccgccgaccagcagucccucuaccagaacgccgacgccuacgucuucgucggcaccucccgcuacuccaagaaguucaagcccgagaucgccauccgccccaagguccgcgaccaggagggccgcaugaacuacuacuggacccucgucgagcccggcgacaagaucaccuucgaggccaccggcaaccucgucgucccccgcuacgccuucgccauggagcgcaacgccggcuccggcaucaucaucuccgacacccccguccacgacugcaacaccaccugccagacccccaagggcgccaugaacaccucccuccccuuccagaacauccaccccaucaccaucggcaagugccccaaguacgucaaguccaccaagcuccgcauggccaccggccuccgcaacguccccuccauccagucccgcggccucuucggcgccaucgccggcuucaucgagggcggcuggaccggcauggucgacggcugguacggcuaccaccaccagaacgagcagggcuccggcuacgccgccgaccucaaguccacccagaacgccaucgacgagaucaccaacaaggucaacuccgucaucgagaagaugaacacccaguucaccgccgucggcaaggaguucaaccaccucgagaagcgcaucgagaaccucaacaagaaggucgacgacggcuuccucgacaucuggaccuacaacgccgagcuccucguccuccucgagaacgagcgcacccucgacuaccacgacuccaacgucaagaaccucuacgagaagguccgcucccagcucaagaacaacgccaaggagaucggcaacggcugcuucgaguucuaccacaagugcgacaacaccugcauggaguccgucaagaacggcaccuacgacuaccccaaguacuccgaggaggccaagcucaaccgcgaggagaucgacggcgucaagcucgaguccacccgcaucuaccagauccucgccaucuacuccaccgucgccuccucccucguccucgucgucucccucggcgccaucuccuucuggaugugcuccaacggcucccuccagugccgcaucugcaucuga

SEQ ID NO: 104998 - RNA, 1701 nt, Artificial Sequence
  derived and/or modified CDS sequence (opt2) from hemagglutinin__InfluenzaA__AFK14272
augaaggccauccucaucguccuccucuacaccuucgccaccgccaacgccgacacccucugcaucggcuaccacgccaacaacuccaccgacaccgucgacaccguccucgagaagaacgucaccgucacccacuccgucaaccuccucgaggacaagcacaacggcaagcucugcaagcucaccggcgucgccccccuccaccucggcaagugcgacaucgccggcuggauccucggcaaccccgagugcgagucccucuccaccgccuccuccugguccuacaucgucgagaccuccuccuccgacaacggcaccugcuaccccggcgacuucaucgacuacgaggagcuccgcgagcagcucuccuccgucuccuccuucgagcgcuucgagaucuuccccaagaccuccuccuggcccaaccacgacuccaacaagggcgucaccgccgccugcccccacgccggcgccaaguccuucuacaagaaccucaucuggcucgucaagaagggcaacuccuaccccaagcucuccaaguccuacaucaacgacaagggcaaggagguccucguccucuggggcauccaccaccccuccaccuccgccgaccagcagucccucuaccagaacgccgacgccuacgucuucgucggcaccucccgcuacuccaagaaguucaagcccgagaucgccauccgccccaagguccgcgaccaggagggccgcaugaacuacuacuggacccucgucgagcccggcgacaagaucaccuucgaggccaccggcaaccucgucgucccccgcuacgccuucgccauggagcgcaacgccggcuccggcaucaucaucuccgacacccccguccacgacugcaacaccaccugccagacccccaagggcgccaucaacaccucccuccccuuccagaacauccaccccaucaccaucggcaagugccccaaguacgucaaguccaccaagcuccgccucgccaccggccuccgcaacguccccuccauccagucccgcggccucuucggcgccaucgccggcuucaucgagggcggcuggaccggcauggucgacggcugguacggcuaccaccaccagaacgagcagggcuccggcuacgccgccgaccucaaguccacccagcacgccaucgacgagaucaccaacaaggucaacuccgucaucgagaagaugaacacccaguucaccgccgucggcaaggaguucaaccaccucgagaagcgcaucgagaaccucaacaagaaggucgacgacggcuuccucgacaucuggaccuacaacgccgagcuccucguccuccucgagaacgagcgcacccucgacuaccacgacuccaacgucaagaaccucuacgagaagguccgcucccagcucaagaacaacgccaaggagaucggcaacggcugcuucgaguucuaccacaagugcgacaacaccugcauggaguccgucaagaacggcaccuacgacuaccccaaguacuccgaggaggccaagcucaaccgcgaggagaucgacggcgucaagcucgaguccacccgcaucuaccagauccucgccaucuacuccaccgucgccuccucccucguccucgucgucucccucggcgccaucuccuucuggaugugcuccaacggcucccuccagugccgcaucugcaucuga

SEQ ID NO: 104999 - RNA, 1701 nt, Artificial Sequence; identical to SEQ ID NO: 99058
  derived and/or modified CDS sequence (opt2) from hemagglutinin__InfluenzaA__AFK14314

SEQ ID NO: 105000 - RNA, 1701 nt, Artificial Sequence
  derived and/or modified CDS sequence (opt2) from hemagglutinin__InfluenzaA__AFK14323
augaaggccauccucgucguccuccucuacaccuucgccaccgccaacgccgacacccucugcaucggcuaccacgccaacaacuccaccgacaccgucgacaccguccucgagaagaacgucaccgucacccacuccgucaaccuccucgaggacaagcacaacggcaagcucugcaagcuccgcggcgucgccccccuccaccucggcaagugcaacaucgccggcuggauccucggcaaccccgagugcgagucccucuccaccgccuccuccugguccuacaucgucgagaccuccaacuccgacaacggcaccugcuaccccggcgacuucaucaacuacgaggagcuccgcgagcagcucuccuccgucuccuccuucgagcgcuucgagaucuuccccaagaccuccuccuggcccaaccacgacuccaacaagggcgucaccgccgccugcccccacgccggcgccaaguccuucuacaagaaccucaucuggcucgucaagaagggcaacuccuaccccaagcucuccaaguccuacaucaacgacaagggcaaggagguccucguccucuggggcauccaccaccccuccaccuccgccgaccagcagucccucuaccagaacgccgacgccuacgucuucgucggcaccucccgcuacuccaagaaguucaagcccgagaucgccauccgccccaagguccgcgaccaggagggccgcaugaacuacuacuggacccucgucgagcccggcgacaagaucaccuucgaggccaccggcaaccucgucgucccccgcuacgccuucgccauggagcgcaacgccggcuccggcaucaucaucuccgacacccccguccacgacugcaacaccaccugccagacccccaagggcgccaucaacaccucccuccccuuccagaacauccaccccaucaccaucggcaagugccccaaguacgucaaguccaccaagcuccgccucgccaccggccuccgcaacguccccuccauccagucccgcggccucuucggcgccaucgccggcuucaucgagggcggcuggaccggcauggucgacggcugguacggcuaccaccaccagaacgagcagggcuccggcuacgccgccgaccucaaguccacccagaacgccaucgacaagaucaccaacaaggucaacuccgucaucgagaagaugaacacccaguucaccgccgucggcaaggaguucaaccaccucgagaagcgcaucgagaaccucaacaagaaggucgacgacggcuuccucgacaucuggaccuacaacgccgagcuccucguccuccucgagaacgagcgcacccucgacuaccacgacuccaacgucaagaaccucuacgagaagguccgcucccagcucaagaacaacgccaaggagaucggcaacggcugcuucgaguucuaccacaagugcgacaacaccugcauggaguccgucaagaacggcaccuacgacuaccccaaguacuccgaggaggccaagcucaaccgcgaggagaucgacggcgucaagcucgaguccacccgcaucuaccagauccucgccaucuacuccaccgucgccuccucccucguccucgucgucucccucggcgccaucuccuucuggaugugcuccaacggcucccuccagugccgcaucugcaucuga

SEQ ID NO: 105001 - RNA, 1701 nt, Artificial Sequence; identical to SEQ ID NO: 103470
  derived and/or modified CDS sequence (opt2) from hemagglutinin__InfluenzaA__AFK14332

SEQ ID NO: 105002 - RNA, 1701 nt, Artificial Sequence
  derived and/or modified CDS sequence (opt2) from hemagglutinin__InfluenzaA__AFK14341
augaaggccauccucgucguccuccucuacaccuucgccaccgccaacgccgacacccucugcaucggcuaccacgccaacaacuccaccgacaccgucgacaccguccucgagaagaacgucaccgucacccacuccgucaaccuccucgaggacaagcacaacggcaagcucugcaagcuccgcggcgucgccccccuccaccucggcaagugcaacaucgccggcuggauccucggcaaccccgagugcgagucccucuccaccgccuccuccugguccuacaucgucgagaccuccuccuccgacaacggcaccugcuaccccggcgacuucaucgacuacgaggagcuccgcgagcagcucuccuccgucuccuccuucgagcgcuucgagaucuuccccaagaccuccuccuggcccaaccacgacuccaacaagggcgucaccgccgccugcccccacgccggcgccaaguccuucuacaagaaccucaucuggcucgucaagaagggcaacuccuaccccaagcucuccaaguccuacaucaacgacaagggcaaggagguccucguccucuggggcauccaccaccccuccaccuccgccgaccagcagucccucuaccagaacgccgacgccuacgucuucgucggcaccucccgcuacuccaagaaguucaagcccgagaucgccauccgccccaagguccgcgagcaggagggccgcaugaacuacuacuggacccucgucgagcccggcgacaagaucaccuucgaggccaccggcaaccucgucgucccccgcuacgccuucgccauggagcgcaacgccggcuccggcaucaucaucuccgacacccccguccacgacugcaacaccaccugccagacccccaagggcgccaucaacaccucccuccccuuccagaacauccaccccaucaccaucggcaagugccccaaguacgucaaguccaccaagcuccgccucgccaccggccuccgcaacguccccuccauccagucccgcggccucuucggcgccaucgccggcuucaucgagggcggcuggaccggcauggucgacggcugguacggcuaccaccaccagaacgagcagggcuccggcuacgccgccgaccucaaguccacccagaacgccaucgacgagaucaccaacaaggucaacuccgucaucgagaagaugaacacccaguucaccgccgucggcaaggaguucaaccaccucgagaagcgcaucgagaaccucaacaagaaggucgacgacggcuuccucgacaucuggaccuacaacgccgagcuccucguccuccucgagaacgagaagacccucgacuaccacgacuccaacgucaagaaccucuacgagaagguccgcucccagcucaagaacaacgccaaggagaucggcaacggcugcuucgaguucuaccacaagugcgacaacaccugcauggaguccgucaagaacggcaccuacgacuaccccaaguacuccgaggaggccaagcucaaccgcgaggagaucgacggcgucaagcucgaguccacccgcaucuaccagauccucgccaucuacuccaccgucgccuccucccucguccucgucgucucccucggcgccaucuccuucuggaugugcuccaacggcucccuccagugccgcaucugcaucuga

SEQ ID NO: 105003 - RNA, 1701 nt, Artificial Sequence; identical to SEQ ID NO: 100125
  derived and/or modified CDS sequence (opt2) from hemagglutinin__InfluenzaA__AFK14350

SEQ ID NO: 105004 - RNA, 1701 nt, Artificial Sequence
  derived and/or modified CDS sequence (opt2) from hemagglutinin__InfluenzaA__AFK14358
augaaggccauccucgucguccuccucuacaccuucgccaccgccaacgccgacacccucugcaucggcuaccacgccaacaacuccaccgacaccgucgacaccguccucgagaagaacgucaccgucacccacuccgucaaccuccucgaggacaagcacaacggcaagcucugcaagcuccgcggcgucgccccccuccaccucggcaagugcaacaucgccggcuggauccucggcaaccccgagugcgagucccucuccaccgccuccuccugguccuacaucgucgagaccuccuccuccgacaacggcgccugcuaccccggcgacuucaucgacuacgaggagcuccgcgagcagcucuccuccgucuccuccuucgagcgcuucgagaucuuccccaagaccuccuccuggcccaaccacgacuccaacaagggcgucaccgccgccugcccccacgccggcgccaaguccuucuacaagaaccucaucuggcucgucaagaagggcaacuccuaccccaagcucuccaaguccuacaucaacgacaagggcaaggagguccucguccucuggggcauccaccaccccuccaccuccgccgaccagcagucccucuaccagaacgccgacgccuacgucuucgucggcaccucccgcuacuccaagaaguucaagcccgagaucgccauccgccccaagguccgcgagcaggagggccgcaugaacuacuacuggacccucgucgagcccggcgacaagaucaccuucgaggccaccggcaaccucgucgucccccgcuacgccuucgccauggagcgcaacgccggcuccggcaucaucaucuccgacacccccguccacgacugcaacaccaccugccagacccccaagggcgccaucaacaccucccuccccuuccagaacauccaccccaucaccaucggcaagugccccaaguacgucaaguccaccaagcuccgccucgccaccggccuccgcaacguccccuccauccagucccgcggccucuucggcgccaucgccggcuucaucgagggcggcuggaccggcauggucgacggcugguacggcuaccaccaccagaacgagcagggcuccggcuacgccgccgaccucaaguccacccagaacgccaucgacgagaucaccaacaaggucaacuccgucaucgagaagaugaacacccaguucaccgccgucggcaaggaguucaaccaccucgagaagcgcaucgagaaccucaacaagaaggucgacgacggcuuccucgacaucuggaccuacaacgccgagcuccucguccuccucgagaacgagaagacccucgacuaccacgacuccaacgucaagaaccucuacgagaagguccgcucccagcucaagaacaacgccaaggagaucggcaacggcugcuucgaguucuaccacaagugcgacaacaccugcauggaguccgucaagaacggcaccuacgacuaccccaaguacuccgaggaggccaagcucaaccgcgaggagaucgacggcgucaagcucgaguccacccgcaucuaccagauccucgccaucuacuccaccgucgccuccucccucguccucgucgucucccucggcgccaucuccuucuggaugugcuccaacggcucccuccagugccgcaucugcaucuga

SEQ ID NO: 105005 - RNA, 1701 nt, Artificial Sequence
  derived and/or modified CDS sequence (opt2) from hemagglutinin__InfluenzaA__AFK14395
augaaggccauccucgucguccuccucuacaccuucgccaccgccaacgccgacacccucugcaucggcuaccacgccaacaacuccaccgacaccgucgacaccguccucgagaagaacgucaccgucacccacuccgucaacauccucgaggacaagcacaacggcaagcucugcaagcuccgcggcgucgccccccuccaccucggcaagugcaacaucgccggcuggauccucggcaaccccgagugcgagucccucuccaccgccuccuccugguccuacaucgucgagaccuccuccuccgagaacggcaugugcugcccccgcgacuucaucgacuacgaggagcuccgcgagcagcucuccuccgucuccuccuucgagcgcuucgagaucuuccccaagaccuccuccuggcccaaccacgacuccaacaagggcgucaccgccgccugcccccacgccggcgccaaguccuucuacaagaaccucaucuggcucgucaagaagggcaacuccuaccccaagcucuccaaguccuacaucaacgacaagggcaaggagguccucguccucuggggcauccaccaccccuccaccuccgccgaccagcagucccucuaccagaacgccgacgccuacgucuucgucggcuccucccgcuacuccaagaaguucaagcccgagaucgccauccgccccaagguccgcgaccaggagggccgcaugaacuacuacuggacccucgucgagcccggcgacaagaucaccuucgaggccaccggcaaccucgucgucccccgcuacgccuucgccauggagcgcaacgccggcuccggcaucaucaucuccgacacccccguccacgacugcaacaccaccugccagacccccaagggcgccaucaacaccucccuccccuuccagaacauccaccccaucaccaucggcaagugccccaaguacgucaaguccaccaagcuccgccucgccaccggccuccgcaacguccccuccauccagucccgcggccucuucggcgccaucgccggcuucaucgagggcggcuggaccggcauggucgacggcugguacggcuaccaccaccagaacgagcagggcuccggcuacgccgccgaccucaaguccacccagaacgccaucgacgagaucaccaacaaggucaacuccgucaucgagaagaugaacacccaguucaccgccgucggcaaggaguucaaccaccucgagaagcgcaucgagaaccucaacaagaaggucgacgacggcuuccucgacaucuggaccuacaacgccgagcuccucguccuccucgagaacgagcgcacccucgacuaccacgacuccaacgucaagaaccucuacgagaagguccgcucccagcucaagaacaacgccaaggaggucggcaacggcugcuucgaguucuaccacaagugcgacaacaccugcauggaguccgucaagaacggcaccuacgacuaccccaaguacuccgaggaggccaagcucaaccgcgaggagaucgacggcgucaagcucgaguccacccgcaucuaccagauccucgccaucuacuccaccgccgccuccucccucguccucgucgucucccucggcgccaucuccuucuggaugugcuccaacggcucccuccagugccgcaucugcaucuga

SEQ ID NO: 105006 - RNA, 1701 nt, Artificial Sequence
  derived and/or modified CDS sequence (opt2) from hemagglutinin__InfluenzaA__AFK14431
augaaggccauccucgucguccuccucuacaccuucgccaccgccaacgccgacacccucugcaucggcuaccacgccaacaacuccaccgacaccgucgacaccguccucgagaagaacgucaccgucacccacuccgucaaccuccucgaggacaagcacaacggcaagcucugcaagcuccgcggcgucgccccccuccaccucggcaagugcaacaucgccggcuggauccucggcaaccccgagugcgagucccucuccaccgccuccuccugguccuacaucgucgagaccuccaacuccgacaacggcaccugcuaccccggcgacuuccucgacuacgaggagcuccgcaagcagcucuccuccgucuccuccuucgagcgcgucgagaucuuccccaagaccuccuccuggcccaaccacgacuccaacaagggcgucaccgccgccugcccccacgccggcgccaaguccuucuacaagaaccucaucuggcucgucaagaagggcaacuccuaccccaagcucuccaaguccuacaucaacgacaagggcaaggagguccucguccucuggggcauccaccaccccuccaccuccgccgaccagcagucccucuaccagaacgccgacgccuacgucuucgucggcaccucccgcuacuccaagaaguucaagcccgagaucgccauccgccccaagguccgcgaccaggagggccgcaugaacuacuacuggacccucgucgagcccggcgacaagaucaccuucgaggccaccggcaaccucgucgucccccgcuacgccuucgccauggagcgcaacgccggcuccggcaucaucaucuccgacacccccguccacgacugcaacaccaccugccagacccccaagggcgccaucaacaccucccuccccuuccagaacauccaccccaucaccaucggcaagugccccaaguacgucaaguccaccaagcuccgccucgccaccggccuccgcaacguccccuccauccagucccgcggccucuucggcgccaucgccggcuucaucgagggcggcuggaccggcauggucgacggcugguacggcuaccaccaccagaacgagcagggcuccggcuacgccgccgaccucaaguccacccagaacgccaucgacaagaucaccaacaaggucaacuccgucaucgagaagaugaacacccaguucaccgccgucggcaaggaguucaaccaccucgagaagcgcaucgagaaccucaacaagaaggucgacgacggcuuccucgacaucuggaccuacaacgccgagcuccucguccuccucgagaacgagcgcacccucgacuaccacgacuccaacgucaagaaccucuacgagaagguccgcucccagcucaagaacaacgccaaggagaucggcaacggcugcuucgaguucuaccacaagugcgacaacaccugcauggaguccgucaagaacggcaccuacgacuaccccaaguacuccgaggaggccaagcucaaccgcgaggagaucgacggcgucaagcucgaguccacccgcaucuaccagauccucgccaucuacuccaccgucgccuccucccucguccucgucgucucccucggcgccaucuccuucuggaugugcuccaacggcucccuccagugccgcaucugcaucuga

SEQ ID NO: 105007 - RNA, 1701 nt, Artificial Sequence; identical to SEQ ID NO: 98705
  derived and/or modified CDS sequence (opt2) from hemagglutinin__InfluenzaA__AFK14456

SEQ ID NO: 105008 - RNA, 1701 nt, Artificial Sequence; identical to SEQ ID NO: 98705
  derived and/or modified CDS sequence (opt2) from hemagglutinin__InfluenzaA__AFK14465

SEQ ID NO: 105009 - RNA, 1701 nt, Artificial Sequence
  derived and/or modified CDS sequence (opt2) from hemagglutinin__InfluenzaA__AFK14536
augaaggccauccucgucguccuccucuacaccuucgccaccgccaacgccgacacccucugcaucggcuaccacgccaacaacuccaccgacaccgucgacaccguccucgagaagaacgucaccgucacccacuccgucaaccuccucgaggacaagcacaacggcaagcucugcaagcuccgcggcgucgccccccuccaccucggcaagugcaacaucgccggcuggauccucggcaaccccgagugcgagucccucuccaccgccuccuccugguccuacaucgucgagaccuacuccuccgacaacggcaccugcuaccccggcgacuucaucgacuacgaggagcuccgcgagcagcucuccuccgucuccuccuucgagcgcuucgagaucuuccccaagaccuccuccuggcccaaccacgacuccaacaagggcgucaccgccgccugcccccacgccggcgccaaguccuucuacaagaaccucaucuggcucgucaagaagggcaacuccuaccccaagcucuccaaguccuacaucaacgacaagggcaaggagguccucguccucuggggcauccaccaccccuccaccuccgccgaccagcagucccucuaccagaacgccgacgccuacgucuucgucggcaccucccgcuacuccaagaaguucaagcccgagaucgccauccgccccaagguccgcgaccaggagggccgcaugaacuacuacuggacccucgucgagcccggcgacaagaucaccuucgaggccaccggcaaccucgucgucccccgcuacgccuucgccauggagcgcaacgccggcuccggcaucaucaucuccgacacccccguccacgacugcaacaccaccugccagacccccaagggcgccaucaacaccucccuccccuuccagaacauccaccccaucaccaucggcaagugccccaaguacgucaaguccaccaagcuccgccucgccaccggccuccgcaacguccccuccauccagucccgcggccucuucggcgccaucgccggcuucaucgagggcggcuggaccggcauggucgacggcugguacggcuaccaccaccagaacgagcagggcuccggcuacgccgccgaccucaaguccacccagcacgccaucgacgagaucaccaacaaggucaacuccgucaucgagaagaugaacacccaguucaccgccgucggcaaggaguucaaccaccucgagaagcgcaucgagaaccucaacaagaaggucgacgacggcuuccucgacaucuggaccuacaacgccgagcuccucguccuccucgagaacgagcgcacccucgacuaccacgacuccaacgucaagaaccucuacgagaagguccgcucccagcucaagaacaacgccaaggagaucggcaacggcugcuucgaguucuaccacaagugcgacaacaccugcauggaguccgucaagaacggcaccuacgacuaccccaaguacuccgaggaggccaagcucaaccgcgaggagaucgacggcgucaagcucgaguccacccgcaucuaccagauccucgccaucuacuccaccgucgccuccucccucguccucgucgucucccucggcgccaucuccuucuggaugugcuccaacggcucccuccagugccgcaucugcaucuga

SEQ ID NO: 105010 - RNA, 1701 nt, Artificial Sequence; identical to SEQ ID NO: 98705
  derived and/or modified CDS sequence (opt2) from hemagglutinin__InfluenzaA__AFK14571

SEQ ID NO: 105011 - RNA, 1701 nt, Artificial Sequence; identical to SEQ ID NO: 103214
  derived and/or modified CDS sequence (opt2) from hemagglutinin__InfluenzaA__AFK14586

SEQ ID NO: 105012 - RNA, 1701 nt, Artificial Sequence
  derived and/or modified CDS sequence (opt2) from hemagglutinin__InfluenzaA__AFK14595
augaaggccauccucgucguccuccucuacaccuucgccaccgccaacgccgacacccucugcaucggcuaccacgccaacaacuccaccgacaccgucgacaccguccucgagaagaacgucaccgucacccacuccgucaaccuccucgaggacaagcacaacggcaagcucugcaagcucaagggcgucgccccccuccaccucggcaagugcaacaucgccggcuggauccucggcaaccccaagugcgagucccucuccaccgccuccuccugguccuacaucggcgagaccuccuccuccaacaacggcaccugcuaccccggcaacuucaucgacuucgaggagcucaagaagcagcucuccuccgucuccuccuucgagcgcuucgagaucuuccccaagaccuccuccuggcccaaccacgacuccaacaagggcgucaccgccgccugcccccacgccggcgccaaguccuucuacaagaaccucaucuggcucgucaagaagggcaacuccuaccccaagcucuccaaguccuacaucaacgacaagggcaaggagguccucguccucuggggcauccaccaccccuccaccuccgccgaccagcagucccucuaccagaacgccgacgccuacgucuucgucggcaccucccgcuacuccaagaaguucaagcccgagaucgccauccgccccaagguccgcgaccaggagggccgcaugaacuacuacuggacccucgucgagcccggcgacaagaucaccuucgaggccaccggcaaccucgucgucccccgcuacgccuucgccauggagcgcaacgccggcuccggcaucaucaucuccgacacccccguccacgacugcaacaccaccugccagacccccaagggcgccaucaacaccucccuccccuuccagaacauccaccccaucaccaucggcaagugccccaaguacgucaaguccaccaagcuccgccucgccaccggccuccgcaacguccccuccauccagucccgcggccucuucggcgccaucgccggcuucaucgagggcggcuggaccggcauggucgacggcugguacggcuaccaccaccagaacgagcagggcuccggcuacgccgccgaccucaaguccacccagaacgccaucgacgagaucaccaacaaggucaacuccgucaucgagaagaugaacacccaguucaccgccgucggcaaggaguucaaccaccucgagaagcgcaucgagaaccucaacaagaaggucgacgacggcuuccucgacaucuggaccuacaacgccgagcuccucguccuccucgagaacgagcgcacccucgacuaccacgacuccaacgucaagaaccucuacgagaagguccgcucccagcucaagaacaacgccaaggagaucggcaacggcugcuucgaguucuaccacaagugcgacaacaccugcauggaguccgucaagaacggcaccuacgacuaccccaaguacuccgaggaggccaagcucaaccgcgaggagaucgacggcgucaagcucgaguccacccgcaucuaccagauccucgccaucuacuccaccgucgccuccucccucguccucgucgucucccucggcgccaucuccuucuggaugugcuccaacggcucccuccagugccgcaucugcaucuga

SEQ ID NO: 105013 - RNA, 1701 nt, Artificial Sequence; identical to SEQ ID NO: 103214
  derived and/or modified CDS sequence (opt2) from hemagglutinin__InfluenzaA__AFK14612

SEQ ID NO: 105014 - RNA, 1701 nt, Artificial Sequence; identical to SEQ ID NO: 98705
  derived and/or modified CDS sequence (opt2) from hemagglutinin__InfluenzaA__AFK14621

SEQ ID NO: 105015 - RNA, 1701 nt, Artificial Sequence
  derived and/or modified CDS sequence (opt2) from hemagglutinin__InfluenzaA__AFK14630
augaaggccauccucgucguccuccucuacaccuucgccaccgccaacgccgacacccucugcaucggcuaccacgccaacaacuccaccgacaccgucgacaccguccucgagaagaacgucaccgucacccacuccgucaaccuccucgaggacaagcacaacggcaagcucugcaagcuccgcggcgucgccccccuccaccucggcaagugcaacaucgccggcuggauccucggcaaccccgagugcgagucccucuccaccgccuccuccugguccuacaucgucgagaccuccuccuccgacaacggcaccugcuaccccggcgacuucaucgacuacgaggagcuccgcgagcagcucuccuccgucuccuccuucgagcgcuucgagaucuuccccaagaccuccuccuggcccaaccacgacuccaacaagggcgucaccgccgccugcccccacgccggcgccaaguccuucuacaagaaccucaucuggcucgucaagaagggcaacuccuaccccaagcucuccaaguccuacaucaacgacaagggcaaggagguccucguccucuggggcauccaccaccccuccacccgcgccgaccuccaguccaucaaccagaacgccgacgccuacgucuucgucggcaccucccgcuacuccaagaaguucaagcccgagaucgccauccgccccaagguccgcgaccaggagggccgcaugaacuacuacuggacccucgucgagcccggcgacaagaucaccuucgaggccaccggcaaccucgucgucccccgcuacgccuucgccauggagcgcaacgccggcuccggcaucaucaucuccgacacccccguccacgacugcaacaccaccugccagacccccaagggcgccaucaacaccucccuccccuuccagaacauccaccccaucaccaucggcaagugccccaaguacgucaaguccaccaagcuccgccucgccaccggccuccgcaacguccccuccauccagucccgcggccucuucggcgccaucgccggcuucaucgagggcggcuggaccggcauggucgacggcugguacggcuaccaccaccagaacgagcagggcuccggcuacgccgccgaccucaaguccacccagaacgccaucgacgagaucaccaacaaggucaacuccgucaucgagaagaugaacacccaguucaccgccgucggcaaggaguucaaccaccucgagaagcgcaucgagaaccucaacaagaaggucgacgacggcuuccucgacaucuggaccuacaacgccgagcuccucguccuccucgagaacgagcgcacccucgacuaccacgacuccaacgucaagaaccucuacgagaagguccgcucccagcucaagaacaacgccaaggagaucggcaacggcugcuucgaguucuaccacaagugcgacaacaccugcauggaguccgucaagaacggcaccuacgacuaccccaaguacuccgaggaggccaagcucaaccgcgaggagaucgacggcgucaagcucgaguccacccgcaucuaccagauccucgccaucuacuccaccgucgccuccucccucguccucgucgucucccucggcgccaucuccuucuggaugugcuccaacggcucccuccagugccgcaucugcaucuga

SEQ ID NO: 105016 - RNA, 1701 nt, Artificial Sequence
  derived and/or modified CDS sequence (opt2) from hemagglutinin__InfluenzaA__AFK14639
augaaggccauccucgucguccuccucuacaccuucgccaccgccaacgccgacacccucugcaucggcuaccacgccaacaacuccaccgacaccgucgacaccguccucgagaagaacgucaccgucacccacuccgucaacauccucgaggacaagcacaacggcaagcucugcaagcuccgcggcgucgccccccuccaccucggcaagugcaacaucgccggcuggauccucggcaaccccgagugcgagucccucuccaccgccuccuccugguccuacaucgucgagaccuccuccuccgacaacggcaccugcuaccccggcgacuucaucgacuacgaggagcuccgcgagcagcucuccuccgucuccuccuucgagcgcuucgagaucuuccccaagaccuccuccuggcccaaccacgacuccaacaagggcgucaccgccgccugcccccacgccggcgccaaguccuucuacaagaaccucaucuggcucgucaagaagggcaacuccuaccccaagcucuccaaguccuacaucaacgacaagggcaaggagguccucguccucuggggcauccaccaccccuccaccuccgccgaccagcagucccucuaccagaacgccgacgccuacgucuucgucggcuccucccgcuacuccaagaaguucaagcccgagaucgccauccgccccaagguccgcgaccaggagggccgcaugaacuacuacuggacccucgucgagcccggcgacaagaucaccuucgaggccaccggcaaccucgucgucccccgcuacgccuucgccauggagcgcaacgccggcuccggcaucaucaucuccgacacccccguccacgacugcaacaccaccugccagacccccaagggcgccaucaacaccucccuccccuuccagaacauccaccccaucaccaucggcaagugccccaaguacgucaaguccaccaagcuccgccucgccaccggccuccgcaacguccccuccauccagucccgcggccucuucggcgccaucgccggcuucaucgagggcggcuggaccggcauggucgacggcugguacggcuaccaccaccagaacgagcagggcuccggcuacgccgccgaccucaaguccacccagaacgccaucgacgagaucaccaacaaggucaacuccgucaucgagaagaugaacacccaguucaccgccgucggcaaggaguucaaccaccucgagaagcgcaucgagaaccucaacaagaaggucgacgacggcuuccucgacaucuggaccuacaacgccgagcuccucguccuccucgagaacgagcgcacccucgacuaccacgacuccaacgucaagaaccucuacgagaagguccgcggccagcucaagaacaacgccaaggagaucggcaacggcugcuucgaguucuaccacaagugcgacaacaccugcauggaguccgucaagaacggcaccuacgacuaccccaaguacuccgaggaggccaagcucaaccgcgaggagaucgacggcgucaagcucgaguccacccgcaucuaccagauccucgccaucuacuccaccgucgccuccucccucguccucgucgucucccucggcgccaucuccuucuggaugugcuccaacggcucccuccagugccgcaucugcaucuga

SEQ ID NO: 105017 - RNA, 1701 nt, Artificial Sequence; identical to SEQ ID NO: 98705
  derived and/or modified CDS sequence (opt2) from hemagglutinin__InfluenzaA__AFK14661

SEQ ID NO: 105018 - RNA, 1701 nt, Artificial Sequence; identical to SEQ ID NO: 103214
  derived and/or modified CDS sequence (opt2) from hemagglutinin__InfluenzaA__AFK14670

SEQ ID NO: 105019 - RNA, 1701 nt, Artificial Sequence; identical to SEQ ID NO: 103214
  derived and/or modified CDS sequence (opt2) from hemagglutinin__InfluenzaA__AFK14678

SEQ ID NO: 105020 - RNA, 1701 nt, Artificial Sequence
  derived and/or modified CDS sequence (opt2) from hemagglutinin__InfluenzaA__AFK14688
augaaggccauccucgucguccuccucuacaccuucgccaccgccaacgccgacacccucugcaucggcuaccacgccaacaacuccaccgacaccgucgacaccguccucgagaagaacgucaccgucacccacuccgucaaccuccucgaggacaagcacaacggcaagcucugcaagcuccgcggcgucgccccccuccaccucggcaagugcaacaucgccggcuggauccucggcaaccccgagugcgagucccucuccaccgccuccuccugguccuacaucgucgagaccuccuccuccgacaacggcaccugcuaccccggcgacuucauccacgacgaggagcuccgcaagcagcucuccuccgucuccuccuucgagcgcuucgagaucuuccccaagaccuccuccuggcccaaccacgacuccaacaagggcgucaccgccgccugcccccacgccggcgccaaguccuucuacaagaaccucaucuggcucgucaagaagggcaacuccuaccccaagcucuccaaguccuacaucaacgacaagggcaaggagguccucguccucuggggcauccaccaccccuccaccuccgccgaccagcagucccucuaccagaacgccgacgccuacgucuucgucggcaccucccgcuacuccaagaaguucaagcccgagaucgccauccgccccaagguccgcgaccaggagggccgcaugaacuacuacuggacccucgucgagcccggcgacaagaucaccuucgaggccaccggcaaccucgucgucccccgcuacgccuucgccauggagcgcaaggccggcuccggcaucaucauccucgacacccccguccacgacuggaacaccaccugcgagacccccaagggcgccgucaacaccucccuccccuuccagaacauccaccccaucaccaucggcaagugccccaaguacgucaaguccaccaagcuccgccucgccaccggccuccgcaacguccccuccauccagucccgcggccucuucggcgccaucgccggcuucaucgagggcggcuggaccggcauggucgacggcugguacggcuaccaccaccagaacgagcagggcuccggcuacgccgccgaccucaaguccacccagaacgccaucgacgagaucaccaacaaggucaacuccgucaucgagaagaugaacacccaguucaccgccgucggcaaggaguucaaccaccucgagaagcgcaucgagaaccucaacaagaaggucgacgacggcuuccucgacaucuggaccuacaacgccgagcuccucguccuccucgagaacgagcgcacccucgacuaccacgacuccaacgucaagaaccucuacgagaagguccgcucccagcucaagaacaacgccaaggagaucggcaacggcugcuucgaguucuaccacaagugcgacaacaccugcauggaguccgucaagaacggcaccuacgacuaccccaaguacuccgaggaggccaagcucaaccgcgaggagaucgacggcgucaagcucgaguccacccgcaucuaccagauccucgccaucuacuccaccgucgccuccucccucguccucgucgucucccucggcgccaucuccuucuggaugugcuccaacggcucccuccagugccgcaucugcaucuga

SEQ ID NO: 105021 - RNA, 1701 nt, Artificial Sequence; identical to SEQ ID NO: 103214
  derived and/or modified CDS sequence (opt2) from hemagglutinin__InfluenzaA__AFK14697

SEQ ID NO: 105022 - RNA, 1701 nt, Artificial Sequence; identical to SEQ ID NO: 103214
  derived and/or modified CDS sequence (opt2) from hemagglutinin__InfluenzaA__AFK14713

SEQ ID NO: 105023 - RNA, 1701 nt, Artificial Sequence; identical to SEQ ID NO: 103214
  derived and/or modified CDS sequence (opt2) from hemagglutinin__InfluenzaA__AFK14722

SEQ ID NO: 105024 - RNA, 1701 nt, Artificial Sequence
  derived and/or modified CDS sequence (opt2) from hemagglutinin__InfluenzaA__AFK14731
augaaggccauccucgucguccuccucuacaccuucgccaccgccaacgccgacacccucugcaucggcuaccacgccaacaacuccaccgacaccgucgacaccguccucgagaagaacgucaccgucacccacuccgucaaccuccucgaggacaagcacaacggcaagcucugcaagcuccgcggcgucgccccccuccaccucggcaagugcaacaucgccggcuggauccucggcaaccccgagugcgagucccucuccaccgccuccuccugguccuacaucgucgagaccuccuccuccgacaacggcaccugcuaccccggcgacuucaucgacuacgaggagcuccgcaagcagcucuccuccgucuccuccuucgagcgcgucgagaucuuccccaagaccuccuccuggcccaaccacgacuccaacaagggcgucaccgccgccugcccccacgccggcgccaaguccuucuacaagaaccucaucuggcucgucaagaagggcaacuccuaccccaagcucuccaaguccuacaucaacgacaagggcaaggagguccucguccucuggggcauccaccaccccuccaccuccgccgaccagcagucccucuaccagaacgccgacgccuacgucuucgucggcaccucccgcuacuccaagaaguucaagcccgagaucgccauccgccccaagguccgcgaccaggagggccgcaugaacuacuacuggacccucgucgagcccggcgacaagaucaccuucgaggccaccggcaaccucgucgucccccgcuacgccuucgccauggagcgcaacgccggcuccggcaucaucaucuccgacacccccguccacgacugcaacaccaccugccagacccccaagggcgccgucaacaccucccuccccuuccagaacauccaccccaucaccaucggcaagugccccaaguacgucaaguccaccaagcuccgccucgccaccggccuccgcaacguccccuccauccagucccgcggccucuucggcgccaucgccggcuucaucgagggcggcuggaccggcauggucgacggcugguacggcuaccaccaccagaacgagcagggcuccggcuacgccgccgaccucaaguccacccagaacgccaucgacgagaucaccaacaaggucaacuccgucaucgagaagaugaacacccaguucaccgccgucggcaaggaguucaaccaccucgagaagcgcaucgagaaccucaacaagaaggucgacgacggcuuccucgacaucuggaccuacaacgccgagcuccucguccuccucgagaacgagcgcacccucgacuaccacgacuccaacgucaagaaccucuacgagaagguccgcucccagcucaagaacaacgccaaggagaucggcaacggcugcuucgaguucuaccacaagugcgacaacaccugcauggaguccgucaagaacggcaccuacgacuaccccaaguacuccgaggaggccaagcucaaccgcgaggagaucgacggcgucaagcucgaguccacccgcaucuaccagauccucgccaucuacuccaccgucgccuccucccucguccucgucgucucccucggcgccaucuccuucuggaugugcuccaacggcucccuccagugccgcaucugcaucuga

SEQ ID NO: 105025 - RNA, 1701 nt, Artificial Sequence; identical to SEQ ID NO: 103214
  derived and/or modified CDS sequence (opt2) from hemagglutinin__InfluenzaA__AFK14740

SEQ ID NO: 105026 - RNA, 1701 nt, Artificial Sequence; identical to SEQ ID NO: 103214
  derived and/or modified CDS sequence (opt2) from hemagglutinin__InfluenzaA__AFK14749

SEQ ID NO: 105027 - RNA, 1701 nt, Artificial Sequence; identical to SEQ ID NO: 103214
  derived and/or modified CDS sequence (opt2) from hemagglutinin__InfluenzaA__AFK14756

SEQ ID NO: 105028 - RNA, 1701 nt, Artificial Sequence; identical to SEQ ID NO: 103214
  derived and/or modified CDS sequence (opt2) from hemagglutinin__InfluenzaA__AFK14764

SEQ ID NO: 105029 - RNA, 1701 nt, Artificial Sequence
  derived and/or modified CDS sequence (opt2) from hemagglutinin__InfluenzaA__AFK14779
augaaggccauccucgucguccuccucuacaccuucgccaccgccaacgccgacacccucugcaucggcuaccacgccaacaacuccaccgacaccgucgacaccguccucgagaagaacgucaccgucacccacuccgucaaccuccucgaggacaagcacaacggcaagcucugcaagcucggcggcgucgccccccuccaccucggcaagugcaacaucgccggcuggauccucggcaaccccgagugcgagucccucuccaccgccuccuccugguccuacaucgucgagaccuccuccuccgacaacggcaccugcuaccccggcaacuucaucgacuacgaggagcuccgcgagcagcucuccuccgucuccuccuucgagcgcuucgagaucuuccccaagaccuccuccuggcccaaccacgacuccaacaagggcgucaccgccgccugcccccacgccggcgccaaguccuucuacaagaaccucaucuggcucgucaagaagggcaacuccuaccccaagcucuccaaguccuacaucaacgacaagggcaaggagguccucguccucuggggcauccaccaccccuccaccuccgccgaccagcagucccucuaccagaacgccgacgccuacgucuucgucggcaccucccgcuacuccaagaaguucaagcccgagaucgccauccgccccaagguccgcgaccaggagggccgcaugaacuacuacuggacccucgucgagcccggcgacaagaucaccuucgaggccaccggcaaccucgucgucccccgcuacgccuucgccauggagcgcaacgccggcuccggcaucaucaucuccgacacccccguccacgacugcaacaccaccugccagacccccaagggcgccaucaacaccucccuccccuuccagaacauccaccccaucaccaucggcaagugccccaaguacgucaaguccaccaagcuccgccucgccaccggccuccgcaacguccccuccauccagucccgcggccucuucggcgccaucgccggcuucaucgagggcggcuggaccggcauggucgacggcugguacggcuaccaccaccagaacgagcagggcuccggcuacgccgccgaccucaaguccacccagaacgccaucgacgagaucaccaacaaggucaacuccgucaucgagaagaugaacacccaguucaccgccgucggcaaggaguucaaccaccucgagaagcgcaucgagaaccucaacaagaaggucgacgacggcuuccucgacaucuggaccuacaacgccgagcuccucguccuccucgagaacgagcgcacccucgacuaccacgacuccaacgucaagaaccucuacgagaagguccgcucccagcucaagaacaacgccaaggagaucggcaacggcugcuucgaguucuaccacaagugcgacaacaccugcauggaguccgucaagaacggcaccuacgacuaccccaaguacuccgaggaggccaagcucaaccgcgaggagaucgacggcgucaagcucgaguccacccgcaucuaccagauccucgccaucuacuccaccgucgccuccucccucguccucgucgucucccucggcgccaucuccuucuggaugugcuccaacggcucccuccagugccgcaucugcaucuga

SEQ ID NO: 105030 - RNA, 1701 nt, Artificial Sequence
  derived and/or modified CDS sequence (opt2) from hemagglutinin__InfluenzaA__AFK14788
augaaggccauccucgucguccuccucuacaccuucgccaccgccaacgccgacacccucugcaucggcuaccacgccaacaacuccaccgacaccgucgacaccguccucgagaagaacgucaccgucacccacuccgucaacauccucgaggacaagcacaacggcaagcucugcaagcuccgcggcgucgccccccuccaccucggcaagugcaacaucgccggcuggauccucggcaaccccgagugcgagucccucuccaccgccuccuccugguccuacaucgucgagaccuccuccuccgacaacggcaccugcuaccccggcgacuucaucgacuacgaggagcuccgcgagcagcucuccuccgucuccuccuucgagcgcuucgagaucuuccccaagaccuccuccuggcccaaccacgacuccaacaagggcgucaccgccgccugcccccacgccggcgccaaguccuucuacaagaaccucaucuggcucgucaagaagggcaacuccuaccccaagcuccgcaaguccuacaucaacgacaagggcaaggagguccucguccucuggggcauccaccaccccuccaccuccgccgaccagcagucccucuaccagaacgccgacgccuacgucuucgucggcuccucccgcuacuccaagaaguucaagcccgagaucgccauccgccccaagguccgcgaccaggagggccgcaugaacuacuacuggacccucgucgagcccggcgacaagaucaccuucgaggccaccggcaaccucgucgucccccgcuacgccuucgccauggagcgcaacgccggcuccggcaucaucaucuccgacacccccguccacgacugcaacaccaccugccagacccccaagggcgccaucaacaccucccuccccuuccagaacauccaccccaucaccaucggcaagugccccaaguacgucaaguccaccaagcuccgccucgccaccggccuccgcaacguccccuccauccagucccgcggccucuucggcgccaucgccggcuucaucgagggcggcuggaccggcauggucgacggcugguacggcuaccaccaccagaacgagcagggcuccggcuacgccgccgaccucaaguccacccagaacgccaucgacgagaucaccaacaaggucaacuccgucaucgagaagaugaacacccaguucaccgccgucggcaaggaguucaaccaccucgagaagcgcaucgagaaccucaacaagaaggucgacgacggcuuccucgacaucuggaccuacaacgccgagcuccucguccuccucgagaacgagcgcacccucgacuaccacgacuccaacgucaagaaccucuacgagaagguccgcucccagcucaagaacaacgccaaggaggucggcaacggcugcuucgaguucuaccacaagugcgacaacaccugcauggaguccgucaagaacggcaccuacgacuaccccaaguacuccgaggaggccaagcucaaccgcgaggagaucgacggcgucaagcucgaguccacccgcaucuaccagauccucgccaucuacuccaccgccgccuccucccucguccucgucgucucccucggcgccaucuccuucuggaugugcuccaacggcucccuccagugccgcaucugcaucuga

SEQ ID NO: 105031 - RNA, 1701 nt, Artificial Sequence
  derived and/or modified CDS sequence (opt2) from hemagglutinin__InfluenzaA__AFK14798
augaaggccauccucgucguccuccucuacaccuucgccaccgccaacgccgacacccucugcaucggcuaccacgccaacaacuccaccgacaccgucgacaccguccucgagaagaacgucaccgucacccacuccgucaaccuccucgaggacaagcacaacggcaagcucugcaagcuccgcggcgucgccccccuccaccucggcaagugcaacaucgccggcuggauccucggcaaccccgagugcgagucccucuccaccgccuccuccugguccuacaucgucgagaccuccuccuccgacaacggcaccugcuaccccggcgacuucaucaacuacgaggagcuccgcaagcagcucuccuccgucuccuccuucgagcgcgucgagaucuuccccaagaccuccuccuggcccaaccacgacuccaacaagggcgucaccgccgccugcccccacgccggcgccaaguccuucuacaagaaccucaucuggcucgucaagaagggcaacuccuaccccaagcucuccaaguccuacaucaacgacaagggcaaggagguccucguccucuggggcauccaccaccccuccaccuccgccgaccagcagucccucuaccagaacgccgacgccuacgucuucgucggcaccucccgcuacuccaagaaguucaagcccgagaucgccauccgccccaagguccgcgaccaggagggccgcaugaacuacuacuggacccucgucgagcccggcgacaagaucaccuucgaggccaccggcaaccucgucgucccccgcuacgccuucgccauggagcgcaacgccggcuccggcaucaucaucuccgacacccccguccacgacugcaacaccaccugccagacccccaacggcgccaucaacaccucccuccccuuccagaacauccaccccaucaccaucggcaagugccccaaguacgucaaguccaccaagcuccgccucgccaccggccuccgcaacguccccuccauccagucccgcggccucuucggcgccaucgccggcuucaucgagggcggcuggaccggcauggucgacggcugguacggcuaccaccaccagaacgagcagggcuccggcuacgccgccgaccucaaguccacccagaacgccaucgacaagaucaccaacaaggucaacuccgucaucgagaagaugaacacccaguucaccgccgucggcaaggaguucaaccaccucgagaagcgcaucgagaaccucaacaagaaggucgacgacggcuuccucgacaucuggaccuacaacgccgagcuccucguccuccucgagaacgagcgcacccucgacuaccacgacuccaacgucaagaaccucuacgagaagguccgcucccagcucaagaacaacgccaaggagaucggcaacggcugcuucgaguucuaccacaagugcgacaacaccugcauggaguccgucaagaacggcaccuacgacuaccccaaguacuccgaggaggccaagcucaaccgcgaggagaucgacggcgucaagcucgaguccacccgcaucuaccagauccucgccaucuacuccaccgucgccuccucccucguccucgucgucucccucggcgccaucuccuucuggaugugcuccaacggcucccuccagugccgcaucugcaucuga

SEQ ID NO: 105032 - RNA, 1701 nt, Artificial Sequence
  derived and/or modified CDS sequence (opt2) from hemagglutinin__InfluenzaA__AFK14814
augaaggccauccucgucguccuccucuacaccuucgccaccgccaacgccgacacccucugcaucggcuaccacgccaacaacuccaccgacaccgucgacaccguccucgagaagaacgucaccgucacccacuccgucaaccuccucgaggacaagcacaacggcaagcucugcaagcuccgcggcgucgccccccuccaccucggcaagugcaacaucgccggcuggauccucggcaaccccgagugcgagucccucuccaccgccuccuccugguccuacaucgucgagaccuccuccuccgacaacggcaccugcuaccccggcgacuucaucgacuacgaggagcuccgcgagcagcucuccuccgucuccuccuacgagcgcuacgagaucuuccccaagaccuccuccuggcccaaccacgacuccaacaagggcgucaccgccgccugcccccacgccggcgccaaguccuucuacaagaaccucaucuggcucgucaagaagggcaacuccuaccccaagcucuccaaguccuacaucaacgacaagggcaaggagguccucguccucuggggcauccaccaccccuccaccuccgccgaccagcagucccucuaccagaacgccgacgccuacgucuucgucggcaccucccgcuacuccaagaaguucaagcccgagaucgccauccgccccaagguccgcgagcaggagggccgcaugaacuacuacuggacccucgucgagcccggcgacaagaucaccuucgaggccaccggcaaccucgucgucccccgcuacgccuucgccauggagcgcaacgccggcuccggcaucaucaucuccgacacccccguccacgacugcaacaccaccugccagacccccaagggcgccaucaacaccucccuccccuuccagaacauccaccccaucaccaucggcaagugccccaaguacgucaaguccaccaagcuccgccucgccaccggccuccgcaacguccccuccauccagucccgcggccucuucggcgccaucgccggcuucaucgagggcggcuggaccggcauggucgacggcugguacggcuaccaccaccagaacgagcagggcuccggcuacgccgccgaccucaaguccacccagaacgccaucgacgagaucaccaacaaggucaacuccgucaucgagaagaugaacacccaguucaccgccgucggcaaggaguucaaccaccucgagaagcgcaucgagaaccucaacaagaaggucgacgacggcuuccucgacaucuggaccuacaacgccgagcuccucguccuccucgagaacgagcgcacccucgacuaccacgacuccaacgucaagaaccucuacgagaagguccgcucccagcucaagaacaacgccaaggagaucggcaacggcugcuucgaguucuaccacaagugcgacaacaccugcauggaguccgucaagaacggcaccuacgacuaccccaaguacuccgaggaggccaagcucaaccgcgaggagaucgacggcgucaagcucgaguccacccgcaucuaccagauccucgccaucuacuccaccgucgccuccucccucguccucgucgucucccucggcgccaucuccuucuggaugugcuccaacggcucccuccagugccgcaucugcaucuga

SEQ ID NO: 105033 - RNA, 1701 nt, Artificial Sequence
  derived and/or modified CDS sequence (opt2) from hemagglutinin__InfluenzaA__AFK14831
augaaggccauccucgucguccuccucuacaccuucgccaccgccaacgccgacacccucugcaucggcuaccacgccaacaacuccaccgacaccgucgacaccguccucgagaagaacgucaccgucacccacuccgucaaccuccucgaggacaagcacaacggcaagcucugcaagcuccgcggcgucgccccccuccaccucggcaagugcaacaucgccggcuggauccucggcaaccccgagugcgagucccucuccaccgccuccuccugguccuacaucgucgagaccuccuccuccgacaacggcaccugcuaccccggcgacuucuccgacuacgaggagcuccgcgagcagcucuccuccgucuccuccuucgagcgcuucgagaucuuccccaagaccuccuccuggcccaaccacgacuccaacaagggcgucaccgccgccugcccccacgccggcgccaaguccuucuacaagaaccucaucuggcucgucaagaagggcaacuccuaccccaagcucuccaaguccuacaucaacgacaagggcaaggagguccucguccucuggggcauccaccaccccuccaccuccgccgaccagcagucccucuaccagaacgccgacgccuacgucuucgucggcaccucccgcuacuccaagaaguucaagcccgagaucgccauccgccccaagguccgcgaccaggagggccgcaugaacuacuacuggacccucgucgagcccggcgacaagaucaccuucgaggccaccggcaaccucgucgucccccgcuacgccuucgccauggagcgcaacgccggcuccggcaucaucaucuccgacacccccguccacgacugcaacaccaccugccagacccccaagggcgccaucaacaccucccuccccuuccagaacauccaccccaucaccaucggcaagugccccaaguacgucaaguccaccaagcuccgccucgccaccggccuccgcaacguccccuccauccagucccgcggccucuucggcgccaucgccggcuucaucgagggcggcuggaccggcauggucgacggcugguacggcuaccaccaccagaacgagcagggcuccggcuacgccgccgaccucaaguccacccagaacgccaucgacgagaucaccaacaaggucaacuccgucaucgagaagaugaacacccaguucaccgccgucggcaaggaguucaaccaccucgagaagcgcaucgagaaccucaacaagaaggucgacgacggcuuccucgacaucuggaccuacaacgccgagcuccucguccuccucgagaacgagcgcacccucgacuaccacgacuccaacgucaagaaccucuacgagaagguccgcucccagcucaagaacaacgccaaggagaucggcaacggcugcuucgaguucuaccacaagugcgacaacaccugcauggaguccgucaagaacggcaccuacgacuaccccaaguacuccgaggaggccaagcucaaccgcgaggagaucgacggcgucaagcucgaguccacccgcaucuaccagauccucgccaucuacuccaccgucgccuccucccucguccucgucgucucccucggcgccaucuccuucuggaugugcuccaacggcucccuccagugccgcaucugcaucuga

SEQ ID NO: 105034 - RNA, 1701 nt, Artificial Sequence; identical to SEQ ID NO: 98705
  derived and/or modified CDS sequence (opt2) from hemagglutinin__InfluenzaA__AFK14839

SEQ ID NO: 105035 - RNA, 1701 nt, Artificial Sequence
  derived and/or modified CDS sequence (opt2) from hemagglutinin__InfluenzaA__AFK14847
augaaggccauccucgucguccuccucuacaccuucgccaccgccaacgccgacacccucugcaucggcuaccacgccaacaacuccaccgacaccgucgacaccguccucgagaagaacgucaccgucacccacuccgucaaccuccucgaggacaagcacaacggcaagcucugcaagcuccgcggcgucgccccccuccaccucggcaagugcaacaucgccggcuggauccucggcaaccccgagugcgagucccucuccaccgccuccuccugguccuacaucgucgagaccuccuccuccgacaacggcaccugcuaccccggcgacuucaucgacuacgaggagcuccgcgagcagcucuccuccgccuccuccuucgagcgcuacgagaucuuccccaagaccuccuccuggcccaaccacgacuccaacaagggcgucaccgccgccugcccccacgccggcgccaaguccuucuacaagaaccucaucuggcucgucaagaagggcaacuccuaccccaagcucuccaaguccuacaucaacgacaagggcaaggagguccucguccucuggggcauccaccaccccuccaccuccgccgaccagcagucccucuaccagaacgccgacgccuacgucuucgucggcaccucccgcuacuccaagaaguucaagcccgagaucgccauccgccccaagguccgcgaccaggagggccgcaugaacuacuacuggacccucgucgagcccggcgacaagaucaccuucgaggccaccggcaaccucgucgucccccgcuacgccuucgccauggagcgcaacgccggcuccggcaucaucaucuccgacacccccguccacgacugcaacaccaccugccagacccccaagggcgccaucaacaccucccuccccuuccagaacauccaccccaucaccaucggcaagugccccaaguacgucaaguccaccaagcuccgccucgccaccggccuccgcaacguccccuccauccagucccgcggccucuucggcgccaucgccggcuucaucgagggcggcuggaccggcauggucgacggcugguacggcuaccaccaccagaacgagcagggcuccggcuacgccgccgaccucaaguccacccagaacgccaucgacgagaucaccaacaaggucaacuccgucaucgagaagaugaacacccaguucaccgccgucggcaaggaguucaaccaccucgagaagcgcaucgagaaccucaacaagaaggucgacgacggcuuccucgacaucuggaccuacaacgccgagcuccucguccuccucgagaacgagcgcacccucgacuaccacgacuccaacgucaagaaccucuacgagaagguccgcucccagcucaagaacaacgccaaggagaucggcaacggcugcuucgaguucuaccacaagugcgacaacaccugcauggaguccgucaagaacggcaccuacgacuaccccaaguacuccgaggaggccaagcucaaccgcgaggagaucgacggcgucaagcucgaguccacccgcaucuaccagauccucgccaucuacuccaccgucgccuccucccucguccucgucgucucccucggcgccaucuccuucuggaugugcuccaacggcucccuccagugccgcaucugcaucuga

SEQ ID NO: 105036 - RNA, 1701 nt, Artificial Sequence; identical to SEQ ID NO: 103214
  derived and/or modified CDS sequence (opt2) from hemagglutinin__InfluenzaA__AFK14868

SEQ ID NO: 105037 - RNA, 1701 nt, Artificial Sequence; identical to SEQ ID NO: 99869
  derived and/or modified CDS sequence (opt2) from hemagglutinin__InfluenzaA__AFK14884

SEQ ID NO: 105038 - RNA, 1701 nt, Artificial Sequence; identical to SEQ ID NO: 99869
  derived and/or modified CDS sequence (opt2) from hemagglutinin__InfluenzaA__AFK14892

SEQ ID NO: 105039 - RNA, 1701 nt, Artificial Sequence; identical to SEQ ID NO: 99869
  derived and/or modified CDS sequence (opt2) from hemagglutinin__InfluenzaA__AFK14901

SEQ ID NO: 105040 - RNA, 1701 nt, Artificial Sequence; identical to SEQ ID NO: 99869
  derived and/or modified CDS sequence (opt2) from hemagglutinin__InfluenzaA__AFK14910

SEQ ID NO: 105041 - RNA, 1701 nt, Artificial Sequence; identical to SEQ ID NO: 98705
  derived and/or modified CDS sequence (opt2) from hemagglutinin__InfluenzaA__AFK14919

SEQ ID NO: 105042 - RNA, 1701 nt, Artificial Sequence; identical to SEQ ID NO: 98705
  derived and/or modified CDS sequence (opt2) from hemagglutinin__InfluenzaA__AFK14929

SEQ ID NO: 105043 - RNA, 1701 nt, Artificial Sequence; identical to SEQ ID NO: 104222
  derived and/or modified CDS sequence (opt2) from hemagglutinin__InfluenzaA__AFK25599

SEQ ID NO: 105044 - RNA, 1701 nt, Artificial Sequence
  derived and/or modified CDS sequence (opt2) from hemagglutinin__InfluenzaA__AFK25601
augaaggccauccucgucguccuccucuacaccuucgccaccgccaacgccgacacccucugcaucggcuaccacgccaacaacuccaccgacaccgucgacaccguccucgagaagaacgucaccgucacccacuccgucaaccuccucgaggacaagcacaacggcaagcucugcaagcuccgcggcgucgccccccuccaccucggcaagugcaacaucgccggcuggauccucggcaaccccgagugcgucacccucuccaccgccuccuccugguccuacaucgucgagaccuccuccuccgacaacggcaccugcuaccccggcgacuucaucgacuacgaggagcuccgcgagcagcucuccuccgucuccuccuucgagcgcuucgagaucuuccccaagaccuccuccuggcccaaccacgacuccaacaagggcgucaccgccgccugcccccacgccggcgccaagggcuucuacaagaaccucaucuggcucgucaagaagggcaacuccuaccccaagcucuccaaguccuacaucaacgacaagggcaaggagguccucguccucuggggcauccaccaccccuccaccaccgccgaccagcagucccucuaccagaacgccgacaccuacgucuucgucggcaccucccgcuacuccaagaaguucaagcccgagaucgccauccgccccaagguccgcgaccaggagggccgcaugaacuacuacuggacccucgucgagcccggcgacaagaucaccuucgaggccaccggcaaccucgucgucccccgcuacgccuucgccauggagcgcgacgccggcuccggcaucaucaucuccgacacccccguccacgacugcaacaccaccugccagacccccaagggcgccaucaacaccucccuccccuuccagaacauccaccccaucaccaucggcaagugccccaaguacgucaaguccaccaagcuccgccucgccaccggccuccgcaacguccccuccauccagucccgcggccucuucggcgccaucgccggcuucaucgagggcggcuggaccggcauggucgacggcugguacggcuaccaccaccagaacgagcagggcuccggcuacgccgccgaccucaaguccacccagaacgccaucgacaagaucaccaacaaggucaacuccgucaucgagaagaugaacacccaguucaccgccgucggcaaggaguucaaccaccucgagaagcgcaucgagaaccucaacaagaaggucgacgacggcuuccucgacaucuggaccuacaacgccgagcuccucguccuccucgagaacgagcgcacccucgacuaccacgacuccaacgucaagaaccucuacgagaagguccgcaaccagcucaagaacaacgccaaggagaucggcaacggcugcuucgaguucuaccacaagugcgacaacaccugcauggaguccgucaagaacggcaccuacgacuaccccaaguacuccgaggaggccaagcucaaccgcgaggagaucgacggcgucaagcucgaguccacccgcaucuaccagauccucgccaucuacuccaccgccgccuccucccucguccucgucgucucccucggcgccaucuccuucuggaugugcuccaacggcucccuccagugccgcaucugcaucuga

SEQ ID NO: 105045 - RNA, 1701 nt, Artificial Sequence; identical to SEQ ID NO: 104222
  derived and/or modified CDS sequence (opt2) from hemagglutinin__InfluenzaA__AFK25603

SEQ ID NO: 105046 - RNA, 1701 nt, Artificial Sequence
  derived and/or modified CDS sequence (opt2) from hemagglutinin__InfluenzaA__AFK25605
augaaggccauccucgucguccuccucuacaccuucgccaccgccaacgccgacacccucugcaucggcuaccacgccaacaacuccaccgacaccgucgacaccguccucgagaagaacgucaccgucacccacuccgucaaccuccucgaggacaagcacaacggcaagcucugcaagcuccgcggcgucgccccccuccaccucggcaagugcaacaucgccggcuggauccucggcaaccccgagugcgagacccucuccaccgccuccuccugguccuacaucgucgagaccuccuccuccgacaacggcaccugcuaccccggcgacuucaucgacuacgaggagcuccgcgagcagcucuccuccgucuccuccuucgagcgcuucgagaucuuccccaagaccuccuccuggcccaaccacgacuccaacaagggcgucaccgccgccugcccccacgccggcgccaagggcuucuacaagaaccucaucuggcucgucaagaagggcaacuccuaccccaagcucuccaaguccuacaucaacgacaagggcaaggagguccucguccucuggggcauccaccaccccuccaccaccgccgaccagcagucccucuaccagaacgccgacaccuacgucuucgucggcaccucccgcuacuccaagaaguucaagcccgagaucgccauccgccccaagguccgcgaccaggagggccgcaugaacuacuacuggacccucgucgagcccggcgacaagaucaccuucgaggccaccggcaaccucgucgucccccgcuacgccuucgccauggagcgcgacgccggcuccggcaucaucaucuccgacacccccguccacgacugcaacaccaccugccagacccccaagggcgccaucaacaccucccuccccuuccagaacauccaccccaucaccaucggcaagugccccaaguacguccgcuccaccaagcuccgccucgccaccggccuccgcaacguccccuccauccagucccgcggccucuucggcgccaucgccggcuucaucgagggcggcuggaccggcauggucgacggcugguacggcuaccaccaccagaacgagcagggcuccggcuacgccgccgaccucaaguccacccagaacgccaucgacaagaucaccaacaaggucaacuccgucaucgagaagaugaacacccaguucaccgccgucggcaaggaguucaaccaccucgagaagcgcaucgagaaccucaacaagaaggucgacgacggcuuccucgacaucuggaccuacaacgccgagcuccucguccuccucgagaacgagcgcacccucgacuaccacgacuccaacgucaagaaccucuacgagaagguccgcaaccagcucaagaacaacgccaaggagaucggcaacggcugcuucgaguucuaccacaagugcgacaacaccugcauggaguccgucaagaacggcaccuacgacuaccccaaguacuccgaggaggccaagcucaaccgcgaggagaucgacggcgucaagcucgaguccacccgcaucuaccagauccucgccaucuacuccaccgccgccuccucccucguccucgucgucucccucggcgccaucuccuucuggaugugcuccaacggcucccuccagugccgcaucugcaucuga

SEQ ID NO: 105047 - RNA, 1701 nt, Artificial Sequence; identical to SEQ ID NO: 104450
  derived and/or modified CDS sequence (opt2) from hemagglutinin__InfluenzaA__AFK74526

SEQ ID NO: 105048 - RNA, 1701 nt, Artificial Sequence; identical to SEQ ID NO: 98705
  derived and/or modified CDS sequence (opt2) from hemagglutinin__InfluenzaA__AFK74534

SEQ ID NO: 105049 - RNA, 1701 nt, Artificial Sequence; identical to SEQ ID NO: 98705
  derived and/or modified CDS sequence (opt2) from hemagglutinin__InfluenzaA__AFK74544

SEQ ID NO: 105050 - RNA, 1701 nt, Artificial Sequence; identical to SEQ ID NO: 98705
  derived and/or modified CDS sequence (opt2) from hemagglutinin__InfluenzaA__AFK74554

SEQ ID NO: 105051 - RNA, 1701 nt, Artificial Sequence; identical to SEQ ID NO: 98947
  derived and/or modified CDS sequence (opt2) from hemagglutinin__InfluenzaA__AFK74564

SEQ ID NO: 105052 - RNA, 1701 nt, Artificial Sequence; identical to SEQ ID NO: 101260
  derived and/or modified CDS sequence (opt2) from hemagglutinin__InfluenzaA__AFK74575

SEQ ID NO: 105053 - RNA, 1701 nt, Artificial Sequence; identical to SEQ ID NO: 98692
  derived and/or modified CDS sequence (opt2) from hemagglutinin__InfluenzaA__AFK74585

SEQ ID NO: 105054 - RNA, 1701 nt, Artificial Sequence
  derived and/or modified CDS sequence (opt2) from hemagglutinin__InfluenzaA__AFK74595
augaaggccauccucgucguccuccucuacaccuucgccaccgccaacgccgacacccucugcaucggcuaccacgccaacaacuccaccgacaccgucgacaccguccucgagaagaacgucaccgucacccacuccgucaaccuccucgaggacaagcacaacggcaagcucugcaagcuccgcggcgucgccccccuccaccucggcaagugcaacaucgccggcuggauccucggcaaccccgagugcgagucccucuccaccgccuccuccugguccuacaucgucgagaccuccuccuccgacaacggcaccugcuaccccggcgacuucaucgacuacgaggagcuccgcgagcagcucuccuccgucuccuccuucgagcgcuucgagaucuuccccaagaccuccuccuggcccaaccacgaccucaacaagggcgucaccgccgccugcccccacgccggcgccaaguccuucuacaagaaccucaucuggcucgucaagaagggcaacuccuaccccaagcucuccaaguccuacaucaacgacaagggcaaggagguccucguccucuggggcauccaccaccccuccaccuccgccgaccagcagucccucuaccagaacgccgacgccuacgucuucgucggcaccucccgcuacuccaagaaguucaagcccgagaucgccauccgccccaagguccgcgaccaggagggccgcaugaacuacuacuggacccucgucgagcccggcgacaagaucaccuucgaggccaccggcaaccucgucgucccccgcuacgccuucgccauggagcgcaacgccggcuccggcaucaucaucuccgacacccccguccacgacugcaacaccaccugccagacccccaagggcgccaucaacaccucccuccccuuccagaacauccaccccaucaccaucggcaagugccccaaguacgucaaguccaccaagcuccgccucgccaccggccuccgcaacguccccuccauccagucccgcggccucuucggcgccaucgccggcuucaucgagggcggcuggaccggcauggucgacggcugguacggcuaccaccaccagaacgagcagggcuccggcuacgccgccgaccucaaguccacccagaacgccaucgacgagaucaccaacaaggucaacuccgucaucgagaagaugaacacccaguucaccgccgucggcaaggaguucaaccaccucgagaagcgcaucgagaaccucaacaagaaggucgacgacggcuuccucgacaucuggaccuacaacgccgagcuccucguccuccucgagaacgagcgcacccucgacuaccacgacuccaacgucaagaaccucuacgagaagguccgcucccagcucaagaacaacgccaaggagaucggcaacggcugcuucgaguucuaccacaagugcgacaacaccugcauggaguccgucaagaacggcaccuacgacuaccccaaguacuccgaggaggccaagcucaaccgcgaggagaucgacggcgucaagcucgaguccacccgcaucuaccagauccucgccaucuacuccaccgucgccuccucccucguccucgucgucucccucggcgccaucuccuucuggaugugcuccaacggcucccuccagugccgcaucugcaucuga

SEQ ID NO: 105055 - RNA, 1701 nt, Artificial Sequence; identical to SEQ ID NO: 98705
  derived and/or modified CDS sequence (opt2) from hemagglutinin__InfluenzaA__AFK74605

SEQ ID NO: 105056 - RNA, 1701 nt, Artificial Sequence; identical to SEQ ID NO: 98947
  derived and/or modified CDS sequence (opt2) from hemagglutinin__InfluenzaA__AFK74615

SEQ ID NO: 105057 - RNA, 1701 nt, Artificial Sequence; identical to SEQ ID NO: 98947
  derived and/or modified CDS sequence (opt2) from hemagglutinin__InfluenzaA__AFK74625

SEQ ID NO: 105058 - RNA, 1701 nt, Artificial Sequence; identical to SEQ ID NO: 99807
  derived and/or modified CDS sequence (opt2) from hemagglutinin__InfluenzaA__AFK74635

SEQ ID NO: 105059 - RNA, 1701 nt, Artificial Sequence; identical to SEQ ID NO: 99807
  derived and/or modified CDS sequence (opt2) from hemagglutinin__InfluenzaA__AFK74645

SEQ ID NO: 105060 - RNA, 1701 nt, Artificial Sequence; identical to SEQ ID NO: 98705
  derived and/or modified CDS sequence (opt2) from hemagglutinin__InfluenzaA__AFK74655

SEQ ID NO: 105061 - RNA, 1701 nt, Artificial Sequence; identical to SEQ ID NO: 98705
  derived and/or modified CDS sequence (opt2) from hemagglutinin__InfluenzaA__AFK74665

SEQ ID NO: 105062 - RNA, 1701 nt, Artificial Sequence; identical to SEQ ID NO: 98705
  derived and/or modified CDS sequence (opt2) from hemagglutinin__InfluenzaA__AFK74675

SEQ ID NO: 105063 - RNA, 1701 nt, Artificial Sequence; identical to SEQ ID NO: 98705
  derived and/or modified CDS sequence (opt2) from hemagglutinin__InfluenzaA__AFK74685

SEQ ID NO: 105064 - RNA, 1701 nt, Artificial Sequence; identical to SEQ ID NO: 101260
  derived and/or modified CDS sequence (opt2) from hemagglutinin__InfluenzaA__AFK74695

SEQ ID NO: 105065 - RNA, 1701 nt, Artificial Sequence; identical to SEQ ID NO: 98705
  derived and/or modified CDS sequence (opt2) from hemagglutinin__InfluenzaA__AFK74705

SEQ ID NO: 105066 - RNA, 1701 nt, Artificial Sequence; identical to SEQ ID NO: 98705
  derived and/or modified CDS sequence (opt2) from hemagglutinin__InfluenzaA__AFK74715

SEQ ID NO: 105067 - RNA, 1701 nt, Artificial Sequence; identical to SEQ ID NO: 98705
  derived and/or modified CDS sequence (opt2) from hemagglutinin__InfluenzaA__AFK74725

SEQ ID NO: 105068 - RNA, 1701 nt, Artificial Sequence; identical to SEQ ID NO: 98705
  derived and/or modified CDS sequence (opt2) from hemagglutinin__InfluenzaA__AFK74735

SEQ ID NO: 105069 - RNA, 1701 nt, Artificial Sequence; identical to SEQ ID NO: 98705
  derived and/or modified CDS sequence (opt2) from hemagglutinin__InfluenzaA__AFK74745

SEQ ID NO: 105070 - RNA, 1701 nt, Artificial Sequence; identical to SEQ ID NO: 98705
  derived and/or modified CDS sequence (opt2) from hemagglutinin__InfluenzaA__AFK74755

SEQ ID NO: 105071 - RNA, 1701 nt, Artificial Sequence; identical to SEQ ID NO: 101260
  derived and/or modified CDS sequence (opt2) from hemagglutinin__InfluenzaA__AFK74765

SEQ ID NO: 105072 - RNA, 1701 nt, Artificial Sequence; identical to SEQ ID NO: 98705
  derived and/or modified CDS sequence (opt2) from hemagglutinin__InfluenzaA__AFK74775

SEQ ID NO: 105073 - RNA, 1701 nt, Artificial Sequence; identical to SEQ ID NO: 98705
  derived and/or modified CDS sequence (opt2) from hemagglutinin__InfluenzaA__AFK74785

SEQ ID NO: 105074 - RNA, 1701 nt, Artificial Sequence; identical to SEQ ID NO: 98705
  derived and/or modified CDS sequence (opt2) from hemagglutinin__InfluenzaA__AFK74795

SEQ ID NO: 105075 - RNA, 1701 nt, Artificial Sequence; identical to SEQ ID NO: 98705
  derived and/or modified CDS sequence (opt2) from hemagglutinin__InfluenzaA__AFK74805

SEQ ID NO: 105076 - RNA, 1701 nt, Artificial Sequence; identical to SEQ ID NO: 98705
  derived and/or modified CDS sequence (opt2) from hemagglutinin__InfluenzaA__AFK74815

SEQ ID NO: 105077 - RNA, 1701 nt, Artificial Sequence; identical to SEQ ID NO: 98705
  derived and/or modified CDS sequence (opt2) from hemagglutinin__InfluenzaA__AFK74825

SEQ ID NO: 105078 - RNA, 1701 nt, Artificial Sequence; identical to SEQ ID NO: 98705
  derived and/or modified CDS sequence (opt2) from hemagglutinin__InfluenzaA__AFK74835

SEQ ID NO: 105079 - RNA, 1701 nt, Artificial Sequence; identical to SEQ ID NO: 98705
  derived and/or modified CDS sequence (opt2) from hemagglutinin__InfluenzaA__AFK74845

SEQ ID NO: 105080 - RNA, 1701 nt, Artificial Sequence; identical to SEQ ID NO: 98705
  derived and/or modified CDS sequence (opt2) from hemagglutinin__InfluenzaA__AFK74895

SEQ ID NO: 105081 - RNA, 1701 nt, Artificial Sequence; identical to SEQ ID NO: 98705
  derived and/or modified CDS sequence (opt2) from hemagglutinin__InfluenzaA__AFK74905

SEQ ID NO: 105082 - RNA, 1701 nt, Artificial Sequence; identical to SEQ ID NO: 98705
  derived and/or modified CDS sequence (opt2) from hemagglutinin__InfluenzaA__AFK74915

SEQ ID NO: 105083 - RNA, 1701 nt, Artificial Sequence
  derived and/or modified CDS sequence (opt2) from hemagglutinin__InfluenzaA__AFK74925
augaaggccauccucgucguccuccucuacaccuucgccaccgccaacgccgacacccucugcaucggcuaccacgccaacaacuccaccgacaccgucgacaccguccucgagaagaacgucaccgucacccacuccgucaaccuccucgaggacaagcacaacggcaagcucugcaagcuccgcggcgucgucccccuccaccucggcaagugcaacaucgccggcuggauccucggcaaccccgagugcgagucccucuccaccgccuccuccugguccuacaucgucgagaccuccuccuccgacaacggcaccugcuaccccggcgacuucaucgacuacgaggagcuccgcgagcagcucuccuccgucuccuccuucgagcgcuucgagaucuuccccaagaccuccuccuggcccaaccacgacuccaacaagggcgucaccgccgccugcccccacgccggcgccaaguccuucuacaagaaccucaucuggcucgucaagaagggcaacuccuaccccaagcucuccaaguccuacaucaacgacaagggcaaggagguccucguccucuggggcauccaccaccccuccaccuccgccgaccagcagucccucuaccagaacgccgacgccuacgucuucgucggcaccucccgcuacuccaagaaguucaagcccgagaucgccauccgccccaagguccgcgaccaggagggccgcaugaacuacuacuggacccucgucgagcccggcgacaagaucaccuucgaggccaccggcaaccucgucgucccccgcuacgccuucaccauggagcgcaacgccggcuccggcaucaucaucuccgacacccccguccacgacugcaacaccaccugccagacccccaagggcgccaucaacaccucccuccccuuccagaacauccaccccaucaccaucggcaagugccccaaguacgucaaguccaccaagcuccgccucgccaccggccuccgcaacguccccuccauccagucccgcggccucuucggcgccaucgccggcuucaucgagggcggcuggaccggcauggucgacggcugguacggcuaccaccaccagaacgagcagggcuccggcuacgccgccgaccucaaguccacccagaacgccaucgacggcaucaccaacaaggucaacuccgucaucgagaagaugaacacccaguucaccgccgucggcaaggaguucaaccaccucgagaagcgcaucgagaaccucaacaagaagaucgacgacggcuuccucgacaucuggaccuacaacgccgagcuccucguccuccucgagaacgagcgcacccucgacuaccacgacuccaacgucaagaaccucuacgagaagguccgcucccagcucaagaacaacgccaaggagaucggcaacggcugcuucgaguucuaccacaagugcgacaacaccugcauggaguccgucaagaacggcaccuacgacuaccccaaguacuccgaggaggccaagcucaaccgcgaggagaucgacggcgucaagcucgaguccacccgcaucuaccagauccucgccaucuacuccaccgucgccuccucccucguccucgucgucucccucggcgccaucuccuucuggaugugcuccaacggcucccuccagugccgcaucugcaucuga

SEQ ID NO: 105084 - RNA, 1701 nt, Artificial Sequence; identical to SEQ ID NO: 99807
  derived and/or modified CDS sequence (opt2) from hemagglutinin__InfluenzaA__AFK74935

SEQ ID NO: 105085 - RNA, 1701 nt, Artificial Sequence; identical to SEQ ID NO: 98705
  derived and/or modified CDS sequence (opt2) from hemagglutinin__InfluenzaA__AFK74945

SEQ ID NO: 105086 - RNA, 1701 nt, Artificial Sequence; identical to SEQ ID NO: 98705
  derived and/or modified CDS sequence (opt2) from hemagglutinin__InfluenzaA__AFK74955

SEQ ID NO: 105087 - RNA, 1701 nt, Artificial Sequence; identical to SEQ ID NO: 98705
  derived and/or modified CDS sequence (opt2) from hemagglutinin__InfluenzaA__AFK74965

SEQ ID NO: 105088 - RNA, 1701 nt, Artificial Sequence; identical to SEQ ID NO: 98796
  derived and/or modified CDS sequence (opt2) from hemagglutinin__InfluenzaA__AFK74975

SEQ ID NO: 105089 - RNA, 1701 nt, Artificial Sequence; identical to SEQ ID NO: 98705
  derived and/or modified CDS sequence (opt2) from hemagglutinin__InfluenzaA__AFK74985

SEQ ID NO: 105090 - RNA, 1701 nt, Artificial Sequence; identical to SEQ ID NO: 101260
  derived and/or modified CDS sequence (opt2) from hemagglutinin__InfluenzaA__AFK74995

SEQ ID NO: 105091 - RNA, 1701 nt, Artificial Sequence; identical to SEQ ID NO: 98705
  derived and/or modified CDS sequence (opt2) from hemagglutinin__InfluenzaA__AFK75005

SEQ ID NO: 105092 - RNA, 1701 nt, Artificial Sequence
  derived and/or modified CDS sequence (opt2) from hemagglutinin__InfluenzaA__AFK75015
augaaggccauccucgucguccuccucuacaccuucgccaccgccaacgccgacacccucugcaucggcuaccacgccaacaacuccaccgacaccgucgacaccguccucgagaagaacgucaccgucacccacuccgucaaccuccucgaggacaagcacaacggcaagcucugcaagcuccgcggcgucgccccccuccaccucggcaagugcaacaucgccggcuggauccucggcaaccccgagugcgagucccucuccaccgccuccuccugguccuacaucgucgagaccuccuccuccgacaacggcaccugcuaccccggcgacuucaucgacuacgaggagcuccgcgagcagcucuccuccgucuccuccuucgagcgcuucgagaucuuccccaagaccuccuccuggcccaaccacgacuccaacaagggcgucaccgccgccugcccccacgccggcgccaaguccuucuacaagaaccucaucuggcucgucaagaagggcaacuccuaccccaagcucuccaaguccuacaucaacgacaagggcaaggagguccucguccucuggggcauccaccaccccuccaccuccgccgaccagcagucccucuaccagaacgccgacgccuacgucuucgucggcaccucccgcuacuccaagaaguucaagcccgagaucgccauccgccccaagguccgcgaccaggagggccgcaugaacuacuacuggacccucgucgagcccggcgacaagaucaccuucgaggccaccggcaaccucgucgucccccgcuacgccuucgccauggagcgcaacgccggcuccggcaucaucaucuccgacacccccguccacgacugcaacaccaccugccagacccccaagggcgccaucaacaccucccuccccuuccagaacauccaccccaucaccaucggcaagugccccaaguacgucaaguccaccaagcuccgccucgccaccggccuccgcaacguccccuccauccagucccgcggccucuucggcgccaucgccggcuucaucgagggcggcuggaccggcauggucgacggcugguacggcuaccaccaccagaacgagcagggcuccggcuacgccgccgaccucaaguccacccagaacgccaucgacgagaucaccaacaaggucaacuccgucaucgagaagaugaacacccaguucaccgccgucggcaaggaguucaaccaccucgagaagcgcaucgagaaccucaacaagaaggucgacgacggcuuccucgacaucuggaccuacaacgccgagcuccucguccuccucgagaacgagcgcacccucgacuaccacgacuccaacgucaagaaccucuacgagaagguccgcucccagcucaagaacaacgccaaggagaucggcaacggcugcuucgaguucuaccacaagugcgacaacaccugcauggaguccgucaagaacggcaccuacgacuaccccaaguacuccgaggaggccaagcucaaccgcgaggagaucgacggcgucaagcucgaguccacccgcaucuaccagauccucgccaucuacuccaccgucgccuccucccucguccucgucgucucccucggcgccaucuccuucuggaugugcuccaacggcucccuccagugccgcaucugcgucuga

SEQ ID NO: 105093 - RNA, 1701 nt, Artificial Sequence; identical to SEQ ID NO: 98947
  derived and/or modified CDS sequence (opt2) from hemagglutinin__InfluenzaA__AFK75025

SEQ ID NO: 105094 - RNA, 1701 nt, Artificial Sequence; identical to SEQ ID NO: 98947
  derived and/or modified CDS sequence (opt2) from hemagglutinin__InfluenzaA__AFK75035

SEQ ID NO: 105095 - RNA, 1701 nt, Artificial Sequence; identical to SEQ ID NO: 98947
  derived and/or modified CDS sequence (opt2) from hemagglutinin__InfluenzaA__AFK75045

SEQ ID NO: 105096 - RNA, 1701 nt, Artificial Sequence; identical to SEQ ID NO: 98947
  derived and/or modified CDS sequence (opt2) from hemagglutinin__InfluenzaA__AFK75055

SEQ ID NO: 105097 - RNA, 1701 nt, Artificial Sequence; identical to SEQ ID NO: 98705
  derived and/or modified CDS sequence (opt2) from hemagglutinin__InfluenzaA__AFK75065

SEQ ID NO: 105098 - RNA, 1701 nt, Artificial Sequence; identical to SEQ ID NO: 98705
  derived and/or modified CDS sequence (opt2) from hemagglutinin__InfluenzaA__AFK75075

SEQ ID NO: 105099 - RNA, 1701 nt, Artificial Sequence; identical to SEQ ID NO: 99869
  derived and/or modified CDS sequence (opt2) from hemagglutinin__InfluenzaA__AFK75085

SEQ ID NO: 105100 - RNA, 1701 nt, Artificial Sequence; identical to SEQ ID NO: 99869
  derived and/or modified CDS sequence (opt2) from hemagglutinin__InfluenzaA__AFK75095

SEQ ID NO: 105101 - RNA, 1701 nt, Artificial Sequence; identical to SEQ ID NO: 98705
  derived and/or modified CDS sequence (opt2) from hemagglutinin__InfluenzaA__AFK75105

SEQ ID NO: 105102 - RNA, 1701 nt, Artificial Sequence; identical to SEQ ID NO: 98947
  derived and/or modified CDS sequence (opt2) from hemagglutinin__InfluenzaA__AFK77857

SEQ ID NO: 105103 - RNA, 1701 nt, Artificial Sequence; identical to SEQ ID NO: 98947
  derived and/or modified CDS sequence (opt2) from hemagglutinin__InfluenzaA__AFK77867

SEQ ID NO: 105104 - RNA, 1701 nt, Artificial Sequence; identical to SEQ ID NO: 104233
  derived and/or modified CDS sequence (opt2) from hemagglutinin__InfluenzaA__AFK77877

SEQ ID NO: 105105 - RNA, 1701 nt, Artificial Sequence; identical to SEQ ID NO: 98705
  derived and/or modified CDS sequence (opt2) from hemagglutinin__InfluenzaA__AFK77887

SEQ ID NO: 105106 - RNA, 1701 nt, Artificial Sequence
  derived and/or modified CDS sequence (opt2) from hemagglutinin__InfluenzaA__AFK77897
augaaggccauccucgucguccuccucuacaccuucgccaccgccaacgccgacacccucugcaucggcuaccacgccaacaacuccaccgacaccgucgacaccguccucgagaagaacgucaccgucacccacuccaucaaccuccucgaggacaagcacaacggcaagcucugcaagcuccgcggcgucgccccccuccaccucggcaagugcaacaucgccggcuggauccucggcaaccccgagugcgagucccucuccaccgccuccuccugguccuacaucgucgagaccuccuccuccgacaacggcaccugcuaccccggcgacuucaucaacuacgaggagcuccgcgagcagcucuccuccgucuccuccuucgagcgcuucgagaucuuccccaagaccuccuccuggcccaaccacgacuccaacaagggcgucaccgccgccugcccccacgccggcgccaaguccuucuacaagaaccucaucuggcucgucaagaagggcaacuccuaccccaagcucuccaaguccuacaucaacgacaagggcaaggagguccucguccucuggggcauccaccaccccuccaccuccgccgaccagcagucccucuaccagaacgccgacgccuacgucuucgucggcaccuccaaguacuccaagaaguucaagcccgagaucgccguccgccccaagguccgcgaccaggagggccgcaugaacuacuacuggacccucgucgagcccggcgacaagaucaccuucgaggccaccggcaaccuccucgucccccgcuacgccuucgccauggagcgcaacgccggcuccggcaucaucaucuccgacacccccguccacgacugcaacaccaccugccagacccccaagggcgccaucaacaccucccuccccuuccagaacauccaccccaucaccaucggcaagugccccaaguacgucaaguccaccaagcuccgccucgccaccggccuccgcaacguccccuccauccagucccgcggccucuucggcgccaucgccggcuucaucgagggcggcuggaccggcauggucgacggcugguacggcuaccaccaccagaacgagcagggcuccggcuacgccgccgaccucaaguccacccagaacgccaucgacaagaucaccaacaaggucaacuccgucaucgagaagaugaacacccaguucaccgccgucggcaaggaguucaaccaccucgagaagcgcaucgagaaccucaacaagaaggucgacgacggcuuccucgacaucuggaccuacaacgccgagcuccucguccuccucgagaacgagcgcacccucgacuaccacgacuccaacgucaagaaccucuacgagaagguccgcucccagcucaagaacaacgccaaggagaucggcaacggcugcuucgaguucuaccacaagugcgacaacaccugcauggaguccgucaagaacggcaccuacgacuaccccaaguacuccgaggaggccaagcucaaccgcgaggagaucgacggcgucaagcucgaguccacccgcaucuaccagauccucgccaucuacuccaccgucgccuccucccucguccucgucgucucccucggcgccaucuccuucuggaugugcuccaacggcucccuccagugccgcaucugcaucuga

SEQ ID NO: 105107 - RNA, 1701 nt, Artificial Sequence; identical to SEQ ID NO: 103086
  derived and/or modified CDS sequence (opt2) from hemagglutinin__InfluenzaA__AFK78028

SEQ ID NO: 105108 - RNA, 1701 nt, Artificial Sequence; identical to SEQ ID NO: 98947
  derived and/or modified CDS sequence (opt2) from hemagglutinin__InfluenzaA__AFK78187

SEQ ID NO: 105109 - RNA, 1701 nt, Artificial Sequence; identical to SEQ ID NO: 102891
  derived and/or modified CDS sequence (opt2) from hemagglutinin__InfluenzaA__AFM45476

SEQ ID NO: 105110 - RNA, 1701 nt, Artificial Sequence
  derived and/or modified CDS sequence (opt2) from hemagglutinin__InfluenzaA__AFM45487
augaagaccaucaucgcccucuccuacauccucugccucgucuucgcccagaagcuccccggcaacgacaacuccaccgccacccucugccucggccaccacgccguccccaacggcaccaucgucaagaccaucaccaacgaccagaucgaggucaccaacgccaccgagcucguccaguccuccuccaccggcgagaucugcgacuccccccaccagauccucgacggcgagaacugcacccucaucgacgcccuccucggcgacccccagugcgacggcuuccagaacaagaagugggaccucuucgucgagcgcuccaaggccuacuccaacugcuaccccuacgacguccccgacuacgccucccuccgcucccucgucgccuccuccggcacccucgaguucaacaacgaguccuucaacuggaccggcgucacccagaacggcaccuccuccgccugcauccgccgcuccaacuccuccuucuucucccgccucaacuggcucacccaccucaacuucaaguaccccgcccucaacgucaccaugcccaacaacgagcaguucgacaagcucuacaucuggggcguccaccaccccggcaccgacaaggaccagaucuuccucuacgcccaguccuccggccgcaucaccgucuccaccaagcgcucccagcaggccgucauccccaacaucggcucccgcccccgcauccgcaacauccccucccgcaucuccaucuacuggaccaucgucaagcccggcgacauccuccucaucaacuccaccggcaaccucaucgccccccgcggcuacuucaagauccgcuccggcaaguccuccaucaugcgcuccgacgcccccaucggcaagugcaacuccgagugcaucacccccaacggcuccauccccaacgacaagcccuuccagaacgucaaccgcaucaccuacggcgccugcccccgcuacgucaagcaguccacccucaagcucgccaccggcaugcgcaacguccccgagaagcagacccgcggcaucuucggcgccaucgccggcuucaucgagaacggcugggagggcauggucgacggcugguacggcuuccgccaccagaacuccgagggccgcggccaggccgccgaccucaaguccacccaggccgccaucgaccagaucaacggcaagcucaaccgccucaucggcaagaccaacgagaaguuccaccagaucgagaaggaguucuccgaggucgagggccgcauccaggaccucgagaaguacgucgaggacaccaagaucgaccucugguccuacaacgccgagcuccucgucgcccucgagaaccagcacaccaucgaccucaccgacuccgagaugaacaagcucuucgagaagaccaagaagcagcuccgcgagaacgccgaggacaugggcaacggcugcuucaagaucuaccacaagugcgacaacgccugcaucggcuccauccgcaacggcaccuacaaccacgacgucuaccgcgacgaggcccucaacaaccgcuuccagaucaagggcgucgagcucaaguccggcuacaaggacuggauccucuggaucuccuucgccaucuccugcuuccuccucugcgucgcccuccucggcuucaucaugugggccugccagaagggcaacauccgcugcaacaucugcaucuga

SEQ ID NO: 105111 - RNA, 1701 nt, Artificial Sequence; identical to SEQ ID NO: 102891
  derived and/or modified CDS sequence (opt2) from hemagglutinin__InfluenzaA__AFM45489

SEQ ID NO: 105112 - RNA, 1701 nt, Artificial Sequence; identical to SEQ ID NO: 105110
  derived and/or modified CDS sequence (opt2) from hemagglutinin__InfluenzaA__AFM45494

SEQ ID NO: 105113 - RNA, 1701 nt, Artificial Sequence
  derived and/or modified CDS sequence (opt2) from hemagglutinin__InfluenzaA__AFM68954
augaaggcccgccuccucguccuccucugcgcccucgccgccaccgacgccgacaccaucugcaucggcuaccacgccaacaacuccaccgacaccgucgacacccuccucgagaagaacgucaccgucacccacuccgucaaccuccucgaggacucccacaacggcaagcucugcaagcucaagggcaucgccccccuccagcucggcaagugcaacaucgccggcuggcuccucggcaaccccgagugcgacucccuccuccccgcccgcuccugguccuacaucgucgagacccccaacuccgagaacggcgccugcuaccccggcgacuucaucgacuacgaggagcucaaggagcagcucuccuccgucuccucccucgagcgcuucgagaucuuccccaaggaguccuccuggcccaaccacaacacccucaagggcgucaccgccuccugcucccacggcggcaaguccuccuucuaccgcaaccuccucuggcucaccaagaccgaggacuccuaccccaagcucuccaacuccuacgucaacaacaagggcaaggagguccucguccucuggggcguccaccaccccuccuccuccgacgagcagcagucccucuaccacaacgucaacgccuacgucuccgucgucuccuccaacuacaacggccgcuucacccccgagaucgccgcccgccccaagguccgcaaccagcccggccgcaugaacuacuacuggacccuccucgagcccggcgacaccaucaucuucgaggccaccggcaaccucaucgcccccugguacgccuucgcccucucccgcggcuucggcuccggcaucaucaccuccaacgccuccaugcacgagugcaacaccaagugccagaccccccagggcgccaucaacuccucccuccccuuccagaacauccaccccgucaccaucggcgagugccccaaguacguccgcuccaccaagcuccgcauggucaccggccuccgcaacauccccuccauccaguuccgcggccucuucggcgccaucgccggcuucaucgagggcggcuggaccggcaugaucgacggcugguacggcuaccaccaccagaacgagcagggcuccggcuacgccgccgaccagaaguccacccagaacgccaucaacggcaucaccaacaaggucaacuccgucaucgagaagaugaacacccaguucaccgccgucuccaaggaguucaacaaccucgagaagcgcauggagaaccucaacaagaaggucgacgacggcuuccucgacaucuggaccuacaacgccgagcuccucguccuccucgagaacgagcgcacccucgacuuccacgaccucaacgucaagaaccucuacgagaaggucaagucccagcucaagaacaacgccaaggagaucggcaacggcugcuucgaguucuaccacaagugcgacaacaagugcauggaguccguccgcaacggcaccuacgacuaccccaaguacuccgaggaguccaagcucaaccgcgagaagaucgacggcgucaagcucgaguccaugggcgucuaccagauccucgccaucuacuccaccgucgccuccucccucguccuccucgucucccucggcgccaucuccuucuggaugugcuccaacggcucccuccagugccgcaucugcaucuga

SEQ ID NO: 105114 - RNA, 1701 nt, Artificial Sequence
  derived and/or modified CDS sequence (opt2) from hemagglutinin__InfluenzaA__AFM68965
augaagaccaucaucgcccucuccuacaucuucugccagguccucgcccagaaccuccccggcaacgacaacuccaccgccacccucugccucggccaccacgccguccccaacggcacccucgucaagaccaucaccaacgaccagaucgaggucaccaacgccaccgagcucguccaguccuccuccaccggccgcaucugcgacuccccccaccgcauccucgacggcaagaacugcacccucaucgacgcccuccucggcgacccccacugcgacggcuuccagaacgagaagugggaccucuucgucgagcgcuccaaggccuucuccaacugcuaccccuacgacguccccgacuacgccucccuccgcucccucgucgccuccuccggcacccucgaguucaucaacgagggcuucaacuggaccggcgucacccagaacggcggcuccuacgccugcaagcgcggccccgacaacuccuucuucucccgccucaacuggcucuacaaguccgaguccaccuaccccguccucaacgucaccaugcccaacaacgacaacuucgacaagcucuacaucuggggcguccaccaccccuccaccgacaaggagcagaccaaccucuacguccaggccuccggccgcgucaccgucuccaccaagcgcucccagcagaccaucauccccaacgucggcucccgccccuggguccgcggccucuccuccggcaucuccaucuacuggaccaucgucaagcccggcgacauccuccucaucaacuccaacggcaaccucaucgccccccgcggcuacuucaagauccgcaccggcaaguccuccaucaugcgcuccgacgcccccaucggcaccugcuccuccgagugcaucacccccaacggcuccauccccaacgacaagcccuuccagaacgucaacaagaucaccuacggcgccugccccaaguacgucaagcagaacacccucaagcucgccaccggcaugcgcaacguccccgagaagcagacccgcggcaucuucggcgccaaggccggcuucaucgagaacggcugggagggcaugaucgacggcugguacggcuuccgccaccagaacuccgagggcaccggccaggccgccgaccucaaguccacccaggccgccaucgaccagaucaacggcaagcucaaccgcgucaucgagaagaccaacgagaaguuccaccagaucgagaaggaguucuccgaggucgagggccgcauccaggaccucgagaaguacgucgaggacaccaagaucgaccucugguccuacaacgccgagcuccucgucgcccucgagaaccagcacaccaucgaccucaccgacuccgagaugaacaagcucuucgagaagacccgccgccagcuccgcgagaacgccgaggacaugggcaacggcugcuucaagaucuaccacaagugcgacaacgccugcaucggcuccauccgcaacggcaccuacgaccacgacgucuaccgcgacgaggcccucaacaaccgcuuccagaucaagggcgucgagcucaaguccggcuacaaggacuggauccucuggaucuccuucgccaucuccugcuuccuccucugcgucguccuccucggcuucaucaugugggccugccagaagggcaacauccgcugcaacaucugcaucuga

SEQ ID NO: 105115 - RNA, 1701 nt, Artificial Sequence
  derived and/or modified CDS sequence (opt2) from hemagglutinin__InfluenzaA__AFM68987
augaagaccaucaucgcccucuccuacaucuucugccucgucuucgcccagaaccuccccggcaacgacaacuccaccgccacccucugccucggccaccacgccguccccaacggcacccucgucaagaccaucaccaacgaccagaucgaggucaccaacgccaccgagcucguccaguccuccuccaccggccgcaucugcgacuccccccaccgcauccucgacggcaagaacugcacccucaucgacgcccuccucggcgacccccacugcgacggcuuccagaacgagaagugggaccucuucgucgagcgcuccaaggccuucuccaacugcuaccccuacgacguccccgacuacgccucccuccgcucccucgucgccuccuccggcacccucgaguucaucaacgagggcuucaacuggaccggcgucacccaguccggcggcuccuacgccugcaagcgcggcuccgacaaguccuucuucucccgccucaacuggcucuacgaguccgaguccaaguaccccguccucaacgucaccaugcccaacaacggcaacuucgacaagcucuacaucuggggcguccaccaccccuccaccgacaaggagcagaccaaccucuacguccgcgccuccggccgcgucaccgucuccaccaagcgcucccagcagaccgucauccccaacaucggcucccgccccuggguccgcggccucuccucccgcaucuccaucuacuggaccaucgucaagcccggcgacauccuccucaucaacuccaacggcaaccucaucgccccccgcggcuacuucaagauccgcaccggcaaguccuccaucaugcgcuccgacgcccccaucggcaccugcuccuccgagugcaucacccccaacggcuccauccccaacgacaagcccuuccagaacgucaacaagaucaccuacggcgccugccccaaguacgucaagcagaacacccucaagcucgccaccggcaugcgcaacguccccgagaagcagacccgcggcaucuucggcgccaucgccggcuucaucgagaacggcugggagggcauggucgacggcugguacggcuuccgccaccagaacuccgagggcaccggccaggccgccgaccucaaguccacccaggccgccaucgaccagaucaacggcaagcucaaccgcgucaucgagaagaccaacgagaaguuccaccagaucgagaaggaguucuccgaggucgagggccgcauccaggaccucgagaaguacgucgaggacaccaagaucgaccucugguccuacaacgccgagcuccucgucgcccucgagaaccagcacaccaucgaccucaccgacuccgagaugaacaagcucuucgagaagacccgccgccagcuccgcgagaacgccgaggacaugggcaacggcugcuucaagaucuaccacaagugcgacaacgccugcaucggcuccauccgcaacggcaccuacgaccacgacgucuaccgcgacgaggcccucaacaaccgcuuccagaucaagggcgucgagcucaaguccggcuacaaggacuggauccucuggaucuccuucgccaucuccugcuuccuccucugcgucguccuccucggcuucaucaugugggccugccagaagggcaacauccgcugcaacaucugcaucuga

SEQ ID NO: 105116 - RNA, 1701 nt, Artificial Sequence
  derived and/or modified CDS sequence (opt2) from hemagglutinin__InfluenzaA__AFM71720
augaagaccaucaucgcccucuccuacaucuucugccucgucuucgcccagaagcuccccggcaacgacaacuccaccgccacccucugccucggccaccacgccguccccaacggcacccucgucaagaccaucaccaacgaccagaucgaggucaccaacgccaccgagcucguccaguccuccuccaccggccgcaucugcgacuccccccaccgcauccucgacggcaagaacugcacccucaucgacgcccuccucggcgacccccacugcgacggcuuccagaacgagaagugggaccucuucgucgagcgcuccaaggccuacuccaacugcuaccccuacgacguccccgacuacgccucccuccgcucccucgucgccuccuccggcacccucgaguucaucaacgaggacuucaacuggaccggcgucacccaguccggcggcuccuacgccugcaagcgcggcuccgucaacuccuucuucucccgccucaacuggcuccacgaguccgaguacaaguaccccgcccucaacgucgccaugcccaacaacggcaaguucgacaagcucuacaucuggggcguccaccaccccaucaccgaccgcgagcagaccaaccucuacguccgcgccuccggccgcgucaccgucuccaccaagcgcucccagcagaccgucauccccaacaucggcucccgccccuggguccgcggccucuccucccgcaucuccaucuacuggaccaucgucaagcccggcgacauccucuucaucaacuccaccggcaaccucaucgccccccgcggcuacuucaagauccgcaccggcaaguccuccaucaugcgcuccgacgcccccaucggcaccugcuccuccgagugcaucacccccaacggcuccauccccaacgacaagcccuuccagaacgucaacaagaucaccuacggcgccugcccccgcuacgucaagcagaacacccucaagcucgccaccggcaugcgcaacguccccgagaagcagacccgcggcaucuucggcgccaucgccggcuucaucgagaacggcugggagggcauggucgacggcugguacggcuuccgccaccagaacuccgagggcaccggccaggccgccgaccucaaguccacccaggccgccaucgaccagaucaacggcaagcucaaccgccucaucgagaagaccaacgagaaguuccaccagaucgagaaggaguucuccgaggucgagggccgcauccaggaccucgagaaguacgucgaggacaccaagaucgaccucugguccuacaacgccgagcuccucgucgcccucgagaaccagcacaccaucgaccucaccgacuccgagaugaacaagcucuucgagaagacccgcaagcagcuccgcgagaacgccgaggacaugggcaacggcugcuucaagaucuaccacaagugcgacaacgccugcaucggcuccauccgcaacggcaccuacgaccacgacgucuaccgcgacgaggcccucaacaaccgcuuccagaucaagggcgucgagcucaaguccggcuacaaggacuggauccucuggaucuccuucgccaucuccugcuuccuccucugcgucguccuccucggcuucaucaugugggccugccagaagggcaacauccgcugcaacaucugcaucuga

SEQ ID NO: 105117 - RNA, 1701 nt, Artificial Sequence
  derived and/or modified CDS sequence (opt2) from hemagglutinin__InfluenzaA__AFM71731
augaagaccaucaucgcccucuccuacauccucugccucgucuucgcccagaagcuccccggcaacgacaacuccaccgccacccucugccucggccaccacgccguccccaacggcacccucgucaagaccaucaccaacgaccagaucgaggucaccaacgccaccgagcucguccaguccuccuccaccggccgcaucugcgacuccccccaccgcauccucgacggcaagaacugcacccucaucgacgcccuccucggcgacccccacugcgacggcuuccagaacaaggagugggaccucuucgucgagcgcuccaaggccuacuccaacugcuaccccuacgacguccccgacuacgccucccuccgcucccucgucgccuccuccggcacccucgaguucaucaacgaggacuucaacuggaccggcgucgcccaguccggcgaguccuacgccugcaagcgcggcuccgucaaguccuucuucucccgccucaacuggcuccacaaguccgaguacaaguaccccgcccucaacgucaccaugcccaacaacggcaaguucgacaagcucuacaucuggggcguccaccaccccuccaccgaccgcgagcagaccaaccucuacguccgcgccuccggccgcgucaccgucuccaccaagcgcucccagcagaccgucauccccaacaucggcucccgccccuggguccgcggccucuccucccgcaucuccaucuacuggaccaucgucaagcccggcgacauccuccucaucaacuccaccggcaaccucaucgccccccgcggcuacuucaagauccgcaccggcaaguccuccaucaugcgcuccgacgcccccaucggcaccugcuccuccgagugcaucacccccaacggcuccauccccaacgacaagcccuuccagaacgucaaccgcaucaccuacggcgccugcccccgcuacgucaagcagaacacccucaagcucgccaccggcaugcgcaacguccccgagaagcagacccgcggcaucuucggcgccaucgccggcuucaucgagaacggcugggagggcauggucgacggcugguacggcuuccgccaccagaacuccgagggcaccggccaggccgccgaccucaaguccacccaggccgccaucgaccagaucaacggcaagcucaaccgccucaucgagaagaccaacgagaaguuccaccagaucgagaaggaguucuccgaggucgagggccgcauccaggaccucgagaaguacgucgaggacaccaagaucgaccucugguccuacaacgccgagcuccucgucgcccucgagaaccagcacaccaucgaccucaccgacuccgagaugaacaagcucuucgagaagacccgcaagcagcuccgcgagaacgccgaggacaugggcaacggcugcuucaagaucuaccacaagugcgacaacgccugcaucggcuccauccgcaacggcaccuacgaccacgacgucuaccgcgacgaggcccucaacaaccgcuuccagaucaagggcgucgagcucaaguccggcuacaaggacuggauccucuggaucuccuucgccaucuccugcuuccuccucugcgucguccuccucggcuucaucaugugggccugccagaagggcaacauccgcugcaacaucugcaucuga

SEQ ID NO: 105118 - RNA, 1701 nt, Artificial Sequence
  derived and/or modified CDS sequence (opt2) from hemagglutinin__InfluenzaA__AFM71754
augaagaccaucaucgcccucuccuacauccucugccucgucuucgcccagaagcuccccggcaacgacaacuccaccgccacccucugccucggccaccacgccguccccaacggcaccaucgucaagaccaucaccaacgaccagaucgaggucaccaacgccaccgagcucguccaguccuccuccaccggcgagaucugcgacuccccccaccagauccucgacggcaagaacugcacccucaucgacgcccuccucggcgacccccagugcgacggcuuccagaacaagaagugggaccucuucgucgagcgcuccaaggccuacuccaacugcuaccccuacgacguccccgacuacgccucccuccgcucccucgucgccuccuccggcacccucgaguucaacaacgaguccuucaacuggaccggcgucacccagaacggcaccuccuccgccugcauccgccgcuccaagaacuccuucuucucccgccucaacuggcucacccaccucaacuucaaguaccccgcccucaacgucaccaugcccaacaacgagcaguucgacaagcucuacaucuggggcguccaccaccccggcaccgacaaggaccagaucuuccccuacgcccaggccuccggccgcaucaccgucuccaccaagcgcucccagcagaccgccauccccaacaucggcucccgcccccgcguccgcaacauccccucccgcaucuccaucuacuggaccaucgucaagcccggcgacauccuccucaucaacuccaccggcaaccucaucgccccccgcggcuacuucaagauccgcuccggcaaguccuccaucaugcgcuccgacgcccccaucggcaagugcaacuccgagugcaucacccccaacggcuccauccccaacgacaagcccuuccagaacgucaaccgcaucaccuacggcgccugcccccgcuacgucaagcagaacacccucaagcucgccaccggcaugcgcaacguccccgagaagcagacccgcggcaucuucggcgccaucgccggcuucaucgagaacggcugggagggcauggucgacggcugguacggcuuccgccaccagaacuccgagggccgcggccaggccgccgaccucaaguccacccaggccgccaucgaccagaucaacggcaagcucaaccgccucaucggcaagaccaacgagaaguuccaccagaucgagaaggaguucuccgaggucgagggccgcauccaggaccucgagaaguacgucgaggacaccaagaucgaccucugguccuacaacgccgagcuccucgucgcccucgagaaccagcacaccaucgaccucaccgacuccgagaugaacaagcucuucgagaagaccaagaagcagcuccgcgagaacgccgaggacaugggcaacggcugcuucaagaucuaccacaagugcgacaacgccugcaucggcuccauccgcaacggcaccuacgcccacgacgucuaccgcgacgaggcccucaacaaccgcuuccagaucaagggcgucgagcucaaguccggcuacaaggacuggauccucuggaucuccuucgccaucuccugcuuccuccucugcgucgcccuccucggcuucaucaugugggccugccagaagggcaacauccgcugcaacaucugcaucuga

SEQ ID NO: 105119 - RNA, 1701 nt, Artificial Sequence
  derived and/or modified CDS sequence (opt2) from hemagglutinin__InfluenzaA__AFM71768
augaagaccaucaucgcccucuccuacauccucugccucgucuucgcccagaagcuccccggcaacgacaacuccaccgccacccucugccucggccaccacgccguccccaacggcaccaucgucaagaccaucaccaacgaccagaucgaggucaccaacgccaccgagcucguccaguccuccuccaccggcgagaucugcgacuccccccaccagauccucgacggcaagaacugcacccucaucgacgcccuccucggcgacccccagugcgacgacuuccagaacaagaagugggaccucuucgucgagcgcuccaaggccuacuccaacugcuaccccuacgacguccccgacuacgccucccuccgcucccucgucgccuccuccggcacccucgaguucaacaacgaguccuucaacuggaccggcgucacccagaacggcaccuccuccgccugcauccgccgcuccaagaacuccuucuucucccgccucaacuggcucacccaccucaacuucaaguaccccgcccucaacgucaccaugcccaacaacgagcaguucgacaagcucuacaucuggggcguccaccaccccggcaccgacaaggaccagaucuuccccuacgcccaggccuccggccgcaucaccgucuccaccaagcgcucccagcagaccgccauccccaacaucggcucccgcccccgcguccgcaacauccccucccgcaucuccaucuacuggaccaucgucaagcccggcgacauccuccucaucaacuccaccggcaaccucaucgccccccgcggcuacuucaagauccgcuccggcaaguccuccaucaugcgcuccgacgcccccaucggcaagugcaacuccgagugcaucacccccaacggcuccauccccaacgacaagcccuuccagaacgucaaccgcaucaccuacggcgccugcccccgcuacgucaagcagaacacccucaagcucgccaccggcaugcgcaacguccccgagaagcagacccgcggcaucuucggcgccaucgccggcuucaucgagaacggcugggagggcauggucgacggcugguacggcuuccgccaccagaacuccgagggccgcggccaggccgccgaccucaaguccacccaggccgccaucgaccagaucaacggcaagcucaaccgccucaucggcaagaccaacgagaaguuccaccagaucgagaaggaguucuccgaggucgagggccgcauccaggaccucgagaaguacgucgaggacaccaagaucgaccucugguccuacaacgccgagcuccucgucgcccucgagaaccagcacaccaucgaccucaccgacuccgagaugaacaagcucuucgagaagaccaagaagcagcuccgcgagaacgccgaggacaugggcaacggcugcuucaagaucuaccacaagugcgacaacgccugcaucggcuccauccgcaacggcaccuacgcccacgacgucuaccgcgacgaggcccucaacaaccgcuuccagaucaagggcgucgagcucaaguccggcuacaaggacuggauccucuggaucuccuucgccaucuccugcuuccuccucugcgucgcccuccucggcuucaucaugugggccugccagaagggcaacauccgcugcaacaucugcaucuga

SEQ ID NO: 105120 - RNA, 1701 nt, Artificial Sequence
  derived and/or modified CDS sequence (opt2) from hemagglutinin__InfluenzaA__AFM71791
augaagaccaucaucgcccucuccuacacccucugccucgucuucgcccagaagcuccccggcaacgacaacuccaccgccacccucugccucggccaccacgccguccccaacggcaccaucgucaagaccaucaccaacgaccagaucgaggucaccaacgccaccgagcucguccaguccuccuccaccggcgagaucugcgacuccccccaccagauccucgacggcaagaacugcacccucaucgacgcccuccucggcgacccccagugcgacggcuuccagaacaagaagugggaccucuucgucgagcgcuccaaggccuacuccaacugcuaccccuacgacguccccgacuacgccucccuccgcucccucgucgccuccuccggcacccucgaguucaacaacgaguccuucaacuggaccggcgucacccagaacggcaccuccuccgccugcauccgccgcuccaagaacuccuucuucucccgccucaacuggcucacccaccucaacuucaaguaccccgcccucaacgucaccaugcccaacaacgagcaguucgacaagcucuacaucuggggcguccaccaccccggcaccgacaaggaccagaucuuccccuacgcccaggccuccggccgcaucaccgucuccaccaagcgcucccagcagaccgucauccccaacaucggcucccgcccccgcguccgcaacauccccucccgcaucuccaucuacuggaccaucgucaagcccggcgacauccuccucaucaacuccaccggcaaccucaucgccccccgcggcuacuucaagauccgcuccggcaaguccuccaucaugcgcuccgacgcccccaucggcaagugcaacuccgagugcaucacccccaacggcuccauccccaacgacaagcccuuccagaacgucaaccgcaucaccuacggcgccugcccccgcuacgucaagcagaacacccucaagcucgccaccggcaugcgcaacguccccgagaagcagacccgcggcaucuucggcgccaucgccggcuucaucgagaacggcugggagggcauggucgacggcugguacggcuuccgccaccagaacuccgagggccgcggccaggccgccgaccucaaguccacccaggccgccaucgaccagaucaacggcaagcucaaccgccucaucggcaagaccaacgagaaguuccaccagaucgagaaggaguucuccgaggucgagggccgcauccaggaccucgagaaguacgucgaggacaccaagaucgaccucugguccuacaacgccgagcuccucgucgcccucgagaaccagcacaccaucgagcucaccgacuccgagaugaacaagcucuucgagaagaccaagaagcagcuccgcgagaacgccgaggacaugggcaacggcugcuucaagaucuaccacaagugcgacaacgccugcaucggcuccauccgcaacggcaccuacgaccacgacgucuaccgcgacgaggcccucaacaaccgcuuccagaucaagggcgucgagcucaaguccggcuacaaggacuggauccucuggaucuccuucgccaucuccugcuuccuccucugcgucgcccuccucggcuucaucaugugggccugccagaagggcaacauccgcugcaacaucugcaucuga

SEQ ID NO: 105121 - RNA, 1701 nt, Artificial Sequence
  derived and/or modified CDS sequence (opt2) from hemagglutinin__InfluenzaA__AFM71824
augaagaccaucaucgcccucuccuacauccucugccucgucuucgcccagaagcuccccggcaacgacaacuccaccgccacccucugccucggccaccacgccguccccaacggcaccaucgucaagaccaucaccaacgaccagaucgaggucaccaacgccaccgagcucguccaguccuccuccaccggcgagaucugcgacuccccccaccagauccucgacggcaagaacugcacccucaucgacgcccuccucggcgacccccagugcgacggcuuccagaacaagaagugggaccucuucgucgagcgcuccaaggccuacuccaacugcuaccccuacgacguccccgacuacgccucccuccgcucccucgucgccuccuccggcacccucgaguucaacaacgaguccuucaacuggaccggcgucacccaggacggcaccuccuccgccugcauccgccgcuccaagaacuccuucuucucccgccucaacuggcucacccaccucaacuucaaguaccccgcccucaacgucaccaugcccaacaacgagcaguucgacaagcucuacaucuggggcguccaccaccccggcaccgacaaggaccagaucuuccccuacgcccaggccuccggccgcaucaccgucuccaccaagcgcucccagcagaccgccauccccaacaucggcucccgcccccgcguccgcaacauccccucccgcaucuccaucuacuggaccaucgucaagcccggcgacauccuccucaucaacuccaccggcaaccucaucgccccccgcggcuacuucaagauccgcuccggcaaguccuccaucaugcgcuccgacgcccccaucggcaagugcaacuccgagugcaucacccccaacggcuccauccccaacgacaagcccuuccagaacgucaaccgcaucaccuacggcgccugcccccgcuacgucaagcagaacacccucaagcucgccaccggcaugcgcaacguccccgagaagcagacccgcggcaucuucggcgccaucgccggcuucaucgagaacggcugggagggcauggucgacggcugguacggcuuccgccaccagaacuccgagggccgcggccaggccgccgaccucaaguccacccaggccgccaucgaccagaucaacggcaagcucaaccgccucaucggcaagaccaacgagaaguuccaccagaucgagaaggaguucuccgaggucgagggccgcauccaggaccucgagaaguacgucgaggacaccaagaucgaccucugguccuacaacgccgagcuccucgucgcccucgagaaccagcacaccaucgaccucaccgacuccgagaugaacaagcucuucgagaagaccaagaagcagcuccgcgagaacgccgaggacaugggcaacggcugcuucaagaucuaccacaagugcgacaacgccugcaucggcuccauccgcaacggcaccuacgaccacgacgucuaccgcgacgaggcccucaacaaccgcuuccagaucaagggcgucgagcucaaguccggcuacaaggacuggauccucuggaucuccuucgccaucuccugcuuccuccucugcgucgcccuccucggcuucaucaugugggccugccagaagggcaacauccgcugcaacaucugcaucuga

SEQ ID NO: 105122 - RNA, 1701 nt, Artificial Sequence
  derived and/or modified CDS sequence (opt2) from hemagglutinin__InfluenzaA__AFM71835
augaagaccaucaucgcccucuccuacauccucugccucgucuucgcccagaagcuccccggcaacgacaacuccaccgccacccucugccucggccaccacgccguccccaacggcaccaucgucaagaccaucaccaacgaccagaucgaggucaccaacgccaccgagcucguccaguccuccuccaccggcgagaucugcgacuccccccaccagauccucgacggcgagaacugcacccucaucgacgcccuccucggcgacccccagugcgacggcuuccagaacaagaagugggaccucuucgucgagcgcuccaaggccuacuccuccugcuaccccuacgacguccccgacuacgccucccuccgcucccucgucgccuccuccggcacccucgaguucaacuccgaguccuucaacuggaccggcgucacccagaacggcaccuccuccgccugcauccgccgcuccuacaacuccuucuucucccgccucaacuggcucacccaccucaacuucaaguaccccgcccucaacgucaccaugcccaacaacgagcaguucgacaagcucuacaucuggggcguccaccaccccggcaccgacaaggaccagaucuuccccuacgcccaggccuccggccgcaucaccgucuccaccaagcgcucccagcaggccgucauccccaacaucggcucccgcccccgcguccgcaacauccccucccgcaucuccaucuacuggaccaucgucaagcccggcgacauccuccucaucaacuccaccggcaaccucaucgccccccgcggcuacuucaagauccgcuccggcaaguccuccaucaugcgcuccgacgcccccaucggcaagugcaacuccgagugcaucacccccaacggcuccauccccaacgacaagcccuuccagaacgucaaccgcaucaccuacggcgccugcccccgcuacaucaagcaguccacccucaagcucgccaccggcaugcgcaacguccccgagaagcagacccgcggcaucuucggcgccaucgccggcuucaucgagaacggcugggagggcauggucgacggcugguacggcuuccgccaccagaacuccgagggccgcggccaggccgccgaccucaaguccacccaggccgccaucgaccagaucaacggcaagcucaaccgccucaucggcaagaccaacgagaaguuccaccagaucgagaaggaguucuccgaggucgagggccgcauccaggaccucgagaaguacgucgaggacaccaagaucgaccucugguccuacaacgccgagcuccucgucgcccucgagaaccagcacaccaucgaccucaccgacuccgagaugaacaagcucuucgagaagaccaagaagcagcuccgcgagaacgccgaggacaugggcaacggcugcuucaagaucuaccacaagugcgacaacgccugcaucggcuccauccgcaacggcaccuacgaccacgacgucuaccgcgacgaggcccucaacaaccgcuuccagaucaagggcgucgagcucaaguccggcuacaaggacuggauccucuggaucucccucgccaucuccugcuuccuccucugcgucgcccuccucggcuucaucaugugggccugccagaagggcaacauccgcugcaacaucugcaucuga

SEQ ID NO: 105123 - RNA, 1698 nt, Artificial Sequence
  derived and/or modified CDS sequence (opt2) from hemagglutinin__InfluenzaA__AFM71846
augaaggccaaccuccucguccuccucugcgcccucgccgccgccgacgccgacaccaucugcaucggcuaccacgccaacaacuccaccgacaccgucgacaccguccucgagaagaacgucaccgucacccacuccgucaaccuccucgaggacucccacaacggcaagcucugccgccucaagggcaucgccccccuccagcucggcaagugcaacaucgccggcuggcuccucggcaaccccgagugcgacccccuccuccccguccgcuccugguccuacaucgucgagacccccaacuccgagaacggcaucugcuaccccggcgacuucaucgacuacgaggagcuccgcgagcagcucuccuccgucuccuccuucgagcgcuucgagaucuuccccaaggaguccuccuggcccaaccacaacaccaacggcgucaccgccgccugcucccacgagggcaaguccuccuucuaccgcaaccuccucuggcucaccgagaaggagggcuccuaccccaagcucaagaacuccuacgucaacaagaagggcaaggagguccucguccucuggggcauccaccaccccuccaacuccaaggagcagcagaaccucuaccagaacgagaacgccuacgucuccgucgucaccuccaacuacaaccgccgcuucacccccgagaucgccgagcgccccaagguccgcgaccaggccggccgcaugaacuacuacuggacccuccucaagcccggcgacaccaucaucuucgaggccaacggcaaccucaucgcccccauguacgccuucgcccucucccgcggcuucggcuccggcaucaucaccuccaacgccuccaugcacgagugcaacaccaagugccagaccccccucggcgccaucaacuccucccuccccuaccagaacauccaccccgucaccaucggcgagugccccaaguacguccgcuccgccaagcuccgcauggucaccggccuccgcaacauccccuccauccagucccgcggccucuucggcgccaucgccggcuucaucgagggcggcuggaccggcaugaucgacggcugguacggcuaccaccaccagaacgagcagggcuccggcuacgccgccgaccagaaguccacccagaacgccaucaacggcaucaccaacaaggucaacaccgucaucgagaagaugaacauccaguucaccgccgucggcaaggaguucaacaagcucgagaagcgcauggagaaccucaacaagaaggucgacgacggcuuccucgacaucuggaccuacaacgccgagcuccucguccuccucgagaacgagcgcacccucgacuuccacgacuccaacgucaagaaccucuacgagaaggucaagucccagcucaagaacaacgccaaggagaucggcaacggcugcuucgaguucuaccacaagugcgacaacgagugcauggaguccguccgcaacggcaccuacgacuaccccaaguacuccgaggaguccaagcucaaccgcgagaaggucgacggcgucaagcucgaguccaugggcaucuaccagauccucgccaucuacuccaccgucgccuccucccucguccuccucgucucccucggcgccaucuccuucuggaugugcuccaacggcucccuccagugccgcaucugcaucuga

SEQ ID NO: 105124 - RNA, 1701 nt, Artificial Sequence; identical to SEQ ID NO: 98354
  derived and/or modified CDS sequence (opt2) from hemagglutinin__InfluenzaA__AFM71857

SEQ ID NO: 105125 - RNA, 1701 nt, Artificial Sequence
  derived and/or modified CDS sequence (opt2) from hemagglutinin__InfluenzaA__AFM71868
augaagaccaucaucgcccucuccuacauccucugccucgucuucgcccagaagcuccccggcaacgacaacuccaccgccacccucugccucggccaccacgccguccccaacggcaccaucgucaagaccaucaccaacgaccagaucgaggucaccaacgccaccgagcucguccaguccuccuccaccggcggcaucugcgacuccccccaccagauccucgacggcgagaacugcacccucaucgacgcccuccucggcgacccccagugcgacggcuuccagaacaagaagugggaccucuucgucgagcgcuccaaggccuacuccaacugcuaccccuacgacguccccgacuacgccucccuccgcucccucgucgccuccuccggcacccucgaguucaacaacgaguccuucaacuggaccggcgucacccagaacggcaccuccuccuccugcaagcgccgcuccaacaacuccuucuucucccgccucaacuggcucacccaccucaaguucaaguaccccgcccucaacgucaccaugcccaacaacgagaaguucgacaagcucuacaucuggggcguccaccaccccgucaccgacaacgaccagauccgccucuacgcccaggccuccggccgcaucaccgucuccaccaagcgcucccagcagaccgucauccccaacaucggcucccgcccccgcguccgcgacauccccucccgcaucuccaucuacuggaccaucgucaagcccggcgacauccuccucaucaacuccaccggcaaccucaucgccccccgcggcuacuucaagauccgcuccggcaaguccuccaucaugcgcuccgacgcccccaucggcaagugcaacuccgagugcaucacccccaacggcuccauccccaacgacaagcccuuccagaacgucaaccgcaucaccuacggcgccugcccccgcuacgucaagcagaacacccucaagcucgccaccggcaugcgcaacguccccgagaagcagacccgcggcaucuucggcgccaucgccggcuucaucgagaacggcugggagggcauggucgacggcugguacggcuuccgccaccagaacuccgagggcaucggccaggccgccgaccucaaguccacccaggccgccaucaaccagaucaacggcaagcucaaccgccucaucggcaagaccaacgagaaguuccaccagaucgagaaggaguucuccgaggucgagggccgcauccaggaccucgagaaguacgucgaggacaccaagaucgaccucugguccuacaacgccgagcuccucgucgcccucgagaaccagcacaccaucgaccucaccgacuccgagaugaacaagcucuucgagcgcaccaagaagcagcuccgcgagaacgccgaggacaugggcaacggcugcuucaagaucuaccacaagugcgacaacgccugcaucggcuccauccgcaacggcaccuacgaccacgacgucuaccgcgacgaggcccucaacaaccgcuuccagaucaagggcgucgagcucaaguccggcuacaaggacuggauccucuggaucuccuucgccaucuccugcuuccuccucugcgucguccuccucggcuucaucaugugggccugccagaagggcaacauccgcugcaacaucugcaucuga

SEQ ID NO: 105126 - RNA, 1701 nt, Artificial Sequence; identical to SEQ ID NO: 103034
  derived and/or modified CDS sequence (opt2) from hemagglutinin__InfluenzaA__AFM71879

SEQ ID NO: 105127 - RNA, 1701 nt, Artificial Sequence
  derived and/or modified CDS sequence (opt2) from hemagglutinin__InfluenzaA__AFM71890
augaaggcccgccuccucguccuccucugcgcccucgccgccaccgacgccgacaccaucugcaucggcuaccacgccaacaacuccaccgacaccgucgacacccuccucgagaagaacgucaccgucacccacuccgucaaccuccucgaggacucccacaacggcaagcucugcaagcucaagggcaucgccccccuccagcucggcaagugcaacaucgccggcuggcuccucggcaaccccgagugcgacucccuccuccccgcccgcuccugguccuacaucgucgagacccccaacuccgagaacggcgccugcuaccccggcgacuucaucgacuacgaggagcucaaggagcagcucuccuccgucuccucccucgagcgcuucgagaucuuccccaaggaguccuccuggcccaaccacaacacccucaagggcgucaccgccuccugcucccacggcggcaaguccuccuucuaccgcaaccuccucuggcucaccaagaccgaggacuccuaccccaagcucuccaacuccuacgucaacaacaagggcaaggagguccucguccucuggggcguccaccaccccuccuccuccgacgagcagcagucccucuaccacaacgucaacgccuacgucuccgucgucuccuccaacuacaaccgccgcuucacccccgagaucgccgcccgccccaagguccgcaaccagcccggccgcaugaacuacuacuggacccuccucgagcccggcgacaccaucaucuucgaggccaccggcaaccucaucgcccccugguacgccuucgcccucucccgcggcuucggcuccggcaucaucaccuccaacgccuccaugcacgagugcaacaccaagugccagaccccccagggcgccaucaacuccucccuccccuuccagaacauccaccccgucaccaucggcgagugccccaaguacguccgcuccaccaagcuccgcauggucaccggccuccgcaacauccccuccauccaguuccgcggccucuucggcgccaucgccggcuucaucgagggcggcuggaccggcaugaucgacggcugguacggcuaccaccaccagaacgagcagggcuccggcuacgccgccgaccagaaguccacccagaacgccaucaacggcaucaccaacaaggucaacuccgucaucgagaagaugaacacccaguucaccgccgucuccaaggaguucaacaaccucgagaagcgcauggagaaccucaacaagaaggucgacgacggcuuccucgacaucuggaccuacaacgccgagcuccucguccuccucgagaacgagcgcacccucgacuuccacgaccucaacgucaagaaccucuacgagaaggucaagucccagcucaagaacaacgccaaggagaucggcaacggcugcuucgaguucuaccacaagugcgacaacaagugcauggaguccguccgcaacggcaccuacgacuaccccaaguacuccgaggaguccaagcucaaccgcgagaagaucgacggcgucaagcucgaguccaugggcgucuaccagauccucgccaucuacuccaccgucgccuccucccucguccuccucgucucccucggcgccaucuccuucuggaugugcuccaacggcucccuccagugccgcaucugcaucuga

SEQ ID NO: 105128 - RNA, 1701 nt, Artificial Sequence; identical to SEQ ID NO: 105113
  derived and/or modified CDS sequence (opt2) from hemagglutinin__InfluenzaA__AFM71901

SEQ ID NO: 105129 - RNA, 1701 nt, Artificial Sequence
  derived and/or modified CDS sequence (opt2) from hemagglutinin__InfluenzaA__AFM71923
augaagaccaucaucgcccucuccuacaucuucugccucguccucggccaggaccuccccggcaacgacaacuccaccgccacccucugccucggccaccacgccguccccaacggcacccucgucaagaccaucaccaacgaccagaucgaggucaccaacgccaccgagcucguccaguccuccuccaccggcaagaucugcaacaacccccaccgcauccucgacggcaucgacugcacccucaucgacgcccuccucggcgacccccacugcgacuccuuccagaacgagaccugggaccucuucgucgagcgcuccaaggccuucuccaacugcuaccccuacgacguccccgacuacgccucccuccgcucccucgucgccuccuccggcacccucgaguucaucaacgagggcuucaccuggaccggcgucacccagaacggcggcuccaacgccugcaagcgcggccccgacuccggcuucuucucccgccucaacuggcucuacaaguccggcuccaccuaccccguccucaacgucaccaugcccaacaacgacaacuucgacaagcucuacaucuggggcguccaccaccccuccaccaaccaggagcagaccucccucuacguccaggccuccggccgcgucaccgucuccaccaagcgcucccagcagaccaucauccccaacaucggcucccgccccuggguccgcggccucuccucccgcaucuccaucuacuggaccaucgucaagcccggcgacauccucgucaucaacuccaacggcaaccucaucgccccccgcggcuacuucaagaugcgcaccggcaaguccuccaucaugcgcuccgacgcccccaucggcaccugcaucuccgagugcaucacccccaacggcuccauccccaacgacaagcccuuccagaacgucaacaagaucaccuacggcgccugccccaaguacgucaagcagaacacccucaagcucgccaccggcaugcgcaacguccccgagaagcagacccgcggccucuucggcgccaucgccggcuucaucgagaacggcugggagggcaugaucgacggcugguacggcuuccgccaccagaacuccgagggcaccggccaggccgccgaccucaaguccacccaggccgccaucgaccagaucaacggcaagcucaaccgcgucaucgagaagaccaacgagaaguuccaccagaucgagaaggaguucuccgaggucgagggccgcauccaggaccucgagaaguacgucgaggacaccaagaucgaccucugguccuacaacgccgagcuccucgucgcccucgagaaccagcacaccaucgaccucaccgacuccgagaugaacaagcucuucgagaagacccgccgccagcuccgcgagaacgccgaggacaugggcaacggcugcuuccgcaucuaccacaagugcgacaacgccugcaucggcuccauccgcaacggcaccuacgaccacgacgucuaccgcgacgaggcccucaacaaccgcuuccagaucaagggcgucgagcucaaguccggcuacaaggacuggauccucuggaucuccuucgccaucuccugcuuccuccucugcgucguccuccucggcuucaucaugugggccugccagaagggcaacauccgcugcaacaucugcaucuga

SEQ ID NO: 105130 - RNA, 1701 nt, Artificial Sequence
  derived and/or modified CDS sequence (opt2) from hemagglutinin__InfluenzaA__AFM71934
augaagaccaucaucgcccucuccuacaucuucugccucguccucggccaggaccuccccggcaacgacaacuccaccgccacccucugccucggccaccacgccguccccaacggcacccucgucaagaccaucaccaacgaccagaucgaggucaccaacgccaccgagcucguccaguccuccuccaccggcaagaucugcaacaacccccaccgcauccucgacggcaucgacugcacccucaucgacgcccuccucggcgacccccacugcgacggcuuccagaacgagaccugggaccucuucgucgagcgcuccaaggccuucuccaacugcuaccccuacgacguccccgacuacgccucccuccgcucccucgucgccuccuccggcacccucgaguucaucaacgagggcuucaccuggaccggcgucacccagaacggcggcuccaacgccugcaagcgcggccccgacuccggcuucuucucccgccucaacuggcucuacaaguccggcuccaccuaccccguccucaacgucaccaugcccaacaacgacaacuucgacaagcucuacaucuggggcguccaccaccccuccaccaaccaggagcagaccucccucuacguccaggccuccggccgcgucaccgucuccaccaagggcucccagcagaccaucauccccaacaucggcucccgccccuggguccgcggccucuccucccgcaucuccaucuacuggaccaucgucaagcccggcgacauccucgucaucaacuccaacggcaaccucaucgccccccgcggcuacuucaagaugcgcaccggcaaguccuccaucaugcgcuccgacgcccccaucggcaccugcaucuccgagugcaucacccccaacggcuccauccccaacgacaagcccuuccagaacgucaacaagaucaccuacggcgccugccccaaguacgucaagcagaacacccucaagcucgccaccggcaugcgcaacguccccgagaagcagacccgcggccucuucggcgccaucgccggcuucaucgagaacggcugggagggcaugaucgacggcugguacggcuuccgccaccagaacuccgagggcaccggccaggccgccgaccucaaguccacccaggccgccaucgaccagaucaacggcaagcucaaccgcgucaucgagaagaccaacgagaaguuccaccagaucgagaaggaguucuccgaggucgagggccgcauccaggaccucgagaaguacgucgaggacaccaagaucgaccucugguccuacaacgccgagcuccucgucgcccucgagaaccagcacaccaucgaccucaccgacuccgagaugaacaagcucuucgagaagacccgccgccagcuccgcgagaacgccgaggacaugggcaacggcugcuuccgcaucuaccacaagugcgacaacgccugcaucggcuccauccgcaacggcaccuacgaccacgacgucuaccgcgacgaggcccucaacaaccgcuuccagaucaagggcgucgagcucaaguccggcuacaaggacuggauccucuggaucuccuucgccaucuccugcuuccuccucugcgucguccuccucggcuucaucaugugggccugccagaagggcaacauccgcugcaacaucugcaucuga

SEQ ID NO: 105131 - RNA, 1701 nt, Artificial Sequence
  derived and/or modified CDS sequence (opt2) from hemagglutinin__InfluenzaA__AFM71945
augaagaccaucaucgcccucuccuacaucuucugccucguccucggccaggacuuccccggcaacgacaacuccaccgccacccucugccucggccaccacgccguccccaacggcacccucgucaagaccaucaccaacgaccagaucgaggucaccaacgccaccgagcucguccaguccuccuccaccggcaagaucugcaacaacccccaccgcauccucgacggcaucaacugcacccucaucgacgcccuccucggcgacccccacugcgacggcuuccagaacgagaccugggaccucuucgucgagcgcuccaaggccuucuccaacugcuaccccuacgacguccccgacuacgccucccuccgcucccucgucgccuccuccggcacccucgaguucaucaacgagggcuucaccuggaccggcgucacccagaacggcggcuccaacgccugcaagcgcggccccgacuccggcuucuucucccgccucaacuggcucuacaaguccggcuccgccuaccccguccucaacgucaccaugcccaacaacgacaacuucgacaagcucuacaucuggggcguccaccaccccuccaccgaccaggagcagaccaaccucuacguccaggccuccggccgcgucaccgucuccaccaagcgcucccagcagaccaucauccccaacaucggcucccgccccuggguccgcggccucuccucccgcaucuccaucuacuggaccaucgucaagcccggcgacauccucgucaucaacuccaacggcaaccucaucgccccccgcggcuacuucaagaugcgcaccggcaaguccuccaucaugcgcuccgacgcccccaucggcaccugcaucuccgagugcaucacccccaacggcuccauccccaacgacaagcccuuccagaacgucaacaagaucaccuacggcgccugccccaaguacgucaagcagaacacccucaagcucgccaccggcaugcgcaacguccccgagaagcagacccgcggcaucuucggcgccaucgccggcuucaucgagaacggcugggagggcaugaucgacggcugguacggcuuccgccaccagaacuccgagggcaccggccaggccgccgaccucaaguccacccaggccgccaucgaccagaucaacggcaagcucaaccgcgucaucgagaagaccaacgagaaguuccaccagaucgagaaggaguucuccgaggucgagggccgcauccaggaccucgagaaguacgucgaggacaccaagaucgaccucugguccuacaacgccgagcuccucgucgcccucgagaaccagcacaccaucgaccucaccgacuccgagaugaacaagcucuucgagaagacccgccgccagcuccgcgagaacgccgaggacaugggcaacggcugcuucaagaucuaccacaagugcgacaacgccugcaucggcuccauccgcaacggcaccuacgaccacgacgucuaccgcgacgaggcccucaacaaccgcuuccagaucaagggcgucgagcucaaguccggcuacaaggacuggauccucuggaucuccuucgccaucuccugcuuccuccucugcgucguccuccucggcuucaucaugugggccugccagaagggcaacauccgcugcaacaucugcaucuga

SEQ ID NO: 105132 - RNA, 1701 nt, Artificial Sequence; identical to SEQ ID NO: 105131
  derived and/or modified CDS sequence (opt2) from hemagglutinin__InfluenzaA__AFM71956

SEQ ID NO: 105133 - RNA, 1704 nt, Artificial Sequence
  derived and/or modified CDS sequence (opt2) from hemagglutinin__InfluenzaA__AFM71978
augaagaccaucaucgcccucuccuacaucuucugccucgucuucgcccaggaccuccccggcaacgacaacaacuccaccgccacccucugccucggccaccacgccguccccaacggcacccucgucaagaccaucaccaacgaccagaucgaggucaccaacgccaccgagcucguccaguccuccuccaccggcaagaucugcaacaacccccaccgcauccucgacggcaucaacugcacccucaucgacgcccuccucggcgacccccacugcgacggcuuccagaacgagaagugggaccucuucgucgagcgcuccaaggccuucuccaacugcuaccccuacgacguccccgacuacgccucccuccgcucccucgucgccuccuccggcacccucgaguucaucaacgagggcuucaacuggaccggcgucacccagaacggcggcuccaacgccugcaagcgcggccccgacuccggcuucuucucccgccucaacuggcucuacaaguccggcuccaccuaccccguccagaacgucaccaugcccaacaacgacaacuccgacaagcucuacaucuggggcguccaccaccccuccaccgacaaggagcagaccaaccucuacguccaggccuccggcaaggucaccgucuccaccaagcgcucccagcagaccaucauccccaacgucggcucccgccccuggguccgcggccucuccucccgcaucuccaucuacuggaccaucgucaagcccggcgacauccucgucaucaacuccaacggcaaccucaucgccccccgcggcuacuucaagaugcgcaccggcaaguccuccaucaugcgcuccgacgcccccaucggcaccugcuccuccgagugcaucacccccaacggcuccauccccaacgacaagcccuuccagaacgucaacaagaucaccuacggcgccugccccaaguacgucaagcagaacacccucaagcucgccaccggcaugcgcaacguccccgagaagcagacccgcggcaucuucggcgccaucgccggcuucaucgagaacggcugggagggcaugaucgacggcugguacggcuuccgccaccagaacuccgagggcaccggccaggccgccgaccucaaguccacccaggccgccaucgaccagaucaacggcaagcucaaccgcgucaucgagaagaccaacgagaaguuccaccagaucgagaaggaguucuccgaggucgagggccgcauccaggaccucgagaaguacgucgaggacaccaagaucgaccucugguccuacaacgccgagcuccucgucgcccucgagaaccagcacaccaucgaccucaccgacuccgagaugaacaagcucuucgagaagacccgccgccagcuccgcgagaacgccgaggacaugggcaacggcugcuucaagaucuaccacaagugcgacaacgccugcaucggcuccauccgcaacggcaccuacgaccacgacgucuaccgcgacgaggcccucaacaaccgcuuccagaucaagggcgucgagcucaaguccggcuacaaggacuggauccucuggaucuccuucgccaucuccugcuuccuccucugcgucguccuccucggcuucaucaugugggccugccagaagggcaacauccgcugcaacaucugcaucuga

SEQ ID NO: 105134 - RNA, 1701 nt, Artificial Sequence
  derived and/or modified CDS sequence (opt2) from hemagglutinin__InfluenzaA__AFM71989
augaagaccaucaucgcccucuccuacauccucugccucgucuucgcccagaagcuccccggcaacgacaacuccaccgccacccucugccucggccaccacgccguccccaacggcaccaucgucaagaccaucaccaacgaccagaucgaggucaccaacgccaccgagcucguccaguccuccuccaccggcgagaucugcaacuccccccaccagauccucgacggcgagaacugcacccucaucgacgcccuccucggcgacccccagugcgacggcuuccagaacaagaagugggaccucuucgucgagcgcuccaaggcccacuccaacugcuaccccuacgacguccccgacuacgccucccuccgcucccucgucgccuccuccggcacccucgaguucaacaacgaguccuucaacuggaccggcgucacccagaacggcaccuccuccgccugcauccgccgcuccaacaacuccuucuucucccgccucaacuggcucacccaccucaacuucaaguaccccgcccucaacgucaccaugcccaacaacgagcaguucgacaagcucuacaucuggggcguccaccaccccuccaccgacaaggaccagaucuuccucuacacccaggccgccggccgcaucaccgucuccaccaagcgcucccagcaggccgucauccccaacaucggcucccgcccccgcguccgcaacauccccucccgcgucuccaucuacuggaccaucgucaagcccggcgacauccuccucaucaacuccaccggcaaccucaucgccccccgcggcuacuucaagauccgcuccggcaaguccuccaucaugcgcuccgacgcccccaucggcaagugcaacuccgccugcaucacccccaacggcuccauccccaacgacaagcccuuccagaacgucaaccgcaucaccuacggcgccugcccccgcuacgucaagcagaacacccucaagcucgccaccggcaugcgcaacguccccgagaagcagacccgcggcaucuucggcgccaucgccggcuucaucgagaacggcugggagggcauggucgacggcugguacggcuuccgccaccagaacuccgagggccgcggccaggccgccgaccucaaguccacccaggccgccaucgaccagaucaacggcaagcucaaccgccucaucggcaagaccaacgagaaguuccaccagaucgagaaggaguucuccgaggucgagggccgcauccaggaccucgagaaguacgucgaggacaccaagaucgaccucugguccuacaacgccgagcuccucgucgcccucgagaaccagcacaccaucgaccucaccgacuccgagaugaacaagcucuucgagaagaccaagaagcagcuccgcgagaacgccgaggacaugggcaacggcugcuucaagaucuaccacaagugcgacaacgccugcaucggcuccauccgcaacggcaccuacgaccacgacgucuaccgcgacgaggcccucaacaaccgcuuccagaucaagggcgucgagcucaaguccggcuacaaggacuggauccucuggaucuccuucgccaucuccugcuuccuccucugcgucgcccuccucggcuucaucaugugggccugccagaagggcaacauccgcugcaacaucugcaucuga

SEQ ID NO: 105135 - RNA, 1701 nt, Artificial Sequence
  derived and/or modified CDS sequence (opt2) from hemagglutinin__InfluenzaA__AFM72010
augaagaccaucaucgcccucuccuacaucuucugccagguccucgcccagaaccuccccggcaacgacaacuccaccgccacccucugccucggccaccacgccguccccaacggcacccucgucaagaccaucaccaacgaccagaucgaggucaccaacgccaccgagcucguccaguccuccuccaccggccgcaucugcgacuccccccaccgcauccucgacggcaagaacugcacccucaucgacgcccuccucggcgacccccacugcgacggcuuccagaacgagaagugggaccucuucgucgagcgcuccaaggccuucuccaacugcuaccccuacgacguccccgacuacgccucccuccgcucccucgucgccuccuccggcacccucgaguucaucaacgagggcuucaacuggaccggcgucacccagaacggcggcuccuacgccugcaagcgcggccccgacaaguccuucuucucccgccucaacuggcucuacgaguccgaguccaccuaccccguccucaacgucaccaugcccaacaacgacaacuucgacaagcucuacaucuggggcguccaccaccccuccaccgacaaggagcagaccaagcucuacguccaggccuccggccgcgucaccgucuccaccaagcgcucccagcagaccaucauccccaacgucggcucccgccccuggguccgcggccucuccucccgcaucuccaucuacuggaccaucgucaagcccggcgacauccuccucaucaacuccaacggcaaccucaucgccccccgcggcuacuucaagauccgcaccggcaaguccuccaucaugcgcuccgacgcccccaucggcaccugcuccuccgagugcaucacccccaacggcuccauccccaacgacaagcccuuccagaacgucaacaagaucaccuacggcgccugccccaaguacgucaagcagaacacccucaagcucgccaccggcaugcgcaacguccccgagaagcagacccgcggcaucuucggcgccaucgccggcuucaucgagaacggcugggagggcaugaucgacggcugguacggcuuccgccaccagaacuccgagggcaccggccaggccgccgaccucaaguccacccaggccgccaucgaccagaucaacggcaagcucaaccgcgucaucgagaagaccaacgagaaguuccaccagaucgagaaggaguucuccgaggucgagggccgcauccaggaccucgagaaguacgucgaggacaccaagaucgaccucugguccuacaacgccgagcuccucgucgcccucgagaaccagcacaccaucgaccucaccgacuccgagaugaacaagcucuucgagaagacccgccgccagcuccgcgagaacgccgaggacaugggcaacggcugcuucaagaucuaccacaagugcgacaacgccugcaucggcuccauccgcaacggcaccuacgaccacgacgucuaccgcgacgaggcccucaacaaccgcuuccagaucaagggcgucgagcucaaguccggcuacaaggacuggauccucuggaucuccuucgccaucuccugcuuccuccucugcgucguccuccucggcuucaucaugugggccugccagaagggcaacauccgcugcaacaucugcaucuga

SEQ ID NO: 105136 - RNA, 1701 nt, Artificial Sequence; identical to SEQ ID NO: 96951
  derived and/or modified CDS sequence (opt2) from hemagglutinin__InfluenzaA__AFM72021

SEQ ID NO: 105137 - RNA, 1701 nt, Artificial Sequence
  derived and/or modified CDS sequence (opt2) from hemagglutinin__InfluenzaA__AFM72032
augaagaccaucaucgcccucuccuacauguucugccucgucuucgcccagaaccuccccggcaacgacaacuccaccgccacccucugccucggccaccacgccguccccaacggcacccucgucaagaccaucaccaacgaccagaucgaggucaccaacgccaccgagcucguccaguccuccuccaccggccgcaucugcgacuccccccaccgcauccucgacggcaagaacugcacccucaucgacgcccuccucggcgacccccacugcgacggcuuccagaacgagaagugggaccucuucgucgagcgcuccaaggccuucuccaacugcuaccccuacgacguccccgacuacgccucccuccgcucccucgucgccuccuccggcacccucgaguucaucaacgagggcuucaacuggaccggcgucacccaguccggcggcuccuacaccugcaagcgcggcuccaacaacuccuucuucucccgccucaacuggcucuacgaguccgaguccaaguaccccguccucaacgucaccaugcccaacaacggcaaguucgacaagcucuacaucuggggcauccaccaccccuccaccgacaaggagcagaccaaccucuacauccgcgccuccggccgcgucaccgucuccaccaagcgcucccagcagaccgucauccccaacaucggcucccgccccuggguccgcggccucuccucccgcaucuccaucuacuggaccaucgucaagcccggcgacauccuccucaucaacuccaccggcaaccucaucgccccccgcggcuacuucaagauccgcaccggcaaguccuccaucaugcgcuccgacgcccccaucggcaccugcuccuccgagugcaucacccccaacggcuccauccccaacgacaagcccuuccagaacgucaacaagaucaccuacggcgccugcccccgcuacgucaagcagaacacccucaagcucgccaccggcaugcgcaacguccccgagaagcagacccgcggcaucuucggcgccaucgccggcuucaucgagaacggcugggagggcauggucgacggcugguacggcuuccgccaccagaacuccgagggcaccggccaggccgccgaccucaaguccacccaggccgccaucgaccagaucaacggcaagcucaaccgcgucaucgagaagaccaacgagaaguuccaccagaucgagaaggaguucuccgaggucgagggccgcauccaggaccucgagaaguacgucgaggacaccaagaucgaccucugguccuacaacgccgagcuccucgucgcccucgagaaccagcacaccaucgaccucaccgacuccgagaugaacaagcucuucgagaagacccgcaagcagcuccgcgagaacgccgaggacaugggcaacggcugcuucaagaucuaccacaagugcgacaacgccugcaucggcuccauccgcaacggcaccuacgaccacgacgucuaccgcgacgaggcccucaacaaccgcuuccagaucaagggcgucgagcucaaguccggcuacaaggacuggauccucuggaucuccuucgccaucuccugcuuccuccucugcgucguccuccucggcuucaucaugugggccugccagaagggcaacauccgcugcaacaucugcaucuga

SEQ ID NO: 105138 - RNA, 1701 nt, Artificial Sequence
  derived and/or modified CDS sequence (opt2) from hemagglutinin__InfluenzaA__AFM72043
augaagaccaucaucgcccucuccuacauguucugccucgucuucgcccagaaccuccccggcaacgacaacuccaccgccacccucugccucggccaccacgccguccccaacggcacccucgucaagaccaucaccaacgaccagaucgaggucaccaacgccaccgagcucguccaguccuccuccaccggccgcaucugcgacuccccccaccgcauccucgacggcaagaacugcacccucaucgacgcccuccucggcgacccccacugcgacggcuuccagaacgagaagugggaccucuucgucgagcgcuccaaggccuucuccaacugcuaccccuacgacguccccgacuacgccucccuccgcucccucgucgccuccuccggcacccucgaguucaucaacgagggcuucaacuggaccggcgucacccaguccggcggcuccuccaccugcaagcgcggcuccaacaacuccuucuucucccgccucaacuggcucuacgaguccgaguccaaguaccccguccucaacgucaccaugcccaacaacggcaaguucgacaagcucuacaucuggggcauccaccaccccuccaccgacaaggagcagaccaaccucuacauccgcgccuccggccgcgucaccgucuccaccaagcgcucccagcagaccgucauccccaacaucggcucccgccccuggguccgcggccucuccucccgcaucuccaucuacuggaccaucgucaagcccggcgacauccuccucaucaacuccaccggcaaccucaucgccccccgcggcuacuucaagauccgcaccggcaaguccuccaucaugcgcuccgacgcccccaucggcaccugcuccuccgagugcaucacccccaacggcuccauccccaacgacaagcccuuccagaacgucaacaagaucaccuacggcgccugcccccgcuacgucaagcagaacacccucaagcucgccaccggcaugcgcaacguccccgagaagcagacccgcggcaucuucggcgccaucgccggcuucaucgagaacggcugggagggcauggucgacggcugguacggcuuccgccaccagaacuccgagggcaccggccaggccgccgaccucaaguccacccaggccgccaucgaccagaucaacggcaagcucaaccgcgucaucgagaagaccaacgagaaguuccaccagaucgagaaggaguucuccgaggucgagggccgcauccaggaccucgagaaguacgucgaggacaccaagaucgaccucugguccuacaacgccgagcuccucgucgcccucgagaaccagcacaccaucgaccucaccgacuccgagaugaacaagcucuucgagaagacccgcaagcagcuccgcgagaacgccgaggacaugggcaacggcugcuucaagaucuaccacaagugcgacaacgccugcaucggcuccauccgcaacggcaccuacgaccacgacgucuaccgcgacgaggcccucaacaaccgcuuccagaucaagggcgucgagcucaaguccggcuacaaggacuggauccucuggaucuccuucgccaucuccugcuuccuccucugcgucguccuccucggcuucaucaugugggccugccagaagggcaacauccgcugcaacaucugcaucuga

SEQ ID NO: 105139 - RNA, 1701 nt, Artificial Sequence
  derived and/or modified CDS sequence (opt2) from hemagglutinin__InfluenzaA__AFM72054
augaaggccaagcuccucguccuccucugcgcccucuccgccaccgacgccgacaccaucugcaucggcuaccacgccaacaacuccaccgacaccgucgacaccguccucgagaagaacgucaccgucacccacuccgucaaccuccucgaggacaaccacaacggcaagcucugcaagcucaagggcaucgccccccuccagcucggcaagugcuccaucgccggcuggauccucggcaaccccgagugcgagucccucuucuccaagaaguccugguccuacaucgccgagacccccaacuccgagaacggcaccugcuaccccggcuacuucgccgacuacgaggagcuccgcgagcagcucuccuccgucuccuccuucgagcgcuucgagaucuuccccaaggaguccuccuggcccaagcacaacgucaccaagggcgucaccgccgccugcucccacaagggcaaguccuccuucuaccgcaaccuccucuggcucaccgagaagaacggcuccuaccccaaccucuccaaguccuacgucaacaacaaggagaaggagguccucguccucuggggcguccaccaccccuccaacaucgaggaccagaagaccaucuaccgcaaggagaacgccuacgucuccgucgucuccucccacuacaaccgccgcuucacccccgagaucgccaagcgccccaagguccgcaaccaggagggccgcaucaacuacuacuggacccuccucgagcccggcgacaccaucaucuucgaggccaacggcaaccucaucgcccccugguacgccuucgcccucucccgcggcuucggcuccggcaucaucaccuccaacgccuccauggacgagugcgacgccaagugccagaccccccagggcgccaucaacuccucccuccccuuccagaacguccaccccgucaccaucggcgagugccccaaguacguccgcuccaccaagcuccgcauggucaccggccuccgcaacauccccuccauccagucccgcggccucuucggcgccaucgccggcuucaucgagggcggcuggaccggcaugaucgacggcugguacggcuaccaccaccagaacgagcagggcuccggcuacgccgccgaccagaaguccacccagaacgccaucaacggcaucaccaacaaggucaacuccaucaucgagaagaugaacacccaguucaccgccgucggcaaggaguucaacaagcucgagaagcgcauggagaaccucaacaagaaggucgacgacggcuuccucgacaucuggaccuacaacgccgagcuccucguccuccucgagaacgagcgcacccucgacuuccacgacuccaacgucaagaaccucuacgagaaggucaagucccagcucaagaacaacgccaaggagaucggcaacggcugcuucgaguucuaccacaagugcaacaacgagugcauggaguccgucaagaacggcaccuacgacuaccccaaguacuccgaggaguccaagcucaaccgcgagaagaucgacggcgucaagcucgaguccaugggcgucuaccagauccucgccaucuacuccaccgucgccuccucccucguccuccucgucucccucggcgccaucuccuucuggaugugcuccaacggcucccuccagugccgcaucugcaucuga

SEQ ID NO: 105140 - RNA, 1701 nt, Artificial Sequence; identical to SEQ ID NO: 105139
  derived and/or modified CDS sequence (opt2) from hemagglutinin__InfluenzaA__AFM72065

SEQ ID NO: 105141 - RNA, 1701 nt, Artificial Sequence
  derived and/or modified CDS sequence (opt2) from hemagglutinin__InfluenzaA__AFM72087
augaagaccaucaucgcccucuccuacaucuucugccucgucuucgcccagaagcuccccggcaacgacaacuccaccgccacccucugccucggccaccacgccguccccaacggcacccucgucaagaccaucaccaacgaccagaucgaggucaccaacgccaccgagcucguccaguccuccuccaccggccgcaucugcgacuccccccaccgcauccucgacggcaagaacugcacccucaucgacgcccuccucggcgacccccacugcgacggcuuccagaacgagaagugggaccucuucaucgagcgcuccaaggccuucuccaacugcuaccccuacgacguccccgacuacgccucccuccgcucccucgucgccuccuccggcacccucgaguucaucaacgagggcuucaacuggaccggcgucacccaguccggcggcuccuacaccugcaagcgcggcuccgucaacuccuucuucucccgccucaacuggcucuacgaguccgaguacaaguaccccgcccucaacgucaccaugcccaacaacggcaaguucgacaagcucuacaucuggggcguccaccaccccuccaccgagaaggagcagaccaaccucuacguccgcgccuccggccgcgucaccgucuccaccaagcgcucccagcagaccgucauccccaacaucggcuccucccccuggguccgcggccucuccucccgcaucuccaucuacuggaccaucgucaagcccggcgacauccuccucaucaacuccaccggcaaccucaucgccccccgcggcuacuucaagauccgcaccggcaaguccuccaucaugcgcuccgacgcccccaucggcaccugcuccuccgagugcaucacccccaacggcuccauccccaacgacaagcccuuccagaacgucaacaagaucaccuacggcgccugcccccgcuacgucaagcagaacacccucaagcucgccaccggcaugcgcaacguccccgagaagcagacccgcggcaucuucggcgccaucgccggcuucaucgagaacggcugggagggcauggucgacggcugguacggcuuccgccaccagaacuccgagggcaccggccaggccgccgaccucaaguccacccaggccgccaucgaccagaucaacggcaagcucaaccgccucaucgagaagaccaacgagaaguuccaccagaucgagaaggaguucuccgaggucgagggccgcauccaggaccucgagaaguacgucgaggacaccaagaucgaccucugguccuacaacgccgagcuccucgucgcccucgagaaccaguacaccaucgaccucaccgacuccgagaugaacaagcucuucgagaagacccgcaagcagcuccgcgagaacgccgaggacaugggcaacggcugcuucaagaucuaccacaagugcgacaacgccugcaucggcuccauccgcaacggcaccuacgaccacgacgucuaccgcgacgaggcccucaacaaccgcuuccagaucaagggcgucgagcucaaguccggcuacaaggacuggauccucuggaucuccuucgccaucuccugcuuccuccucugcgucguccuccucggcuucaucaugugggccugccagaagggcaacauccgcugcaacaucugcaucuga

SEQ ID NO: 105142 - RNA, 1701 nt, Artificial Sequence
  derived and/or modified CDS sequence (opt2) from hemagglutinin__InfluenzaA__AFM72098
augaagaccaucaucgcccucuccuacaucuucugccucgucuucgcccagaagcuccccggcaacgacaacuccaccgccacccucugccucggccaccacgccguccccaacggcacccucgucaagaccaucaccaacgaccagaucgaggucaccaacgccaccgagcucguccaguccuccuccaccggccgcaucugcgacuccccccaccgcauccucgacggcaagaacugcacccucaucgacgcccuccucggcgacccccacugcgacggcuuccagaacgagaagugggaccucuucgucgagcgcuccaaggccuacuccaacugcuaccccuacgacguccccgacuacgccucccuccgcucccucgucgccuccuccggcacccucgaguucaucaacgaggacuucaacuggaccggcgucacccaguccggcggcuccuacgccugcaagcgcggcuccgucaacuccuucuucucccgccucaacuggcucuacaaguccgaguacaaguaccccgcccucaacgucaccaugcccaacaacggcaaguucgacaagcucuacaucuggggcguccaccaccccgucaccgaccgcgagcagaccaaccucuacguccgcgccuccggccgcgucaccgucuccaccaagcgcucccagcagaccgucauccccaacaucggcucccgccccuggguccgcggccucuccucccgcaucuccaucuacuggaccaucgucaagcccggcgacauccuccucaucaacuccaccggcaaccucaucgccccccgcggcuacuucaagauccgcaccggcaaguccuccaucaugcgcuccgacgcccccaucggcaccugcuccuccgagugcaucacccccaacggcuccauccccaacgacaagcccuuccagaacgucaacaagaucaccuacggcgccugcccccgcuacgucaagcagaacacccucaagcucgccaccggcaugcgcaacguccccgagaagcagacccgcggcaucuucggcgccaucgccggcuucaucgagaacggcugggagggcauggucgacggcugguacggcuuccgccaccagaacuccgagggcaccggccaggccgccgaccucaaguccacccaggccgccaucgaccagaucaacggcaagcucaaccgccucaucgagaagaccaacgagaaguuccaccagaucgagaaggaguucuccgaggucgagggccgcauccaggaccucgagaaguacgucgaggacaccaagaucgaccucugguccuacaacgccgagcuccucgucgcccucgagaaccagcacaccaucgaccucaccgacuccgagaugaacaagcucuucgagaagacccgcaagcagcuccgcgagaacgccgaggacaugggcaacggcugcuucaagaucuaccacaagugcgacaacgccugcaucggcuccauccgcaacggcaccuacgaccacgacgucuaccgcgacgaggcccucaacaaccgcuuccagaucaagggcgucgagcucaaguccggcuacaaggacuggauccucuggaucuccuucgccaucuccugcuuccuccucugcgucguccuccucggcuucaucaugugggccugccagaagggcaacauccgcugcaacaucugcaucuga

SEQ ID NO: 105143 - RNA, 1701 nt, Artificial Sequence
  derived and/or modified CDS sequence (opt2) from hemagglutinin__InfluenzaA__AFM72109
augaagaccaucaucgcccucuccuacaucuucugccucgucuucgcccagaagcuccccggcaacgacaacuccaccgccacccucugccucggccaccacgccguccccaacggcacccucgucaagaccaucaccaacgaccagaucgaggucaccaacgccaccgagcucguccaguccuccuccaccggccgcaucugcgacuccccccaccgcauccucgacggcaagaacugcacccucaucgacgcccuccucggcgacccccacugcgacggcuuccagaacgagaagugggaccucuucgucgagcgcuccaaggccuacuccaacugcuaccccuacgacguccccgacuacgccucccuccgcucccucgucgccuccuccggcacccucgaguucaucaacgaggacuucaacuggaccggcgucacccaguccggcggcuccuacgccugcaagcgcggcuccgucaacuccuucuucucccgccucaacuggcuccacaaguccgaguacaaguaccccgcccucaacgucaccaugcccaacaacggcaaguucgacaagcucuacaucuggggcguccaccaccccaucaccgaccgcgagcagaccaaccucuacguccgcgccuccggccgcgucaccgucuccaccaagcgcucccagcagaccgucauccccaacaucggcucccgccccuggguccgcggccucuccucccgcaucuccaucuacuggaccaucgucaagcccggcgacauccuccucaucaacuccaccggcaaccucaucgccccccgcggcuacuucaagauccgcaccggcaaguccuccaucaugcgcuccgacgcccccaucggcaccugcuccuccgagugcaucacccccaacggcuccauccccaacgacaagcccuuccagaacgucaacaagaucaccuacggcgccugcccccgcuacgucaagcagaacacccucaagcucgccaccggcaugcgcaacguccccgagaagcagacccgcggcaucuucggcgccaucgccggcuucaucgagaacggcugggagggcauggucgacggcugguacggcuuccgccaccagaacuccgagggcaccggccaggccgccgaccucaaguccacccaggccgccaucgaccagaucaacggcaagcucaaccgccucaucgagaagaccaacgagaaguuccaccagaucgagaaggaguucuccgaggucgagggccgcauccaggaccucgagaaguacgucgaggacaccaagaucgaccucugguccuacaacgccgagcuccucgucgcccucgagaaccagcacaccaucgaccucaccgacuccgagaugaacaagcucuucgagaagacccgccgccagcuccgcgagaacgccgaggacaugggcaacggcugcuucaagaucuaccacaagugcgacaacgccugcaucggcuccauccgcaacggcaccuacgaccacgacgucuaccgcgacgaggcccucaacaaccgcuuccagaucaagggcgucgagcucaaguccggcuacaaggacuggauccucuggaucuccuucgccaucuccugcuuccuccucugcgucguccuccucggcuucaucaugugggccugccagaagggcaacauccgcugcaacaucugcaucuga

SEQ ID NO: 105144 - RNA, 1701 nt, Artificial Sequence
  derived and/or modified CDS sequence (opt2) from hemagglutinin__InfluenzaA__AFM72120
augaagaccaucaucgcccucuccuacaucuucugccucgucuucgcccagaagcuccccggcaacgacaacuccaccgccacccucugccucggccaccacgccguccccaacggcacccucgucaagaccaucaccaacgaccagaucgaggucaccaacgccaccgagcucguccaguccuccuccaccggccgcaucugcgacuccccccaccgcauccucgacggcaagaacugcacccucaucgacgcccuccucggcgacccccacugcgacggcuuccagaacgagaagugggaccucuucgucgagcgcuccaaggccuacuccaacugcuaccccuacgacguccccgacuacgccucccuccgcucccucgucgccuccuccggcacccucgaguucaucaacgaggacuucaacuggaccggcgucacccaguccggcggcuccuacgccugcaagcgcggcuccgucaacuccuucuucucccgccucaacuggcuccacgaguccgaguacaaguaccccgcccucaacgucaccaugcccaacaacggcaaguucgacaagcucuacaucuggggcguccaccaccccaucaccgaccgcgagcagaccaaccucuacguccgcgccuccggccgcgucaccgucuccaccaagcgcucccagcagaccgucauccccaacaucggcuuccgccccuggguccgcggccucuccucccgcaucuccaucuacuggaccaucgucaagcccggcgacauccuccucaucaacuccaccggcaaccucaucgccccccgcggcuacuucaagauccgcaacggcaaguccuccaucaugcgcuccgacgcccccaucggcaccugcuccuccgagugcaucacccccaacggcuccauccccaacgacaagcccuuccagaacgucaacaagaucaccuacggcgccugcccccgcuacgucaagcagaacacccucaagcucgccaccggcaugcgcaacguccccgagaagcagacccgcggcaucuucggcgccaucgccggcuucaucgagaacggcugggagggcauggucgacggcugguacggcuuccgccaccagaacuccgagggcaccggccaggccgccgaccucaaguccacccaggccgccaucgaccagaucaacggcaagcucaaccgccucaucgagaagaccaacgagaaguuccaccagaucgagaaggaguucuccgaggucgagggccgcauccaggaccucgagaaguacgucgaggacaccaagaucgaccucugguccuacaacgccgagcuccucgucgcccucgagaaccagcacaccaucgaccucaccgacuccgagaugaacaagcucuucgagaagacccgcaagcagcuccgcgagaacgccgaggacaugggcaacggcugcuucaagaucuaccacaagugcgacaacgccugcaucggcuccauccgcaacggcaccuacgaccacgacgucuaccgcgacgaggcccucaacaaccgcuuccagaucaagggcgucgagcucaaguccggcuacaaggacuggauccucuggaucuccuucgccaucuccugcuuccuccucugcgucguccuccucggcuucaucaugugggccugccagaagggcaacauccgcugcaacaucugcaucuga

SEQ ID NO: 105145 - RNA, 1701 nt, Artificial Sequence
  derived and/or modified CDS sequence (opt2) from hemagglutinin__InfluenzaA__AFM72131
augaagaccaucaucgcccucuccuacauccucugccucgucuucgcccagaagcuccccggcaacgacaacuccaccgccacccucugccucggccaccacgccguccccaacggcacccucgucaagaccaucaccaacgaccagaucgaggucaccaacgccaccgagcucguccaguccuccuccaccggccgcaucugcgacuccccccaccgcauccucgacggcaaggacugcacccucaucgacgcccuccucggcgacccccacugcgacggcuuccagaacaaggagugggaccucuucgucgagcgcuccaaggccuacuccaacugcuaccccuacgacguccccgacuacgccucccuccgcucccucgucgccuccuccggcacccucgaguucaucaacgaggacuucaacuggaacggcgucgcccaguccggcgaguccuacgccugcaagcgcggcuccgucaaguccuucuucucccgccucaacuggcuccacgaguccgaguacaaguaccccgcccucaacgucaccaugcccaacaacggcaaguucgacaagcucuacaucuggggcguccaccaccccuccaccgaccgcgagcagaccaagcucuacguccgcgccuccggccgcgucaccgucuccaccaagcgcucccagcagaccgucauccccaacaucggcucccgccccuggguccgcggccucuccucccgcaucuccaucuacuggaccaucgucaagcccggcgacauccuccucaucaacuccaccggcaaccucaucgccccccgcggcuacuucaagauccgcaccggcaaguccuccaucaugcgcuccgacgcccccaucggcaccugcuccuccgagugcaucacccccaacggcuccauccccaacgacaagcccuuccagaacgucaaccgcaucaccuacggcgccugcccccgcuacgucaagcagaacacccucaagcucgccaccggcaugcgcaacguccccgagaagcagacccgcggcaucuucggcgccaucgccggcuucaucgagaacggcugggagggcauggucgacggcugguacggcuuccgccaccagaacuccgagggcaccggccaggccgccgaccucaaguccacccaggccgccaucgaccagaucaacggcaagcucaaccgccucaucgagaagaccaacgagaaguuccaccagaucgagaaggaguucuccgaggucgagggccgcauccaggaccucgagaaguacgucgaggacaccaagaucgaccucugguccuacaacgccgagcuccucgucgcccucgagaaccagcacaccaucgaccucaccgacuccgagaugaacaagcucuucgagaagacccgcaagcagcuccgcgagaacgccgaggacaugggcaacggcugcuucaagaucuaccacaagugcgacaacgccugcaucggcuccauccgcaacggcaccuacgaccacgacgucuaccgcgacgaggcccucaacaaccgcuuccagaucaagggcgucgagcucaaguccggcuacaaggacuggauccucuggaucuccuucgccaucuccugcuuccuccucugcgucguccuccucggcuucaucaugugggccugccagaagggcaacauccgcugcaacaucugcaucuga

SEQ ID NO: 105146 - RNA, 1701 nt, Artificial Sequence
  derived and/or modified CDS sequence (opt2) from hemagglutinin__InfluenzaA__AFM72142
augaagaccaucaucgcccucuccuacaucuccugccucgucuucgcccagaagcuccccggcaacgacaacuccaccgccacccucugccucggccaccacgccguccccaacggcacccucgucaagaccaucaccaacgaccagaucgaggucaccaacgccaccgagcucguccaguccuccuccaccggccgcaucugcgacuccccccaccgcauccucgacggcaagaacugcacccucaucgacgcccuccucggcgacccccacugcgacggcuuccagaacaaggagugggaccucuucgucgagcgcuccaaggccuacuccaacugcuaccccuacgacguccccgacuacgccucccuccgcucccucgucgccuccuccggcacccucgaguucaucaacgaggacuucaacuggaccggcgucgcccaggacggcggcuccuacgccugcaagcgcggcuccgucaacuccuucuucucccgccucaacuggcuccacaagcucgaguacaaguaccccgcccucaacgucaccaugcccaacaacggcaaguucgacaagcucuacaucuggggcguccaccaccccuccaccgaccgcgaccagaccucccucuacguccgcgccuccggccgcgucaccgucuccaccaagcgcucccagcagaccgucauccccaacaucggcucccgccccuggguccgcggccaguccucccgcaucuccaucuacuggaccaucgucaagcccggcgacauccuccucaucaacuccaccggcaaccucaucgccccccgcggcuacuucaagauccgcaacggcaaguccuccaucaugcgcuccgacgcccccaucggcaacugcuccuccgagugcaucacccccaacggcuccauccccaacgacaagcccuuccagaacgucaaccgcaucaccuacggcgccugcccccgcuacgucaagcagaacacccucaagcucgccaccggcaugcgcaacguccccgagaagcagacccgcggcaucuucggcgccaucgccggcuucaucgagaacggcugggagggcauggucgacggcugguacggcuuccgccaccagaacuccgagggcaccggccaggccgccgaccucaaguccacccaggccgccaucgaccagaucaacggcaagcucaaccgccucaucgagaagaccaacgagaaguuccaccagaucgagaaggaguucuccgaggucgagggccgcauccaggaccucgagaaguacgucgaggacaccaagaucgaccucugguccuacaacgccgagcuccucgucgcccucgagaaccagcacaccaucgaccucaccgacuccgagaugaacaagcucuucgagcgcacccgcaagcagcuccgcgagaacgccgaggacaugggcaacggcugcuucaagaucuaccacaagugcgacaacgccugcaucggcuccauccgcaacggcaccuacgaccacgacgucuaccgcgacgaggcccucaacaaccgcuuccagaucaagggcgucgagcucaaguccggcuacaaggacuggauccucuggaucuccuucgccaucuccugcuuccuccucugcgucguccuccucggcuucaucaugugggccugccagaagggcaacauccgcugcaacaucugcaucuga

SEQ ID NO: 105147 - RNA, 1701 nt, Artificial Sequence
  derived and/or modified CDS sequence (opt2) from hemagglutinin__InfluenzaA__AFM72153
augaagaccaucaucgcccucuccuacauccucugccucgucuucgcccagaagcuccccggcaacgacaacuccaccgccacccucugccucggccaccacgccguccccaacggcacccucgucaagaccaucaccaacgaccagaucgaggucaccaacgccaccgagcucguccaguccuccuccaccggccgcaucugcggcuccccccaccgcauccucgacggcaagaacugcacccucaucgacgcccuccucggcgacccccacugcgacggcuuccagaacaaggagugggaccucuucgucgagcgcuccaaggccuacuccaacugcuaccccuacgacguccccgacuacgccucccuccgcucccucgucgccuccuccggcacccucgaguucaucaacgaggacuucaacuggaccggcgucgcccaggacggcggcuccuacgccugcaagcgcggcuccgucaacuccuucuucucccgccucaacuggcuccacaagcucgaguacaaguaccccgcccucaacgucaccaugcccaacaacggcaaguucgacaagcucuacaucuggggcguccaccaccccuccaccgacuccgaccagaccucccucuacguccgcgccuccggccgcgucaccgucuccaccaagcgcucccagcagaccgucacccccaacaucggcucccgccccuggguccgcggccaguccucccgcaucggcaucuacuggaccaucgucaagcccggcgacauccuccucaucaacuccaccggcaaccucaucgccccccgcggcuacuucaagauccgcaacggcaaguccuccaucaugcgcuccgacgcccccaucggcaacugcuccuccgagugcaucacccccaacggcuccauccccaacgacaagcccuuccagaacgucaaccgcaucaccuacggcgccugcccccgcuacgucaagcagaacacccucaagcucgccaccggcaugcgcaacguccccgagaagcagacccgcggcaucuucggcgccaucgccggcuucaucgagaacggcugggagggcauggucgacggcugguacggcuuccgccaccagaacuccgagggcaccggccaggccgccgaccucaaguccacccaggccgccaucgaccagaucaacggcaagcucaaccgccucaucgagaagaccaacgagaaguuccaccagaucgagaaggaguucuccgaggucgagggccgcauccaggaccucgagaaguacgucgaggacaccaagaucgaccucugguccuacaacgccgagcuccucgucgcccucgagaaccagcacaccaucgaccucaccgacuccgagaugaacaagcucuucgagaagacccgcaagcagcuccgcgagaacgccgaggacaugggcaacggcugcuucaagaucuaccacaagugcgacaacgccugcaucggcuccauccgcaacggcaccuacgaccacgacgucuaccgcgacgaggcccucaacaaccgcuuccagaucaagggcgucgagcucaaguccggcuacaaggacuggauccucuggaucuccuucgccaucuccugcuuccuccucugcgucguccuccucggcuucaucaugugggccugccagaagggcaacauccgcugcaacaucugcaucuga

SEQ ID NO: 105148 - RNA, 1701 nt, Artificial Sequence
  derived and/or modified CDS sequence (opt2) from hemagglutinin__InfluenzaA__AFM72164
augaagaccaucaucgcccucuccuacauccucugccucgucuucgcccagaagcuccccggcaacgacaacuccaccgccacccucugccucggccaccacgccguccccaacggcacccucgucaagaccaucaccaacgaccagaucgaggucaccaacgccaccgagcucguccaguccucccccaccggccgcaucugcgacuccccccaccgcauccucgacggcaagaacugcacccucaucgacgcccuccucggcgacccccacugcgacggcuuccagaacaaggagugggaccucuucgucgagcgcuccaaggccuacuccaacugcuaccccuacgacguccccgacuacgccucccuccgcucccucgucgccuccuccggcacccucgaguucaucaacgagaacuucaacuggaccggcgucgcccaggacggcaaguccuacgccugcaagcgcggcuccgucaacuccuucuucucccgccucaacuggcuccacaagcucgaguacaaguaccccgcccucaacgucaccaugcccaacaacggcaaguucgacaagcucuacaucuggggcguccaccaccccuccaccgacuccgaccagaccucccucuacguccgcgccuccggccgcgucaccgucuccaccaagcgcucccagcagaccgucauccccgacaucggcuaccgccccuggguccgcggccaguccucccgcaucuccauccacuggaccaucgucaagcccggcgacauccuccucaucaacuccaccggcaaccucaucgccccccgcggcuacuucaagauccgcaacggcaaguccuccaucaugcgcuccgacgcccccaucggcaacugcuccuccgagugcaucacccccaacggcuccauccccaacgacaagcccuuccagaacgucaaccgcaucaccuacggcgccugcccccgcuacgucaagcagaacacccucaagcucgccaccggcaugcgcaacguccccgagaagcagacccgcggcaucuucggcgccaucgccggcuucaucgagaacggcugggagggcauggucgacggcugguacggcuuccgccaccagaacuccgagggcaccggccaggccgccgaccucaaguccacccaggccgccaucgaccagaucaacggcaagcucaaccgccucgucgagaagaccaacgagaaguuccaccagaucgagaaggaguucuccgaggucgagggccgcauccaggaccucgagaaguacgucgaggacaccaagaucgaccucugguccuacaacgccgagcuccucgucgcccucgagaaccagcacaccaucgaccucaccgacuccgagaugaacaagcucuucgagcgcacccgcaagcagcuccgcgagaacgccgaggacaugggcaacggcugcuucaagaucuaccacaagugcgacaacgccugcaucggcuccauccgcaacggcaccuacgaccacgacgucuaccgcgacgaggcccucaacaaccgcuuccagaucaagggcgucgagcucaaguccggcuacaaggacuggauccucuggaucuccuucgccaucuccugcuuccuccucugcgucguccuccucggcuucaucaugugggccugccagaagggcaacauccgcugcaacaucugcaucuga

SEQ ID NO: 105149 - RNA, 1701 nt, Artificial Sequence
  derived and/or modified CDS sequence (opt2) from hemagglutinin__InfluenzaA__AFM72175
augaagaccaucaucgcccucuccuacauccucugccucgucuucgcccagaagcuccccggcaacgacaacuccaccgccacccucugccucggccaccacgccguccccaacggcacccucgucaagaccaucaccaacgaccagaucgaggucaccaacgccaccgagcucguccaguccucccccaccggccgcaucugcgacuccccccaccgcauccucgacggcaagaacugcacccucaucgacgcccuccucggcgacccccacugcgacggcuuccagaacaaggagugggaccucuucgucgagcgcuccaaggccuacuccaacugcuaccccuacgacguccccgacuacgccucccuccgcucccucgucgccuccuccggcacccucgaguucaucaacgagaacuucaacuggaccggcgucgcccaggacggcaaguccuacgccugcaagcgcggcuccgucaacuccuucuucucccgccucaacuggcuccacaagcucgaguacaaguaccccgcccucaacgucaccaugcccaacaacggcaaguucgacaagcucuacaucuggggcguccaccaccccuccaccgacuccgaccagaccaaccucuacguccgcgccuccggccgcgucaccgucuccaccaagcgcucccagcagaccgucauccccgacaucggcuaccgccccuggguccgcggccaguccucccgcaucuccauccacuggaccaucgucaagcccggcgacauccuccucaucaacuccaccggcaaccucaucgccccccgcggcuacuucaagauccgcaacggcaaguccuccaucaugcgcuccgacgcccccaucggcaacugcuccuccgagugcaucacccccaacggcuccauccccaacgacaagcccuuccagaacgucaaccgcaucaccuacggcgccugcccccgcuacgucaagcagaacacccucaagcucgccaccggcaugcgcaacguccccgagaagcagacccgcggcaucuucggcgccaucgccggcuucaucgagaacggcugggagggcauggucgacggcugguacggcuuccgccaccagaacuccgagggcaccggccaggccgccgaccucaaguccacccaggccgccaucgaccagaucaacggcaagcucaaccgccucgucgagaagaccaacgagaaguuccaccagaucgagaaggaguucuccgaggucgagggccgcauccaggaccucgagaaguacgucgaggacaccaagaucgaccucugguccuacaacgccgagcuccucgucgcccucgagaaccagcacaccaucgaccucaccgacuccgagaugaacaagcucuucgagcgcacccgcaagcagcuccgcgagaacgccgaggacaugggcaacggcugcuucaagaucuaccacaagugcgacaacgccugcaucggcuccauccgcaacggcaccuacgaccacgacgucuaccgcgacgaggcccucaacaaccgcuuccagaucaagggcgucgagcucaaguccggcuacaaggacuggauccucuggaucuccuucgccaucuccugcuuccuccucugcgucguccuccucggcuucaucaugugggccugccagaagggcaacauccgcugcaacaucugcaucuga

SEQ ID NO: 105150 - RNA, 1701 nt, Artificial Sequence
  derived and/or modified CDS sequence (opt2) from hemagglutinin__InfluenzaA__AFM72197
augaagaccaucaucgcccucuccuacauccucugcauggucuucgcccagaagcuccccggcaacgacaacuccaccgccacccucugccucggccaccacgccguccccaacggcacccucgucaagaccaucaccaacgaccagaucgaggucaccaacgccaccgagcucguccaguccuccuccaccggccgcaucugcgacuccccccaccgcauccucgacggcaagaacugcacccucaucgacgcccuccucggcgacccccacugcgacggcuuccagaacaaggagugggaccucuucgucgagcgcuccaaggccuacuccaacugcuaccccuacgacguccccgacuacgccucccuccgcucccucgucgccuccuccggcacccucgaguucaacaacgaguccuucaacuggaccggcgucgcccagaacggcaccuccuacgccugcaagcgccgcuccgucaaguccuucuucucccgccucaacuggcuccacaagcucgaguacaaguaccccgcccucaacgucaccaugcccaacaacgacaaguucgacaagcucuacaucuggggcguccaccaccccaucaccgacuccgagcagaccucccucuacguccaggccuccggccgcgucaccgucuccaccaagcgcucccagcagaccgucauccccaacaucggcuaccgccccuggguccgcggcgucuccucccgcaucuccaucuacuggaccaucgucaagcccggcgacauccuccucaucaacuccaccggcaaccucaucgccccccgcggcuacuucaagauccgcuccggcaaguccuccaucaugcgcuccgacgcccccaucggcaacugcaacuccgagugcaucacccccaacggcuccauccccaacgacaagcccuuccagaacgucaaccgcaucaccuacggcgccugcccccgcuacgucaagcagaacacccucaagcucgccaccggcaugcgcaacguccccgagaagcagacccgcggcaucuucggcgccaucgccggcuucaucgagaacggcugggagggcauggucgacggcugguacggcuuccgccaccagaacuccgagggcaccggccaggccgccgaccucaaguccacccaggccgccaucaaccagaucaacggcaagcucaaccgccucaucgagaagaccaacgagaaguuccaccagaucgagaaggaguucuccgaggucgagggccgcauccaggaccucgagaaguacgucgaggacaccaagaucgaccucugguccuacaacgccgagcuccucgucgcccucgagaaccagcacaccaucgaccucaccgacuccgagaugaacaagcucuucgagcgcacccgcaagcagcuccgcgagaacgccgaggacaugggcaacggcugcuucaagaucuaccacaagugcgacaacgccugcaucggcuccauccgcaacggcaccuacgaccacgacgucuaccgcgacgaggcccucaacaaccgcuuccagaucaagggcgucgagcucaaguccggcuacaaggacuggauccucuggaucuccuucgccaucuccugcuuccuccucugcgucguccuccucggcuucaucaugugggccugccagaagggcaacaucaagugcaacaucugcaucuga

SEQ ID NO: 105151 - RNA, 1701 nt, Artificial Sequence
  derived and/or modified CDS sequence (opt2) from hemagglutinin__InfluenzaA__AFM72208
augaagaccaucaucgcccucuccuacauccucugccucgucuucgcccagaagcuccccggcaacgacaacuccaccgccacccucugccucggccaccacgccguccccaacggcacccucgucaagaccaucaccaacgaccagaucgaggucaccaacgccaccgagcucguccaguccuccuccaccggccgcaucugcgacuccccccaccagauccucgacggcgagaacugcacccucaucgacgcccuccucggcgacccccacugcgacggcuuccagaacaaggagugggaccucuucgucgagcgcuccaaggccuacuccaacugcuaccccuacgacguccccgacuacgccucccuccgcucccucgucgccuccuccggcacccucgaguucaacaacgaguccuucaacuggaccggcgucgcccagaacggcaccuccuccgccugcaagcgccgcuccaucaacuccuucuucucccgccucaacuggcuccaccagcucaaguaccgcuaccccgcccucaacgucaccaugcccaacaacgacaaguucgacaagcucuacaucuggggcguccaccaccccuccaccgacuccgaccagaccucccucuacacccaggccuccggccgcgucaccgucuccaccaagcgcucccagcagaccgucauccccaacaucggcucccgccccuggguccgcggcaucuccucccgcaucuccaucuacuggaccaucgucaagcccggcgacauccuccucaucaacuccaccggcaaccucaucgccccccgcggcuacuucaagauccgcuccggcaaguccuccaucaugcgcuccgacgcccccaucggcaagugcaacuccgagugcaucacccccaacggcuccauccccaacgacaagcccuuccagaacgucaaccgcaucaccuacggcgccugcccccgcuacgucaagcagaacacccucaagcucgccaccggcaugcgcaacguccccgagaagcagacccgcggcaucuucggcgccaucgccggcuucaucgagaacggcugggagggcaugauggacggcugguacggcuuccgccaccagaacuccgagggcaccggccaggccgccgaccucaaguccacccaggccgccaucaaccagaucaacggcaagcucaaccgccucaucgagaagaccaacgagaaguuccaccagaucgagaaggaguucuccgaggucgagggccgcauccaggaccucgagaaguacgucgaggacaccaagaucgaccucugguccuacaacgccgagcuccucgucgcccucgagaaccagcacaccaucgaccucaccgacuccgagaugaacaagcucuucgagcgcacccgcaagcagcuccgcgagaacgccgaggacaugggcaacggcugcuucaagaucuaccacaagugcgacaacgccugcaucggcuccauccgcaacggcaccuacgaccacgacgucuaccgcgacgaggcccucaacaaccgcuuccagaucaagggcgucgagcucaaguccggcuacaaggacuggauccucuggaucuccuucgccaucuccugcuuccuccucugcgucguccuccucggcuucaucaugugggccugccagaagggcaacauccgcugcaacaucugcaucuga

SEQ ID NO: 105152 - RNA, 1701 nt, Artificial Sequence
  derived and/or modified CDS sequence (opt2) from hemagglutinin__InfluenzaA__AFM72219
augaagaccaucaucgcccucuccuacauccucugccucgucuucgcccagaagcuccccggcaacgacaacuccaccgccacccucugccucggccaccacgccguccccaacggcacccucgucaagaccaucaccaacgaccagaucgaggucaccaacgccaccgagcucguccaguccuccuccaccggccgcaucugcgacuccccccaccagauccucgacggcgagaacugcacccucaucgacgcccuccucggcgacccccacugcgacggcuuccagaacaaggagugggaccucuucgucgagcgcuccaaggccuacuccaacugcuaccccuacgacguccccgacuacgccucccuccgcucccucgucgccuccuccggcacccucgaguucaacaacgaguccuucaacuggaccggcgucgcccagaacggcaccuccuccgccugcaagcgccgcuccaucaacuccuucuucucccgccucaacuggcuccaccagcucaaguaccgcuaccccgcccucaacgucaccaugcccaacaacgacaaguucgacaagcucuacaucuggggcguccaccaccccuccaccgacuccgaccagaccucccucuacacccaggccuccggccgcgucaccgucuccaccaagcgcucccagcagaccgucauccccaacaucggcucccgccccuggguccgcggcaucuccucccgcaucuccaucuacuggaccaucgucaagcccggcgacauccuccucaucaaguccaccggcaaccucaucgccccccgcggcuacuucaagauccgcuccggcaaguccuccaucaugcgcuccgacgcccccaucggcaagugcaacuccgagugcaucacccccaacggcuccauccccaacgacaagcccuuccagaacgucaaccgcaucaccuacggcgccugcccccgcuacgucaagcagaacacccucaagcucgccaccggcaugcgcaacguccccgagaagcagacccgcggcaucuucggcgccaucgccggcuucaucgagaacggcugggagggcaugauggacggcugguacggcuuccgccaccagaacuccgagggcaccggccaggccgccgaccucaaguccacccaggccgccaucaaccagaucaacggcaagcucaaccgccucaucgagaagaccaacgagaaguuccaccagaucgagaaggaguucuccgaggucgagggccgcauccaggaccucgagaaguacgucgaggacaccaagaucgaccucugguccuacaacgccgagcuccucgucgcccucgagaaccagcacaccaucgaccucaccgacuccgagaugaacaagcucuucgagcgcacccgcaagcagcuccgcgagaacgccgaggacaugggcaacggcugcuucaagaucuaccacaagugcgacaacgccugcaucggcuccauccgcaacggcaccuacgaccacgacgucuaccgcgacgaggcccucaacaaccgcuuccagaucaagggcgucgagcucaaguccggcuacaaggacuggauccucuggaucuccuucgccaucuccugcuuccuccucugcgucguccuccucggcuucaucaugugggccugccagaagggcaacauccgcugcaacaucugcaucuga

SEQ ID NO: 105153 - RNA, 1698 nt, Artificial Sequence
  derived and/or modified CDS sequence (opt2) from hemagglutinin__InfluenzaA__AFM72230
augaaggccaagcuccucguccuccucugcaccuucaccgccaccuacgccgacaccaucugcaucggcuaccacgccaacaacuccaccgacaccgucgacaccguccucgagaagaacgucaccgucacccacuccgucaaccuccucgaggacucccacaacggcaagcucugccuccucaagggcaucgccccccuccagcucggcaacugcuccgucgccggcuggauccucggcaaccccgagugcgagcuccucaucuccaagaaguccugguccuacaucgucgagacccccaaccccgagaacggcaccugcuaccccggcuacuucgccgacuacgaggagcuccgcgagcagcucuccuccgucuccuccuucgagcgcuucgagaucuuccccaaggaguccuccuggcccaaccacaccgucaccggcgucuccgccuccugcucccacaacggcaaguccuccuucuaccgcaaccuccucuggcucaccggcaagaacggccucuaccccaaccucuccaaguccuacgucaacaacaaggagaaggagguccucguccucuggggcguccaccacccccccaacaucggcaaccagcgcgcccucuaccacaccgagaacgccuacgucuccgucgucuccucccacuacucccgccgcuucacccccgagaucgccaagcgccccaagguccgcgaccaggagggccgcaucaacuacuacuggacccuccucgagcccggcgacaccaucaucuucgaggccaacggcaaccucaucgcccccugguacgccuucgcccucucccgcggcuucggcuccggcaucaucaccuccaacgcccccauggacgagugcgacgccaagugccagaccccccagggcgccaucaacuccucccuccccuuccagaacguccaccccgucaccaucggcgagugccccaaguacguccgcuccgccaagcuccgcauggucaccggccuccgcaacauccccuccauccagucccgcggccucuucggcgccaucgccggcuucaucgagggcggcuggaccggcauggucgacggcugguacggcuaccaccaccagaacgagcagggcuccggcuacgccgccgaccagaaguccacccagaacgccaucaacggcaucaccaacaaggucaacuccgucaucgagaagaugaacacccaguucaccgccgucggcaaggaguucaacaagcucgagcgccgcauggagaaccucaacaagaaggucgacgacggcuuccucgacaucuggaccuacaacgccgagcuccucguccuccucgagaacgagcgcacccucgacuuccacgacuccaacgucaagaaccucuacgagaaggucaagucccagcucaagaacaacgccaaggagaucggcaacggcugcuucgaguucuaccacaagugcaacaacgagugcauggaguccgucaagaacggcaccuacgacuaccccaaguacuccgaggaguccaagcucaaccgcgagaagaucgacggcgucaagcucgaguccaugggcgucuaccagauccucgccaucuacuccaccgucgccuccucccucguccuccucgucucccucggcgccaucuccuucuggaugugcuccaacggcucccuccagugccgcaucugcaucuga

SEQ ID NO: 105154 - RNA, 1701 nt, Artificial Sequence
  derived and/or modified CDS sequence (opt2) from hemagglutinin__InfluenzaA__AFM72246
augaagaccaucaucgcccucuccuacauccucugccucgucuucgcccagaagcuccccggcaacgacaacuccaccgccacccucugccucggccaccacgccgucuccaacggcacccucgucaagaccaucaccaacgaccagaucgaggucaccaacgccaccgagcucguccaguccuccuccaccggccgcaucugcgacuccccccaccagauccucgacggcgagaacugcacccucaucgacgcccuccucggcgacccccacugcgacggcuuccagaacaaggagugggaccucuucgucgagcgcuccaaggccuacuccaacugcuaccccuacgacguccccgacuacgccucccuccgcucccucgucgccuccuccggcacccucgaguucaacaacgaguccuucaacuggaccggcgucgcccagaacggcaccuccuccgccugcaagcgccgcuccaacaaguccuucuucucccgccucaacuggcuccaccagcucaaguacaaguaccccgcccucaacgucaccaugcccaacaacgagaaguucgacaagcucuacaucuggggcguccaccaccccuccaccgacuccgaccagaucuccaucuacgcccaggccuccggccgcgucaccgucuccaccaagcgcucccagcagaccgucauccccaacaucggcuccucccccuggguccgcggcgucuccucccgcaucuccaucuacuggaccaucgucaagcccggcgacauccuccucaucaacuccaccggcaaccucaucgccccccgcggcuacuucaagauccgcuccggcaaguccuccaucaugcgcuccgacgcccccaucggcaagugcaacuccgagugcaucacccccaacggcuccauccccaacgacaagcccuuccagaacgucaaccgcaucaccuacggcgccugcccccgcuacgucaagcagaacacccucaagcucgccaccggcaugcgcaacguccccgagaagcagacccgcggcaucuucggcgccaucgccggcuucaucgagaacggcugggagggcauggucgacggcugguacggcuuccgccaccagaacuccgagggcaccggccaggccgccgaccucaaguccacccaggccgccaucaaccagaucaacggcaagcucaaccgccucaucgagaagaccaacgagaaguuccaccagaucgagaaggaguucuccgaggucgagggccgcauccaggaccucgagaaguacgucgaggacaccaagaucgaccucugguccuacaacgccgagcuccucgucgcccucgagaaccagcacaccaucgaccucaccgacuccgagaugaacaagcucuucgagcgcaccaagaagcagcuccgcgagaacgccgaggacaugggcaacggcugcuucaagaucuaccacaagugcgacaacgccugcaucggcuccauccgcaacggcaccuacgaccacgacgucuaccgcgacgaggcccucaacaaccgcuuccagaucaagggcgucgagcucaaguccggcuacaaggacuggauccucuggaucuccuucgccaucuccugcuuccuccucugcgucguccuccucggcuucaucaugugggccugccagaagggcaacauccgcugcaacaucugcaucuga

SEQ ID NO: 105155 - RNA, 1701 nt, Artificial Sequence
  derived and/or modified CDS sequence (opt2) from hemagglutinin__InfluenzaA__AFM72257
augaagaccaucaucgcccucuccuacauccucugccucgucuucgcccagaagcuccccgucaacgacaacuccaccgccacccucugccucggccaccacgccguccccaacggcacccucgucaagaccaucaccaacgaccacaucgaggucaccaacgccaccgagcucguccaguccuccuccaccggccgcaucugcgacuccccccaccagauccucgacggcgagaacugcacccucaucgacgcccuccucggcgacccccacugcgacggcuuccagaacaaggagugggaccucuucgucgagcgcuccaccgccuacuccaacugcuaccccuacgacguccccgacuacgccucccuccgcucccucgucgccuccuccggcacccucgaguucaacaacgaguccuucaacuggaccggcgucgcccagaacggcaccuccuccgccugcaagcgccgcuccaucaaguccuucuucucccgccucaacuggcuccaccagcucaacuacaaguaccccgcccucaacgucaccaugcccaacaacgagaaguucgacaagcucuacaucuggggcguccaccaccccuccaccgacuccgaccagaucuccaucuacgcccaggccuccggccgcgucaccgucuccaccaagcgcucccagcagaccgucauccccaacaucggcucccgccccuggguccgcggcgucuccuccggcaucuccaucuacuggaccaucgucaagcccggcgacauccuccucaucaacuccaccggcaaccucaucgccccccgcggcuacuucaagauccgcuccggcaaguccuccaucaugcgcuccaacgcccccaucggcaagugcaacuccgagugcaucacccccaacggcuccauccccaacgacaagcccuuccagaacgucaaccgcaucaccuacggcgccugcccccgcuacgucaagcagaacacccucaagcucgccaccggcaugcgcaacguccccgagaagcagacccgcggcaucuucggcgccaucgccggcuucaucgagaacggcugggagggcauggucgacggcugguacggcuuccgccaccagaacuccgagggcaccggccaggccgccgaccucaaguccacccaggccgccaucaaccagaucaacggcaagcucaaccgccucaucgagaagaccaacgagaaguuccaccagaucgagaaggaguucuccgaggucgagggccgcauccaggaccucgagaaguacgucgaggacaccaagaucgaccucugguccuacaacgccgagcuccucgucgcccucgagaaccagcacaccaucgaccucaccgacuccgagaugaacaagcucuucgagcgcacccgcaagcagcuccgcgagaacgccgaggacaugggcaacggcugcuucaagaucuaccacaagugcgacaacgccugcaucggcuccauccgcaacggcaccuacgaccacgacgucuaccgcgacgaggcccucaacaaccgcuuccagaucaagggcgucgagcucaaguccggcuacaaggacuggauccucuggaucuccuucgccaucuccugcuuccuccucugcgucguccuccucggcuucaucaugugggccugccagaagggcaacauccgcugcaacaucugcaucuga

SEQ ID NO: 105156 - RNA, 1701 nt, Artificial Sequence
  derived and/or modified CDS sequence (opt2) from hemagglutinin__InfluenzaA__AFM72268
augaagaccaucaucgcccucuccuacauccucugccucgucuucgcccagaagcuccccgucaacgacaacuccaccgccacccucugccucggccaccacgccguccccaacggcacccucgucaagaccaucaccaacgaccacaucgaggucaccaacgccaccgagcucguccaguccuccuccaccggccgcaucugcgacuccccccaccagauccucgacggcgagaacugcacccucaucgacgcccuccucggcgacccccacugcgacggcuuccagaacaaggagugggaccucuucgucgagcgcuccaccgccuacuccaacugcuaccccuacgacguccccgacuacgccucccuccgcucccucgucgccuccuccggcacccucgaguucaacaacgaguccuucaacuggaccggcgucgcccagaacggcaccuccuccgccugcaagcgccgcuccaucaaguccuucuucucccgccucaacuggcuccaccagcucaacuacaaguaccccgcccucaacgucaccaugcccaacaacgagaaguucgacaagcucuacaucuggggcguccaccaccccaacaccgacuccgaccagaucuccaucuacgcccaggccuccggccgcgucaccgucuccaccaagcgcucccagcagaccgucauccccaacaucggcucccgccccuggguccgcggcgucuccuccggcaucuccaucuacuggaccaucgucaagcccggcgacauccuccucaucaacuccaccggcaaccucaucgccccccgcggcuacuucaagauccgcuccggcaaguccuccaucaugcgcuccaacgcccccaucggcaagugcaacuccgagugcaucacccccaacggcuccauccccaacgacaagcccuuccagaacgucaaccgcaucaccuacggcgccugcccccgcuacgucaagcagaacacccucaagcucgccaccggcaugcgcaacguccccgagaagcagacccgcggcaucuucggcgccaucgccggcuucaucgagaacggcugggagggcauggucgacggcugguacggcuuccgccaccagaacuccgagggcaccggccaggccgccgaccucaaguccacccaggccgccaucaaccagaucaacggcaagcucaaccgccucaucgagaagaccaacgagaaguuccaccagaucgagaaggaguucuccgaggucgagggccgcauccaggaccucgagaaguacgucgaggacaccaagaucgaccucugguccuacaacgccgagcuccucgucgcccucgagaaccagcacaccaucgaccucaccgacuccgagaugaacaagcucuucgagcgcacccgcaagcagcuccgcgagaacgccgaggacaugggcaacggcugcuucaagaucuaccacaagugcgacaacgccugcaucggcuccauccgcaacggcaccuacgaccacgacgucuaccgcgacgaggcccucaacaaccgcuuccagaucaagggcgucgagcucaaguccggcuacaaggacuggauccucuggaucuccuucgccaucuccugcuuccuccucugcgucguccuccucggcuucaucaugugggccugccagaagggcaacauccgcugcaacaucugcaucuga

SEQ ID NO: 105157 - RNA, 1701 nt, Artificial Sequence
  derived and/or modified CDS sequence (opt2) from hemagglutinin__InfluenzaA__AFM72279
augaagaccaucaucgcccucuccuacauccucugccucgucuucgcccagaagcuccccgucaacgacaacuccaccgccacccucugccucggccaccacgccguccccaacggcacccucgucaagaccaucaccaacgaccacaucgaggucaccaacgccaccgagcucguccaguccuccuccaccggccgcaucugcgacuccccccaccagauccucgacggcgagaacugcacccucaucgacgcccuccucggcgacccccacugcgacggcuuccagaacaaggagugggaccucuucgucgagcgcuccaccgccuacuccaacugcuaccccuacgacguccccgacuacgccucccuccgcucccucgucgccuccuccggcacccucgaguucaacaacgaguccuucaacuggaccggcgucgcccagaacggcaccuccuccgccugcaagcgccgcuccaucaaguccuucuucucccgccucaacuggcuccaccagcucaaguacaaguaccccgcccucaacgucaccaugcccaacaacgagaaguucgacaagcucuacaucuggggcguccaccaccccuccaccgacuccgaccagaucuccaucuacgcccaggccuccggccgcgucaccgucuccaccaagcgcucccagcagaccgucauccccaacaucggcuccaagcacuggguccgcggcgucuccucccgcaucuccaucuacuggaccaucgucaagcccggcgacauccuccucaucaacuccaccggcaaccucaucgccccccgcggcuacuucaagauccgcuccggcaaguccuccaucaugcgcuccaacgcccccaucggcaagugcaacuccgagugcaucacccccaacggcuccauccccaacgacaagcccuuccagaacgucaaccgcaucaccuacggcgccugcccccgcuacgucaagcagaacacccucaagcucgccaccggcaugcgcaacguccccgagaagcagacccgcggcaucuucggcgccaucgccggcuucaucgagaacggcugggagggcauggucgacggcugguacggcuuccgccaccagaacuccgagggcaccggccaggccgccgaccucaaguccacccaggccgccaucaaccagaucaacggcaagcucaaccgccucaucgagaagaccaacgagaaguuccaccagaucgagaaggaguucuccgaggucgagggccgcauccaggaccucgagaaguacgucgaggacaccaagaucgaccucugguccuacaacgccgagcuccucgucgcccucgagaaccagcacaccaucgaccucaccgacuccgagaugaacaagcucuucgagcgcacccgcaagcagcuccgcgagaacgccgaggacaugggcaacggcugcuucaagaucuaccacaagugcgacaacgccugcaucggcuccauccgcaacggcaccuacgaccacgacgucuaccgcgacgaggcccucaacaaccgcuuccagaucaagggcgucgagcucaaguccggcuacaaggacuggauccucuggaucuccuucgccaucuccugcuuccuccucugcgucguccuccucggcuucaucaugugggccugccagaagggcaacauccgcugcaacaucugcaucuga

SEQ ID NO: 105158 - RNA, 1701 nt, Artificial Sequence
  derived and/or modified CDS sequence (opt2) from hemagglutinin__InfluenzaA__AFM72290
augaagaccaucaucgcccucuccuacauccucugccucgucuucgcccagaagcuccccgucaacgacaacuccaccgccacccucugccucggccaccacgccguccccaacggcacccucgucaagaccaucaccaacgaccacaucgaggucaccaacgccaccgagcucguccaguccuccuccaccggccgcaucugcgacuccccccaccagauccucgacggcgagaacugcacccucaucgacgcccuccucggcgacccccacugcgacggcuuccagaacaaggagugggaccucuucgucgagcgcuccaccgccuacuccaacugcuaccccuacgacguccccgacuacgccucccuccgcucccucgucgccuccuccggcacccucgaguucaacaacgaguccuucaacuggaccggcgucgcccagaacggcaccuccuccgccugcaagcgccgcuccaucaaguccuucuucucccgccucaacuggcuccaccagcucaaggacaaguaccccgcccucaacgucaccaugcccaacaacgagaaguucgacaagcucuacaucuggggcguccaccaccccuccaccgacuccgaccagaucuccaucuacgcccaggccuccggccgcgucaccgucuccaccaagcgcucccagcagaccgucauccccaacaucggcuccaagcacuggguccgcggcgucuccucccgcaucuccaucuacuggaccaucgucaagcccggcgacauccuccucaucaacuccaccggcaaccucaucgccccccgcggcuacuucaagauccgcuccggcaaguccuccaucaugcgcuccaacgcccccaucggcaagugcaacuccgagugcaucacccccaacggcuccauccccaacgacaagcccuuccagaacgucaaccgcaucaccuacggcgccugcccccgcuacgucaagcagaacacccucaagcucgccaccggcaugcgcaacguccccgagaagcagacccgcggcaucuucggcgccaucgccggcuucaucgagaacggcugggagggcauggucgacggcugguacggcuuccgccaccagaacuccgagggcaccggccaggccgccgaccucaaguccacccaggccgccaucaaccagaucaacggcaagcucaaccgccucaucgagaagaccaacgagaaguuccaccagaucgagaaggaguucuccgaggucgagggccgcauccaggaccucgagaaguacgucgaggacaccaagaucgaccucugguccuacaacgccgagcuccucgucgcccucgagaaccagcacaccaucgaccucaccgacuccgagaugaacaagcucuucgagcgcacccgcaagcagcuccgcgagaacgccgaggacaugggcaacggcugcuucaagaucuaccacaagugcgacaacgccugcaucggcuccauccgcaacggcaccuacgaccacgacgucuaccgcgacgaggcccucaacaaccgcuuccagaucaagggcgucgagcucaaguccggcuacaaggacuggauccucuggaucuccuucgccaucuccugcuuccuccucugcgucguccuccucggcuucaucaugugggccugccagaagggcaacauccgcugcaacaucugcaucuga

SEQ ID NO: 105159 - RNA, 1701 nt, Artificial Sequence
  derived and/or modified CDS sequence (opt2) from hemagglutinin__InfluenzaA__AFM72301
augaagaccaucaucgcccucuccuacauccucugccucgucuucucccagaagcuccccggcaacgacaacuccaccgccacccucugccucggccaccacgccguccccaacggcaccaucgucaagaccaucaccaacgaccagaucgaggucaccaacgccaccgagcucguccaguccuccuccaccggcggcaucugcgacuccccccaccagauccucgacggcgagaacugcacccucaucgacgcccuccucggcgacccccagugcgacggcuuccagaacaagaagugggaccucuucgucgagcgcuccaaggccuacuccaacugcuaccccuacgacguccccgacuacgccucccuccgcucccucgucgccuccuccggcacccucgaguucaacaacgaguccuucaacugggccggcgucacccagaacggcaccuccuccgccugcaagcgccgcuccaacaaguccuucuucucccgccucaacuggcucacccagcucaaguacaaguaccccgcccucaacgucaccaugcccaacaacgagaaguucgacaagcucuacaucuggggcguccaccaccccgucaccgacuccgaccagaucucccucuacgcccaggccuccggccgcaucaccgucuccaccaagcgcucccagcagaccgucauccccaacaucggcuaccgcccccgcguccgcgacaucuccucccgcaucuccaucuacuggaccaucgucaagcccggcgacauccuccucaucaacuccaccggcaaccucaucgccccccgcggcuacuucaagauccgcuccggcaaguccuccaucaugcgcuccgacgcccccaucggcaagugcaacuccgagugcaucacccccaacggcuccauccccaacgacaagcccuuccagaacgucaaccgcaucaccuacggcgccugcccccgcuacgucaagcagaacacccucaagcucgccaccggcaugcgcaacguccccgagaagcagacccgcggcaucuucggcgccaucgccggcuucaucgagaacggcugggagggcauggucgacggcugguacggcuuccgccaccagaacuccgagggcaccggccaggccgccgaccucaaguccacccaggccgccaucaaccagaucaacggcaagcucaaccgccucaucggcaagaccaacgagaaguuccaccagaucgagaaggaguucuccgaggucgagggccgcauccaggaccucgagaaguacgucgaggacaccaagaucgaccucugguccuacaacgccgagcuccucgucgcccucgagaaccagcacaccaucgaccucaccgacuccgagaugaacaagcucuucgagcgcaccaagaagcagcuccgcgagaacgccgaggacaugggcaacggcugcuucaagaucuaccacaagugcgacaacgccugcaucgaguccauccgcaacggcaccuacgaccacgacgucuaccgcgacgaggcccucaacaaccgcuuccagaucaagggcgucgagcucaaguccggcuacaaggacuggauccucuggaucuccuucgccaucuccugcuuccuccucugcgucgcccuccucggcuucaucaugugggccugccagaagggcaacauccgcugcaacaucugcaucuga

SEQ ID NO: 105160 - RNA, 1701 nt, Artificial Sequence
  derived and/or modified CDS sequence (opt2) from hemagglutinin__InfluenzaA__AFM72312
augaagaccaucaucgcccucuccuacauccucugccucgucuucgcccagaagcuccccggcaacgacaacuccaccgccacccucugccucggccaccacgccguccccaacggcaccaucgucaagaccaucaccaacgaccagaucgaggucaccaacgccaccgagcucguccaguccuccuccaccggcggcaucugcgacuccccccaccagauccucgacggcgagaacugcacccucaucgacgcccuccucggcgacccccagugcgacggcuuccagaacaagaagugggaccucuucgucgagcgcuccaaggccuacuccaacugcuaccccuacgacguccccgacuacgccucccuccgcucccucgucgccuccuccggcacccucgaguucaacaacgaguccuucaacuggaccggcgucacccagaacggcaccuccuccgccugcaagcgccgcuccaacaaguccuucuucucccgccucaacuggcucacccaccucaaguacaaguaccccgcccucaacgucaccaugcccaacaacgagaaguucgacaagcucuacaucuggggcguccaccaccccgucaccgacuccgaccagaucaaccucuacgcccaggccuccggccgcaucaccgucuccaccaagcgcucccagcagaccgucauccccaacaucggcuaccgcccccgcguccgcgacauccccucccgcaucuccaucuacuggaccaucgucaagcccggcgacauccuccucaucaacuccaccggcaaccucaucgccccccgcggcuacuucaagauccgcuccggcaaguccuccaucaugcgcuccgacgcccccaucggcaagugcaacuccgagugcaucacccccaacggcuccauccccaacgacaagcccuuccagaacgucaaccgcaucaccuacggcgccugcccccgcuacgucaagcagaacacccucaagcucgccaccggcaugcgcaacguccccgagaagcagacccgcggcaucuucggcgccaucgccggcuucaucgagaacggcugggagggcauggucgacggcugguacggcuuccgccaccagaacuccgagggcaccggccaggccgccgaccucaaguccacccaggccgccaucaaccagaucaacggcaagcucaaccgccucaucggcaagaccaacgagaaguuccaccagaucgagaaggaguucuccgaggucgagggccgcauccaggaccucgagaaguacgucgaggacaccaagaucgaccucugguccuacaacgccgagcuccucgucgcccucgagaaccagcacaccaucgaccucaccgacuccgagaugaacaagcucuucgagcgcaccaagaagcagcuccgcgagaacgccgaggacaugggcaacggcugcuucaagaucuaccacaagugcgacaacgccugcaucggcuccauccgcaacggcaccuacgaccacgacgucuaccgcgacgaggcccucaacaaccgcuuccagaucaagggcgucgagcucaaguccggcuacaaggacuggauccucuggaucuccuucgccaucuccugcuuccuccucugcgucgcccuccucggcuucaucaugugggccugccagaagggcaacauccgcugcaacaucugcaucuga

SEQ ID NO: 105161 - RNA, 1701 nt, Artificial Sequence
  derived and/or modified CDS sequence (opt2) from hemagglutinin__InfluenzaA__AFM72323
augaaggccaucaucgcccucuccuacauccucugccucgucuucgcccagaagcuccccggcaacgacaacuccaccgccacccucugccucggccaccacgccguccccaacggcaccaucgucaagaccaucaccaacgaccagaucgaggucaccaacgccaccgagcucguccaguccuccuccaccggcggcaucugcgacuccccccaccagauccucgacggcgagaacugcacccucaucgacgcccuccucggcgacccccagugcgacggcuuccagaacaagaagugggaccucuucgucgagcgcuccaaggccuacuccaacugcuaccccuacgacguccccgacuacgccucccuccgcucccucgucgccuccuccggcacccucgaguucaacaacgaguccuucaacuggaccggcgucacccagaacggcaccuccuccgccugcaagcgccgcuccaacaaguccuucuucucccgccucaacuggcucacccaccucaaguacaaguaccccgcccucaacgucaccaugcccaacaacgagaaguucgacaagcucuacaucuggggcguccaccaccccgucaccgacuccgaccagaucaaccucuacgcccaggccuccggccgcaucaccgucuccaccaagcgcucccagcagaccgucauccccaacaucggcuaccgcccccgcguccgcgacaaccccucccgcaucuccaucuacuggaccaucgucaagcccggcgacauccuccucaucaacuccaccggcaaccucaucgccccccgcggcuacuucaagauccgcuccggcaaguccuccaucaugcgcuccgacgcccccaucggcaagugcaacuccgagugcaucacccccaacggcuccauccccaacgacaagcccuuccagaacgucaaccgcaucaccuacggcgccugcccccgcuacgucaagcagaacacccucaagcucgccaccggcaugcgcaacguccccgagaagcagacccgcggcaucuucggcgccaucgccggcuucaucgagaacggcugggagggcauggucgacggcugguacggcuuccgccaccagaacuccgagggcaccggccaggccgccgaccucaaguccacccaggccgccaucaaccagaucaacggcaagcucaaccgccucaucggcaagaccaacgagaaguuccaccagaucgagaaggaguucuccgaggucgagggccgcauccaggaccucgagaaguacgucgaggacaccaagaucgaccucugguccuacaacgccgagcuccucgucgcccucgagaaccagcacaccaucgaccucaccgacuccgagaugaacaagcucuucgagcgcaccaagaagcagcuccgcgagaacgccgaggacaugggcaacggcugcuucaagaucuaccacaagugcgacaacgccugcaucggcuccauccgcaacggcaccuacgaccacgacgucuaccgcgacgaggcccucaacaaccgcuuccagaucaagggcgucgagcucaaguccggcuacaaggacuggauccucuggaucuccuucgccaucuccugcuuccuccucugcgucgcccuccucggcuucaucaugugggccugccagaagggcaacauccgcugcaacaucugcaucuga

SEQ ID NO: 105162 - RNA, 1701 nt, Artificial Sequence
  derived and/or modified CDS sequence (opt2) from hemagglutinin__InfluenzaA__AFM72334
augaagaccaucaucgcccucuccuacauccucugccucgucuucgcccagaagcuccccggcaacgacaacuccaccgccacccucugccucggccaccacgccguccccaacggcaccaucgucaagaccaucaccaacgaccagaucgaggucaccaacgccaccgagcucguccaguccuccuccaccggcgagaucugcaacuccccccaccagauccucgacggcgagaacugcacccucaucgacgcccuccucggcgacccccagugcgacggcuuccagaacaagaagugggaccucuucgucgagcgcuccaaggcccacuccaacugcuaccccuacgacguccccgacuacgccucccuccgcucccucgucgccuccuccggcacccucgaguucaacaacgaguccuucaacuggaccggcgucacccagaacggcaccuccuccgccugcauccgccgcuccaacaacuccuucuucucccgccucaacuggcucacccaccucaacuucaaguaccccgcccucaacgucaccaugcccaacaacgagcaguucgacaagcucuacaucuggggcguccuccaccccggcaccuacaaggaccagaucuuccucuacgcccaggccuccggccgcaucaccgucuccaccaagcgcucccagcaggccgucauccccaacaucggcucccgcccccgcguccgcaacauccccucccgcgucuccaucuacuggaccaucgucaagcccggcgacauccuccucaucaacuccaccggcaaccucaucgccccccgcggcuacuucaagauccgcuccggcaaguccuccaucaugcgcuccgacgcccccaucggcaagugcaacuccgccugcaucacccccaacggcuccauccccaacgacaagcccuuccagaacgucaaccgcaucaccuacggcgccugcccccgcuacgucaagcagaacacccucaagcucgccaccggcaugcgcaacguccccgagaagcagacccgcggcaucuucggcgccaucgccggcuucaucgagaacggcugggagggcauggucgacggcugguacggcuuccgccaccagaacuccgagggccgcggccaggccgccgaccucaaguccacccaggccgccaucgaccagaucaacggcaagcucaaccgccucaucggcaagaccaacgagaaguuccaccagaucgagaaggaguucuccgaggucgagggccgcauccaggaccucgagaaguacgucgaggacaccaagaucgaccucugguccuacaacgccgagcuccucgucgcccucgagaaccagcacaccaucgaccucaccgacuccgagaugaacaagcucuucgagaagaccaagaagcagcuccgcgagaacgccgaggacaugggcaacggcugcuucaagaucuaccacaagugcgacaacgccugcaucggcuccauccgcaacggcaccuacgaccacgacgucuaccgcgacgaggcccucaacaaccgcuuccagaucaagggcgucgagcucaaguccggcuacaaggacuggauccucuggaucuccuucgccaucuccugcuuccuccucugcgucgcccuccucggcuucaucaugugggccugccagaagggcaacauccgcugcaacaucugcaucuga

SEQ ID NO: 105163 - RNA, 1701 nt, Artificial Sequence
  derived and/or modified CDS sequence (opt2) from hemagglutinin__InfluenzaA__AFM72345
augaagaccaucaucgcccucuccuacauccucugccucgucuucgcccagaagcuccccggcaacgacaacuccaccgccacccucugccucggccaccacgccguccccaacggcaccaucgucaagaccaucaccaacgaccagaucgaggucaccaacgccaccgagcucguccaguccuccuccaccggcggcaucugcgacuccccccaccagauccucgacggcgagaacugcacccucaucgacgcccuccucggcgacccccagugcgacggcuuccagaacaagaagugggaccucuucgucgagcgcuccaaggccuacuccaacugcuaccccuacgacguccccgacuacgccucccuccgcucccucgucgccuccuccggcacccucgaguucaacaacgaguccuucgacuggaccggcgucacccagaacggcaccuccuccgccugcaagcgccgcuccaacaaguccuucuucucccgccucaacuggcucacccaccucaaguacaaguaccccgcccucaacgucaccaugcccaacaacgagaaguucgacaagcucuacaucuggggcguccaccaccccgucaccgacuccgaccagaucucccucuacacccaggccuccggccgcaucaccgucuccaccaagcgcucccagcagaccgucauccccaacaucggcuuccgcccccgcguccgcgacaucuccucccgcaucuccaucuacuggaccaucgucaagcccggcgacauccuccucaucaacuccaccggcaaccucaucgccccccgcggcuacuucaagauccgcuccggcaaguccuccaucaugcgcuccgacgcccccaucggcaagugcaacuccgagugcaucacccccaacggcuccauccccaacgacaagcccuuccagaacgucaaccgcaucaccuacggcgccugcccccgcuacgucaagcagaacacccucaagcucgccaccggcaugcgcaacguccccgagaagcagacccgcggcaucuucggcgccaucgccggcuucaucgagaacggcugggagggcauggucgacggcugguacggcuuccgccaccagaacuccgagggcaccggccaggccgccgaccucaaguccacccaggccgccaucaaccagaucaacggcaagcucaaccgccucaucggcaagaccaacgagaaguuccaccagaucgagaaggaguucuccgaggucgagggccgcauccaggaccucgagaaguacgucgaggacaccaagaucgaccucugguccuacaacgccgagcuccucgucgcccucgagaaccagcacaccaucgaccucaccgacuccgagaugaacaagcucuucgagcgcaccaagaagcagcuccgcgagaacgccgaggacaugggcaacggcugcuucaagaucuaccacaagugcgacaacgccugcaucggcuccauccgcaacggcaccuacgaccacgacgucuaccgcgacgaggcccucaacaaccgcuuccagaucaagggcgucgagcucaaguccggcuacaaggacuggauccucuggaucuccuucgccaucuccugcuuccuccucugcgucgcccuccucggcuucaucaugugggccugccagaagggcaacauccgcugcaacaucugcaucuga

SEQ ID NO: 105164 - RNA, 1701 nt, Artificial Sequence
  derived and/or modified CDS sequence (opt2) from hemagglutinin__InfluenzaA__AFM72356
augaagaccaucaucgcccucuccuacauccucugccucgucuucgcccagaagcuccccggcaacgacaacuccaccgccacccucugccucggccaccacgccguccccaacggcaccaucgucaagaccaucaccaacgaccagaucgaggucaccaacgccaccgagcucguccaguccuccuccaccggcggcaucugcgacuccccccaccagauccucgacggcgagaacugcacccucaucgacgcccuccucggcgacccccagugcgacggcuuccagaacaagaagugggaccucuucgucgagcgcuccaaggccuacuccaacugcuaccccuacgacguccccgacuacgccucccuccgcucccucgucgccuccuccggcacccucgaguucaacaacgaguccuucaacuggaccggcgucacccagaacggcaccuccuccgccugcaagcgccgcuccaacaaguccuucuucucccgccucaacuggcucacccaccucaaguucaaguaccccgcccucaacgucaccaugcccaacaacgagaaguucgacaagcucuacaucuggggcguccaccaccccggcaccgacaacgaccagaucaaccucuacguccaggccuccggccgcaucaccgucuccaccaagcgcucccagcagaccgucauccccaacaucggcucccgcccccgcguccgcgacguccccucccgcaucuccaucuacuggaccaucgucaagcccggcgacauccuccucaucuccuccaccggcaaccucaucgccccccgcggcuacuucaagauccgcuccggcaaguccuccaucaugcgcuccgacgcccccaucggcaagugcaacuccgagugcaucacccccaacggcuccauccccaacgacaagcccuuccagaacgucaaccgcaucaccuacggcgccugcccccgcuacgucaagcagaacacccucaagcucgccaccggcaugcgcaacguccccgagaagcagacccgcggcaucuucggcgccaucgccggcuucaucgagaacggcugggagggcauggucgacggcugguacggcuuccgccaccagaacuccgagggcaccggccaggccgccgaccucaaguccacccaggccgccaucaaccagaucaacggcaagcucaaccgccucaucggcaagaccaacgagaaguuccaccagaucgagaaggaguucuccgaggucgagggccgcauccaggaccucgagaaguacgucgaggacaccaagaucgaccucugguccuacaacgccgagcuccucgucgcccucgagaaccagcacaccaucgaccucaccgacuccgagaugaacaagcucuucgagcgcaccaagaagcagcuccgcgagaacgccgaggacaugggcaacggcugcuucaagaucuaccacaagugcgacaacgccugcaucggcuccauccgcaacggcaccuacgaccacgacgucuaccgcgacgaggcccucaacaaccgcuuccagaucaagggcgucgagcucaaguccggcuacaaggacuggauccucuggaucuccuucgccaucuccugcuuccuccucugcgucgcccuccucggcuucaucaugugggccugccagaagggcaacauccgcugcaacaucugcaucuga

SEQ ID NO: 105165 - RNA, 1701 nt, Artificial Sequence
  derived and/or modified CDS sequence (opt2) from hemagglutinin__InfluenzaA__AFM72367
augaagaccaucaucgcccucuccuacauccucugccucgucuucgcccagaagcuccccggcaacgacaacuccaccgccacccucugccucggccaccacgccguccccaacggcaccaucgucaagaccaucaccaacgaccagaucgaggucaccaacgccaccgagcucguccaguccuccuccaccggcggcaucugcgacuccccccaccagauccucgacggcgagaacugcacccucaucgacgcccuccucggcgacccccagugcgacggcuuccagaacaagaagugggaccucuucgucgagcgcuccaaggccuacuccaacugcuaccccuacgacguccccgacuacgccucccuccgcucccucgucgccuccuccggcacccucgaguucaacaacgaguccuucaacuggaccggcgucacccagaacggcaccuccuccgccugcaagcgccgcuccaacaaguccuucuucucccgccucaacuggcucacccaccucaaguucaaguaccccgcccucaacgucaccaugcccaacaacgagaaguucgacaagcucuacaucuggggcguccaccaccccgucaccgacaacgaccagaucaaccucuacgcccaggccuccggccgcaucaccgucuccaccaagcgcucccagcagaccgucauccccaacaucggcucccgcccccgcguccgcgacguccccucccgcaucuccaucuacuggaccaucgucaagcccggcgacauccuccucaucuccuccaccggcaaccucaucgccccccgcggcuacuucaagauccgcuccggcaaguccuccaucaugcgcuccgacgcccccaucggcaagugcaacuccgagugcaucacccccaacggcuccauccccaacgacaagcccuuccagaacgucaaccgcaucaccuacggcgccugcccccgcuacgucaagcagaacacccucaagcucgccaccggcaugcgcaacguccccgagaagcagacccgcggcaucuucggcgccaucgccggcuucaucgagaacggcugggagggcauggucgacggcugguacggcuuccgccaccagaacuccgagggcaccggccaggccgccgaccucaaguccacccaggccgccaucaaccagaucaacggcaagcucaaccgccucaucggcaagaccaacgagaaguuccaccagaucgagaaggaguucuccgaggucgagggccgcauccaggaccucgagaaguacgucgaggacaccaagaucgaccucugguccuacaacgccgagcuccucgucgcccucgagaaccagcacaccaucgaccucaccgacuccgagaugaacaagcucuucgagcgcaccaagaagcagcuccgcgagaacgccgaggacaugggcaacggcugcuucaagaucuaccacaagugcgacaacgccugcaucggcuccauccgcaacggcaccuacgaccacgacgucuaccgcgacgaggcccucaacaaccgcuuccagaucaagggcgucgagcucaaguccggcuacaaggacuggauccucuggaucuccuucgccaucuccugcuuccuccucugcgucgcccuccucggcuucaucaugugggccugccagaagggcaacauccgcugcaacaucugcaucuga

SEQ ID NO: 105166 - RNA, 1701 nt, Artificial Sequence
  derived and/or modified CDS sequence (opt2) from hemagglutinin__InfluenzaA__AFM72378
augaagaccaucaucgcccucuccuacauccucugccucgucuucgcccagaagcuccccggcaacgacaacuccaccgccacccucugccucggccaccacgccguccccaacggcaccaucgucaagaccaucaccaacgaccagaucgaggucaccaacgccaccgagcucguccaguccuccuccaccggcgagaucugcaacuccccccaccagauccucgacggcgagaacugcacccucaucgacgcccuccucggcgacccccagugcgacggcuuccagaacaagaagugggaccucuucgucgagcgcuccaaggcccacuccaacugcuaccccuacgacguccccgacuacgccucccuccgcucccucgucgccuccuccggcacccucgaguucaacaacgaguccuucaacuggaccggcgucacccagaacggcaccuccuccgccugcauccgccgcuccaacaacuccuucuucucccgccucaacuggcucacccagcucaacuucaaguaccccgcccucaacgucaccaugcccaacaacgagcaguucgacaagcucuacaucuggggcguccaccaccccgucaccgacaaggaccagaucuuccucuacgcccaggccuccggccgcaucaccgucuccaccaagcgcucccagcaggccgucauccccaacaucggcuaccgcccccgcguccgcaacauccccucccgcgucuccaucuacuggaccaucgucaagcccggcgacauccuccucaucaacuccaccggcaaccucaucgccccccgcggcuacuucaagauccgcuccggcaaguccuccaucaugcgcuccgacgcccccaucggcaagugcaacuccgccugcaucacccccaacggcuccauccccaacgacaagcccuuccagaacgucaaccgcaucaccuacggcgccugcccccgcuacgucaagcagaacacccucaagcucgccaccggcaugcgcaacguccccgagaagcagacccgcggcaucuucggcgccaucgccggcuucaucgagaacggcugggagggcauggucgacggcugguacggcuuccgccaccagaacuccgagggccgcggccaggccgccgaccucaaguccacccaggccgccaucgaccagaucaacggcaagcucaaccgccucaucggcaagaccaacgagaaguuccaccagaucgagaaggaguucuccgaggucgagggccgcauccaggaccucgagaaguacgucgaggacaccaagaucgaccucugguccuacaacgccgagcuccucgucgcccucgagaaccagcacaccaucgaccucaccgacuccgagaugaacaagcucuucgagaagaccaagaagcagcuccgcgagaacgccgaggacaugggcaacggcugcuucaagaucuaccacaagugcgacaacgccugcaucggcuccauccgcaacggcaccuacgaccacgacgucuaccgcgacgaggcccucaacaaccgcuuccagaucaagggcgucgagcucaaguccggcuacaaggacuggauccucuggaucuccuucgccaucuccugcuuccuccucugcgucgcccuccucggcuucaucaugugggccugccagaagggcaacauccgcugcaacaucugcaucuga

SEQ ID NO: 105167 - RNA, 1701 nt, Artificial Sequence
  derived and/or modified CDS sequence (opt2) from hemagglutinin__InfluenzaA__AFM72389
augaagaccaucaucgcccucuccuacauccucugccucgucuucgcccagaagcuccccggcaacgacaacuccaccgccacccucugccucggccaccacgccguccccaacggcaccaucgucaagaccaucaccaacgaccagaucgaggucaccaacgccaccgagcucguccaguccuccuccaccggcgagaucugcaacuccccccaccagauccucgacggcgagaacugcacccucaucgacgcccuccucggcgacccccagugcgacggcuuccagaacaagaagugggaccucuucgucgagcgcuccaaggcccacuccaacugcuaccccuacgacguccccgacuacgccucccuccgcucccucgucgccuccuccggcacccucgaguucaacaacgaguccuucaacuggaccggcgucacccagaacggcaccuccuccgccugcauccgccgcuccaacaacuccuucuucucccgccucaacuggcucacccaccucaacuucaaguaccccgcccucaacgucaccaugcccaacaacgagcaguucgacaagcucuacaucuggggcguccaccaccccgucaccgacaaggaccagaucuuccucuacgcccaggccuccggccgcaucaccgucuccaccaagcgcucccagcaggccgucauccccaacaucggcuaccgcccccgcguccgcaacaaccccucccgcgucuccaucuacuggaccaucgucaagcccggcgacauccuccucaucaacuccaccggcaaccucaucgccccccgcggcuacuucaagauccgcuccggcaaguccuccaucaugcgcuccgacgcccccaucggcaagugcaacuccgccugcaucacccccaacggcuccauccccaacgacaagcccuuccagaacgucaaccgcaucaccuacggcgccugcccccgcuacgucaagcagaacacccucaagcucgccaccggcaugcgcaacguccccgagaagcagacccgcggcaucuucggcgccaucgccggcuucaucgagaacggcugggagggcauggucgacggcugguacggcuuccgccaccagaacuccgagggccgcggccaggccgccgaccucaaguccacccaggccgccaucgaccagaucaacggcaagcucaaccgccucaucggcaagaccaacgagaaguuccaccagaucgagaaggaguucuccgaggucgagggccgcauccaggaccucgagaaguacgucgaggacaccaagaucgaccucugguccuacaacgccgagcuccucgucgcccucgagaaccagcacaccaucgaccucaccgacuccgagaugaacaagcucuucgagaagaccaagaagcagcuccgcgagaacgccgaggacaugggcaacggcugcuucaagaucuaccacaagugcgacaacgccugcaucggcuccauccgcaacggcaccuacgaccacgacgucuaccgcgacgaggcccucaacaaccgcuuccagaucaagggcgucgagcucaaguccggcuacaaggacuggauccucuggaucuccuucgccaucuccugcuuccuccucugcgucgcccuccucggcuucaucaugugggccugccagaagggcaacauccgcugcaacaucugcaucuga

SEQ ID NO: 105168 - RNA, 1701 nt, Artificial Sequence
  derived and/or modified CDS sequence (opt2) from hemagglutinin__InfluenzaA__AFM72400
augaagaccaucaucgcccucuccuacauccucugccucgucuucgcccagaagcuccccggcaucgacaacuccaccgccacccucugccucggccaccacgccguccccaacggcaccaucgucaagaccaucaccaacgaccagaucgaggucaccaacgccaccgagcucguccaguccuccuccaccggcgagaucugcgacuccccccaccagauccucgacggcgagaacugcacccucaucgacgcccuccucggcgacccccagugcgacggcuuccagaacaagaagugggaccucuucgucgagcgcuccaaggccuacuccaacugcuaccccuacgacguccccgacuacgccucccuccgcucccucgucgccuccuccggcacccucgaguucaacaacgaguccuucaacugggccggcgucacccagaacggcaccuccuccgccugcaagcgcggcuccaacaacuccuucuucucccgccucaacuggcucacccacuccaaguucaaguaccccgcccucaacgucaccaugcccaacaacgaggaguucgacaagcucuacaucuggggcguccuccaccccggcaccgacaacgaccagaucuuccucuacgcccaggccuccggccgcaucaccgucuccaccaagcgcucccagcagaccgucauccccaacaucggcucccgcccccgcguccgcaacauccccucccgcaucuccaucuacuggaccaucgucaagcccggcgacauccuccucaucaacuccaccggcaaccucaucgccccccgcggcuacuucaagauccgcuccggcaaguccuccaucaugcgcuccgacgcccccaucggcaagugcaacuccgagugcaucacccccaacggcuccauccccaacgacaagcccuuccagaacgucaaccgcaucaccuacggcgccugcccccgcuacgucaagcagaacacccucaagcucgccaccggcaugcgcaacguccccgagaagcagacccgcggcaucuucggcgccaucgccggcuucaucgagaacggcugggagggcauggucgacggcugguacggcuuccgccaccagaacuccgagggcaucggccaggccgccgaccucaaguccacccaggccgccaucgaccagaucaacggcaagcucaaccgccucaucggcaagaccaacgagaaguuccaccagaucgagaaggaguucuccgaggucgagggccgcauccaggaccucgagaaguacgucgaggacaccaagaucgaccucugguccuacaacgccgagcuccucgucgcccucgagaaccagcacaccaucgaccucaccgacuccgagaugaacaagcucuucgagaagaccaagaagcagcuccgcgagaacgccgaggacaugggcaacggcugcuucaagaucuaccacaagugcgacaacgccugcaucggcuccauccgcaacggcaccuacgaccacgacgucuaccgcgacgaggcccucaacaaccgcuuccagaucaagggcgucgagcucaaguccggcuacaaggacuggauccucuggaucuccuucgccaucuccugcuuccuccucugcgucgcccuccucggcuucaucaugugggccugccagaagggcaacauccgcugcaacaucugcaucuga

SEQ ID NO: 105169 - RNA, 1701 nt, Artificial Sequence
  derived and/or modified CDS sequence (opt2) from hemagglutinin__InfluenzaA__AFM72411
augaagaccaucaucgcccucuccuacauccucugccucgucuucgcccagaagcuccccggcaucgacaacuccaccgccacccucugccucggccaccacgccguccccaacggcaccaucgucaagaccaucaccaacgaccagaucgaggucaccaacgccaccgagcucguccaguccuccuccaccggcgagaucugcgacuccccccaccagauccucgacggcgagaacugcacccucaucgacgcccuccucggcgacccccagugcgacggcuuccagaacaagaagugggaccucuucgucgagcgcuccaaggccuacuccaacugcuaccccuacgacguccccgacuacgccucccuccgcucccucgucgccuccuccggcacccucgaguucaacaacgaguccuucaacugggccggcgucacccagaacggcaccuccuccgccugcaagcgcggcuccaacaacuccuucuucucccgccucaacuggcucacccaguccaaguucaaguaccccgcccucaacgucaccaugcccaacaacgaggaguucgacaagcucuacaucuggggcguccaccaccccgucaccgacaacgaccagaucuuccucuacgcccaggccuccggccgcaucaccgucuccaccaagcgcucccagcagaccgucauccccaacaucggcucccgcccccgcguccgcaacauccccucccgcaucuccaucuacuggaccaucgucaagcccggcgacauccuccucaucaacuccaccggcaaccucaucgccccccgcggcuacuucaagauccgcuccggcaaguccuccaucaugcgcuccgacgcccccaucggcaagugcaacuccgagugcaucacccccaacggcuccauccccaacgacaagcccuuccagaacgucaaccgcaucaccuacggcgccugcccccgcuacgucaagcagaacacccucaagcucgccaccggcaugcgcaacguccccgagaagcagacccgcggcaucuucggcgccaucgccggcuucaucgagaacggcugggagggcauggucgacggcugguacggcuuccgccaccagaacuccgagggcaucggccaggccgccgaccucaaguccacccaggccgccaucgaccagaucaacggcaagcucaaccgccucaucggcaagaccaacgagaaguuccaccagaucgagaaggaguucuccgaggucgagggccgcauccaggacuucgagaaguacgucgaggacaccaagaucgaccucugguccuacaacgccgagcuccucgucgcccucgagaaccagcacaccaucgaccucaccgacuccgagaugaacaagcucuucgagaagaccaagaagcagcuccgcgagaacgccgaggacaugggcaacggcugcuucaagaucuaccacaagugcgacaacgccugcaucggcuccauccgcaacggcaccuacgaccacgacgucuaccgcgacgaggcccucaacaaccgcuuccagaucaagggcgucgagcucaaguccggcuacaaggacuggauccucuggaucuccuucgccaucuccugcuuccuccucugcgucgcccuccucggcuucaucaugugggccugccagaagggcaacauccgcugcaacaucugcaucuga

SEQ ID NO: 105170 - RNA, 1701 nt, Artificial Sequence
  derived and/or modified CDS sequence (opt2) from hemagglutinin__InfluenzaA__AFM72422
augaagaccaucaucgcccucuccuacauccucugccucgucuucgcccagaagcuccccggcaacgacaacuccaccgccacccucugccucggccaccacgccguccccaacggcaccaucgucaagaccaucaccaacgaccagaucgaggucaccaacgccaccgagcucguccaguccuccuccaccggcgagaucugcgacuccccccaccagauccucgacggcgagaacugcacccucaucgacgcccuccucggcgacccccagugcgacggcuuccagaacaagaagugggaccucuucgucgagcgcuccaaggccuacuccaacugcuaccccuacgacguccccgacuacgccucccuccgcucccucgucgccuccuccggcacccucgaguucaacaacgaguccuucaacuggaccggcgucacccagaacggcaccuccuccgccugcauccgccgcuccaacaacuccuucuucucccgccucaacuggcucacccaccucaaguucaaguaccccgcccucaacgucaccaugcccaacaacgaggaguucgacaagcucuacaucuggggcguccaccaccccgucaccgacaacgaccagaucuuccucuacgcccaggccuccggccgcaucaccgucuccaccaagcgcucccagcagaccgucauccccaacaucggcuuccgcccccgcguccgcaacauccccucccgcaucuccaucuacuggaccaucgucaagcccggcgacauccuccucaucaacuccaccggcaaccucaucgccccccgcggcuacuucaagauccgcuccggcaaguccuccaucaugcgcuccgacgcccccaucggcaagugcaacuccgagugcaucacccccaacggcuccauccccaacgacaagcccuuccagaacgucaaccgcaucaccuacggcgccugcccccgcuacgucaagcagaacacccucaagcucgccaccggcaugcgcaacguccccgagaagcagacccgcggcaucuucggcgccaucgccggcuucaucgagaacggcugggagggcauggucgacggcugguacggcuuccgccaccagaacuccgagggcaucggccaggccgccgaccucaaguccacccaggccgccaucgaccagaucaacggcaagcucaaccgccucaucggcaagaccaacgagaaguuccaccagaucgagaaggaguucuccgaggucgagggccgcauccaggaccucgagaaguacgccgaggacaccaagaucgaccucugguccuacaacgccgagcuccucgucgcccucgagaaccagcacaccaucgaccucaccgacuccgagaugaacaagcucuucgagaagaccaagaagcagcuccgcgagaacgccgaggacaugggcaacggcugcuucaagaucuaccacaagugcgacaacgccugcaucggcuccauccgcaacggcaccuacgaccacgacgucuaccgcgacgaggcccucaacaaccgcuuccagaucaagggcgucgagcucaaguccggcuacaaggacuggauccucuggaucuccuucgccaucuccugcuuccuccucugcgucgcccuccucggcuucaucaugugggccugccagaagggcaacauccgcugcaacaucugcaucuga

SEQ ID NO: 105171 - RNA, 1701 nt, Artificial Sequence
  derived and/or modified CDS sequence (opt2) from hemagglutinin__InfluenzaA__AFM72433
augaagaccaucaucgcccucuccuacauccucugccucgucuucgcccagaagcuccccggcaacgacaacuccaccgccacccucugccucggccaccacgccguccccaacggcaccaucgucaagaccaucaccaacgaccagaucgaggucaccaacgccaccgagcucguccaguccuccuccaccggcgagaucugcgacuccccccaccagauccucgacggcgagaacugcacccucaucgacgcccuccucggcgacccccagugcgacggcuuccagaacaagaagugggaccucuucgucgagcgcuccaaggccuacuccaacugcuaccccuacgacguccccgacuacgccucccuccgcucccucgucgccuccuccggcacccucgaguucaacaacgaguccuucaacuggaccggcgucacccagaacggcaccuccuccgccugcauccgccgcuccaacaacuccuucuucucccgccucaacuggcucacccaccucaaguucaaguaccccgcccucaacgucaccaugcccaacaacgaggaguucgacaagcucuacaucuggggcguccaccaccccgucaccgacaacgaccagaucuuccucuacgcccaggccuccggccgcaucaccgucuccaccaagcgcucccagcagaccgucauccccaacaucggcuuccgcccccgcguccgcaacaaccccucccgcaucuccaucuacuggaccaucgucaagcccggcgacauccuccucaucaacuccaccggcaaccucaucgccccccgcggcuacuucaagauccgcuccggcaaguccuccaucaugcgcuccgacgcccccaucggcaagugcaacuccgagugcaucacccccaacggcuccauccccaacgacaagcccuuccagaacgucaaccgcaucaccuacggcgccugcccccgcuacgucaagcagaacacccucaagcucgccaccggcaugcgcaacguccccgagaagcagacccgcggcaucuucggcgccaucgccggcuucaucgagaacggcugggagggcauggucgacggcugguacggcuuccgccaccagaacuccgagggcaucggccaggccgccgaccucaaguccacccaggccgccaucgaccagaucaacggcaagcucaaccgccucaucggcaagaccaacgagaaguuccaccagaucgagaaggaguucuccgaggucgagggccgcauccaggaccucgagaaguacgccgaggacaccaagaucgaccucugguccuacaacgccgagcuccucgucgcccucgagaaccagcacaccaucgaccucaccgacuccgagaugaacaagcucuucgagaagaccaagaagcagcuccgcgagaacgccgaggacaugggcaacggcugcuucaagaucuaccacaagugcgacaacgccugcaucggcuccauccgcaacggcaccuacgaccacgacgucuaccgcgacgaggcccucaacaaccgcuuccagaucaagggcgucgagcucaaguccggcuacaaggacuggauccucuggaucuccuucgccaucuccugcuuccuccucugcgucgcccuccucggcuucaucaugugggccugccagaagggcaacauccgcugcaacaucugcaucuga

SEQ ID NO: 105172 - RNA, 1701 nt, Artificial Sequence
  derived and/or modified CDS sequence (opt2) from hemagglutinin__InfluenzaA__AFM72444
augaagaccaucaucgcccucuccuacauccucugccucgucuucgcccagaagcuccccggcaacgacaacuccaccgccacccucugccucggccaccacgccguccccaacggcaccaucgucaagaccaucaccaacgaccagaucgaggucaccaacgccaccgagcucguccaguccuccuccaccggcgagaucugcgacuccccccaccagauccucgacggcgagaacugcacccucaucgacgcccuccucggcgacccccagugcgacggcuuccagaacaagaagugggaccucuucgucgagcgcuccaaggccuacuccaacugcuaccccuacgacguccccgacuacgccucccuccgcucccucgucgccuccuccggcacccucgaguucaacaacgaguccuucaacuggaccggcgucacccagaacggcaccuccuccgccugcauccgccgcuccaacaacuccuucuucucccgccucaacuggcucacccaccucaaguucaaguaccccgcccucaacgucaccaugcccaacaacgaggaguucgacaagcucuacaucuggggcguccaccaccccgucaccgacaacgaccagauccuccucuacgcccaggccuccggccgcaucaccgucuccaccaagcgcucccagcagaccgucauccccaacaucggcuuccgcccccgcguccgcaacaaccccucccgcaucuccaucuacuggaccaucgucaagcccggcgacauccuccucaucaacuccaccggcaaccucaucgccccccgcggcuacuucaagauccgcuccggcaaguccuccaucaugcgcuccgacgcccccaucggcaagugcaacuccgagugcaucacccccaacggcuccauccccaacgacaagcccuuccagaacgucaaccgcaucaccuacggcgccugcccccgcuacgucaagcagaacacccucaagcucgccaccggcaugcgcaacguccccgagaagcagacccgcggcaucuucggcgccaucgccggcuucaucgagaacggcugggagggcauggucgacggcugguacggcuuccgccaccagaacuccgagggcaucggccaggccgccgaccucaaguccacccaggccgccaucgaccagaucaacggcaagcucaaccgccucaucggcaagaccaacgagaaguuccaccagaucgagaaggaguucuccgaggucgagggccgcauccaggaccucgagaaguacgccgaggacaccaagaucgaccucugguccuacaacgccgagcuccucgucgcccucgagaaccagcacaccaucgaccucaccgacuccgagaugaacaagcucuucgagaagaccaagaagcagcuccgcgagaacgccgaggacaugggcaacggcugcuucaagaucuaccacaagugcgacaacgccugcaucggcuccauccgcaacggcaccuacgaccacgacgucuaccgcgacgaggcccucaacaaccgcuuccagaucaagggcgucgagcucaaguccggcuacaaggacuggauccucuggaucuccuucgccaucuccugcuuccuccucugcgucgcccuccucggcuucaucaugugggccugccagaagggcaacauccgcugcaacaucugcaucuga

SEQ ID NO: 105173 - RNA, 1701 nt, Artificial Sequence
  derived and/or modified CDS sequence (opt2) from hemagglutinin__InfluenzaA__AFM72455
augaagaccaucaucgcccucuccuacauccucugccucgucuucgcccagaagcuccccggcaacgacaacuccaccgccacccucugccucggccaccacgccguccccaacggcaccaucgucaagaccaucaccaacgaccagaucgaggucaccaacgccaccgagcucguccaguccuccuccaccggcgagaucugcgacuccccccaccagauccucgacggcgagaacugcacccucaucgacgcccuccucggcgacccccagugcgacggcuuccagaacaagaagugggaccucuucgucgagcgcuccaaggccuacuccaacugcuaccccuacgacguccccgacuacgccucccuccgcucccucgucgccuccuccggcacccucgaguucaacaacgaguccuucaacuggaccggcgucacccagaacggcaccuccuccgccugcauccgccgcuccaacaacuccuucuucucccgccucaacuggcucacccagcucaaguucaaguaccccgcccucaacgucaccaugcccaacaacgaggaguucgacaagcucuacaucuggggcguccaccaccccgucaccgacaacgaccagaucuuccucuacgcccaggccuccggccgcaucaccgucuccaccaagcgcucccagcagaccgucauccccaacaucggcuuccgcccccgcguccgcaacaaccccucccgcaucuccaucuacuggaccaucgucaagcccggcgacauccuccucaucaacuccaccggcaaccucaucgccccccgcggcuacuucaagauccgcuccggcaaguccuccaucaugcgcuccgacgcccccaucggcaagugcaacuccgagugcaucacccccaacggcuccauccccaacgacaagcccuuccagaacgucaaccgcaucaccuacggcgccugcccccgcuacgucaagcagaacacccucaagcucgccaccggcaugcgcaacguccccgagaagcagacccgcggcaucuucggcgccaucgccggcuucaucgagaacggcugggagggcauggucgacggcugguacggcuuccgccaccagaacuccgagggcaucggccaggccgccgaccucaaguccacccaggccgccaucgaccagaucaacggcaagcucaaccgccucaucggcaagaccaacgagaaguuccaccagaucgagaaggaguucuccgaggucgagggccgcauccaggaccucgagaaguacgccgaggacaccaagaucgaccucugguccuacaacgccgagcuccucgucgcccucgagaaccagcacaccaucgaccucaccgacuccgagaugaacaagcucuucgagaagaccaagaagcagcuccgcgagaacgccgaggacaugggcaacggcugcuucaagaucuaccacaagugcgacaacgccugcaucggcuccauccgcaacggcaccuacgaccacgacgucuaccgcgacgaggcccucaacaaccgcuuccagaucaagggcgucgagcucaaguccggcuacaaggacuggauccucuggaucuccuucgccaucuccugcuuccuccucugcgucgcccuccucggcuucaucaugugggccugccagaagggcaacauccgcugcaacaucugcaucuga

SEQ ID NO: 105174 - RNA, 1701 nt, Artificial Sequence
  derived and/or modified CDS sequence (opt2) from hemagglutinin__InfluenzaA__AFM72466
augaagaccaucaucgcccucuccuacauccucugccucgucuucgcccagaagcuccccggcaacgacaacuccaccgccacccucugccucggccaccacgccguccccaacggcaccaucgucaagaccaucaccaacgaccagaucgaggucaccaacgccaccgagcucguccaguccuccuccaccggcgagaucugcgacuccccccaccagauccucgacggcgagaacugcacccucaucgacgcccuccucggcgacccccagugcgacggcuuccagaacaagaagugggaccucuucgucgagcgcuccaaggccuacuccaacugcuaccccuacgacguccccgacuacgccucccuccgcucccucgucgccuccuccggcacccucgaguucaacaacgaguccuucaacuggaccggcgucacccagaacggcaccuccuccgccugcauccgccgcuccaacaacuccuucuucucccgccucaacuggcucacccaccucaaguucaaguaccccgcccucaacgucaccaugcccaacaacgaggaguucgacaagcucuacaucuggggcguccaccaccccgucaccgacaaggaccagaucuuccucuacgcccaggccuccggccgcaucaccgucuccaccaagcgcucccagcagaccgucauccccaacaucggcuuccgcccccgcguccgcaacaaccccucccgcaucuccaucuacuggaccaucgucaagcccggcgacauccuccucaucaacuccaccggcaaccucaucgccccccgcggcuacuucaagauccgcuccggcaaguccuccaucaugcgcuccgacgcccccaucggcaagugcaacuccgagugcaucacccccaacggcuccauccccaacgacaagcccuuccagaacgucaaccgcaucaccuacggcgccugcccccgcuacgucaagcagaacacccucaagcucgccaccggcaugcgcaacguccccgagaagcagacccgcggcaucuucggcgccaucgccggcuucaucgagaacggcugggagggcauggucgacggcugguacggcuuccgccaccagaacuccgagggcaucggccaggccgccgaccucaaguccacccaggccgccaucgaccagaucaacggcaagcucaaccgccucaucggcaagaccaacgagaaguuccaccagaucgagaaggaguucuccgaggucgagggccgcauccaggaccucgagaaguacgccgaggacaccaagaucgaccucugguccuacaacgccgagcuccucgucgcccucgagaaccagcacaccaucgaccucaccgacuccgagaugaacaagcucuucgagaagaccaagaagcagcuccgcgagaacgccgaggacaugggcaacggcugcuucaagaucuaccacaagugcgacaacgccugcaucggcuccauccgcaacggcaccuacgaccacgacgucuaccgcgacgaggcccucaacaaccgcuuccagaucaagggcgucgagcucaaguccggcuacaaggacuggauccucuggaucuccuucgccaucuccugcuuccuccucugcgucgcccuccucggcuucaucaugugggccugccagaagggcaacauccgcugcaacaucugcaucuga

SEQ ID NO: 105175 - RNA, 1701 nt, Artificial Sequence
  derived and/or modified CDS sequence (opt2) from hemagglutinin__InfluenzaA__AFM72488
augaagaccaucaucgcccucuccuacauccucugccucgucuucgcccagaagcuccccggcaacgacaacuccaccgccacccucugccucggccaccacgccguccccaacggcaccaucgucaagaccaucaccaacgaccagaucgaggucaccaacgccaccgagcucguccaguccuccuccaccggcggcaucugcgacuccccccaccagauccucgacggcgagaacugcacccucaucgacgcccuccucggcgacccccagugcgacggcuuccagaacaagaagugggaccucuucgucgagcgcuccaaggccuacuccaacugcuaccccuacgacguccccgacuacgccucccuccgcucccucgucgccuccuccggcacccucgaguucaacaacgaguccuucaacuggaccggcgucacccagaacggcaccuccuccgccugcaagcgccgcuccaacaacuccuucuucucccgccucaacuggcucacccagcucaaguucaaguaccccgcccucaacgucaccaugcccaacaacgagaaguucgacaagcucuacaucuggggcguccaccaccccgucaccgacaacgagcagaucuuccucuacgcccaggccuccggccgcaucaccgucuccaccaagcgcucccagcagaccgucauccccaacaucggcuuccgcccccgcguccgcaacauccccucccgcaucuccaucuacuggaccaucgucaagcccggcgacauccuccucaucaacuccaccggcaaccucaucgccccccgcggcuacuucaagauccgcuccggcaaguccuccaucaugcgcuccgacgcccccaucggcaagugcaacuccaagugcaucacccccaacggcuccauccccaacgacaagcccuuccagaacgucaaccgcaucaccuacggcgccugcccccgcuacgucaagcagaacacccucaagcucgccaccggcaugcgcaacguccccgagaagcagacccgcggcaucuucggcgccaucgccggcuucaucgagaacggcugggagggcauggucgacggcugguacggcuuccgccaccagaacuccgagggcaucggccaggccgccgaccucaaguccacccaggccgccaucgaccagaucaacggcaagcucaaccgccucaucggcaagaccaacgagaaguuccaccagaucgagaaggaguucuccgaggucgagggccgcauccaggaccucgagaaguacgucgaggacaccaagaucgaccucugguccuacaacgccgagcuccucgucgcccucgagaaccagcacaccaucgaccucaccgacuccgagaugaacaagcucuucgagaagaccaagaagcagcuccgcgagaacgccgaggacaugggcaacggcugcuucaagaucuaccacaagugcgacaacgccugcaucggcuccauccgcaacggcaccuacgaccacgacgucuaccgcgacgaggcccucaacaaccgcuuccagaucaagggcgucgagcucaaguccggcuacaaggacuggauccucuggaucuccuucgccaucuccugcuuccuccucugcgucgcccuccucggcuucaucaugugggccugccagaagggcaacauccgcugcaacaucugcaucuga

SEQ ID NO: 105176 - RNA, 1701 nt, Artificial Sequence
  derived and/or modified CDS sequence (opt2) from hemagglutinin__InfluenzaA__AFM72499
augaagaccaucaucgcccucuccuacauccucugccucgucuucgcccagaagcuccccggcaacgacaacuccaccgccacccucugccucggccaccacgccguccccaacggcaccaucgucaagaccaucaccaacgaccagaucgaggucaccaacgccaccgagcucguccaguccuccuccaccggcggcaucugcgacuccccccaccagauccucgacggcgagaacugcacccucaucgacgcccuccucggcgacccccagugcgacggcuuccagaacaagaagugggaccucuucgucgagcgcuccaaggccuacuccaacugcuaccccuacgacguccccgacuacgccucccuccgcucccucgucgccuccuccggcacccucgaguucaacaacgaguccuucaacuggaccggcgucacccagaacggcaccuccuccgccugcaagcgccgcuccaacaacuccuucuucucccgccucaacuggcucacccagcucaaguucaaguaccccgcccucaacgucaccaugcccaacaacgagaaguucgacaagcucuacaucuggggcguccaccaccccgucaccgacaacgaccagaucuuccucuacgcccaggccuccggccgcaucaccgucuccaccaagcgcucccagcagaccgucauccccaacaucggcucccgcccccgcguccgcaacauccccucccgcaucuccaucuacuggaccaucgucaagcccggcgacauccuccucaucaacuccaccggcaaccucaucgccccccgcggcuacuucaagauccgcuccggcaaguccuccaucaugcgcuccgacgcccccaucggcaagugcaacuccgagugcaucacccccaacggcuccauccccaacgacaagcccuuccagaacgucaaccgcaucaccuacggcgccugcccccgcuacgucaagcagaacacccucaagcucgccaccggcaugcgcaacguccccgagaagcagacccgcggcaucuucggcgccaucgccggcuucaucgagaacggcugggagggcauggucgacggcugguacggcuuccgccaccagaacuccgagggcaucggccaggccgccgaccucaaguccacccaggccgccaucgaccagaucaacggcaagcucaaccgccucaucggcaagaccaacgagaaguuccaccagaucgagaaggaguucuccgaggucgagggccgcauccaggaccucgagaaguacgucgaggacaccaagaucgaccucugguccuacaacgccgagcuccucgucgcccucgagaaccagcacaccaucgaccucaccgacuccgagaugaacaagcucuucgagaagaccaagaagcagcuccgcgagaacgccgaggacaugggcaacggcugcuucaagaucuaccacaagugcgacaacgccugcaucggcuccauccgcaacggcaccuacgaccacgacgucuaccgcgacgaggcccucaacaaccgcuuccagaucaagggcgucgagcucaaguccggcuacaaggacuggauccucuggaucuccuucgccaucuccugcuuccuccucugcgucgcccuccucggcuucaucaugugggccugccagaagggcaacauccgcugcaacaucugcaucuga

SEQ ID NO: 105177 - RNA, 1698 nt, Artificial Sequence
  derived and/or modified CDS sequence (opt2) from hemagglutinin__InfluenzaA__AFM72521
augaaggucaagcuccucguccuccucugcaccuucaccgccaccuacgccgacaccaucugcaucggcuaccacgccaacaacuccaccgacaccgucgacaccguccucgagaagaacgucaccgucacccacuccgucaaccuccucgagaacucccacaacggccgccucugccuccucaagggcaucgccccccuccagcucggcaacugcuccgucgccggcuggauccucggcaaccccgagugcgagcuccucaucuccaaggaguccugguccuacaucgucgagaagcccaaccccgagaacggcaccugcuaccccggccacuucgccgacuacgaggagcuccgcgagcagcucuccuccgucuccucccucgagcgcuucgagaucuuccccaaggaguccuccuggcccaaccacaccgucaccggcgucuccgccuccugcucccacaacggcgaguccuccuucuaccgcaaccuccucuggcucaccggcaagaacggccucuaccccaaccucuccaaguccuacgccaacaacaaggagaaggagguccucguccucuggggcguccaccacccccccaacaucggcaaccagaaggcccucuaccacaccgagaacgccuacgucuccgucgucuccucccacuacucccgcaaguucacccccgagaucgccaagcgccccaagguccgcgaccaggagggccgcaucaacuacuacuggacccuccucgagcccggcgacaccaucaucuucgaggccaacggcaaccucaucgccccccgcuacgccuucgcccucucccgcggcuucggcuccggcaucaucaacuccaacgcccccauggacaagugcgacgccaagugccagaccccccagggcgccaucaacuccucccuccccuuccagaacguccaccccgucaccaucggcgagugccccaaguacguccgcuccgccaagcuccgcauggucaccggccuccgcaacauccccuccauccagucccgcggccucuucggcgccaucgccggcuucaucgagggcggcuggaccggcauggucgacggcugguacggcuaccaccaccagaacgagcagggcuccggcuacgccgccgaccagaaguccacccagaacgccaucaacggcaucaccaacaaggucaacuccgucaucgagaagaugaacacccaguucaccgccgucggcaaggaguucaacaagcucgagcgccgcauggagaaccucaacaagaaggucgacgacggcuucaucgacaucuggaccuacaacgccgagcuccucguccuccucgagaacgagcgcacccucgacuuccacgacuccaacgucaagaaccucuacgagaaggucaagucccagcucaagaacaacgccaaggagaucggcaacggcugcuucgaguucuaccacaagugcaacgacgagugcauggaguccgucaagaacggcaccuacgacuaccccaaguacuccgaggaguccaagcucaaccgcgagaagaucgacggcgucaagcucgaguccaugggcgucuaccagauccucgccaucuacuccaccgucgccuccucccucguccuccucgucucccucggcgccaucuccuucuggaugugcuccaacggcucccuccagugccgcaucugcaucuga

SEQ ID NO: 105178 - RNA, 1698 nt, Artificial Sequence; identical to SEQ ID NO: 105177
  derived and/or modified CDS sequence (opt2) from hemagglutinin__InfluenzaA__AFM72532

SEQ ID NO: 105179 - RNA, 1698 nt, Artificial Sequence; identical to SEQ ID NO: 105177
  derived and/or modified CDS sequence (opt2) from hemagglutinin__InfluenzaA__AFM72543

SEQ ID NO: 105180 - RNA, 1698 nt, Artificial Sequence
  derived and/or modified CDS sequence (opt2) from hemagglutinin__InfluenzaA__AFM72554
augaaggucaagcuccucguccuccucugcaccuucaccgccaccuacgccgacaccaucugcaucggcuaccacgccaacaacuccaccgacaccgucgacaccguccucgagaagaacgucaccgucacccacuccgucaaccuccucgagaacucccacaacggccgccucugccuccucaagggcaucgccccccuccagcucggcaacugcuccgucgccggcuggauccucggcaaccccgagugcgagcuccucaucuccaaggaguccugguccuacaucgucgagaagcccaaccccgagaacggcaccugcuaccccggccacuucgccgacuacgaggagcuccgcgagcagcucuccuccgucuccucccucgagcgcuucgagaucuuccccaaggaguccuccuggcccaaccacaccgucaccggcgucuccgccuccugcucccacaacggcgaguccuccuucuaccgcaaccuccucuggcucaccggcaagaacggccucuaccccaaccucuccaaguccuacgccaacaacaaggagaaggagguccucguccucuggggcguccaccacccccccaacaucggcaaccagaaggcccucuaccacaccgagaacgccuacgucuccgucgucuccucccacuacucccgcaaguucacccccgagaucgccaagcgccccaagguccgcgaccaggagggccgcaucaacuacuacuggacccuccucgagcccggcgacaccaucaucuucgaggccaacggcaaccucaucgccccccgcuacgccuucgcccucucccgcggcuucggcuccggcaucaucaacuccaacgcccccauggacaagugcgacgccaagugccagaccccccagggcgccaucaacuccucccuccccuuccagaacguccaccccgucaccaucggcgagugccccaaguacguccgcuccgccaagcuccgcauggucaccggccuccgcaacauccccuccauccagucccgcggccucuucggcgccaucgccggcuucaucgagggcggcuggaccggcauggucgacggcugguacggcuaccaccaccagaacgagcagggcuccggcuacgccgccgaccagaaguccacccagaacgccaucaacggcaucaccaacaaggucaacuccgucaucgagaagaugaacacccaguucaccgccgucggcaaggaguucaacaagcucgagcgccgcauggagaaccucaacaagaaggucgacgacggcuucaucgacaucuggaccuacaacgccgagcuccucguccuccucgagaacgagcgcacccucgacuuccacgacuccaacgucaagaaccucuacgagaaggucaagucccagcucaagaacaacgccaaggagaucggcaacggcugcuucgaguucuaccacaagugcaacgacgagugcauggaguccgucaagaacggcaccuacgacuaccccaaguacuccgaggaguccaagcucaaccgcgagaagaucgacgaggucaagcucgaguccaugggcgucuaccagauccucgccaucuacuccaccgucgccuccucccucguccuccucgucucccucggcgccaucuccuucuggaugugcuccaacggcucccuccagugccgcaucugcaucuga

SEQ ID NO: 105181 - RNA, 1701 nt, Artificial Sequence
  derived and/or modified CDS sequence (opt2) from hemagglutinin__InfluenzaA__AFM72565
augaagaccaucaucgcccucuccuacauccucugccucgucuucgcccagaagcuccccggcaacgacaacuccaccgccacccucugccucggccaccacgccguccccaacggcaccaucgucaagaccaucaccaacgaccagaucgaggucaccaacgccaccgagcucguccaguccuccuccaccggcgagaucugcgacuccccccaccagauccucgacggcgagaacugcacccucaucgacgcccuccucggcgacccccagugcgacggcuuccagaacaagaagugggaccucuucgucgagcgcuccaaggccuacuccaacugcuaccccuacgacguccccgacuacgccucccuccgcucccucgucgccuccuccggcacccucgaguucaacaacgaguccuucaacuggaccggcgucacccagaacggcaccuccuccuccugcauccgccgcuccaacaacuccuucuucucccgccucaacuggcucacccaccucaaguucaaguaccccgcccucaacgucaccaugcccaacaacgagaaguucgacaagcucuacaucuggggcguccaccaccccggcaccgacaacgaccagaucuuccccuacgcccaggccuccggccgcaucaccgucuccaccaagcgcucccagcagaccgucauccccaacaucggcucccgcccccgcguccgcaacauccccucccgcaucuccaucuacuggaccaucgucaagcccggcgacauccuccucaucaacuccaccggcaaccucaucgccccccgcggcuacuucaagauccgcuccggcaaguccuccaucaugcgcuccgacgcccccaucggcaagugcaacuccgagugcaucacccccaacggcuccauccccaacgacaagcccuuccagaacgucaaccgcaucaccuacggcgccugcccccgcuacgucaagcagaacacccucaagcucgccaccggcaugcgcaacguccccgagaagcagacccgcggcaucuucggcgccaucgccggcuucaucgagaacggcugggagggcauggucgacggcugguacggcuuccgccaccagaacuccgagggcaucggccaggccgccgaccucaaguccacccaggccgccaucgaccagaucaacggcaagcucaaccgccucaucggcaagaccaacgagaaguuccaccagaucgagaaggaguucuccgaggucgagggccgcauccaggaccucgagaaguacgucgaggacaccaagaucgaccucugguccuacaacgccgagcuccucgucgcccucgagaaccagcacaccaucgaccucaccgacuccgagaugaacaagcucuucgagaagaccaagaagcagcuccgcgagaacgccgaggacaugggcaacggcugcuucaagaucuaccacaagugcgacaacgccugcaucggcuccauccgcaacggcaccuacgaccacgacgucuaccgcgacgaggcccucaacaaccgcuuccagaucaagggcgucgagcucaaguccggcuacaaggacuggauccucuggaucuccuucgccaucuccugcuuccuccucugcgucgcccuccucggcuucaucaugugggccugccagaagggcaacauccgcugcaacaucugcaucuga

SEQ ID NO: 105182 - RNA, 1701 nt, Artificial Sequence
  derived and/or modified CDS sequence (opt2) from hemagglutinin__InfluenzaA__AFM72576
augaagaccaucaucgcccucuccuacauccucugccucgucuucgcccagaagcuccccggcaacgacaacuccaccgccacccucugccucggccaccacgccguccccaacggcaccaucgucaagaccaucaccaacgaccagaucgaggucaccaacgccaccgagcucguccaguccuccuccaccggcgagaucugcgacuccccccaccagauccucgacggcgagaacugcacccucaucgacgcccuccucggcgacccccagugcgacggcuuccagaacaagaagugggaccucuucgucgagcgcuccaaggccuacuccaacugcuaccccuacgacguccccgacuacgccucccuccgcucccucgucgccuccuccggcacccucgaguucaacaacgaguccuucaacuggaccggcgucacccagaacggcaccuccuccuccugcauccgcggcuccaacaacuccuucuucucccgccucaacuggcucacccaccucaaguucaaguaccccgcccucaacgucaccaugcccaacaacgagaaguucgacaagcucuacaucuggggcguccaccaccccggcaccgacaacgaccagaucuuccccuacgcccaggccuccggccgcaucaccgucuccaccaagcgcucccagcagaccgucauccccaacaucggcucccgcccccgcguccgcaacauccccucccgcaucuccaucuacuggaccaucgucaagcccggcgacauccuccucaucaacuccaccggcaaccucaucgccccccgcggcuacuucaagauccgcuccggcaaguccuccaucaugcgcuccgacgcccccaucggcaagugcaacuccgagugcaucacccccaacggcuccauccccaacgacaagcccuuccagaacgucaaccgcaucaccuacggcgccugcccccgcuacgucaagcagaacacccucaagcucgccaccggcaugcgcaacguccccgagaagcagacccgcggcaucuucggcgccaucgccggcuucaucgagaacggcugggagggcauggucgacggcugguacggcuuccgccaccagaacuccgagggcaucggccaggccgccgaccucaaguccacccaggccgccaucgaccagaucaacggcaagcucaaccgccucaucggcaagaccaacgagaaguuccaccagaucgagaaggaguucuccgaggucgagggccgcauccaggaccucgagaaguacgucgaggacaccaagaucgaccucugguccuacaacgccgagcuccucgucgcccucgagaaccagcacaccaucgaccucaccgacuccgagaugaacaagcucuucgagaagaccaagaagcagcuccgcgagaacgccgaggacaugggcaacggcugcuucaagaucuaccacaagugcgacaacgccugcaucggcuccauccgcaacggcaccuacgaccacgacgucuaccgcgacgaggcccucaacaaccgcuuccagaucaagggcgucgagcucaaguccggcuacaaggacuggauccucuggaucuccuucgccaucuccugcuuccuccucugcgucgcccuccucggcuucaucaugugggccugccagaagggcaacauccgcugcaacaucugcaucuga

SEQ ID NO: 105183 - RNA, 1698 nt, Artificial Sequence
  derived and/or modified CDS sequence (opt2) from hemagglutinin__InfluenzaA__AFM72799
augaaggucaagcuccucguccuccucugcaccuucaccgccaccuacgccgacaccaucugcaucggcuaccacgccaacaacuccaccgacaccgucgacaccguccucgagaagaacgucaccgucacccacuccgucaaccuccucgaggacaaccacaacggcaagcucugccuccucaagggcaaggccccccuccagcucggcaacugcuccgucgccggcuggauccucggcaaccccgagugcggccuccucaucuccaaggaguccugguccuacaucgucgagcgccccaaccccgagaacggcaccugcuaccccggccacuucgccgacuacgaggagcuccgcgagcagcucuccuccgucuccuccuucgagcgcuucgagaucuuccccaaggaguccuccuggcccaaccacaccgucaccggcgucuccgccuccugcucccacaacggcgaguccuccuucuacaagaaccuccucuggcucaccggcaagaacggccucuaccccaaccucuccaaguccuacgccaacaacaaggagaaggagguccucguccucuggggcguccaccacccccccaacaucggcaaccagaugacccucuaccacaaggagaacgccuacgucuccgucgucuccucccacuacucccgcaaguucacccccgagaucgccaagcgccccaagguccgcgaccaggagggccgcaucaacuacuacuggacccuccucgagcccggcgacaccaucaucuucgaggccaacggcaaccucaucgccccccgcuacgccuucgcccucucccgcggcuucggcuccggcaucaucaacuccaacgcccccauggacgagugcgacgccaagugccagaccccccagggcgccaucaacuccucccuccccuuccagaacguccaccccgucaccaucggcgagugccccaaguacguccgcuccgccaagcuccgcauggucaccggccuccgcaacauccccuccauccagucccgcggccucuucggcgccaucgccggcuucaucgagggcggcuggaccggcauggucgacggcugguacggcuaccaccaccagaacgagcagggcuccggcuacgccgccgaccagaaguccacccagaacgccaucaacggcaucaccaacaaggucaacuccgucaucgagaagaugaacacccaguucaccgccgucggcaaggaguucaacaagcucgagcgccgcauggagaaccucaacaagaaggucgacgacggcuucaucgacgucuggaccuacaacgccgagcuccucguccuccucgagaacgagcgcacccucgacuuccacgacuccaacgucaagaaccucuacgagaaggucaagaaccagcucaagaacaacgccaaggagaucggcaacggcugcuucgaguucuaccacaagugcaacgacgagugcauggaguccgucaagaacggcaccuacgacuaccccaaguacuccgaggaguccaagcucucccgcgagaagaucgacggcgucaagcucgaguccaugggcgucuaccagauccucgccaucuacuccaccgucgccuccucccucguccuccucgucucccucggcgccaucuccuucuggaugugcuccaacggcucccuccagugccgcaucugcaucuga

SEQ ID NO: 105184 - RNA, 1698 nt, Artificial Sequence; identical to SEQ ID NO: 105183
  derived and/or modified CDS sequence (opt2) from hemagglutinin__InfluenzaA__AFM72810

SEQ ID NO: 105185 - RNA, 1698 nt, Artificial Sequence; identical to SEQ ID NO: 105183
  derived and/or modified CDS sequence (opt2) from hemagglutinin__InfluenzaA__AFM72821

SEQ ID NO: 105186 - RNA, 1701 nt, Artificial Sequence
  derived and/or modified CDS sequence (opt2) from hemagglutinin__InfluenzaA__AFM72852
augaaggccauccucgucguccuccucuacaccuucgccaccgccaacgccgacacccucugcaucggcuaccacgccaacaacuccaccgacaccgucgacaccguccucgagaagaacgucaccgucacccacuccgucaaccuccucgaggacaagcacaacggcaagcucugcaagcuccgcggcgucgccccccuccaccucggcaagugcaacaucgccggcuggauccucggcaaccccgagugcgagucccucuccaccgccuccuccugguccuacaucgucgagacccccuccuccgacaacggcaccugcuaccccggcgacuucaucgacuacgaggagcuccgcgagcagcucuccuccgucuccuccuucgagcgcuucgagaucuuccccaagaccuccuccuggcccaaccacgacuccgacaagggcgucaccgccgccugcccccacgccggcgccaaguccuucuacaagaaccucaucuggcucgucaagaagggcaacuccuaccccaagcucuccaaguccuacaucaacgacaagggcaaggagguccucguccucuggggcauccaccaccccuccaccuccgccgaccagcagucccucuaccagaacgccgacgccuacgucuucgucggcuccucccgcuacuccaagaccuucaagcccgagaucgccauccgccccaagguccgcgaccgcgagggccgcaugaacuacuacuggacccucgucgagcccggcgacaagaucaccuucgaggccaccggcaaccucgucgucccccgcuacgccuucgccauggagcgcaacgccggcuccggcaucaucaucuccgacacccccguccacgacugcaacaccaccugccagacccccaagggcgccaucaacaccucccuccccuuccagaacauccaccccaucaccaucggcaagugccccaaguacgucaaguccaccaagcuccgccucgccaccggccuccgcaacauccccuccauccagucccgcggccucuucggcgccaucgccggcuucaucgagggcggcuggaccggcauggucgacggcugguacggcuaccaccaccagaacgagcagggcuccggcuacgccgccgaccucaaguccacccagaacgccaucgacgagaucaccaacaaggucaacuccgucaucgagaagaugaacacccaguucaccgccgucggcaaggaguucaaccaccucgagaagcgcaucgagaaccucaacaagaaggucgacgacggcuuccucgacaucuggaccuacaacgccgagcuccucguccuccucgagaacgagcgcacccucgacuaccacgacuccaacgucaagaaccucuacgagaagguccgcucccagcucaagaacaacgccaaggagaucggcaacggcugcuucgaguucuaccacaagugcgacaacaccugcauggaguccgucaagaacggcaccuacgacuaccccaaguacuccgaggaggccaagcucaaccgcgaggagaucgacggcgucaagcucgaguccacccgcaucuaccagauccucgccaucuacuccaccgucgccuccucccucguccucgucgucucccucggcgccaucuccuucuggaugugcuccaacggcucccuccagugccgcaucugcaucuga

SEQ ID NO: 105187 - RNA, 1701 nt, Artificial Sequence
  derived and/or modified CDS sequence (opt2) from hemagglutinin__InfluenzaA__AFM72862
augaaggccauccucgucguccuccucuacaccuucgccaccgccaacgccgacacccucugcaucggcuaccacgccaacaacuccaccgacaccgucgacaccguccucgagaagaacgucaccgucacccacuccgucaaccuccucgaggacaagcacaacggcaagcucugcaagcuccgcggcgucgccccccuccaccucggcaagugcaacaucgccggcuggauccucggcaaccccgagugcgagucccucuccaccgccuccuccugguccuacaucgucgagacccccuccuccgacaacggcaccugcuaccccggcgacuucaucgacuacgaggagcuccgcgagcagcucuccuccgucuccuccuucgagcgcuucgagaucuuccccaagaccuccuccuggcccaaccacgacuccaacaagggcgucaccgccgccugcccccacgccggcgccaaguccuucuacaagaaccucaucuggcucgucaagaagggcaacuccuaccccaagcucuccaacuccuacaucaacgacaagggcaaggagguccucguccucuggggcauccaccaccccuccaccuccgccgaccagcagucccucuaccagaacgccgacgccuacgucuucgucggcuccucccgcuacuccaagaccuucaagcccgagaucgccauccgccccaagguccgcgaccgcgagggccgcaugaacuacuacuggacccucgucgagcccggcgacaagaucaccuucgaggccaccggcaaccucgucgucccccgcuacgccuucgccauggagcgcaacgccggcuccggcaucaucaucuccgacacccccguccacgacugcaacaccaccugccagacccccaagggcgccaucaacaccucccuccccuuccagaacauccaccccaucaccaucggcaagugccccaaguacgucaaguccaccaagcuccgccucgccaccggccuccgcaacauccccuccauccagucccgcggccucuucggcgccaucgccggcuucaucgagggcggcuggaccggcauggucgacggcugguacggcuaccaccaccagaacgagcagggcuccggcuacgccgccgaccucaaguccacccagaacgccaucgacgagaucaccaacaaggucaacuccgucaucgagaagaugaacacccaguucaccgccgucggcaaggaguucaaccaccucgagaagcgcaucgagaaccucaacaagaaggucgacgacggcuuccucgacaucuggaccuacaacgccgagcuccucguccuccucgagaacgagcgcacccucgacuaccacgacuccaacgucaagaaccucuacgagaagguccgcucccagcucaagaacaacgccaaggagaucggcaacggcugcuucgaguucuaccacaagugcgacaacaccugcauggaguccgucaagaacggcaccuacgacuaccccaaguacuccgaggaggccaagcucaaccgcgaggagaucgacggcgucaagcucgaguccacccgcaucuaccagauccucgccaucuacuccaccgucgccuccucccucguccucgucgucucccucggcgccaucuccuucuggaugugcuccaacggcucccuccagugccgcaucugcaucuga

SEQ ID NO: 105188 - RNA, 1701 nt, Artificial Sequence
  derived and/or modified CDS sequence (opt2) from hemagglutinin__InfluenzaA__AFM72872
augaagaccaucaucgcccucuccuacacccucugccucgucuucgcccagaagcuccccggcaacgacaacuccaccgccacccucugccucggccaccacgccguccccaacggcaccaucgucaagaccaucaccaacgaccagaucgaggucaccaacgccaccgagcucguccaguccuccuccaccggcgagaucugcgacuccccccaccagauccucgacggcaagaacugcacccucaucgacgcccuccucggcgacccccagugcgacggcuuccagaacaagaagugggaccucuucgucgagcgcuccaaggccuacuccaacugcuaccccuacgacguccccgacuacgccucccuccgcucccucgucgccuccuccggcacccucgaguucaacaacgaguccuucaacuggaccggcgucacccagaacggcaccuccuccgccugcauccgccgcuccaagaacuccuucuucucccgccucaacuggcucacccaccucaacuucaaguaccccgcccucaacgucaccaugcccaacaacgagcaguucgacaagcucuacaucuggggcguccaccaccccggcaccgacaaggaccagaucuuccccuacgcccaggccuccggccgcaucaccgucuccaccaagcgcucccagcagaccgccauccccaacaucggcucccgcccccgcguccgcaacauccccucccgcaucuccaucuacuggaccaucgucaagcccggcgacauccuccucaucaacuccaccggcaaccucaucgccccccgcggcuacuucaagauccgcuccggcaaguccuccaucaugcgcuccgacgcccccaucggcaagugcaacuccgagugcaucacccccaacggcuccauccccaacgacaagcccuuccagaacgucaaccgcaucaccuacggcgccugcccccgcuacgucaagcagaacacccucaagcucgccaccggcaugcgcaacguccccgagaagcagacccgcggcaucuucggcgccaucgccggcuucaucgagaacggcugggagggcauggucgacggcugguacggcuuccgccaccagaacuccgagggccgcggccaggccgccgaccucaaguccacccaggccgccaucgaccagaucaacggcaagcucaaccgccucaucggcaagaccaacgagaaguuccaccagaucgagaaggaguucuccgaggucgagggccgcauccaggaccucgagaaguacgucgaggacaccaagaucgaccucugguccuacaacgccgagcuccucgucgcccucgagaaccagcacaccaucgaccucaccgacuccgagaugaacaagcucuucgagaagaccaagaagcagcuccgcgagaacgccgaggacaugggcaacggcugcuucaagaucuaccacaagugcgacaacgccugcaucggcuccauccgcaacggcaccuacgaccacgacgucuaccgcgacgaggcccucaacaaccgcuuccagaucaagggcgucgagcucaaguccggcuacaaggacuggauccucuggaucuccuucgccaucuccugcuuccuccucugcgucgcccuccucggcuucaucaugugggccugccagaagggcaacauccgcugcaacaucugcaucuga

SEQ ID NO: 105189 - RNA, 1701 nt, Artificial Sequence
  derived and/or modified CDS sequence (opt2) from hemagglutinin__InfluenzaA__AFM72883
augaagaccaucaucgcccucuccuacauccucugccucgucuucgcccagaagcuccccggcaacgacaacuccaccgccacccucugccucggccaccacgccguccccaacggcaccaucgucaagaccaucaccaacgaccagaucgaggucaccaacgccaccgagcucguccagaacuccuccaccggcgagaucugcgacuccccccaccagauccucgacggcaagaacugcacccucaucgacgcccuccucggcgacccccagugcgacggcuuccagaacaagaagugggaccucuucgucgagcgcuccaaggccuacuccaacugcuaccccuacgacguccccgacuacgccucccuccgcucccucgucgccuccuccggcacccucgaguucaacaacgaguccuucaacuggaccggcgucacccagaacggcaccuccuccgccugcauccgccgcuccaagaacuccuucuucucccgccucaacuggcucacccaccucaacuucaaguaccccgcccucaacgucaccaugcccaacaacgagcaguucgacaagcucuacaucuggggcguccaccaccccgucaccgacaaggaccagaucuuccucuacgcccaggccuccggccgcaucaccgucuccaccaagcgcucccagcagaccgucauccccaacaucggcucccgcccccgcguccgcaacauccccacccgcaucuccaucuacuggaccaucgucaagcccggcgacauccuccucaucaacuccaccggcaaccucaucgccccccgcggcuacuucaagaugcaguccggcaaguccuccaucaugcgcuccgacgcccccaucggcaagugcaacuccgagugcaucacccccaacggcuccauccccaacgacaagcccuuccagaacgucaaccgcaucaccuacggcgccugcccccgcuacgucaagcagaacacccucaagcucgccaccggcaugcgcaacguccccgagaagcagacccgcggcaucuucggcgccaucgccggcuucaucgagaacggcugggagggcauggucgacggcugguacggcuuccgccaccagaacuccgagggccgcggccaggccgccgaccucaaguccacccaggccgccaucgaccagaucaacggcaagcucaaccgccucaucggcaagaccaacgagaaguuccaccagaucgagaaggaguucuccgaggucgagggccgcauccaggaccucgagaaguacgucgaggacaccaagaucgaccucugguccuacaacgccgagcuccucgucgcccucgagaaccagcacaccaucgaccucaccgacuccgagaugaacaagcucuucgagaagaccaagaagcagcuccgcgagaacgccgaggacaugggcaacggcugcuucaagaucuaccacaagugcgacaacgccugcaucggcuccauccgcaacggcaccuacgaccacaacgucuaccgcgacgaggcccucaacaaccgcuuccagaucaagggcgucgagcucaaguccggcuacaaggacuggauccucuggaucuccuucgccaucuccugcuuccuccucugcgucgcccuccucggcuucaucaugugggccugccagaagggcaacauccgcugcaacaucugcaucuga

SEQ ID NO: 105190 - RNA, 1701 nt, Artificial Sequence
  derived and/or modified CDS sequence (opt2) from hemagglutinin__InfluenzaA__AFM72894
augaagaccaucaucgcccucuccuacauccucugccucgucuucgcccagaagcuccccggcaacgacaacuccaccgccacccucugccucggccaccacgccguccccaacggcaccaucgucaagaccaucaccaacgaccagaucgaggucaccaacgccaccgagcucguccagaacuccuccaccggcgagaucugcgacuccccccaccagauccucgacggcaagaacugcacccucaucgacgcccuccucggcgacccccagugcgacggcuuccagaacaagaagugggaccucuucgucgagcgcuccaaggccuacuccaacugcuaccccuacgacguccccgacuacgccucccuccgcucccucgucgccuccuccggcacccucgaguucaacaacgaguccuucaacuggaccggcgucacccagaacggcaccuccuccgccugcauccgccgcuccaagaacuccuucuucucccgccucaacuggcucacccagcucaacuucaaguaccccgcccucaacgucaccaugcccaacaacgagcaguucgacaagcucuacaucuggggcguccaccaccccgucaccgacaaggaccagaucuuccucuacgcccaggccuccggccgcaucaccgucuccaccaagcgcucccagcagaccgucauccccaacaucggcucccgcccccgcguccgcaacauccccucccgcaucuccaucuacuggaccaucgucaagcccggcgacauccuccucaucaacuccaccggcaaccucaucgccccccgcggcuacuucaagaugcaguccggcaaguccuccaucaugcgcuccgacgcccccaucggcaagugcaacuccgagugcaucacccccaacggcuccauccccaacgacaagcccuuccagaacgucaaccgcaucaccuacggcgccugcccccgcuacgucaagcagaacacccucaagcucgccaccggcaugcgcaacguccccgagaagcagacccgcggcaucuucggcgccaucgccggcuucaucgagaacggcugggagggcauggucgacggcugguacggcuuccgccaccagaacuccgagggccgcggccaggccgccgaccucaaguccacccaggccgccaucgaccagaucaacggcaagcucaaccgccucaucggcaagaccaacgagaaguuccaccagaucgagaaggaguucuccgaggucgagggccgcauccaggaccucgagaaguacgucgaggacaccaagaucgaccucugguccuacaacgccgagcuccucgucgcccucgagaaccagcacaccaucgaccucaccgacuccgagaugaacaagcucuucgagaagaccaagaagcagcuccgcgagaacgccgaggacaugggcaacggcugcuucaagaucuaccacaagugcgacaacgccugcaucggcuccauccgcaacggcaccuacgaccacaacgucuaccgcgacgaggcccucaacaaccgcuuccagaucaagggcgucgagcucaaguccggcuacaaggacuggauccucuggaucuccuucgccaucuccugcuuccuccucugcgucgcccuccucggcuucaucaugugggccugccagaagggcaacauccgcugcaacaucugcaucuga

SEQ ID NO: 105191 - RNA, 1701 nt, Artificial Sequence
  derived and/or modified CDS sequence (opt2) from hemagglutinin__InfluenzaA__AFM72916
augaagaccaucaucgcccucuccuacauccucugccucgucuucgcccagaagauccccggcaacgacaacuccaccgccacccucugccucggccaccacgccguccccaacggcaccaucgucaagaccaucaccaacgaccagaucgaggucaccaacgccaccgagcucguccaguccuccuccaccggcgagaucugcgacuccccccaccagauccucgacggcaagaacugcacccucaucgacgcccuccucggcgacccccagugcgacggcuuccagaacaagaagugggaccucuucgucgagcgcuccaaggccuacuccaacugcuaccccuacgacguccccgacuacgccucccuccgcucccucgucgccuccuccggcacccucgaguucaacaacgaguccuucaacuggaccggcgucacccagaacggcaccuccuccgccugcauccgccgcuccaagaacuccuucuucucccgccucaacuggcucacccaccucaacuucaaguaccccgcccucaacgucaccaugcccaacaacgagcaguucgacaagcucuacaucuggggcguccaccaccccggcaccgacaaggaccagaucuuccccuacgcccaggccuccggccgcaucaccgucuccaccaagcgcucccagcagaccgccauccccaacaucggcucccgcccccgcguccgcaacauccccucccgcaucuccaucuacuggaccaucgucaagcccggcgacauccuccucaucaacuccaccggcaaccucaucgccccccgcggcuacuucaagauccgcuccggcaaguccuccaucaugcgcuccgacgcccccaucggcaagugcaacuccggcugcaucacccccaacggcuccauccccaacgacaagcccuuccagaacgucaaccgcaucaccuacggcgccugcccccgcuacgucaagcagaacacccucaagcucgccaccggcaugcgcaacguccccgagaagcagacccgcggcaucuucggcgccaucgccggcuucaucgagaacggcugggagggcauggucgacggcugguacggcuuccgccaccagaacuccgagggccgcggccaggccgccgaccucaaguccacccaggccgccaucgaccagaucaacggcaagcucaaccgccucaucggcaagaccaacgagaaguuccaccagaucgagaaggaguucuccgaggucgagggccgcauccaggaccucgagaaguacgucgaggacaccaagaucgaccucugguccuacaacgccgagcuccucgucgcccucgagaaccagcacaccaucgaccucaccgacuccgagaugaacaagcucuucgagaagaccaagaagcagcuccgcgagaacgccgaggacaugggcaacggcugcuucaagaucuaccacaagugcgacaacgccugcaucggcuccauccgcaacggcaccuacgaccacgacgucuaccgcgacgaggcccucaacaaccgcuuccagaucaagggcgucgagcucaaguccggcuacaaggacugguuccucuggaucuccuucgccaucuccugcuuccuccucugcgucgcccuccucggcuucaucaugugggccugccagaagggcaacauccgcugcaacaucugcaucuga

SEQ ID NO: 105192 - RNA, 1701 nt, Artificial Sequence
  derived and/or modified CDS sequence (opt2) from hemagglutinin__InfluenzaA__AFM72927
augaagaccaucaucgcccucuccuacauccucugccucgucuucgcccagaagcuccccggcaacgacaacuccaccgccacccucugccucggccaccacgccguccccaacggcaccaucgucaagaccaucaccaacgaccagaucgaggucaccaacgccaccgagcucguccaguccuccuccaccggcgagaucugcgacuccccccaccagauccucgacggcgagaacugcacccucaucgacgcccuccucggcgacccccagugcgacggcuuccagaacaagaagugggaccucuucgucgagcgcuccaaggccuacuccaacugcuaccccuacgacguccccgacuacgccucccuccgcucccucgucgccuccuccggcacccucgaguucaacaacgaguccuucaacuggaccggcgucacccagaacggcaccuccuccgccugcauccgccgcuccaacaacuccuucuucucccgccucaacuggcucacccaccucaaguucaaguaccccgcccucaacgucaccaugcccaacaacgagcaguucgacaagcucuacaucuggggcguccaccaccccggcaccgacaacgaccagaccucccucuacgcccaggccuccggccgcaucaccgucuccaccaagcgcucccagcagaccgucauccccaacaucggcucccgcccccgcguccgcaacauccccucccgcaucuccaucuacuggaccaucgucaagcccggcgacauccuccucaucaacuccaucggcaaccucaucgccccccgcggcuacuucaagauccgcuccggcaaguccuccaucaugcgcuccgacgcccccaucggcaagugcaacuccgagugcaucacccccaacggcuccauccccaacgacaagcccuuccagaacgucaaccgcaucaccuacggcgccugcccccgcuacgucaagcagaacacccucaagcucgccaccggcaugcgcaacguccccgagaagcagacccgcggcaucuucggcgccaucgccggcuucaucgagaacggcugggagggcauggucgacggcugguacggcuuccgccaccagaacuccgagggccgcggccaggccgccgaccucaaguccacccaggccgccaucgaccagaucaacggcaagcucaaccgccucaucggcaagaccaacgagaaguuccaccagaucgagaaggaguucuccgaggucgagggccgcauccaggaccucgagaaguacgucgaggacaccaagaucgaccucugguccuacaacgccgagcuccucgucgcccucgagaaccagcacaccaucgaccucaccgacuccgagaugaacaagcucuucgagaagaccaagaagcagcuccgcgagaacgccgaggacaugggcaacggcugcuucaagaucuaccacaagugcgacaacgccugcaucggcuccauccgcaacggcaccuacgaccacaacgucuaccgcgacgaggcccucaacaaccgcuuccagaucaagggcgucgagcucaaguccggcuacaaggacuggauccucuggaucuccuucgccaucuccugcuuccuccucugcgucgcccuccucggcuucaucaugugggccugccagaagggcaacauccgcugcaacaucugcaucuga

SEQ ID NO: 105193 - RNA, 1701 nt, Artificial Sequence
  derived and/or modified CDS sequence (opt2) from hemagglutinin__InfluenzaA__AFM72938
augaagaccaucaucgcccucuccuacauccucugccucgucuucgcccagaagcuccccggcaacgacaacuccaccgccacccucugccucggccaccacgccguccccaacggcaccaucgucaagaccaucaccaacgaccagaucgaggucaccaacgccaccgagcucguccaguccuccuccaccggcgagaucugcgacuccccccaccagauccucgacggcgagaacugcacccucaucgacgcccuccucggcgacccccagugcgacggcuuccagaacaagaagugggaccucuucgucgagcgcuccaaggccuacuccaacugcuaccccuacgacguccccgacuacgccucccuccgcucccucgucgccuccuccggcacccucgaguucaacaacgaguccuucaacuggaccggcgucacccagaacggcaccuccuccgccugcauccgccgcuccaacaacuccuucuucucccgccucaacuggcucacccaccucaaguucaaguaccccgcccucaacgucaccaugcccaacaacgagcaguucgacaagcucuacaucuggggcguccaccaccccggcaccgacaacgaccagaccucccucuacgcccaggccuccggccgcaucaccgucuccaccaagcgcucccagcagaccgucauccccaacaucggcucccgcccccgcguccgcaacaaccccucccgcaucuccaucuacuggaccaucgucaagcccggcgacauccuccucaucaacuccaucggcaaccucaucgccccccgcggcuacuucaagauccgcuccggcaaguccuccaucaugcgcuccgacgcccccaucggcaagugcaacuccgagugcaucacccccaacggcuccauccccaacgacaagcccuuccagaacgucaaccgcaucaccuacggcgccugcccccgcuacgucaagcagaacacccucaagcucgccaccggcaugcgcaacguccccgagaagcagacccgcggcaucuucggcgccaucgccggcuucaucgagaacggcugggagggcauggucgacggcugguacggcuuccgccaccagaacuccgagggccgcggccaggccgccgaccucaaguccacccaggccgccaucgaccagaucaacggcaagcucaaccgccucaucggcaagaccaacgagaaguuccaccagaucgagaaggaguucuccgaggucgagggccgcauccaggaccucgagaaguacgucgaggacaccaagaucgaccucugguccuacaacgccgagcuccucgucgcccucgagaaccagcacaccaucgaccucaccgacuccgagaugaacaagcucuucgagaagaccaagaagcagcuccgcgagaacgccgaggacaugggcaacggcugcuucaagaucuaccacaagugcgacaacgccugcaucggcuccauccgcaacggcaccuacgaccacaacgucuaccgcgacgaggcccucaacaaccgcuuccagaucaagggcgucgagcucaaguccggcuacaaggacuggauccucuggaucuccuucgccaucuccugcuuccuccucugcgucgcccuccucggcuucaucaugugggccugccagaagggcaacauccgcugcaacaucugcaucuga

SEQ ID NO: 105194 - RNA, 1701 nt, Artificial Sequence
  derived and/or modified CDS sequence (opt2) from hemagglutinin__InfluenzaA__AFM72949
augaagaccaucaucgcccucuccuacauccucugccucgucuucgcccagaagcuccccggcaacgacaacuccaccgccacccucugccucggccaccacgccguccccaacggcaccaucgucaagaccaucaccaacgaccagaucgaggucaccaacgccaccgagcucguccaguccuccuccaccggcgagaucugcgacuccccccaccagauccucgacggcgagaacugcacccucaucgacgcccuccucggcgacccccagugcgacggcuuccagaacaagaagugggaccucuucgucgagcgcuccaaggccuacuccaacugcuaccccuacgacguccccgacuacgccucccuccgcucccucgucgccuccuccggcacccucgaguucaacaacgaguccuucaacuggaccggcgucacccagaacggcaccuccuccgccugcauccgccgcuccaacaacuccuucuucucccgccucaacuggcucacccagcucaaguucaaguaccccgcccucaacgucaccaugcccaacaacgagcaguucgacaagcucuacaucuggggcguccaccaccccggcaccgacaacgaccagaccucccucuacgcccaggccuccggccgcaucaccgucuccaccaagcgcucccagcagaccgucauccccaacaucggcucccgcccccgcguccgcaacaaccccucccgcaucuccaucuacuggaccaucgucaagcccggcgacauccuccucaucaacuccaucggcaaccucaucgccccccgcggcuacuucaagauccgcuccggcaaguccuccaucaugcgcuccgacgcccccaucggcaagugcaacuccgagugcaucacccccaacggcuccauccccaacgacaagcccuuccagaacgucaaccgcaucaccuacggcgccugcccccgcuacgucaagcagaacacccucaagcucgccaccggcaugcgcaacguccccgagaagcagacccgcggcaucuucggcgccaucgccggcuucaucgagaacggcugggagggcauggucgacggcugguacggcuuccgccaccagaacuccgagggccgcggccaggccgccgaccucaaguccacccaggccgccaucgaccagaucaacggcaagcucaaccgccucaucggcaagaccaacgagaaguuccaccagaucgagaaggaguucuccgaggucgagggccgcauccaggaccucgagaaguacgucgaggacaccaagaucgaccucugguccuacaacgccgagcuccucgucgcccucgagaaccagcacaccaucgaccucaccgacuccgagaugaacaagcucuucgagaagaccaagaagcagcuccgcgagaacgccgaggacaugggcaacggcugcuucaagaucuaccacaagugcgacaacgccugcaucggcuccauccgcaacggcaccuacgaccacaacgucuaccgcgacgaggcccucaacaaccgcuuccagaucaagggcgucgagcucaaguccggcuacaaggacuggauccucuggaucuccuucgccaucuccugcuuccuccucugcgucgcccuccucggcuucaucaugugggccugccagaagggcaacauccgcugcaacaucugcaucuga

SEQ ID NO: 105195 - RNA, 1701 nt, Artificial Sequence
  derived and/or modified CDS sequence (opt2) from hemagglutinin__InfluenzaA__AFM72960
augaagaccaucaucgcccucuccuacauccucugccucgucuucgcccagaagcuccccggcaacgacaacuccaccgccacccucugccucggccaccacgccguccccaacggcaccaucgucaagaccaucaccaacgaccagaucgaggucaccaacgccaccgagcucguccaguccuccuccaccggcgagaucugcgacuccccccaccagauccucgacggcgagaacugcacccucaucgacgcccuccucggcgacccccagugcgacggcuuccagaacaagaagugggaccucuucgucgagcgcuccaaggccuacuccaacugcuaccccuacgacguccccgacuacgccucccuccgcucccucgucgccuccuccggcacccucgaguucaacaacgaguccuucaaguggaccggcgucacccagaacggcaccuccuccgccugcauccgccgcuccaacaacuccuucuucucccgccucaacuggcucacccaccucaaguucaaguaccccgcccucaacgucaccaugcccaacaacgagcaguucgacaagcucuacaucuggggcguccaccaccccggcaccgacaacgaccagaccucccucuacgcccaggccuccggccgcaucaccgucuccaccaagcgcucccagcagaccgucauccccaacaucggcucccgcccccgcguccgcaacauccccucccgcaucuccaucuacuggaccaucgucaagcccggcgacauccuccucaucaacuccaucggcaaccucaucgccccccgcggcuacuucaagauccgcuccggcaaguccuccaucaugcgcuccgacgcccccaucggcaagugcaacuccgagugcaucacccccaacggcuccauccccaacgacaagcccuuccagaacgucaaccgcaucaccuacggcgccugcccccgcuacgucaagcagaacacccucaagcucgccaccggcaugcgcaacguccccgagaagcagacccgcggcaucuucggcgccaucgccggcuucaucgagaacggcugggagggcauggucgacggcugguacggcuuccgccaccagaacuccgagggccgcggccaggccgccgaccucaaguccacccaggccgccaucgaccagaucaacggcaagcucaaccgccucaucggcaagaccaacgagaaguuccaccagaucgagaaggaguucuccgaggucgagggccgcauccaggaccucgagaaguacgucgaggacaccaagaucgaccucugguccuacaacgccgagcuccucgucgcccucgagaaccagcacaccaucgaccucaccgacuccgagaugaacaagcucuucgagaagaccaagaagcagcuccgcgagaacgccgaggacaugggcaacggcugcuucaagaucuaccacaagugcgacaacgccugcaucggcuccauccgcaacggcaccuacgaccacaacgucuaccgcgacgaggcccucaacaaccgcuuccagaucaagggcgucgagcucaaguccggcuacaaggacuggauccucuggaucuccuucgccaucuccugcuuccuccucugcgucgcccuccucggcuucaucaugugggccugccagaagggcaacauccgcugcaacaucugcaucuga

SEQ ID NO: 105196 - RNA, 1701 nt, Artificial Sequence
  derived and/or modified CDS sequence (opt2) from hemagglutinin__InfluenzaA__AFM72971
augaagaccaucaucgcccucuccuacauccucugccucgucuucgcccagaagcuccccggcaacgacaacuccaccgccacccucugccucggccaccacgccguccccaacggcaccaucgucaagaccaucaccaacgaccagaucgaggucaccaacgccaccgagcucguccaguccuccuccaccggcgagaucugcgacuccccccaccagauccucgacggcgagaacugcacccucaucgacgcccuccucggcgacccccagugcgacggcuuccagaacaagaagugggaccucuucgucgagcgcuccaaggccuacuccaacugcuaccccuacgacguccccgacuacgccucccuccgcucccucgucgccuccuccggcacccucgaguucaacaacgaguccuucaaguggaccggcgucacccagaacggcaccuccuccgccugcauccgccgcuccaacaacuccuucuucucccgccucaacuggcucacccagcucaacuucaaguaccccgcccucaacgucaccaugcccaacaacgagcaguucgacaagcucuacaucuggggcguccaccaccccggcaccgacaacgaccagaccucccucuacgcccaggccuccggccgcaucaccgucuccaccaagcgcucccagcagaccgucauccccaacaucggcucccgcccccgcguccgcaacauccccucccgcaucuccaucuacuggaccaucgucaagcccggcgacauccuccucaucaacuccaucggcaaccucaucgccccccgcggcuacuucaagauccgcuccggcaaguccuccaucaugcgcuccgacgcccccaucggcaagugcaacuccgagugcaucacccccaacggcuccauccccaacgacaagcccuuccagaacgucaaccgcaucaccuacggcgccugcccccgcuacgucaagcagaacacccucaagcucgccaccggcaugcgcaacguccccgagaagcagacccgcggcaucuucggcgccaucgccggcuucaucgagaacggcugggagggcauggucgacggcugguacggcuuccgccaccagaacuccgagggccgcggccaggccgccgaccucaaguccacccaggccgccaucgaccagaucaacggcaagcucaaccgccucaucggcaagaccaacgagaaguuccaccagaucgagaaggaguucuccgaggucgagggccgcauccaggaccucgagaaguacgucgaggacaccaagaucgaccucugguccuacaacgccgagcuccucgucgcccucgagaaccagcacaccaucgaccucaccgacuccgagaugaacaagcucuucgagaagaccaagaagcagcuccgcgagaacgccgaggacaugggcaacggcugcuucaagaucuaccacaagugcgacaacgccugcaucggcuccauccgcaacggcaccuacgaccacaacgucuaccgcgacgaggcccucaacaaccgcuuccagaucaagggcgucgagcucaaguccggcuacaaggacuggauccucuggaucuccuucgccaucuccugcuuccuccucugcgucgcccuccucggcuucaucaugugggccugccagaagggcaacauccgcugcaacaucugcaucuga

SEQ ID NO: 105197 - RNA, 1701 nt, Artificial Sequence
  derived and/or modified CDS sequence (opt2) from hemagglutinin__InfluenzaA__AFM72982
augaagaccaucaucgcccucuccuacauccucugccucgucuucgcccagaagcuccccggcaacgacaacuccaccgccacccucugccucggccaccacgccguccccaacggcaccaucgucaagaccaucaccaacgaccagaucgaggucaccaacgccaccgagcucguccaguccuccuccaccggcgagaucugcgacuccccccaccagauccucgacggcgagaacugcacccucaucgacgcccuccucggcgacccccagugcgacggcuuccagaacaagaagugggaccucuucgucgagcgcuccaaggccuacuccaacugcuaccccuacgacguccccgacuacgccucccuccgcucccucgucgccuccuccggcacccucgaguucaacuccgaguccuucaacuggaccggcgucacccagaacggcaccuccuccgccugcauccgccgcuccaacaacuccuucuucucccgccucaacuggcucacccaccucaacuucaaguaccccgcccucaacgucaccaugcccaacaacgagcaguucgacaagcucuacaucuggggcguccaccaccccggcaccgacaaggaccagaucuuccccuacgcccaggccuccggccgcaucaccgucuccaccaagcgcucccagcaggccgucauccccaacaucggcucccgcccccgcguccgcaacauccccucccgcaucuccaucuacuggaccaucgucaagcccggcgacauccuccucaucaacuccaccggcaaccucaucgccccccgcggcuacuucaagauccgcuccggcaaguccuccaucaugcgcuccgacgcccccaucggcaagugcaacuccgagugcaucacccccaacggcuccauccccaacgacaagcccuuccagaacgucaaccgcaucaccuacggcgccugcccccgcuacaucaagcaguccacccucaagcucgccaccggcaugcgcaacguccccgagaagcagacccgcggcaucuucggcgccaucgccggcuucaucgagaacggcugggagggcauggucgacggcugguacggcuuccgccaccagaacuccgagggccgcggccaggccgccgaccucaaguccacccaggccgccaucgaccagaucaacggcaagcucaaccgccucaucggcaagaccaacgagaaguuccaccagaucgagaaggaguucuccgaggucgagggccgcauccaggaccucgagaaguacgucgaggacaccaagaucgaccucugguccuacaacgccgagcuccucgucgcccucgagaaccagcacaccaucgaccucaccgacuccgagaugaacaagcucuucgagaagaccaagaagcagcuccgcgagaacgccgaggacaugggcaacggcugcuucaagaucuaccacaagugcgacaacgccugcaucggcuccauccgcaacggcaccuacgaccacgacgucuaccgcgacgaggcccucaacaaccgcuuccagaucaagggcgucgagcucaaguccggcuacaaggacuggauccucuggaucucccucgccaucuccugcuuccuccucugcgucgcccuccucggcuucaucaugugggccugccagaagggcaacauccgcugcaacaucugcaucuga

SEQ ID NO: 105198 - RNA, 1701 nt, Artificial Sequence
  derived and/or modified CDS sequence (opt2) from hemagglutinin__InfluenzaA__AFM72993
augaagaccaucaucgcccucuccuacauccucugccucgucuucgcccagaagcuccccggcaacgacaacuccaccgccacccucugccucggccaccacgccguccccaacggcaccaucgucaagaccaucaccaacgaccagaucgaggucaccaacgccaccgagcucguccaguccuccuccgccggcgagaucugcgacuccccccaccagauccucgacggcgagaacugcacccucaucgacgcccuccucggcgacccccagugcgacggcuuccagaacaagaagugggaccucuucgucgagcgcucccgcgccuacuccaacugcuaccccuacgacguccccgacuacgccucccuccgcucccucgucgccuccuccggcacccucgaguucaacaacgaguccuucaacuggaccggcgucacccagaacggcaccuccuccgccugcauccgccgcuccaacaacuccuucuucucccgccucaacuggcucacccaccucaacuucaaguaccccgcccucaacgucaccaugcccaacaacgagcaguucgacaagcucuacaucuggggcguccuccaccccggcaccuacaaggaccagaucuuccucuacgcccaggccuccggccgcaucaccgucuccaccaagcgcucccagcaggccgucauccccaacaucggcucccgcccccgcguccgcaacauccccucccgcaucuccaucuacuggaccaucgucaagcccggcgacauccuccucaucaacuccaccggcaaccucaucgccccccgcggcuacuucaagauccgcuccggcaaguccuccaucaugcgcuccgacgcccccaucggcaagugcaacuccgagugcaucacccccaacggcuccauccccaacgacaagcccuuccagaacgucaaccgcaucaccuacggcgccugcccccgcuacgucaagcaguccacccucaagcucgccaccggcaugcgcaacguccccgagaagcagacccgcggcaucuucggcgccaucgccggcuucaucgagaacggcugggagggcauggucgacggcugguacggcuuccgccaccagaacuccgagggccgcggccaggccgccgaccucaaguccacccaggccgccaucgaccagaucaacggcaagcucaaccgccucaucggcaagaccaacgagaaguuccaccagaucgagaaggaguucuccgaggucgagggccgcauccaggaccucgagaaguacgucgaggacaccaagaucgaccucugguccuacaacgccgagcuccucgucgcccucgagaaccagcacaccaucgaccucaccgacuccgagaugaacaagcucuucgagaagaccaagaagcagcuccgcgagaacgccgaggacaugggcaacggcugcuucaagaucuaccacaagugcgacaacgccugcaucggcuccauccgcaacggcaccuacgaccacgacgucuaccgcgacgaggcccucaacaaccgcuuccagaucaagggcgucgagcucaaguccggcuacaaggacuggauccucuggaucuccuucgccaucuccugcuuccuccucugcgucgcccuccucggcuucaucaugugggccugccagaagggcaacauccgcugcaacaucugcaucuga

SEQ ID NO: 105199 - RNA, 1701 nt, Artificial Sequence
  derived and/or modified CDS sequence (opt2) from hemagglutinin__InfluenzaA__AFM73004
augaagaccaucaucgcccucuccuacauccucugccucgucuucgcccagaagcuccccggcaacgacaacuccaccgccacccucugccucggccaccacgccguccccaacggcaccaucgucaagaccaucaccaacgaccagaucgaggucaccaacgccaccgagcucguccaguccuccuccgccggcgagaucugcgacuccccccaccagauccucgacggcgagaacugcacccucaucgacgcccuccucggcgacccccagugcgacggcuuccagaacaagaagugggaccucuucgucgagcgcucccgcgccuacuccaacugcuaccccuacgacguccccgacuacgccucccuccgcucccucgucgccuccuccggcacccucgaguucaacaacgaguccuucaacuggaccggcgucacccagaacggcaccuccuccgccugcauccgccgcuccaacaacuccuucuucucccgccucaacuggcucacccaccucaacuucaaguaccccgcccucaacgucaccaugcccaacaacgagcaguucgacaagcucuacaucuggggcguccuccaccccggcaccuacaaggaccagaucuuccucuacgcccaggccuccggccgcgucaccgucuccaccaagcgcucccagcaggccgucauccccaacaucggcucccgcccccgcguccgcaacauccccucccgcaucuccaucuacuggaccaucgucaagcccggcgacauccuccucaucaacuccaccggcaaccucaucgccccccgcggcuacuucaagauccgcuccggcaaguccuccaucaugcgcuccgacgcccccaucggcaagugcaacuccgagugcaucacccccaacggcuccauccccaacgacaagcccuuccagaacgucaaccgcaucaccuacggcgccugcccccgcuacgucaagcaguccacccucaagcucgccaccggcaugcgcaacguccccgagaagcagacccgcggcaucuucggcgccaucgccggcuucaucgagaacggcugggagggcauggucgacggcugguacggcuuccgccaccagaacuccgagggccgcggccaggccgccgaccucaaguccacccaggccgccaucgaccagaucaacggcaagcucaaccgccucaucggcaagaccaacgagaaguuccaccagaucgagaaggaguucuccgaggucgagggccgcauccaggaccucgagaaguacgucgaggacaccaagaucgaccucugguccuacaacgccgagcuccucgucgcccucgagaaccagcacaccaucgaccucaccgacuccgagaugaacaagcucuucgagaagaccaagaagcagcuccgcgagaacgccgaggacaugggcaacggcugcuucaagaucuaccacaagugcgacaacgccugcaucggcuccauccgcaacggcaccuacgaccacgacgucuaccgcgacgaggcccucaacaaccgcuuccagaucaagggcgucgagcucaaguccggcuacaaggacuggauccucuggaucuccuucgccaucuccugcuucuuccucugcgucgcccuccucggcuucaucaugugggccugccagaagggcaacauccgcugcaacaucugcaucuga

SEQ ID NO: 105200 - RNA, 1701 nt, Artificial Sequence
  derived and/or modified CDS sequence (opt2) from hemagglutinin__InfluenzaA__AFM73015
augaaggccauccucgucguccuccucuacaccuucgccaccgccaacgccgacacccucugcaucggcuaccacgccaacaacuccaccgacaccgucgacaccguccucgagaagaacgucaccgucacccacuccgucaaccuccucgaggacaagcacaacggcaagcucugcaagcuccgcggcgucgccccccuccaccucggcaagugcaacaucgccggcuggauccucggcaaccccgagugcgagucccucuccaccgccuccuccugguccuacaucgucgagaccuccuccuccgacaacggcaccugcuaccccggcgacuucaucgacuacgaggagcuccgcgagcagcucuccuccgucuccuccuucgagcgcuucgagaucuuccccaagaccuccuccuggcccaaccacgacuccaacaagggcgucaccgccgccugcccccacgccggcgccaagggcuucuacaagaaccucaucuggcucgucaagaagggcaacuccuaccccaagcucuccaaguccuacaucaacgacaagggcaaggagguccucguccucuggggcauccaccaccccuccaccaccgccgaccagcagucccucuaccagaacgccgacaccuacgucuucgucggcaccucccgcuacuccaagaaguucaagcccgagaucgccauccgccccaagguccgcgaccgcgagggccgcaugaacuacuacuggacccucgucgagcccggcgacaagaucaccuucgaggccaccggcaaccucgucgucccccgcuacgccuucgccauggagcgcaacgccggcuccggcaucaucaucuccgacacccccguccacgacugcaacaccaccugccagacccccaagggcgccaucaacaccucccuccccuuccagaacauccaccccaucaccaucggcaagugccccaaguacgucaaguccaccaagcuccgccucgccaccggccuccgcaacguccccuccauccagucccgcggccucuucggcgccaucgccggcuucaucgagggcggcuggaccggcauggucgacggcugguacggcuaccaccaccagaacgagcagggcuccggcuacgccgccgaccucaaguccacccagaacgccaucgacaagaucaccaacaaggucaacuccgucaucgagaagaugaacacccaguucaccgccgucggcaaggaguucaaccaccucgagaagcgcaucgagaaccucaacaagaaggucgacgacggcuuccucgacaucuggaccuacaacgccgagcuccucguccuccucgagaacgagcgcacccucgacuaccacgacuccaacgucaagaaccucuacgagaagguccgcaaccagcucaagaacaacgccaaggagaucggcaacggcugcuucgaguucuaccacaagugcgacaacaccugcauggaguccgucaagaacggcaccuacgacuaccccaaguacuccgaggaggccaagcucaaccgcgaggagaucgacggcgucaagcucgaguccacccgcaucuaccagauccucgccaucuacuccaccgucgccuccucccucguccucgucgucucccucggcgccaucuccuucuggaugugcuccaacggcucccuccagugccgcaucugcaucuga

SEQ ID NO: 105201 - RNA, 1701 nt, Artificial Sequence
  derived and/or modified CDS sequence (opt2) from hemagglutinin__InfluenzaA__AFM73025
augaaggccauccucgucguccuccucuacaccuucgccaccgccaacgccgacacccucugcaucggcuaccacgccaacaacuccaccgacaccgucgacaccguccucgagaagaacgucaccgucacccacuccgucaaccuccucgaggacaagcacaacggcaagcucugcaagcuccgcggcgucgccccccuccaccucggcaagugcaacaucgccggcuggauccucggcaaccccgagugcgagucccucuccaccgccuccuccugguccuacaucgucgagaccuccuccuccgacaacggcaccugcuaccccggcgacuucaucgacuacgaggagcuccgcgagcagcucuccuccgucuccuccuucgagcgcuucgagaucuuccccaagaccuccuccuggcccaaccacgacuccaacaagggcgucaccgccgccugcccccacgccggcgccaagggcuucuacaagaaccucaucuggcucgucaagaagggcaacuccuaccccaagcucuccaaguccuacaucaacgacaagggcaaggagguccucguccucuggggcauccaccaccccuccaccaccgacgaccagcagucccucuaccagaacgccgacaccuacgucuucgucggcaccucccgcuacuccaagaaguucaagcccgagaucgccauccgccccaagguccgcgaccgcgagggccgcaugaacuacuacuggacccucgucgagcccggcgacaagaucaccuucgaggccaccggcaaccucgucgucccccgcuacgccuucgccauggagcgcaacgccggcuccggcaucaucaucuccgacacccccguccacgacugcaacaccaccugccagacccccaagggcgccaucaacaccucccuccccuuccagaacauccaccccaucaccaucggcaagugccccaaguacgucaaguccaccaagcuccgccucgccaccggccuccgcaacguccccuccauccagucccgcggccucuucggcgccaucgccggcuucaucgagggcggcuggaccggcauggucgacggcugguacggcuaccaccaccagaacgagcagggcuccggcuacgccgccgaccucaaguccacccagaacgccaucgacaagaucaccaacaaggucaacuccgucaucgagaagaugaacacccaguucaccgccgucggcaaggaguucaaccaccucgagaagcgcaucgagaaccucaacaagaaggucgacgacggcuuccucgacaucuggaccuacaacgccgagcuccucguccuccucgagaacgagcgcacccucgacuaccacgacuccaacgucaagaaccucuacgagaagguccgcaaccagcucaagaacaacgccaaggagaucggcaacggcugcuucgaguucuaccacaagugcgacaacaccugcauggaguccgucaagaacggcaccuacgacuaccccaaguacuccgaggaggccaagcucaaccgcgaggagaucgacggcgucaagcucgaguccacccgcaucuaccagauccucgccaucuacuccaccgucgccuccucccucguccucgucgucucccucggcgccaucuccuucuggaugugcuccaacggcucccuccagugccgcaucugcaucuga

SEQ ID NO: 105202 - RNA, 1701 nt, Artificial Sequence; identical to SEQ ID NO: 105201
  derived and/or modified CDS sequence (opt2) from hemagglutinin__InfluenzaA__AFM73035

SEQ ID NO: 105203 - RNA, 1701 nt, Artificial Sequence
  derived and/or modified CDS sequence (opt2) from hemagglutinin__InfluenzaA__AFM73045
augaaggccauccucgucguccuccucuacaccuucgccaccgccaacgccgacacccucugcaucggcuaccacgccaacaacuccaccgacaccgucgacaccguccucgagcgcaacgucaccgucacccacuccgucaaccuccucgaggacaagcacaacggcaagcucugcaagcuccgcggcgucgccccccuccaccucggcaagugcaacaucgccggcuggauccucggcaaccccgagugcgagucccucuccaccgccuccuccugguccuacaucgucgagaccuccuccuccgacaacggcaccugcuaccccggcgacuucaucgacuacgaggagcuccgcgagcagcucuccuccgucuccuccuucgagcgcuucgagaucuuccccaagaccuccuccuggcccaaccacgaguccaacaagggcgucaccgccgccugcccccacgccggcgccaaguccuucuacaagaaccucaucuggcucgucaagaagggcaacuccuaccccaagcucuccaaguccuacaucaacgacaagggcaaggagguccucguccucuggggcauccaccaccccuccaccuccgccgaccagcagucccucuaccagaacgccgacgccuacgucuucgucggcaccucccgcuacuccaagaaguucaagcccgagaucgccauccgccccaagguccgcgaccaggagggccgcaugaacuacuacuggacccucgucgagcccggcgacaagaucaccuucgaggccaccggcaaccucgucgucccccgcuacgccuucgccauggagcgcaacgccggcuccggcaucaucaucuccgacacccccguccacgacugcaacaccaccugccagacccccaagggcgccaucaacaccucccuccccuuccagaacauccaccccaucaccaucggcaagugccccaaguacgucaaguccaccaagcuccgccucgccaccggccuccgcaacguccccuccauccagucccgcggccucuucggcgccaucgccggcuucaucgagggcggcuggaccggcauggucgacggcugguacggcuaccaccaccagaacgagcagggcuccggcuacgccgccgaccucaaguccacccagaacgccaucgacgagaucaccaacaaggucaacuccgucaucgagaagaugaacacccaguucaccgccgucggcaaggaguucaaccaccucgagaagcgcaucgagaaccucaacaagaaggucgacgacggcuuccucgacaucuggaccuacaacgccgagcuccucguccuccucgagaacgagcgcacccucgacuaccacgacuccaacgucaagaaccucuacgagaagguccgcucccagcucaagaacaacgccaaggagaucggcaacggcugcuucgaguucuaccacaagugcgacaacaccugcauggaguccgucaagaacggcaccuacgacuaccccaaguacuccgaggaggccaagcucaaccgcgaggagaucgacggcgucaagcucgaguccacccgcaucuaccagauccucgccaucuacuccaccgucgccuccucccucguccucgucgucucccucggcgccaucuccuucuggaugugcuccaacggcucccuccagugccgcaucugcaucuga

SEQ ID NO: 105204 - RNA, 1701 nt, Artificial Sequence
  derived and/or modified CDS sequence (opt2) from hemagglutinin__InfluenzaA__AFM73055
augaaggccauccucgucguccuccucuacaccuucgccaccgccaacgccgacacccucugcaucggcuaccacgccaacaacuccaccgacaccgucgacaccguccucgagcgcaacgucaccgucacccacuccgucaaccuccucgaggacaagcacaacggcaagcucugcaagcuccgcggcgucgccccccuccaccucggcaagugcaacaucgccggcuggauccucggcaaccccgagugcgagucccucuccaccgccuccuccugguccuacaucgucgagaccuccuccuccgacaacggcaccugcuaccccggcgacuucaucgacuacgaggagcuccgcgagcagcucuccuccgucuccuccuucgagcgcuucgagaucuuccccaagaccuccuccuggcccaaccacgacuccaacaagggcgucaccgccgccugcccccacgccggcgccaaguccuucuacaagaaccucaucuggcucgucgagaagggcaacuccuaccccaagcucuccaaguccuacaucaacgacaagggcaaggagguccucguccucuggggcauccaccaccccuccaccuccgccgaccagcagucccucuaccagaacgccgacgccuacgucuucgucggcaccucccgcuacuccaagaaguucaagcccgagaucgccauccgccccaagguccgcgaccgcgagggccgcaugaacuacuacuggacccucgucgagcccggcgacaagaucaccuucgaggccaccggcaaccucgucgucccccgcuacgccuucgccauggagcgcaacgccggcuccggcaucaucaucuccgacacccccguccacgacugcaacaccaccugccagacccccaagggcgccaucaacaccucccuccccuuccagaacauccaccccaucaccaucggcaagugccccaaguacgucaaguccaccaagcuccgccucgccaccggccuccgcaacguccccuccauccagucccgcggccucuucggcgccaucgccggcuucaucgagggcggcuggaccggcauggucgacggcugguacggcuaccaccaccagaacgagcagggcuccggcuacgccgccgaccucaaguccacccagaacgccaucgacgagaucaccaacaaggucaacuccgucaucgagaagaugaacacccaguucaccgccgucggcaaggaguucaaccaccucgagaagcgcaucgagaaccucaacaagaaggucgacgacggcuuccucgacaucuggaccuacaacgccgagcuccucguccuccucgagaacgagcgcacccucgacuaccacgacuccaacgucaagaaccucuacgagaagguccgcucccagcucaagaacaacgccaaggagaucggcaacggcugcuucgaguucuaccacaagugcgacaacaccugcauggaguccgucaagaacggcaccuacgacuaccccaaguacuccgaggaggccaagcucaaccgcgaggagaucgacggcgucaagcucgaguccacccgcaucuaccagauccucgccaucuacuccaccgucgccuccucccucguccucgucgucucccucggcgccaucuccuucuggaugugcuccaacggcucccuccagugccgcaucugcaucuga

SEQ ID NO: 105205 - RNA, 1701 nt, Artificial Sequence
  derived and/or modified CDS sequence (opt2) from hemagglutinin__InfluenzaA__AFM73065
augaaggccauccucgucguccuccucuacaccuucgccaccgccaacgccgacacccucugcaucggcuaccacgccaacaacuccaccgacaccgucgacaccguccucgagcgcaacgucaccgucacccacuccgucaaccuccucgaggacaagcacaacggcaagcucugcaagcuccgcggcgucgccccccuccaccucggcaagugcaacaucgccggcuggauccucggcaaccccgagugcgagucccucuccaccgccuccuccugguccuacaucgucgagaccuccuccuccgacaacggcaccugcuaccccggcgacuucaucgacuacgaggagcuccgcgagcagcucuccuccgucuccuccuucgagcgcuucgagaucuuccccaagaccuccuccuggcccaaccacgacuccaacaagggcgucaccgccgccugcccccacgccggcgccaaguccuucuacaagaaccucaucuggcucgucaaggagggcaacuccuaccccaagcucuccaaguccuacaucaacgacaagggcaaggagguccucguccucuggggcauccaccaccccuccaccuccgccgaccagcagucccucuaccagaacgccgacgccuacgucuucgucggcaccucccgcuacuccaagaaguucaagcccgagaucgccauccgccccaagguccgcgaccgcgagggccgcaugaacuacuacuggacccucgucgagcccggcgacaagaucaccuucgaggccaccggcaaccucgucgucccccgcuacgccuucgccauggagcgcaacgccggcuccggcaucaucaucuccgacacccccguccacgacugcaacaccaccugccagacccccaagggcgccaucaacaccucccuccccuuccagaacauccaccccaucaccaucggcaagugccccaaguacgucaaguccaccaagcuccgccucgccaccggccuccgcaacguccccuccauccagucccgcggccucuucggcgccaucgccggcuucaucgagggcggcuggaccggcauggucgacggcugguacggcuaccaccaccagaacgagcagggcuccggcuacgccgccgaccucaaguccacccagaacgccaucgacgagaucaccaacaaggucaacuccgucaucgagaagaugaacacccaguucaccgccgucggcaaggaguucaaccaccucgagaagcgcaucgagaaccucaacaagaaggucgacgacggcuuccucgacaucuggaccuacaacgccgagcuccucguccuccucgagaacgagcgcacccucgacuaccacgacuccaacgucaagaaccucuacgagaagguccgcucccagcucaagaacaacgccaaggagaucggcaacggcugcuucgaguucuaccacaagugcgacaacaccugcauggaguccgucaagaacggcaccuacgacuaccccaaguacuccgaggaggccaagcucaaccgcgaggagaucgacggcgucaagcucgaguccacccgcaucuaccagauccucgccaucuacuccaccgucgccuccucccucguccucgucgucucccucggcgccaucuccuucuggaugugcuccaacggcucccuccagugccgcaucugcaucuga

SEQ ID NO: 105206 - RNA, 1701 nt, Artificial Sequence; identical to SEQ ID NO: 96951
  derived and/or modified CDS sequence (opt2) from hemagglutinin__InfluenzaA__AFM73477

SEQ ID NO: 105207 - RNA, 1707 nt, Artificial Sequence
  derived and/or modified CDS sequence (opt2) from hemagglutinin__InfluenzaA__AFM78567
auggagaagaucguccuccuccucgccaucgucucccucgucaaguccgaccagaucugcaucggcuaccacgccaacaacuccaccgagcaggucgacaccaucauggagaagaacgucaccgucacccacgcccaggacauccucgagaagacccacaacggcaagcucugcgaccucgacggcgucaagccccucauccuccgcgacugcuccgucgccggcuggcuccucggcaaccccaugugcgacgaguucaucaacguccccgagugguccuacaucgucgagaaggccaaccccaccaacgaccucugcuaccccggcuccuucaacgacuacgaggagcucaagcaccuccucucccgcaucaaccacuucgagaagauccagaucauccccaaguccuccugguccgaccacgaggccuccuccggcgucuccuccgccugccccuaccucggcucccccuccuucuuccgcaacgucgucuggcucaucaagaagaacuccaccuaccccaccaucaagaaguccuacaacaacaccaaccaggaggaccuccucguccucuggggcauccaccaccccaacgacgccgccgagcagacccgccucuaccagaaccccaccaccuacaucuccaucggcaccuccacccucaaccagcgccucguccccaagaucgccacccgcuccaaggucaacggccaguccggccgcauggaguucuucuggaccauccucaagcccaacgacgccaucaacuucgaguccaacggcaacuucaucgcccccgaguacgccuacaagaucgucaagaagggcgacuccgccaucaugaaguccgagcucgaguacggcaacugcaacaccaagugccagacccccaugggcgccaucaacuccuccaugcccuuccacaacauccacccccucaccaucggcgagugccccaaguacgucaaguccaaccgccucguccucgccaccggccuccgcaacuccccccagcgcgagucccgccgcaagaagcgcggccucuucggcgccaucgccggcuucaucgagggcggcuggcagggcauggucgacggcugguacggcuaccaccacuccaacgagcagggcuccggcuacgccgccgacaaggaguccacccagaaggccaucgacggcgucaccaacaaggucaacuccaucaucgacaagaugaacacccaguucgaggccgucggccgcgaguucaacaaccucgagcgccgcaucgagaaccucaacaagaagauggaggacggcuuccucgacgucuggaccuacaacgccgagcuccucguccucauggagaacgagcgcacccucgacuuccacgacuccaacgucaagaaccucuacgacaagguccgccuccagcuccgcgacaacgccaaggagcucggcaacggcugcuucgaguucuaccacaagugcgacaacgagugcauggaguccauccgcaacggcaccuacaacuacccccaguacuccgaggaggcccgccucaagcgcgaggagaucuccggcgucaagcucgaguccaucggcaccuaccagauccucuccaucuacuccaccgucgccuccucccucgcccucgccaucaugauggccggccucucccucuggaugugcuccaacggcucccuccagugccgcaucugcaucuga

SEQ ID NO: 105208 - RNA, 1701 nt, Artificial Sequence
  derived and/or modified CDS sequence (opt2) from hemagglutinin__InfluenzaA__AFM78646
augaaggccauccucgucguccuccucuacaccuucgccaccgccaacgccgacacccucugcaucggcuaccacgccaacaacuccaccgacaccgucgacaccguccucgagaagaacgucaccgucacccacuccgucaaccuccucgaggacaagcacaacggcaagcucugcaagcuccgcggcgucgccccccuccaccucggcaagugcaacaucgccggcuggauccucggcaaccccgagugcgagucccucuccaccgccuccuccugguccuacaucgucgagaccuccuccuccgacaacggcaccugcuaccccggcgacuucaucgacuacgaggagcuccgcgagcagcucuccuccgucuccuccuucgagcgcuucgagaucuuccccaagaccuccuccuggcccaaccacgaccccaacaagggcgucaccgccgccugcccccacgccggcgccaaguccuucuacaagaaccucaucuggcucgucaagaagggcaacuccuaccccaagcucuccaaguccuacaucaacgacaagggcaaggagguccucguccucuggggcauccaccaccccuccaccuccgccgaccagcagggccucuaccagaacgccgacgccuacgucuucgucggcaccucccgcuacuccaagaaguucaagcccgagaucgccauccgccccaagguccgcgaccaggagggccgcaugaacuacuacuggacccucgucgagcccggcgacaagaucaccuucgaggccaccggcaaccucgucgucccccgcuacgccuucgccauggagcgcaacgccggcuccggcaucaucaucuccgacacccccguccacgacugcaacaccaccugccagacccccaagggcgccaucaacaccucccuccccuuccagaacauccaccccaucaccaucggcaagugccccaaguacgucaaguccaccaagcuccgccucgccaccggccuccgcaacguccccuccauccagucccgcggccucuucggcgccaucgccggcuucaucgagggcggcuggaccggcauggucgacggcugguacggcuaccaccaccagaacgagcagggcuccggcuacgccgccgaccucaaguccacccagaacgccaucgacgagaucaccaacaaggucaacuccgucaucgagaagaugaacacccaguucaccgccgucggcaaggaguucaaccaccucgagaagcgcaucgagaaccucaacaagaaggucgacgacggcuuccucgacaucuggaccuacaacgccgagcuccucguccuccucgagaacgagcgcacccucgacuaccacgacuccaacgucaagaaccucuacgagaagguccgcucccagcucaagaacaacgccaaggagaucggcaacggcugcuucgaguucuaccacaagugcgacaacaccugcauggaguccgucaagaacggcaccuacgacuaccccaaguacuccgaggaggccaagcucaaccgcgaggagaucgacggcgucaagcucgaguccacccgcaucuaccagauccucgccaucuacuccaccgucgccuccucccucguccucgucgucucccucggcgccaucuccuucuggaugugcuccaacggcucccuccagugccgcaucugcaucuga

SEQ ID NO: 105209 - RNA, 1698 nt, Artificial Sequence
  derived and/or modified CDS sequence (opt2) from hemagglutinin__InfluenzaA__AFM85179
augaaggucaagcuccucauccuccucugcaccuucaccgccaccuacgccgacaccaucugcaucggcuaccacgccaacaacuccaccgacaccgucgacaccguccucgagaagaacgucaccgucacccacuccgucaaccuccucgagaacucccacaacggcaagcucugccuccucaagggcaucgccccccuccagcucggcaacugcuccgucgccggcuggauccucggcaaccccgagugcgagcuccucaucuccaaggaguccugguccuacaucgucgagacccccaaccccgagaacggcaccugcuaccccggcuacuucgccgacuacgaggagcuccgcgagcagcucuccuccgucuccuccuucgagcgcuucgagaucuuccccaaggaguccuccuggcccaaccacaccgucaccggcgucuccgccuccugcucccacaacggcaaguccuccuucuaccgcaaccuccucuggcucaccggcaagaacggccucuaccccaaccucuccaaguccuacgccaacaacaaggagaaggagguccucauccucuggggcguccaccacccccccaacaucggcgaccagcgcacccucuacuacaccgagaacgccuacgucuccgucgucuccucccacuacucccgccgcuucacccccgagaucaccaagcgccccaagguccgcgaccaggagggccgcaucaacuacuacuggacccuccucgagcccggcgacaccaucaucuucgaggccaacggcaaccucaucgcccccugguacgccuucgcccucucccgcggcuucggcuccggcaucaucaucuccaacgcccccauggacgagugcgacgccaagugccagaccccccagggcgccaucaacuccucccuccccuuccagaacguccaccccgucaccaucggcgagugccccaaguacguccgcuccgccaagcuccgcauggucaccggccuccgcaacauccccuccauccagucccgcggccucuucggcgccaucgccggcuucaucgagggcggcuggaccggcauggucgacggcugguacggcuaccaccaccagaacgagcagggcuccggcuacgccgccgaccagaaguccacccagaacgccaucaacggcaucaccaacaaggucaacuccgucaucgagaagaugaacacccaguucaccgccgucggcaaggaguucaacaaguucgagcgccgcauggagaaccucaacaagaaggucgacgacggcuuccucgacaucuggaccuacaacgccgagcuccucguccuccucgagaacgagcgcacccucgacuuccacgacuccaacgucaagaaccucuacgagaaggucaagucccagcucaagaacaacgccaaggagaucggcaacggcugcuucgaguucuaccacaagugcaacaacgagugcauggaguccgucaagaacggcaccuacgacuaccccaaguacuccgaggaguccaagcucaaccgcgagaagaucgacggcgucaagcucgaguccaugggcgucuaccagauccucgccaucuacuccaccgucgccuccucccucguccuccucgucucccucggcgccaucuccuucuggaugugcuccaacggcucccuccagugccgcaucugcaucuga

SEQ ID NO: 105210 - RNA, 1701 nt, Artificial Sequence
  derived and/or modified CDS sequence (opt2) from hemagglutinin__InfluenzaA__AFN11846
augaagaccaucaucgcccucuccuacauccucugccucgucuucgcccagaagcuccccggcaacgacaacuccaccgccacccucugccucggccaccacgccguccccaacggcacccucgucaagaccaucaccaacgaccagaucgaggucaccaacgccaccgagcucguccaguccuccuccaccggccgcaucugcgacuccccccaccgcauccucgacggcaagaacugcacccucaucgacgcccuccucggcgacccccacugcgacggcuuccagaacaaggagugggaccucuucgucgagcgcuccaaggccuacuccaacugcuaccccuacgacguccccgacuacgccucccuccgcucccucgucgccuccuccggcacccucgaguucaccaacgagggcuucaacuggaccggcgucgcccaggacggcaaguccuacgccugcaagcgcggcuccgucaaguccuucuucucccgccucaacuggcuccacaagcucgaguacaaguaccccgcccucaacgucaccaugcccaacaacgacaaguucgacaagcucuacaucuggggcguccaccaccccuccaccgacuccgaccagaccucccucuacguccaggccuccggccgcgucaccgucuccaccaagcgcucccagcagaccgucauccccaacaucggcucccgccccuggguccgcggcaucuccucccgcaucuccaucuacuggaccaucgucaagcccggcgacauccuccucaucaacuccaccggcaaccucaucgccccccgcggcuacuucaagauccgcaacggcaaguccuccaucaugcgcuccgacgcccccaucggcaacugcaacuccgagugcaucacccccaacggcuccauccccaacgacaagcccuuccagaacgucaaccgcaucaccuacggcgccugcccccgcuacgucaagcagaacacccucaagcucgccaccggcaugcgcaacguccccgagaagcagacccgcggcaucuucggcgccaucgccggcuucaucgagaacggcugggagggcauggucgacggcugguacggcuuccgccaccagaacuccgagggcaccggccaggccgccgaccucaaguccacccaggccgccaucgaccagaucaacggcaagcucaaccgccucaucgagaagaccaacgagaaguuccaccagaucgagaaggaguucuccgaggucgagggccgcauccaggaccucgagaaguacgucgaggacaccaagaucgaccucugguccuacaacgccgagcuccucgucgcccucgagaaccagcacaccaucgaccucaccgacuccgagaugaacaagcucuucgagcgcacccgcaagcagcuccgcgagaacgccgaggacaugggcaacggcugcuucaagaucuaccacaagugcgacaacgccugcaucggcuccauccgcaacggcaccuacgaccacgacgucuaccgcgacgaggcccucaacaaccgcuuccagaucaagggcgucgagcucaaguccggcuacaaggacuggauccucuggaucuccuucgccaucuccugcuuccuccucugcgucguccuccucggcuucaucaugugggccugccagaagggcaacauccgcugcaacaucugcaucuga

SEQ ID NO: 105211 - RNA, 1701 nt, Artificial Sequence; identical to SEQ ID NO: 99566
  derived and/or modified CDS sequence (opt2) from hemagglutinin__InfluenzaA__AFN17371

SEQ ID NO: 105212 - RNA, 1701 nt, Artificial Sequence; identical to SEQ ID NO: 98705
  derived and/or modified CDS sequence (opt2) from hemagglutinin__InfluenzaA__AFN17381

SEQ ID NO: 105213 - RNA, 1701 nt, Artificial Sequence; identical to SEQ ID NO: 98705
  derived and/or modified CDS sequence (opt2) from hemagglutinin__InfluenzaA__AFN17391

SEQ ID NO: 105214 - RNA, 1701 nt, Artificial Sequence; identical to SEQ ID NO: 98705
  derived and/or modified CDS sequence (opt2) from hemagglutinin__InfluenzaA__AFN17401

SEQ ID NO: 105215 - RNA, 1701 nt, Artificial Sequence; identical to SEQ ID NO: 98705
  derived and/or modified CDS sequence (opt2) from hemagglutinin__InfluenzaA__AFN17411

SEQ ID NO: 105216 - RNA, 1701 nt, Artificial Sequence; identical to SEQ ID NO: 98705
  derived and/or modified CDS sequence (opt2) from hemagglutinin__InfluenzaA__AFN17421

SEQ ID NO: 105217 - RNA, 1701 nt, Artificial Sequence; identical to SEQ ID NO: 98796
  derived and/or modified CDS sequence (opt2) from hemagglutinin__InfluenzaA__AFN17431

SEQ ID NO: 105218 - RNA, 1701 nt, Artificial Sequence
  derived and/or modified CDS sequence (opt2) from hemagglutinin__InfluenzaA__AFN17441
augaaggccauccucgucguccuccucuacaccuucgccaccgccaacgccgacacccucugcaucggcuaccacgccaacaacuccaccgacaccgucgacaccguccucgagaagaacgucaccgucacccacuccgucaaccuccucgaggacaagcacaacggcaagcucugcaagcuccgcggcgucgccccccuccaccucggcaagugcaacaucgccggcuggauccucggcaaccccgagugcgagucccucuccaaggccuccuccugguccuacaucgucgagaccuccuccuccgacaacggcaccugcuaccccggcgacuucaucgacuacgaggagcuccgcgagcagcucuccuccgucuccuccuucgagcgcuucgagaucuuccccaagaccuccuccuggcccaaccacgacuccaacaagggcgucaccgccgccugcccccacgccggcgccaaguccuucuacaagaaccucaucuggcucgucaagaagggcaacuccuaccccaagcucuccaaguccuacaucaacgacaagggcaaggagguccucguccucuggggcauccaccaccccuccaccuccgccgaccagcagucccucuaccagaacgccgacgccuacgucuucgucggcaccucccgcuacuccaagaaguucaagcccgagaucgccauccgccccaagguccgcgaccaggagggccgcaugaacuacuacuggacccucgucgagcccggcgacaagaucaccuucgaggccaccggcaaccucgucgucccccgcuacgccuucgccauggagcgcaacgccggcuccggcaucaucaucuccgacacccccguccacgacugcaacaccaccugccagacccccaagggcgccaucaacaccucccuccccuuccagaacauccaccccaucaccaucggcaagugccccaaguacgucaaguccaccaagcuccgccucgccaccggccuccgcaacguccccuccauccagucccgcggccucuucggcgccaucgccggcuucaucgagggcggcuggaccggcauggucgacggcugguacggcuaccaccaccagaacgagcagggcuccggcuacgccgccgaccucaaguccacccagaacgccaucgacgagaucaccaacaaggucaacuccgucaucgagaagaugaacacccaguucaccgccgucggcaaggaguucaaccaccucgagaagcgcaucgagaaccucaacaagaaggucgacgacggcuuccucgacaucuggaccuacaacgccgagcuccucguccuccucgagaacgagcgcacccucgacuaccacgacuccaacgucaagaaccucuacgagaagguccgcucccagcucaagaacaacgccaaggagaucggcaacggcugcuucgaguucuaccacaagugcgacaacaccugcauggaguccgucaagaacggcaccuacgacuaccccaaguacuccgaggaggccaagcucaaccgcgaggagaucgacggcgucaagcucgaguccacccgcaucuaccagauccucgccaucuacuccaccgucgccuccucccucguccucgucgucucccucggcgccaucuccuucuggaugugcuccaacggcucccuccagugccgcaucugcaucuga

SEQ ID NO: 105219 - RNA, 1701 nt, Artificial Sequence; identical to SEQ ID NO: 101260
  derived and/or modified CDS sequence (opt2) from hemagglutinin__InfluenzaA__AFN17451

SEQ ID NO: 105220 - RNA, 1701 nt, Artificial Sequence; identical to SEQ ID NO: 99547
  derived and/or modified CDS sequence (opt2) from hemagglutinin__InfluenzaA__AFN17467

SEQ ID NO: 105221 - RNA, 1701 nt, Artificial Sequence; identical to SEQ ID NO: 98705
  derived and/or modified CDS sequence (opt2) from hemagglutinin__InfluenzaA__AFN17477

SEQ ID NO: 105222 - RNA, 1701 nt, Artificial Sequence; identical to SEQ ID NO: 99566
  derived and/or modified CDS sequence (opt2) from hemagglutinin__InfluenzaA__AFN17487

SEQ ID NO: 105223 - RNA, 1701 nt, Artificial Sequence; identical to SEQ ID NO: 98705
  derived and/or modified CDS sequence (opt2) from hemagglutinin__InfluenzaA__AFN17497

SEQ ID NO: 105224 - RNA, 1701 nt, Artificial Sequence; identical to SEQ ID NO: 98705
  derived and/or modified CDS sequence (opt2) from hemagglutinin__InfluenzaA__AFN17507

SEQ ID NO: 105225 - RNA, 1701 nt, Artificial Sequence; identical to SEQ ID NO: 99547
  derived and/or modified CDS sequence (opt2) from hemagglutinin__InfluenzaA__AFN17517

SEQ ID NO: 105226 - RNA, 1701 nt, Artificial Sequence; identical to SEQ ID NO: 99566
  derived and/or modified CDS sequence (opt2) from hemagglutinin__InfluenzaA__AFN17527

SEQ ID NO: 105227 - RNA, 1701 nt, Artificial Sequence; identical to SEQ ID NO: 98705
  derived and/or modified CDS sequence (opt2) from hemagglutinin__InfluenzaA__AFN17537

SEQ ID NO: 105228 - RNA, 1701 nt, Artificial Sequence; identical to SEQ ID NO: 98947
  derived and/or modified CDS sequence (opt2) from hemagglutinin__InfluenzaA__AFN17547

SEQ ID NO: 105229 - RNA, 1701 nt, Artificial Sequence; identical to SEQ ID NO: 100236
  derived and/or modified CDS sequence (opt2) from hemagglutinin__InfluenzaA__AFN17557

SEQ ID NO: 105230 - RNA, 1701 nt, Artificial Sequence; identical to SEQ ID NO: 99547
  derived and/or modified CDS sequence (opt2) from hemagglutinin__InfluenzaA__AFN17567

SEQ ID NO: 105231 - RNA, 1701 nt, Artificial Sequence; identical to SEQ ID NO: 98947
  derived and/or modified CDS sequence (opt2) from hemagglutinin__InfluenzaA__AFN17574

SEQ ID NO: 105232 - RNA, 1701 nt, Artificial Sequence; identical to SEQ ID NO: 98705
  derived and/or modified CDS sequence (opt2) from hemagglutinin__InfluenzaA__AFN17580

SEQ ID NO: 105233 - RNA, 1701 nt, Artificial Sequence; identical to SEQ ID NO: 98705
  derived and/or modified CDS sequence (opt2) from hemagglutinin__InfluenzaA__AFN17586

SEQ ID NO: 105234 - RNA, 1701 nt, Artificial Sequence; identical to SEQ ID NO: 99566
  derived and/or modified CDS sequence (opt2) from hemagglutinin__InfluenzaA__AFN17595

SEQ ID NO: 105235 - RNA, 1701 nt, Artificial Sequence; identical to SEQ ID NO: 98705
  derived and/or modified CDS sequence (opt2) from hemagglutinin__InfluenzaA__AFN17605

SEQ ID NO: 105236 - RNA, 1701 nt, Artificial Sequence; identical to SEQ ID NO: 98705
  derived and/or modified CDS sequence (opt2) from hemagglutinin__InfluenzaA__AFN17615

SEQ ID NO: 105237 - RNA, 1701 nt, Artificial Sequence; identical to SEQ ID NO: 98705
  derived and/or modified CDS sequence (opt2) from hemagglutinin__InfluenzaA__AFN17625

SEQ ID NO: 105238 - RNA, 1701 nt, Artificial Sequence; identical to SEQ ID NO: 98705
  derived and/or modified CDS sequence (opt2) from hemagglutinin__InfluenzaA__AFN17635

SEQ ID NO: 105239 - RNA, 1701 nt, Artificial Sequence
  derived and/or modified CDS sequence (opt2) from hemagglutinin__InfluenzaA__AFN17645
augaaggccauccucgucguccuccucuacaccuucgccaccgccaacgccgacacccucugcaucggcuaccacgccaacaacuccaccgacaccgucgacaccguccucgagaagaacgucaccgucacccacuccgucaaccuccucgaggacaagcacaacggcaagcucugcaagcuccgcggcgucgccccccuccaccucggcaagugcaacaucgccggcuggauccucggcaaccccgagugcgagucccucuccaccgccuccuccugguccuacaucgucgagaccuccuccuccgacaacggcaccugcuaccccggcgacuucaucgacuacgaggagcuccgcgagcagcucuccuccgucuccuccuucgagcgcgucgagaucuuccccaagaccuccuccuggcccaaccacgacuccaacaagggcgucaccgccgccugcccccacgccggcgccaaguccuucuacaagaaccucaucuggcucgucaagaagggcaacuccuaccccaagcucuccaaguccuacaucaacgacaagggcaaggagguccucguccucuggggcauccaccaccccuccaccuccgccgaccagcagucccucuaccagaacgccgacgccuacgucuucgucggcaccucccgcuacuccaagaaguucaagcccgagaucgccauccgccccaagguccgcgaccaggagggccgcaugaacuacuacuggacccucgucgagcccggcgacaagaucaccuucgaggccaccggcaaccucgucgucccccgcuacgccuucgccauggagcgcaacgccggcuccggcaucaucaucuccgacacccccguccacgacugcaacaccaccugccagacccccaagggcgccaucaacaccucccuccccuuccagaacauccaccccaucaccaucggcaagugccccaaguacgucaaguccaccaagcuccgccucgccaccggccuccgcaacguccccuccauccagucccgcggccucuucggcgccaucgccggcuucaucgagggcggcuggaccggcauggucgacggcugguacggcuaccaccaccagaacgagcagggcuccggcuacgccgccgaccucaaguccacccagaacgccaucgacgagaucaccaacaaggucaacuccgucaucgagaagaugaacacccaguucaccgccgucggcaaggaguucaaccaccucgagaagcgcaucgagaaccucaacaagaaggucgacgacggcuuccucgacaucuggaccuacaacgccgagcuccucguccuccucgagaacgagcgcacccucgacuaccacgacuccaacgucaagaaccucuacgagaagguccgcucccagcucaagaacaacgccaaggagaucggcaacggcugcuucgaguucuaccacaagugcgacaacaccugcauggaguccgucaagaacggcaccuacgacuaccccaaguacuccgaggaggccaagcucaaccgcgaggagaucgacggcgucaagcucgaguccacccgcaucuaccagauccucgccaucuacuccaccgucgccuccucccucguccucgucgucucccucggcgccaucuccuucuggaugugcuccaacggcucccuccagugccgcaucugcaucuga

SEQ ID NO: 105240 - RNA, 1701 nt, Artificial Sequence; identical to SEQ ID NO: 99566
  derived and/or modified CDS sequence (opt2) from hemagglutinin__InfluenzaA__AFN17655

SEQ ID NO: 105241 - RNA, 1701 nt, Artificial Sequence; identical to SEQ ID NO: 99566
  derived and/or modified CDS sequence (opt2) from hemagglutinin__InfluenzaA__AFN17665

SEQ ID NO: 105242 - RNA, 1701 nt, Artificial Sequence
  derived and/or modified CDS sequence (opt2) from hemagglutinin__InfluenzaA__AFN17675
augaaggccauccucaucguccuccucuacaccuucgccaccgccaacgccgacacccucugcaucggcuaccacgccaacaacuccaccgacaccgucgacaccguccucgagaagaacgucaccgucacccacuccgucaaccuccucgaggacaagcacaacggcaagcucugcaagcuccgcggcgucgccccccuccaccucggcaagugcaacaucgccggcuggauccucggcaaccccgagugcgagucccucuccaccgccuccuccugguccuacaucgucgagaccuccuccuccgacaacggcaccugcuaccccggcgacuucaucgacuacgaggagcuccgcgagcagcucuccuccgucuccuccuucgagcgcuucgagaucuuccccaagaccuccuccuggcccaaccacgacuccaacaagggcgucaccgccgccugcccccacgccggcgccaaguccuucuacaagaaccucaucuggcucgucaagaagggcaacuccuaccccaagcucuccgaguccuacaucaacgacaagggcaaggagguccucguccucuggggcauccaccaccccuccaccuccgccgaccagcagucccucuaccagaacgccgacgccuacgucuucgucggcaccucccgcuacuccaagaaguucaagcccgagaucgccauccgccccaagguccgcgaccaggagggccgcaugaacuacuacuggacccucgucgagcccggcgacaagaucaccuucgaggccaccggcaaccucgucgucccccgcuacgccuucgccauggagcgcaacgccggcuccggcaucaucaucuccgacacccccguccacgacugcaacaccaccugccagacccccaagggcgccaucaacaccucccuccccuuccagaacauccaccccaucaccaucggcaagugccccaaguacgucaaguccaccaagcuccgccucgccaccggccuccgcaacguccccuccauccagucccgcggccucuucggcgccaucgccggcuucaucgagggcggcuggaccggcauggucgacggcugguacggcuaccaccaccagaacgagcagggcuccggcuacgccgccgaccucaaguccacccagaacgccaucgacgagaucaccaacaaggucaacuccgucaucgagaagaugaacacccaguucaccgccgucggcaaggaguucaaccaccucgagaagcgcaucgagaaccucaacaagaaggucgacgacggcuuccucgacaucuggaccuacaacgccgagcuccucguccuccucgagaacgagcgcacccucgacuaccacgacuccaacgucaagaaccucuacgagaagguccgcucccagcucaagaacaacgccaaggagaucggcaacggcugcuucgaguucuaccacaagugcgacaacaccugcauggaguccgucaagaacggcaccuacgacuaccccaaguacuccgaggaggccaagcucaaccgcgaggagaucgacggcgucaagcucgaguccacccgcaucuaccagauccucgccaucuacuccaccgucgccuccucccucguccucgucgucucccucggcgccaucuccuucuggaugugcuccaacggcucccuccagugccgcaucugcaucuga

SEQ ID NO: 105243 - RNA, 1701 nt, Artificial Sequence
  derived and/or modified CDS sequence (opt2) from hemagglutinin__InfluenzaA__AFN17685
augaaggccauccucgucguccuccucuacaccuucgccaccgccaacgccgacacccucugcaucggcuaccacgccaacaacuccaccgacaccgucgacaccauccucgagaagaacgucaccgucacccacuccgucaaccuccucgaggacaagcacaacggcaagcucugcaagcuccgcggcgucgccccccuccaccucggcaagugcaacaucgccggcuggauccucggcaaccccgagugcgagucccucuccaccgccuccuccugguccuacaucgucgagaccuccuccuccgacaacggcaccugcuaccccggcgacuucaucgacuacgaggagcuccgcgagcagcucuccuccgucuccuccuucgagcgcuucgagaucuuccccaagaccuccuccuggcccaaccacgacuccaacaagggcgucaccgccgccugcccccacgccggcgccaaguccuucuacaagaaccucaucuggcucgucaagaagggcaacuccuaccccaagcucuccaaguccuacaucaacgacaagggcaaggagguccucguccucuggggcauccaccaccccuccaccuccgccgaccagcagucccucuaccagaacgccgacgccuacgucuucgucggcaccucccgcuacuccaagaaguucaagcccgagaucgccauccgccccaagguccgcgaccaggagggccgcaugaacuacuacuggacccucgucgagccccgcgacaagaucaccuucgaggccaccggcaaccucgucgucccccgcuacgccuucgccauggagcgcaacgccggcuccggcaucaucaucuccgacacccccguccacgacugcaacaccaccugccagacccccaagggcgccaucaacaccucccuccccuuccagaacauccaccccaucaccaucggcaagugccccaaguacgucaaguccaccaagcuccgccucgccaccggccuccgcaacguccccuccauccagucccgcggccucuucggcgccaucgccggcuucaucgagggcggcuggaccggcauggucgacggcugguacggcuaccaccaccagaacgagcagggcuccggcuacgccgccgaccucaaguccacccagaacgccaucgacgagaucaccaacaaggucaacuccgucaucgagaagaugaacacccaguucaccgccgucggcaaggaguucaaccaccucgagaagcgcaucgagaaccucaacaagaaggucgacgacggcuuccucgacaucuggaccuacaacgccgagcuccucguccuccucgagaacgagcgcacccucgacuaccacgacuccaacgucaagaaccucuacgagaagguccgcucccagcucaagaacaacgccaaggagaucggcaacggcugcuucgaguucuaccacaagugcgacaacaccugcauggaguccgucaagaacggcaccuacgacuaccccaaguacuccgaggaggccaagcucaaccgcgaggagaucgacggcgucaagcucgaguccacccgcaucuaccagauccucgccaucuacuccaccgucgccuccucccucguccucgucgucucccucggcgccaucuccuucuggaugugcuccaacggcucccuccagugccgcaucugcaucuga

SEQ ID NO: 105244 - RNA, 1701 nt, Artificial Sequence; identical to SEQ ID NO: 98705
  derived and/or modified CDS sequence (opt2) from hemagglutinin__InfluenzaA__AFN17695

SEQ ID NO: 105245 - RNA, 1701 nt, Artificial Sequence; identical to SEQ ID NO: 98705
  derived and/or modified CDS sequence (opt2) from hemagglutinin__InfluenzaA__AFN17705

SEQ ID NO: 105246 - RNA, 1701 nt, Artificial Sequence; identical to SEQ ID NO: 99334
  derived and/or modified CDS sequence (opt2) from hemagglutinin__InfluenzaA__AFN17715

SEQ ID NO: 105247 - RNA, 1701 nt, Artificial Sequence
  derived and/or modified CDS sequence (opt2) from hemagglutinin__InfluenzaA__AFN17725
augaaggccauccucgucguccuccucuacaccuucgccaccgccaacgccgacacccucugcaucggcuaccacgccaacaacuccaccgacaccgucgacaccguccucgagaagaacgucaccgucacccacuccgucaaccuccucgaggacaagcacaacggcaagcucugcaagcuccgcggcgucgccccccuccaccucggcaagugcaacaucgccggcuggauccucggcaaccccgagugcgagucccucuccaccgccuccuccugguccuacaucgucgagaccuccuccuccgacaacggcaccugcuaccccggcgacuucaucgacuacgaggagcuccgcgagcagcucuccuccgucuccuccuucgagcgcuucgagaucuuccccaagaccuccuccuggcccaaccacgacuccaacaagggcgucaccgccgccugcccccacgccggcgccaaguccuucuacaagaaccucaucuggcucgucaagaagggcaacuccuaccccaagcucuccaaguccuacaucaacgacaagggcaaggagguccucguccucuggggcauccaccaccccuccaccuccgccgaccagcagucccucuaccagaacgccgacgccuacgucuucgucggcaccucccgcuacuccaagaaguucaagcccgagaucgccauccgcccccagguccgcgaccaggagggccgcaugaacuacuacuggacccucgucgagcccggcgacaagaucaccuucgaggccaccggcaaccucgucgucccccgcuacgccuucgccauggagcgcaacgccggcuccggcaucaucaucuccgacacccccguccacgacugcaacaccaccugccagacccccaagggcgccaucaacaccucccuccccuuccagaacauccaccccaucaccaucggcaagugccccaaguacgucaaguccaccaagcuccgccucgccaccggccuccgcaacguccccuccauccagucccgcggccucuucggcgccaucgccggcuucaucgagggcggcuggaccggcauggucgacggcugguacggcuaccaccaccagaacgagcagggcuccggcuacgccgccgaccucaaguccacccagaacgccaucgacgagaucaccaacaaggucaacuccgucaucgagaagaugaacacccaguucaccgccgucggcaaggaguucaaccaccucgagaagcgcaucgagaaccucaacaagaaggucgacgacggcuuccucgacaucuggaccuacaacgccgagcuccucguccuccucgagaacgagcgcacccucgacuaccacgacuccaacgucaagaaccucuacgagaagguccgcucccagcucaagaacaacgccaaggagaucggcaacggcugcuucgaguucuaccacaagugcgacaacaccugcauggaguccgucaagaacggcaccuacgacuaccccaaguacuccgaggaggccaagcucaaccgcgaggagaucgacggcgucaagcucgaguccacccgcaucuaccagauccucgccaucuacuccaccgucgccuccucccucguccucgucgucucccucggcgccaucuccuucuggaugugcuccaacggcucccuccagugccgcaucugcaucuga

SEQ ID NO: 105248 - RNA, 1701 nt, Artificial Sequence; identical to SEQ ID NO: 98705
  derived and/or modified CDS sequence (opt2) from hemagglutinin__InfluenzaA__AFN17735

SEQ ID NO: 105249 - RNA, 1701 nt, Artificial Sequence; identical to SEQ ID NO: 98705
  derived and/or modified CDS sequence (opt2) from hemagglutinin__InfluenzaA__AFN17742

SEQ ID NO: 105250 - RNA, 1701 nt, Artificial Sequence; identical to SEQ ID NO: 98705
  derived and/or modified CDS sequence (opt2) from hemagglutinin__InfluenzaA__AFN17748

SEQ ID NO: 105251 - RNA, 1701 nt, Artificial Sequence; identical to SEQ ID NO: 98705
  derived and/or modified CDS sequence (opt2) from hemagglutinin__InfluenzaA__AFN17757

SEQ ID NO: 105252 - RNA, 1701 nt, Artificial Sequence; identical to SEQ ID NO: 99334
  derived and/or modified CDS sequence (opt2) from hemagglutinin__InfluenzaA__AFN17767

SEQ ID NO: 105253 - RNA, 1701 nt, Artificial Sequence; identical to SEQ ID NO: 103715
  derived and/or modified CDS sequence (opt2) from hemagglutinin__InfluenzaA__AFN17774

SEQ ID NO: 105254 - RNA, 1701 nt, Artificial Sequence; identical to SEQ ID NO: 98705
  derived and/or modified CDS sequence (opt2) from hemagglutinin__InfluenzaA__AFN17783

SEQ ID NO: 105255 - RNA, 1701 nt, Artificial Sequence; identical to SEQ ID NO: 99334
  derived and/or modified CDS sequence (opt2) from hemagglutinin__InfluenzaA__AFN17793

SEQ ID NO: 105256 - RNA, 1701 nt, Artificial Sequence; identical to SEQ ID NO: 98705
  derived and/or modified CDS sequence (opt2) from hemagglutinin__InfluenzaA__AFN17803

SEQ ID NO: 105257 - RNA, 1701 nt, Artificial Sequence; identical to SEQ ID NO: 98705
  derived and/or modified CDS sequence (opt2) from hemagglutinin__InfluenzaA__AFN17813

SEQ ID NO: 105258 - RNA, 1701 nt, Artificial Sequence
  derived and/or modified CDS sequence (opt2) from hemagglutinin__InfluenzaA__AFN17823
augaaggccauccucgucguccuccucuacaccuucgccaccgccaacgccgacacccucugcaucggcuaccacgccaacaacuccaccgacaccgucgacaccguccucgagaagaacgucaccgucacccacuccgucaaccuccucgaggacaagcacaacggcaagcucugcaagcuccgcggcgucgccccccuccaccucggcaagugcaacaucgccggcuggauccucggcaaccccgagugcgagucccucuccaccgccuccuccugguccuacaucgucgagaccuccuccuccgacaacggcaccugcuaccccggcgacuucaucgacuacgaggagcuccgcgagcagcucuccuccgucuccuccuucgagcgcuucgagaucuuccccaagaccuccuccuggcccaaccacgacuccaacaagggcgucaccgccgccugcccccacgccggcgccaaguccuucuacaagaaccucaucuggcucgucaagaagggcaacuccuaccccaagcucuccgaguccuacaucaacgacaagggcaaggagguccucguccucuggggcauccaccaccccuccaccuccgccgaccagcagucccucuaccagaacgccgacgccuacgucuucgucggcaccucccgcuacuccaagaaguucaagcccgagaucgccauccgccccaagguccgcgaccaggagggccgcaugaacuacuacuggacccucgucgagcccggcgacaagaucaccuucgaggccaccggcaaccucgucgucccccgcuacgccuucgccauggagcgcaacgccggcuccggcaucaucaucuccgacacccccguccacgacugcaacaccaccugccagacccccaagggcgccaucaacaccucccuccccuuccagaacauccaccccaucaccaucggcaagugccccaaguacgucaaguccaccaagcuccgccucgccaccggccuccgcaacguccccuccauccagucccgcggccucuucggcgccaucgccggcuucaucgagggcggcuggaccggcauggucgacggcugguacggcuaccaccaccagaacgagcagggcuccggcuacgccgccgaccucaaguccacccagaacgccaucgacgagaucaccaacaaggucaacuccgucaucgagaagaugaacacccaguucaccgccgucggcaaggaguucaaccaccucgagaagcgcaucgagaaccucaacaagaaggucgacgacggcuuccucgacaucuggaccuacaacgccgagcuccucguccuccucgagaacgagcgcacccucgacuaccacgacuccaacgucaagaaccucuacgagaagguccgcucccagcucaagaacaacgccaaggagaucggcaacggcugcuucgaguucuaccacaagugcgacaacaccugcauggaguccgucaagaacggcaccuacgacuaccccaaguacuccgaggaggccaagcucaaccgcgaggagaucgacggcgucaagcucgaguccacccgcaucuaccagauccucgccaucuacuccaccgucgccuccucccucguccucgucgucucccucggcgccaucuccuucuggaugugcuccaacggcucccuccagugccgcaucugcaucuga

SEQ ID NO: 105259 - RNA, 1701 nt, Artificial Sequence
  derived and/or modified CDS sequence (opt2) from hemagglutinin__InfluenzaA__AFN17833
augaaggccauccucgucguccuccucuacaccuucgccaccgccaacgccgacacccucugcaucggcuaccacgccaacaacuccaccgacaccgucgacaccguccucgagaagaacgucaccgucacccacuccgucaaccuccucgaggacaagcacaacggcaagcucugcaagcuccgcggcgucgccccccuccaccucggcaagugcaacaucgccggcuggauccucggcaaccccgagugcgagucccucuccaccgccuccuccugguccuacaucgucgagaccuccuccuccgacaacggcaccugcuaccccggcgacuucaucgacuacgaggagcuccgcgagcagcucuccuccgucuccuccuucgagcgcuucgagaucuuccccaagaccuccuccuggcccaaccacgacuccaacaagggcgucaccgccgccugccccaacgccggcgccaaguccuucuacaagaaccucaucuggcucgucaagaagggcaacuccuaccccaagcucuccaaguccuacaucaacgacaagggcaaggagguccucguccucuggggcauccaccaccccuccaccuccgccgaccagcagucccucuaccagaacgccgacgccuacgucuucgucggcaccucccgcuacuccaagaaguucaagcccgagaucgccauccgccccaagguccgcgaccaggagggccgcaugaacuacuacuggacccucgucgagcccggcgacaagaucaccuucgaggccaccggcaaccucgucgucccccgcuacgccuucgccauggagcgcaacgccggcuccggcaucaucaucuccgacacccccguccacgacugcaacaccaccugccagacccccaagggcgccaucaacaccucccuccccuuccagaacauccaccccaucaccaucggcaagugccccaaguacgucaaguccaccaagcuccgccucgccaccggccuccgcaacguccccuccauccagucccgcggccucuucggcgccaucgccggcuucaucgagggcggcuggaccggcauggucgacggcugguacggcuaccaccaccagaacgagcagggcuccggcuacgccgccgaccucaaguccacccagaacgccaucgacgagaucaccaacaaggucaacuccgucaucgagaagaugaacacccaguucaccgccgucggcaaggaguucaaccaccucgagaagcgcaucgagaaccucaacaagaaggucgacgacggcuuccucgacaucuggaccuacaacgccgagcuccucguccuccucgagaacgagcgcacccucgacuaccacgacuccaacgucaagaaccucuacgagaagguccgcucccagcucaagaacaacgccaaggagaucggcaacggcugcuucgaguucuaccacaagugcgacaacaccugcauggaguccgucaagaacggcaccuacgacuaccccaaguacuccgaggaggccaagcucaaccgcgaggagaucgacggcgucaagcucgaguccacccgcaucuaccagauccucgccaucuacuccaccgucgccuccucccucguccucgucgucucccucggcgccaucuccuucuggaugugcuccaacggcucccuccagugccgcaucugcaucuga

SEQ ID NO: 105260 - RNA, 1701 nt, Artificial Sequence; identical to SEQ ID NO: 103214
  derived and/or modified CDS sequence (opt2) from hemagglutinin__InfluenzaA__AFN17843

SEQ ID NO: 105261 - RNA, 1701 nt, Artificial Sequence; identical to SEQ ID NO: 98705
  derived and/or modified CDS sequence (opt2) from hemagglutinin__InfluenzaA__AFN17853

SEQ ID NO: 105262 - RNA, 1701 nt, Artificial Sequence; identical to SEQ ID NO: 98947
  derived and/or modified CDS sequence (opt2) from hemagglutinin__InfluenzaA__AFN17863

SEQ ID NO: 105263 - RNA, 1701 nt, Artificial Sequence
  derived and/or modified CDS sequence (opt2) from hemagglutinin__InfluenzaA__AFN17873
augaaggccauccucgucguccuccucuacaccuucgccaccgccaacgccgacacccucugcaucggcuaccacgccaacaacuccaccgacaccgucgacaccguccucgagaagaacgucaccgucacccacuccgucaaccuccucgaggacaagcacaacggcaagcucugcaagcuccgcggcgucgccccccuccaccucggcaagugcaacaucgccggcuggauccucggcaaccccgagugcgagucccucuccaccgccggcuccugguccuacaucgucgagaccuccuccuccgacaacggcaccugcuaccccggcgacuucaucgacuacgaggagcuccgcgagcagcucuccuccgucuccuccuucgagcgcuucgagaucuuccccaagaccuccuccuggcccaaccacgaccucaacaagggcgucaccgccgccugcccccacgccggcgccaaguccuucuacaagaaccucaucuggcucgucaagaagggcaacuccuaccccaagcucuccaaguccuacaucaacgacaagggcaaggagguccucguccucuggggcauccaccaccccuccaccuccgccgaccagcagucccucuaccagaacgccgacgccuacgucuucgucggcaccucccgcuacuccaagaaguucaagcccgagaucgccauccgccccaagguccgcgaccaggagggccgcaugaacuacuacuggacccucgucgagcccggcgacaagaucaccuucgaggccaccggcaaccucgucgucccccgcuacgccuucgccauggagcgcaacgccggcuccggcaucaucaucuccgacacccccguccacgacugcaacaccaccugccagacccccaagggcgccaucaacaccucccuccccuuccagaacauccaccccaucaccaucggcaagugccccaaguacgucaaguccaccaagcuccgccucgccaccggccuccgcaacguccccuccauccagucccgcggccucuucggcgccaucgccggcuucaucgagggcggcuggaccggcauggucgacggcugguacggcuaccaccaccagaacgagcagggcuccggcuacgccgccgaccucaaguccacccagaacgccaucgacgagaucaccaacaaggucaacuccgucaucgagaagaugaacacccaguucaccgccgucggcaaggaguucaaccaccucgagaagcgcaucgagaaccucaacaagaaggucgacgacggcuuccucgacaucuggaccuacaacgccgagcuccucguccuccucgagaacgagcgcacccucgacuaccacgacuccaacgucaagaaccucuacgagaagguccgcucccagcucaagaacaacgccaaggagaucggcaacggcugcuucgaguucuaccacaagugcgacaacaccugcauggaguccgucaagaacggcaccuacgacuaccccaaguacuccgaggaggccaagcucaaccgcgaggagaucgacggcgucaagcucgaguccacccgcaucuaccagauccucgccaucuacuccaccgucgccuccucccucguccucgucgucucccucggcgccaucuccuucuggaugugcuccaacggcucccuccagugccgcaucugcaucuga

SEQ ID NO: 105264 - RNA, 1701 nt, Artificial Sequence
  derived and/or modified CDS sequence (opt2) from hemagglutinin__InfluenzaA__AFN17883
augaaggccauccucgucguccuccucuacaccuucgccaccgccaacgccgacacccucugcaucggcuaccacgccaacaacuccaccgacaccgucgacaccguccucgagaagaacgucaccgucacccacuccgucaaccuccucgaggacaagcacaacggcaagcucugcaagcuccgcggcgucgccccccuccaccucggcaagugcaacaucgccggcuggauccucggcaaccccgagugcgagucccucuccaccgccuccuccugguccuacaucgucgagaccuccuccuccgacaacggcaccugcuaccccggcgacuucaucgacuacgaggagcuccgcgagcagcucuccuccgucuccuccuucgagcgcuucgagaucuuccccaagaccuccuccuggcccaaccacgacuccaacaagggcgucaccgccgccugcccccacgccggcgccaaguccuucuacaagaaccucaucuggcucgucaagaagggcaacuccuaccccaagcucuccaaguccuacaucaacgacaagggcaaggagguccucguccucuggggcauccaccaccccuccaccuccgccgaccagcagucccucuaccagaacgccgacgccuacgucuucgucggcaccucccgcuacuccaagaaguucaagcccgagaucgccauccgccccaagguccgcgaccaggagggccgcaugaacuacuacuggacccucgucgagcccggcgacaagaucaccuucgaggccaccggcaaccucgucgucccccgcuacgccuucgccauggagcgcaacgccggcuccggcaucaucaucuccgacacccccguccacgacugcaacaccaccugccagacccucaagggcgccaucaacaccucccuccccuuccagaacauccaccccaucaccaucggcaagugccccaaguacgucaaguccaccaagcuccgccucgccaccggccuccgcaacguccccuccauccagucccgcggccucuucggcgccaucgccggcuucaucgagggcggcuggaccggcauggucgacggcugguacggcuaccaccaccagaacgagcagggcuccggcuacgccgccgaccucaaguccacccagaacgccaucgacgagaucaccaacaaggucaacuccgucaucgagaagaugaacacccaguucaccgccgucggcaaggaguucaaccaccucgagaagcgcaucgagaaccucaacaagaaggucgacgacggcuuccucgacaucuggaccuacaacgccgagcuccucguccuccucgagaacgagcgcacccucgacuaccacgacuccaacgucaagaaccucuacgagaagguccgcucccagcucaagaacaacgccaaggagaucggcaacggcugcuucgaguucuaccacaagugcgacaacaccugcauggaguccgucaagaacggcaccuacgacuaccccaaguacuccgaggaggccaagcucaaccgcgaggagaucgacggcgucaagcucgaguccacccgcaucuaccagauccucgccaucuacuccaccgucgccuccucccucguccucgucgucucccucggcgccaucuccuucuggaugugcuccaacggcucccuccagugccgcaucugcaucuga

SEQ ID NO: 105265 - RNA, 1701 nt, Artificial Sequence; identical to SEQ ID NO: 98705
  derived and/or modified CDS sequence (opt2) from hemagglutinin__InfluenzaA__AFN17893

SEQ ID NO: 105266 - RNA, 1701 nt, Artificial Sequence
  derived and/or modified CDS sequence (opt2) from hemagglutinin__InfluenzaA__AFN17903
augaaggccauccucgucguccuccucuacaccuucgccaccgccaacgccgacacccucugcaucggcuaccacgccaacaacuccaccgacaccgucgacaccguccucgagaagaacgucaccgucacccacuccgucaaccuccucgaggacaagcacaacggcaagcucugcaagcuccgcggcgucgccccccuccaccucggcaagugcaacaucgccggcuggauccucggcaaccccgagugcgagucccucuccaccgccuccuccugguccuacaucgucgagaccuccuccuccgacaacggcaccugcuaccccggcgacuucaucgacuacgaggagcuccgcgagcagcucuccuccgucuccuccuucgagcgcuucgagaucuuccccaagaccuccuccuggcccaaccacgaguccaacaagggcgucaccgccgccugcccccacgccggcgccaaguccuucuacaagaaccucaucuggcucgucaagaagggcaacuccuaccccaagcucuccaaguccuacgucaacgacaagggcaaggagguccucguccucuggggcauccaccaccccuccaccuccgccgaccagcagucccucuaccagaacgccgacgccuacgucuucgucggcaccucccgcuacuccaagaaguucaagcccgagaucgccauccgccccaagguccgcgaccaggagggccgcaugaacuacuacuggacccucgucgagcccggcgacaagaucaccuucgaggccaccggcaaccucgucgucccccgcuacgccuucgccauggagcgcaacgccggcuccggcaucaucaucuccgacacccccguccacgacugcaacaccaccugccagacccccaagggcgccaucaacaccucccuccccuuccagaacauccaccccaucaccaucggcaagugccccaaguacgucaaguccaccaagcuccgccucgccaccggccuccgcaacguccccuccauccagucccgcggccucuucggcgccaucgccggcuucaucgagggcggcuggaccggcauggucgacggcugguacggcuaccaccaccagaacgagcagggcuccggcuacgccgccgaccucaaguccacccagaacgccaucgacgagaucaccaacaaggucaacuccgucaucgagaagaugaacacccaguucaccgccgucggcaaggaguucaaccaccucgagaagcgcaucgagaaccucaacaagaaggucgacgacggcuuccucgacaucuggaccuacaacgccgagcuccucguccuccucgagaacgagcgcacccucgacuaccacgacuccaacgucaagaaccucuacgagaagguccgcucccagcucaagaacaacgccaaggagaucggcaacggcugcuucgaguucuaccacaagugcgacaacaccugcauggaguccgucaagaacggcaccuacgacuaccccaaguacuccgaggaggccaagcucaaccgcgaggagaucgacggcgucaagcucgaguccacccgcaucuaccagauccucgccaucuacuccaccgucgccuccucccucguccucgucgucucccucggcgccaucuccuucuggaugugcuccaacggcucccuccagugccgcaucugcaucuga

SEQ ID NO: 105267 - RNA, 1701 nt, Artificial Sequence; identical to SEQ ID NO: 99058
  derived and/or modified CDS sequence (opt2) from hemagglutinin__InfluenzaA__AFN17919

SEQ ID NO: 105268 - RNA, 1701 nt, Artificial Sequence; identical to SEQ ID NO: 98947
  derived and/or modified CDS sequence (opt2) from hemagglutinin__InfluenzaA__AFN17929

SEQ ID NO: 105269 - RNA, 1701 nt, Artificial Sequence; identical to SEQ ID NO: 104963
  derived and/or modified CDS sequence (opt2) from hemagglutinin__InfluenzaA__AFN17939

SEQ ID NO: 105270 - RNA, 1701 nt, Artificial Sequence; identical to SEQ ID NO: 99566
  derived and/or modified CDS sequence (opt2) from hemagglutinin__InfluenzaA__AFN17949

SEQ ID NO: 105271 - RNA, 1701 nt, Artificial Sequence
  derived and/or modified CDS sequence (opt2) from hemagglutinin__InfluenzaA__AFN17959
augaaggccauccucgucguccuccucuacaccuucgccaccgccaacgccgacacccucugcaucggcuaccacgccaacaacuccaccgacaccgucgacaccguccucgagaagaacgucaccgucacccacuccgucaaccuccucgaggacaagcacaacggcaagcucugcaagcuccgcggcgucgccccccuccaccucggcaagugcaacaucgccggcuggauccucggcaaccccgagugcgagucccucuccaccgccuccuccugguccuacaucgucgagaccuccuccuccgacaacggcaccugcuaccccggcgacuucaucgacuacgaggagcuccgcgagcagcucuccuccgucuccuccuucgagcgcuucgagaucuuccccaagaccuccuccuggcccaaccacgacuccaacaagggcgucaccgccgccugcccccacgccggcgccaaguccuucuacaagaaccucaucuggcucgucaagaagggcaacuccuaccccaagcucuccaaguccuacgucaacgacaagggcaaggagguccucguccucuggggcauccaccaccccuccaccuccgccgaccagcagucccucuaccagaacgccgacgccuacgucuucgucggcaccucccgcuacuccaagaaguucaagcccgagaucgccauccgccccaagguccgcgaccaggagggccgcaugaacuacuacuggacccucgucgagcccggcgacaagaucaccuucgaggccaccggcaaccucgucgucccccgcuacgccuucgccauggagcgcaacgccggcuccggcaucaucaucuccgacacccccguccacgacugcaacaccaccugccagacccccaagggcgccaucaacaccucccuccccuuccagaacauccaccccaucaccaucggcaagugccccaaguacgucaaguccaccaagcuccgccucgccaccggccuccgcaacguccccuccauccagucccgcggccucuucggcgccaucgccggcuucaucgagggcggcuggaccggcauggucgacggcugguacggcuaccaccaccagaacgagcagggcuccggcuacgccgccgaccucaaguccacccagaacgccaucgacgagaucaccaacaaggucaacuccgucaucgagaagaugaacacccaguucaccgccgucggcaaggaguucaaccaccucgagaagcgcaucgagaaccucaacaagaaggucgacgacggcuuccucgacaucuggaccuacaacgccgagcuccucguccuccucgagaacgagcgcacccucgacuaccacgacuccaacgucaagaaccucuacgagaagguccgcucccagcucaagaacaacgccaaggagaucggcaacggcugcuucgaguucuaccacaagugcgacaacaccugcauggaguccgucaagaacggcaccuacgacuaccccaaguacuccgaggaggccaagcucaaccgcgaggagaucgacggcgucaagcucgaguccacccgcaucuaccagauccucgccaucuacuccaccgucgccuccucccucguccucgucgucucccucggcgccaucuccuucuggaugugcuccaacggcucccuccagugccgcaucugcaucuga

SEQ ID NO: 105272 - RNA, 1701 nt, Artificial Sequence; identical to SEQ ID NO: 100387
  derived and/or modified CDS sequence (opt2) from hemagglutinin__InfluenzaA__AFN17969

SEQ ID NO: 105273 - RNA, 1701 nt, Artificial Sequence; identical to SEQ ID NO: 99566
  derived and/or modified CDS sequence (opt2) from hemagglutinin__InfluenzaA__AFN17979

SEQ ID NO: 105274 - RNA, 1701 nt, Artificial Sequence
  derived and/or modified CDS sequence (opt2) from hemagglutinin__InfluenzaA__AFN17989
augaaggccauccucgucguccuccucuacaccuucgccaccgccaacgccgacacccucugcaucggcuaccacgccaacaacuccaccgacaccgucgacaccguccucgagaagaacgucaccgucacccacuccgucaaccuccucgaggacaagcacaacggcaagcucugcaagcuccgcggcgucgccccccuccaccucggcaagugcaacaucgccggcuggauccucggcaaccccgagugcgagucccucuccaccgccuccuccugguccuacaucgucgagaccuccuccuccgacaacggcaccugcuaccccggcgacuucaucgacuacgaggagcuccgcgagcagcucuccuccgucuccuccuucgagcgcuucgagaucuuccccaagaccuccuccuggcccaaccacgacuccaacaagggcgucaccgccgccugcccccacgccggcgccaaguccuucuacaagaaccucaucuggcucgucaagaagggcaacuccuaccccaagcucuccaaguccuacaucaacgacaagggcaaggagguccucguccucuggggcauccaccaccccuccaccuccgccgaccagcagucccucuaccagaacgccgacgccuacgucuucgucggcaccucccgcuacuccaagaaguucaagcccgagaucgccauccgccccaagguccgcgaccaggagggccgcaugaacuacuacuggacccucgucgagcccggcgacaagaucaccuucgaggccaccggcaaccucgucgucccccgcuacgccuucgccauggagcgcaacgccggcuccggcaucaucaucuccgacacccccguccacgacugcaacaccaccugccagacccccaagggcgccaucaacaccucccuccccuuccagaacauccaccccaucaccaucggcaagugccccaaguacgucaaguccaccaagcuccgccucgccaccggccuccgcaacguccccuccauccagucccgcggccucuucggcgccaucgccggcuucaucgagggcggcuggaccggcauggucgacggcugguacggcuaccaccaccagaacgagcagggcuccggcuacgccgccgaccucaaguccacccagaacgccaucgacgagaucaccaacaaggucaacuccgucaucggcaagaugaacacccaguucaccgccgucggcaaggaguucaaccaccucgagaagcgcaucgagaaccucaacaagaaggucgacgacggcuuccucgacaucuggaccuacaacgccgagcuccucguccuccucgagaacgagcgcacccucgacuaccacgacuccaacgucaagaaccucuacgagaagguccgcucccagcucaagaacaacgccaaggagaucggcaacggcugcuucgaguucuaccacaagugcgacaacaccugcauggaguccgucaagaacggcaccuacgacuaccccaaguacuccgaggaggccaagcucaaccgcgaggagaucgacggcgucaagcucgaguccacccgcaucuaccagauccucgccaucuacuccaccgucgccuccucccucguccucgucgucucccucggcgccaucuccuucuggaugugcuccaacggcucccuccagugccgcaucugcaucuga

SEQ ID NO: 105275 - RNA, 1701 nt, Artificial Sequence; identical to SEQ ID NO: 98705
  derived and/or modified CDS sequence (opt2) from hemagglutinin__InfluenzaA__AFN17999

SEQ ID NO: 105276 - RNA, 1701 nt, Artificial Sequence
  derived and/or modified CDS sequence (opt2) from hemagglutinin__InfluenzaA__AFN18019
augaaggccauccucgucguccuccucuacaccuucgccaccgccaaggccgacacccucugcaucggcuaccacgccaacaacuccaccgacaccgucgacaccguccucgagaagaacgucaccgucacccacuccgucaaccuccucgaggacaagcacaacggcaagcucugcaagcuccgcggcgucgccccccuccaccucggcaagugcaacaucgccggcuggauccucggcaaccccgagugcgagucccucuccaccgccuccuccugguccuacaucgucgagaccuccuccuccgacaacggcaccugcuaccccggcgacuucaucgacuacgaggagcuccgcgagcagcucuccuccgucuccuccuucgagcgcuucgagauguuccccaagaccuccuccuggcccaaccacgacuccaacaagggcgucaccgccgccugcccccacgccggcgccaaguccuucuacaagaaccucaucuggcucgucaagaagggcaacuccuaccccaagcucuccaaguccuacaucaacgacaagggcaaggagguccucguccucuggggcauccaccaccccuccaccuccgccgaccagcagucccucuaccagaacgccgacgccuacgucuucgucggcaccucccgcuacuccaagaaguucaagcccgagaucgccauccgccccaagguccgcgaccaggagggccgcaugaacuacuacuggacccucgucgagcccggcgacaagaucaccuucgaggccaccggcaaccucgucgucccccgcuacgccuucgccauggagcgcaacgccggcuccggcaucaucaucuccgacacccccguccacgacugcaacaccaccugccagacccccaagggcgccaucaacaccucccuccccuuccagaacauccaccccaucaccaucggcaagugccccaaguacgucaaguccaccaagcuccgccucgccaccggccuccgcaacguccccuccauccagucccgcggccucuucggcgccaucgccggcuucaucgagggcggcuggaccggcauggucgacggcugguacggcuaccaccaccagaacgagcagggcuccggcuacgccgccgaccucaaguccacccagaacgccaucgacgagaucaccaacaaggucaacuccgucaucgagaagaugaacacccaguucaccgccgucggcaaggaguucaaccaccucgagaagcgcaucgagaaccucaacaagaaggucgacgacggcuuccucgacaucuggaccuacaacgccgagcuccucguccuccucgagaacgagcgcacccucgacuaccacgacuccaacgucaagaaccucuacgagaagguccgcucccagcucaagaacaacgccaaggagaucggcaacggcugcuucgaguucuaccacaagugcgacaacaccugcauggaguccgucaagaacggcaccuacgacuaccccaaguacuccgaggaggccaagcucaaccgcgaggagaucgacggcgucaagcucgaguccacccgcaucuaccagauccucgccaucuacuccaccgucgccuccucccucguccucgucgucucccucggcgccaucuccuucuggaugugcuccaacggcucccuccagugccgcaucugcaucuga

SEQ ID NO: 105277 - RNA, 1701 nt, Artificial Sequence; identical to SEQ ID NO: 99566
  derived and/or modified CDS sequence (opt2) from hemagglutinin__InfluenzaA__AFN18039

SEQ ID NO: 105278 - RNA, 1701 nt, Artificial Sequence; identical to SEQ ID NO: 98705
  derived and/or modified CDS sequence (opt2) from hemagglutinin__InfluenzaA__AFN18049

SEQ ID NO: 105279 - RNA, 1701 nt, Artificial Sequence
  derived and/or modified CDS sequence (opt2) from hemagglutinin__InfluenzaA__AFN18059
augaaggccauccucgucguccuccucuacaccuucgccaccgccaacgccgacacccucugcaucggcuaccacgccaacaacuccaccgacaccgucgacaccguccucgagaagaacgucaccgucacccacuccgucaaccuccucgaggacaagcacaacggcaagcucugcaagcuccgcggcgucgccccccuccaccucggcaagugcaacaucgccggcuggauccucggcaaccccgagugcgagucccucuccaccgccuccuccugguccuacaucgucgagaccuccuccuccgacaacggcaccugcuaccccggcgacuucaucgacuacgaggagcuccgcgagcagcucuccuccgucuccuccuucgagcgcuucgagaucuuccccaagaccuccuccuggcccaaccacgacuccaacaagggcgucaccgccgccugcccccacgccggcgccaaguccuucuacaagaaccucaucuggcucgucaagaagggcaacuccuaccccaagcucuccaaguccuacaucaacgacaagggcaaggagguccucguccucuggggcauccaccaccccuccaccuccgccgaccagcagucccucuaccagaacgccgacgccuacgucuucgucggcaccucccgcuacuccaagaaguucaagcccgagaucgccauccgccccaagguccgcgaccaggagggccgcaugaacuacuacuggacccucgucgagcccggcgacaagaucaccuucgaggccaccggcaaccucgucgucccccgcuacgccuucgccauggagcgcaacgccggcuccggcaucaucaucuccgacacccccguccacgacugcaacaccaccugccagacccccaagggcgccaucaacaccucccuccccuuccagaacauccaccccaucaccaucggcaagugccccaaguacgucaaguccaccaagcuccgccucgccaccggccuccgcaacguccccuccauccagucccgcggccucuucggcgccaucgccggcuucaucgagggcggcuggaccggcauggucgacggcugguacggcuaccaccaccagaacgagcagggcuccggcuacgccgccgaccucaaguccacccagaacgccaucgacgagaucaccaacaaggucaacuccgucaucgagaagaugaacacccaguucaccgccgucggcaaggaguucaaccaccucgagaagcgcaucgagaaccucaacaagaaggucgacgacggcuuccucgacaucuggaccuacaacgccgagcuccucguccuccucgagaacgagcgcacccucgacuaccacgacuccaacgucaagaaccucuacgagaagguccgcucccagcucaagaacaacgccaaggagaucggcaacggcugcuucgaguucuaccacaagugcgacaacgccugcauggaguccgucaagaacggcaccuacgacuaccccaaguacuccgaggaggccaagcucaaccgcgaggagaucgacggcgucaagcucgaguccacccgcaucuaccagauccucgccaucuacuccaccgucgccuccucccucguccucgucgucucccucggcgccaucuccuucuggaugugcuccaacggcucccuccagugccgcaucugcaucuga

SEQ ID NO: 105280 - RNA, 1701 nt, Artificial Sequence; identical to SEQ ID NO: 98705
  derived and/or modified CDS sequence (opt2) from hemagglutinin__InfluenzaA__AFN18078

SEQ ID NO: 105281 - RNA, 1701 nt, Artificial Sequence
  derived and/or modified CDS sequence (opt2) from hemagglutinin__InfluenzaA__AFN18088
augaaggccauccucgucguccuccucuacaccuucgccaccgccaacgccgacacccucugcaucggcuaccacgccaacaacuccaccgacaccgucgacaccguccucgagaagaacgucaccgucacccacuccgucaaccuccucgaggacaagcacaacggcaagcucugcaagcuccgcggcgucgccccccuccaccucggcaagugcaacaucgccggcuggauccucggcaaccccgagugcgagucccucuccaccgccuccuccugguccuacaucgucgagaccuccuccuccgacaacggcaccugcuaccccggcgacuucaucgacuacgaggagcuccgcgagcagcucuccuccgucuccuccuucgagcgcuucgagaucuuccccaagaccuccuccuggcccaaccacgacuccaacaagggcgucaccgccgccugcccccacgccggcgccaaguccuucuacaagaaccucaucuggcucgucaagaagggcaacuccuaccccaagcucuccaaguccuacaucaacgacaagggcaaggagguccucguccucuggggcauccaccaccccuccaccuccgccgaccagcagucccucuaccagaacgccgacaccuacgucuucgucggcaccucccgcuacuccaagaaguucaagcccgagaucgccauccgccccaagguccgcgaccaggagggccgcaugaacuacuacuggacccucgucgagcccggcgacaagaucaccuucgaggccaccggcaaccucgucgucccccgcuacgccuucgccaugguccgcaacgccggcuccggcaucaucaucuccgacacccccguccacgacugcaacaccaccugccagacccccaagggcgccaucaacaccucccuccccuuccagaacauccaccccaucaccaucggcaagugccccaaguacgucaaguccaccaagcuccgccucgccaccggccuccgcaacguccccuccauccagucccgcggccucuucggcgccaucgccggcuucaucgagggcggcuggaccggcauggucgacggcugguacggcuaccaccaccagaacgagcagggcuccggcuacgccgccgaccucaaguccacccagaacgccaucgacgagaucaccaacaaggucaacuccgucaucgagaagaugaacacccaguucaccgccgucggcaaggaguucaaccaccucgagaagcgcaucgagaaccucaacaagaaggucgacgacggcuuccucgacaucuggaccuacaacgccgagcuccucguccuccucgagaacgagcgcacccucgacuaccacgacuccaacgucaagaaccucuacgagaagguccgcucccagcucaagaacaacgccaaggagaucggcaacggcugcuucgaguucuaccacaagugcgacaacaccugcauggaguccgucaagaacggcaccuacgacuaccccaaguacuccgaggaggccaagcucaaccgcgaggagaucgacggcgucaagcucgaguccacccgcaucuaccagauccucgccaucuacuccaccgucgccuccucccucguccucgucgucucccucggcgccaucuccuucuggaugugcuccaacggcucccuccagugccgcaucugcaucuga

SEQ ID NO: 105282 - RNA, 1701 nt, Artificial Sequence
  derived and/or modified CDS sequence (opt2) from hemagglutinin__InfluenzaA__AFN18098
augaaggccauccucgucguccuccucuacaccuucgccaccgccaacgccgacacccucugcaucggcuaccacgccaacaacuccaccgacaccgucgacaccguccucgagaagaacgucaccgucacccacuccgucaaccuccucgaggacaagcacaacggcaagcucugcaagcuccgcggcaucgccccccuccaccucggcaagugcaacaucgccggcuggauccucggcaaccccgagugcgagucccucuccaccgccuccuccugguccuacaucgucgagaccuccuccuccgacaacggcaccugcuaccccggcaacuucaucgacuacgaggagcuccgcgagcagcucuccuccgucuccuccuucgagcgcuucgagaucuuccccaagaccuccuccuggcccaaccacgacuccaacaagggcgucaccgccgccugcccccacgccggcgccaaguccuucuacaagaaccucaucuggcucgucaagaagggcaacuccuaccccaagcucuccaaguccuacaucaacgacaagggcaaggagguccucguccucuggggcauccaccaccccuccaccuccgccgaccagcagucccucuaccagaacgccgacgccuacgucuucgucggcaccucccgcuacuccaagaaguucaagcccgagaucgccauccgccccaagguccgcgaccaggagggccgcaugaacuacuacuggacccucgucgagcccggcgacaagaucaccuucgaggccaccggcaaccucgucgucccccgcuacgccuucgccgucgagcgcaacgccggcuccggcaucaucaucuccgacacccccguccacgacugcaacaccaccugccagacccccaagggcgccaucaacaccucccuccccuuccagaacauccaccccaucaccaucggcaagugccccaaguacgucaaguccaccaagcuccgccucgccaccggccuccgcaacguccccuccauccagucccgcggccucuucggcgccaucgccggcuucaucgagggcggcuggaccggcauggucgacggcugguacggcuaccaccaccagaacgagcagggcuccggcuacgccgccgaccucaaguccacccagaacgccaucgacgagaucaccaacaaggucaacuccgucaucgagaagaugaacacccaguucaccgccgucggcaaggaguucaaccaccucgagaagcgcaucgagaaccucaacaagaaggucgacgacggcuuccucgacaucuggaccuacaacgccgagcuccucguccuccucgagaacgagcgcacccucgacuaccacgacuccaacgucaagaaccucuacgagaagguccgcucccagcucaagaacaacgccaaggagaucggcaacggcugcuucgaguucuaccacaagugcgacaacaccugcauggaguccgucaagaacggcaccuacgacuaccccaaguacuccgaggaggccaagcucaaccgcgaggagaucgacggcgucaagcucgaguccacccgcaucuaccagauccucgccaucuacuccaccgucgccuccucccucguccucgucgucucccucggcgccaucuccuucuggaugugcuccaacggcucccuccagugccgcaucugcaucuga

SEQ ID NO: 105283 - RNA, 1701 nt, Artificial Sequence
  derived and/or modified CDS sequence (opt2) from hemagglutinin__InfluenzaA__AFN18105
augaaggccauccucaucguccuccucuacaccuucgccaccgccaacgccgacacccucugcaucggcuaccacgccaacaacuccaccgacaccgucgacaccguccucgagaagaacgucaccgucacccacuccgucaaccuccucgaggacaagcacaacggcaagcucugcaagcuccgcggcgucgccccccuccaccucggcaagugcaacaucgccggcuggauccucggcaaccccgagugcgagucccucuccaccgccuccuccugguccuacaucgucgagaccuccuccuccgacaacggcaccugcuaccccggcgacuucaucgacuacgaggagcuccgcgagcagcucuccuccgucuccuccuucgagcgcuucgagaucuuccccaagaccuccuccuggcccaaccacgacuccaacaagggcgucaccgccgccugcccccacgccggcgccaaguccuucuacaagaaccucaucuggcucgucaagaagggcaacuccuaccccaagcucuccaaguccuacaucaacgacaagggcaaggagguccucguccucuggggcauccaccaccccuccaccuccgccgaccagcagucccucuaccagaacgccgacgccuacgucuucgucggcaccucccgcuacuccaagaaguucaagcccgagaucgccauccgccccaagguccgcgaccaggagggccgcaugaacuacuacuggacccucgucgagcccggcgacaagaucaccuucgaggccaccggcaaccucgucgucccccgcuacgccuucgccauggagcgcaacgccggcuccggcaucaucaucuccgacacccccguccacgacugcaacaccaacugccagacccccaagggcgccaucaacaccucccuccccuuccagaacauccaccccaucaccaucggcaagugccccaaguacgucaaguccaccaagcuccgccucgccaccggccuccgcaacguccccuccauccagucccgcggccucuucggcgccaucgccggcuucaucgagggcggcuggaccggcauggucgacggcugguacggcuaccaccaccagaacgagcagggcuccggcuacgccgccgaccucaaguccacccagaacgccaucgacgagaucaccaacaaggucaacuccgucaucgagaagaugaacacccaguucaccgccgucggcaaggaguucaaccaccucgagaagcgcaucgagaaccucaacaagaaggucgacgacggcuuccucgacaucuggaccuacaacgccgagcuccucguccuccucgagaacgagcgcacccucgacuaccacgacuccaacgucaagaaccucuacgagaagguccgcucccagcucaagaacaacgccaaggagaucggcaacggcugcuucgaguucuaccacaagugcgacaacaccugcauggaguccgucaagaacggcaccuacgacuaccccaaguacuccgaggaggccaagcucaaccgcgaggagaucgacggcgucaagcucgaguccacccgcaucuaccagauccucgccaucuacuccaccgucgccuccucccucguccucgucgucucccucggcgccaucuccuucuggaugugcuccaacggcucccuccagugccgcaucugcaucuga

SEQ ID NO: 105284 - RNA, 1701 nt, Artificial Sequence; identical to SEQ ID NO: 98947
  derived and/or modified CDS sequence (opt2) from hemagglutinin__InfluenzaA__AFN18107

SEQ ID NO: 105285 - RNA, 1701 nt, Artificial Sequence; identical to SEQ ID NO: 105279
  derived and/or modified CDS sequence (opt2) from hemagglutinin__InfluenzaA__AFN18117

SEQ ID NO: 105286 - RNA, 1701 nt, Artificial Sequence; identical to SEQ ID NO: 98705
  derived and/or modified CDS sequence (opt2) from hemagglutinin__InfluenzaA__AFN18119

SEQ ID NO: 105287 - RNA, 1701 nt, Artificial Sequence
  derived and/or modified CDS sequence (opt2) from hemagglutinin__InfluenzaA__AFN18121
augaaggccauccucgucguccuccucuacaccuucgccaccgccaacgccgacacccucugcaucggcuaccacgccaacaacuccaccgacaccgucgacaccguccucgagaagaacgucaccgucacccacuccgucaaccuccucgaggacaagcacaacggcaagcucugcaagcuccgcggcgucgccccccuccaccucggcaagugcaacaucgccggcuggauccucggcaaccccgagugcgagucccucuccaccgccuccuccugguccuacaucgucgagaccuccuccuccgacaacggcaccugcuaccccggcgacuucaucgacuacgaggagcuccgcgagcagcucuccuccgucuccuccuucgagcgcuucgagaucuuccccaagaccuccuccuggcccaaccacgacuccaacaagggcgucaccgccgccugcccccacgccggcgcccgcuccuucuacaagaaccucaucuggcucgucaagaagggcaacuccuaccccaagcucuccaaguccuacaucaacgacaagggcaaggagguccucguccucuggggcauccaccaccccuccaccuccgccgaccagcagucccucuaccagaacgccgacgccuacgucuucgucggcaccucccgcuacuccaagaaguucaagcccgagaucgccauccgccccaagguccgcgaccaggagggccgcaugaacuacuacuggacccucgucgagcccggcgacaagaucaccuucgaggccaccggcaaccucgucgucccccgcuacgccuucgccaugguccgcaacgccggcuccggcaucaucaucuccgacacccccguccacgacugcaacaccaccugccagacccccaagggcgccaucaacaccucccuccccuuccagaacauccaccccaucaccaucggcaagugccccaaguacgucaaguccaccaagcuccgccucgccaccggccuccgcaacguccccuccauccagucccgcggccucuucggcgccaucgccggcuucaucgagggcggcuggaccggcauggucgacggcugguacggcuaccaccaccagaacgagcagggcuccggcuacgccgccgaccucaaguccacccagaacgccaucgacgagaucaccaacaaggucaacuccgucaucgagaagaugaacacccaguucaccgccgucggcaaggaguucaaccaccucgagaagcgcaucgagaaccucaacaagaaggucgacgacggcuuccucgacaucuggaccuacaacgccgagcuccucguccuccucgagaacgagcgcacccucgacuaccacgacuccaacgucaagaaccucuacgagaagguccgcucccagcucaagaacaacgccaaggagaucggcaacggcugcuucgaguucuaccacaagugcgacaacaccugcauggaguccgucaagaacggcaccuacgacuaccccaaguacuccgaggaggccaagcucaaccgcgaggagaucgacggcgucaagcucgaguccacccgcaucuaccagauccucgccaucuacuccaccgucgccuccucccucguccucgucgucucccucggcgccaucuccuucuggaugugcuccaacggcucccuccagugccgcaucugcaucuga

SEQ ID NO: 105288 - RNA, 1701 nt, Artificial Sequence; identical to SEQ ID NO: 105279
  derived and/or modified CDS sequence (opt2) from hemagglutinin__InfluenzaA__AFN18133

SEQ ID NO: 105289 - RNA, 1701 nt, Artificial Sequence; identical to SEQ ID NO: 104963
  derived and/or modified CDS sequence (opt2) from hemagglutinin__InfluenzaA__AFN18135

SEQ ID NO: 105290 - RNA, 1701 nt, Artificial Sequence; identical to SEQ ID NO: 99547
  derived and/or modified CDS sequence (opt2) from hemagglutinin__InfluenzaA__AFN18137

SEQ ID NO: 105291 - RNA, 1701 nt, Artificial Sequence
  derived and/or modified CDS sequence (opt2) from hemagglutinin__InfluenzaA__AFN18139
auggaggccauccucgucguccuccucuacaccuucgccaccgccaacgccgacacccucugcaucggcuaccacgccaacaacuccaccgacaccgucgacaccguccucgagaagaacgucaccgucacccacuccgucaaccuccucgaggacaagcacaacggcaagcucugcaagcuccgcggcgucgccccccuccaccucggcaagugcaacaucgccggcuggauccucggcaaccccgagugcgagucccucuccaccgccuccuccugguccuacaucgucgagaccuccuccuccgacaacggcaccugcuaccccggcgacuucaucgacuacgaggagcuccgcgagcagcucuccuccgucuccuccuucgagcgcuucgagaucuuccccaagaccuccuccuggcccaaccacgacuccaacaagggcgucaccgccgccugcccccacgccggcgccaaguccuucuacaagaaccucaucuggcucgucaagaagggcaacuccuaccccaagcucuccaaguccuacaucaacgacaagggcaaggagguccucguccucuggggcauccaccaccccuccaccuccgccgaccagcagggccucuaccagaacgccgacgccuacgucuucgucggcuccucccgcuacuccaagaaguucaagcccgagaucgccauccgccccaagguccgcgaccaggagggccgcaugaacuacuacuggacccucgucgagcccggcgacaagaucaccuucgaggccaccggcaaccucgucgucccccgcuacgccuucgccauggagcgcaacgccggcuccggcaucaucaucuccgacacccccguccacgacugcaacaccaccugccagacccccaagggcgccaucaacaccucccuccccuuccacaacauccaccccaucaccaucggcaagugccccaaguacgucaaguccaccaagcuccgccucgccaccggccuccgcaacguccccuccauccagucccgcggccucuucggcgccaucgccggcuucaucgagggcggcuggaccggcauggucgacggcugguacggcuaccaccaccagaacgagcagggcuccggcuacgccgccgaccucaaguccacccagaacgccaucgacgagaucaccaacaaggucaacuccgucaucgagaagaugaacacccaguucaccgccgucggcaaggaguucaaccaccucgagaagcgcaucgagaaccucaacaagaaggucgacgacggcuuccucgacaucuggaccuacaacgccgagcuccucguccuccucgagaacgagcgcacccucgacuaccacgacuccaacgucaagaaccucuacgagaagguccgcucccagcucaagaacaacgccaaggagaucggcaacggcugcuucgaguucuaccacaagugcgacaacaccugcauggaguccgucaagaacggcaccuacgacuaccccaaguacuccgaggaggccaagcucaaccgcgaggagaucgacggcgucaagcucgaguccacccgcaucuaccagauccucgccaucuacuccaccgucgccuccucccucguccucgucgucucccucggcgccaucuccuucuggaugugcuccaacggcucccuccagugccgcaucugcaucuga

SEQ ID NO: 105292 - RNA, 1701 nt, Artificial Sequence; identical to SEQ ID NO: 105287
  derived and/or modified CDS sequence (opt2) from hemagglutinin__InfluenzaA__AFN18141

SEQ ID NO: 105293 - RNA, 1701 nt, Artificial Sequence; identical to SEQ ID NO: 99566
  derived and/or modified CDS sequence (opt2) from hemagglutinin__InfluenzaA__AFN18148

SEQ ID NO: 105294 - RNA, 1701 nt, Artificial Sequence; identical to SEQ ID NO: 99869
  derived and/or modified CDS sequence (opt2) from hemagglutinin__InfluenzaA__AFN18155

SEQ ID NO: 105295 - RNA, 1701 nt, Artificial Sequence
  derived and/or modified CDS sequence (opt2) from hemagglutinin__InfluenzaA__AFN18157
augaaggccauccucgucguccuccucuacaccuucgccaccgccaacgccgacacccucugcaucggcuaccacgccaacaacuccaccgacaccgucgacaccguccucgagaagaacgucaccgucacccacuccgucaaccuccucgaggacaagcacaacggcaagcucugcaagcuccgcggcgucgccccccuccaccucggcaagugcaacaucgccggcuggauccucggcaaccccgagugcgagucccucuccaccgccuccuccugguccuacaucgucgagaccuccuccuccggcaacggcaccugcuaccccggcgacuucaucgacuacgaggagcuccgcgagcagcucuccuccgucuccuccuucgagcgcuucgagaucuuccccaagaccuccuccuggcccaaccacgacuccaacaagggcgucaccgccgccugcccccacgccggcgccaaguccuucuacaagaaccucaucuggcucgucaagaagggcaacuccuaccccaagcucuccaaguccuacaucaacgacaagggcaaggagguccucguccucuggggcauccaccaccccuccaccuccgccgaccagcagucccucuaccagaacgccgacgccuacgccuucgucggcaccucccgcuacuccaagaaguucaagcccgagaucgccauccgccccaagguccgcgaccaggagggccgcaugaacuacuacuggacccucgucgagcccggcgacaagaucaccuucgaggccaccggcaaccucgucgucccccgcuacgccuucgccauggagcgcaacgccggcuccggcaucaucaucuccgacacccccguccacgacugcaacaccaccugccagacccccaagggcgccaucaacaccucccuccccuuccagaacauccaccccaucaccaucggcaagugccccaaguacgucaaguccaccaagcuccgccucgccaccggccuccgcaacguccccuccauccagucccgcggccucuucggcgccaucgccggcuucaucgagggcggcuggaccggcauggucgacggcugguacggcuaccaccaccagaacgagcagggcuccggcuacgccgccgaccucaaguccacccagaacgccaucgacgagaucaccaacaaggucaacuccgucaucgagaagaugaacacccaguucaccgccgucggcaaggaguucaaccaccucgagaagcgcaucgagaaccucaacaagaaggucgacgacggcuuccucgacaucuggaccuacaacgccgagcuccucguccuccucgagaacgagcgcacccucgacuaccacgacuccaacgucaagaaccucuacgagaagguccgcucccagcucaagaacaacgccaaggagaucggcaacggcugcuucgaguucuaccacaagugcgacaacaccugcauggaguccgucaagaacggcaccuacgacuaccccaaguacuccgaggaggccaagcucaaccgcgaggagaucgacggcgucaagcucgaguccacccgcaucuaccagauccucgccaucuacuccaccgucgccuccucccucguccucgucgucucccucggcgccaucuccuucuggaugugcuccaacggcucccuccagugccgcaucugcaucuga

SEQ ID NO: 105296 - RNA, 1701 nt, Artificial Sequence
  derived and/or modified CDS sequence (opt2) from hemagglutinin__InfluenzaA__AFN18159
auggaggccauccucgucguccuccucuacaccuucgccaccgccaacgccgacacccucugcaucggcuaccacgccaacaacuccaccgacaccgucgacaccguccucgagaagaacgucaccgucacccacuccgucaaccuccucgaggacaagcacaacggcaagcucugcaagcuccgcggcgucgccccccuccaccucggcaagugcaacaucgccggcuggauccucggcaaccccgagugcgagucccucuccaccgccuccuccugguccuacaucgucgagaccuccuccuccgacaacggcaccugcuaccccggcgacuucaucgacuacgaggagcuccgcgagcagcucuccuccgucuccuccuucgagcgcuucgagaucuuccccaagaccuccuccuggcccaaccacgacuccaacaagggcgucaccgccgccugcccccacgccggcuccaaguccuucuacaagaaccucaucuggcucgucaagaagggcaacuccuaccccaagcucuccaaguccuacaucaacgacaagggcaaggagguccucguccucuggggcauccaccaccccuccaccuccgccgaccagcagucccucuaccagaacgccgacgccuacgucuucgucggcuccucccgcuacuccaagaaguucaagcccgagaucgccauccgccccaagguccgcgaccaggagggccgcaugaacuacuacuggacccucgucgagcccggcgacaagaucaccuucgaggccaccggcaaccucgucgucccccgcuacgccuucgccauggagcgcaacgccggcuccggcaucaucaucuccgacacccccguccacgacugcaacaccaccugccagacccccaagggcgccaucaacaccucccuccccuuccacaacauccaccccaucaccaucggcaagugccccaaguacgucaaguccaccaagcuccgccucgccaccggccuccgcaacguccccuccauccagucccgcggccucuucggcgccaucgccggcuucaucgagggcggcuggaccggcauggucgacggcugguacggcuaccaccaccagaacgagcagggcuccggcuacgccgccgaccucaaguccacccagaacgccaucgacgagaucaccaacaaggucaacuccgucaucgagaagaugaacacccaguucaccgccgucggcaaggaguucaaccaccucgagaagcgcaucgagaaccucaacaagaaggucgacgacggcuuccucgacaucuggaccuacaacgccgagcuccucguccuccucgagaacgagcgcacccucgacuaccacgacuccaacgucaagaaccucuacgagaagguccgcaaccagcucaagaacaacgccaaggagaucggcaacggcugcuucgaguucuaccacaagugcgacaacaccugcauggaguccgucaagaacggcaccuacgacuaccccaaguacuccgaggaggccaagcucaaccgcgaggagaucgacggcgucaagcucgaguccacccgcaucuaccagauccucgccaucuacuccaccgucgccuccucccucguccucgucgucucccucggcgccaucuccuucuggaugugcuccaacggcucccuccagugccgcaucugcaucuga

SEQ ID NO: 105297 - RNA, 1701 nt, Artificial Sequence
  derived and/or modified CDS sequence (opt2) from hemagglutinin__InfluenzaA__AFN18164
augaaggccauccucgucguccuccucuacaccuucgccaccaccaacgccgacacccucugcaucggcuaccacgccaacaacuccaccgacaccgucgacaccguccucgagaagaacgucaccgucacccacuccgucaaccuccucgaggacaagcacaacggcaagcucugcaagcuccgcggcgucgccccccuccaccucggcaagugcaacaucgccggcuggauccucggcaaccccgagugcgagucccucuccaccgccuccuccugguccuacaucgucgagaccuccuccuccgacaacggcaccugcuaccccggcgacuucaucgacuacgaggagcuccgcgagcagcucuccuccgucuccuccuucgagcgcuucgagaucuuccccaagaccuccuccuggcccaaccacgacuccaacaagggcgucaccgccgccugcccccacgccggcgccaaguccuucuacaagaaccucaucuggcucgucaagaagggcaacuccuaccccaagcucuccaaguccuacaucaacgacaagggcaaggagguccucguccucuggggcauccaccaccccuccaccuccgccgaccagcagucccucuaccagaacgccgacgccuacgucuucgucggcaccucccgcuacuccaagaaguucaagcccgagaucgccauccgccccaagguccgcgaccaggagggccgcaugaacuacuacuggacccucgucgagcccggcgacaagaucaccuucgaggccaccggcaaccucaucgucccccgcuacgccuucgccauggagcgcaacgccggcuccggcaucaucaucuccaacacccccguccacgacugcaacaccaccugccagacccccaagggcgccaucaacaccucccuccccuuccagaacauccaccccaucaccaucggcaagugccccaaguacgucaaguccaccaagcuccgccucgccaccggccuccgcaacguccccuccauccagucccgcggccucuucggcgccaucgccggcuucaucgagggcggcuggaccggcauggucgacggcugguacggcuaccaccaccagaacgagcagggcuccggcuacgccgccgaccucaaguccacccagaacgccaucgacaagaucaccaacaaggucaacuccgucaucgagaagaugaacacccaguucaccgccgucggcaaggagcucaaccaccucgagaagcgcaucgagaaccucaacaagaaggucgacgacggcuuccucgacaucuggaccuacaacgccgagcuccucguccuccucgagaacgagcgcacccucgacuaccacgacuccaacgucaagaaccucuacgagaagguccgcucccagcucaagaacaacgccaaggagaucggcaacggcugcuucgaguucuaccacaagugcgacaacaccugcauggaguccgucaagaacggcaccuacgacuaccccaaguacuccgaggaggccaagcucaaccgcgaggagaucgacggcgucaagcucgaguccacccgcaucuaccagauccucgccgucuacuccaccgucgccuccucccucguccucgucgucucccucggcgccaucuccuucuggaugugcuccaacggcucccuccagugccgcaucugcaucuga

SEQ ID NO: 105298 - RNA, 1701 nt, Artificial Sequence
  derived and/or modified CDS sequence (opt2) from hemagglutinin__InfluenzaA__AFN18171
augaaggccauccucgucguccuccucuacaccuucgccaccgccaacgccgacacccucugcaucggcuaccacgccaacaacuccaccgacaccgucgacaccguccucgagaagaacgucaccgucacccacuccgucaaccuccucgaggacaagcacuccggcaagcucugcaagcuccgcggcgucgccccccuccaccucggcaagugcaacaucgccggcuggauccucggcaaccccgagugcgagucccucuccaccgccuccuccugguccuacaucgucgagaccuccuccuccgacaacggcaagugcuaccccggcgacuucaucgacuacgaggagcuccgcgagcagcucuccuccgucuccuccuucgagcgcuucgagaucuuccccaagaccuccuccuggcccaaccacgacuccaacaagggcgucaccgccgccugcccccacgccggcgccaaguccuucuacaagaaccucaucuggcucgucaagaagggcaacuccuaccccaagcucuccaaguccuacaucaacgacaagggcaaggagguccucguccucuggggcauccaccaccccuccaccuccgccgaccagcagucccucuaccagaacgccgacgccuacgucuucgucggcaccuccaaguacuccaagaaguucaagcccgagaucgccauccgccccaagguccgcgaccaggagggccgcaugaacuacuacuggacccucgucgagcccggcgacaagaucaccuucgaggccaccggcaaccucgucgucccccgcuacgccuucgccauggagcgcaacgccggcuccggcaucaucaucuccgacacccccgucaaggacugcaacaccaccugccagacccccaagggcgccaucaacaccucccuccccuuccagaacauccaccccaucaccaucggcaagugccccaaguacgucaaguccaccaagcuccgccucgccaccggccuccgcaacguccccuccauccagucccgcggccucuucggcgccaucgccggcuucaucgagggcggcuggaccggcauggucgacggcugguacggcuaccaccaccagaacgagcagggcuccggcuacgccgccgaccucaaguccacccagaacgccaucgacgagaucaccaacaaggucaacuccgucaucgagaagaugaacacccaguucaccgccgucggcaaggaguucaaccaccucgagaagcgcaucgagaaccucaacaagaaggucgacgacggcuuccucgacaucuggaccuacaacgccgagcuccucguccuccucgagaacgagcgcacccucgacuaccacgacuccaacgucaagaaccucuacgagaagguccgcucccagcucaagaacaacgccaaggagaucggcaacggcugcuucgaguucuaccacaagugcgacaacaccugcauggaguccgucaagaacggcaccuacgacuaccccaaguacuccgaggaggccaagcucaaccgcgaggagaucgacggcgucaagcucgaguccacccgcaucuaccagauccucgccaucuacuccaccgucgccuccucccucguccucgucgucucccucggcgccaucuccuucuggaugugcuccaacggcucccuccagugccgcaucugcaucuga

SEQ ID NO: 105299 - RNA, 1701 nt, Artificial Sequence
  derived and/or modified CDS sequence (opt2) from hemagglutinin__InfluenzaA__AFN18176
augaaggccauccucgucguccuccucuacaccuucgccaccgccaacgccgacacccucugcaucggcuaccacgccaacaacuccaccgacaccgucgacaccguccucgagaagaacgucaccgucacccacuccgucaaccuccucgaggacaagcacaacggcaagcucugcaagcuccgcggcgucgccccccuccaccucggcaagugcaacaucgccggcuggauccucggcaaccccgagugcgagucccucuccaccgccuccuccugguccuacaucgucgagaccuccuccuccgacaacggcaccugcuaccccggcgacuucaucgacuacgaggagcuccgcgagcagcucuccuccgucuccuccuucgagcgcuucgagaucuuccccaagaccuccuccuggcccaaccacgacuccaacaagggcgucaccgccgccugcccccacgccggcgccaaguccuucuacaagaaccucaucuggcucgucaagaagggcaacuccuaccccaagcucuccaaguccuacaucaacgacaagggcaaggagguccucguccucuggggcauccaccaccccuccaccuccgccgaccagcagucccucuaccagaacgccgacgccuacgucuucgucggcaccucccgcuacuccaagaaguucaagcccgagaucgccauccgccccaagguccgcgaccaggagggccgcaugaacuacuacuggacccucgucgagcccggcgacaagaucaccuucgaggccaccggcaaccuccucgucccccgcuacgccuucgccauggagcgcaacgccggcuccggcaucaucaucuccgacacccccguccacgacugcaacaccaccugccagacccccaagggcgccaucaacaccucccuccccuuccagaacauccaccccaucaccaucggcaagugccccaaguacgucaaguccaccaagcuccgccucgccaccggccuccgcaacauccccuccauccagucccgcggccucuucggcgccaucgccggcuucaucgagggcggcuggaccggcauggucgacggcugguacggcuaccaccaccagaacgagcagggcuccggcuacgccgccgaccucaaguccacccagaacgccaucgacgagaucaccaacaaggucaacuccgucaucgagaagaugaacacccaguucaccgccgucggcaaggaguucaaccaccucgagaagcgcaucgagaaccucaacaagaaggucgacgacggcuuccucgacaucuggaccuacaacgccgagcuccucguccuccucgagaacgagcgcacccucgacuaccacgacuccaacgucaagaaccucuacgagaagguccgcucccagcucaagaacaacgccaaggagaucggcaacggcugcuucgaguucuaccacaagugcgacaacaccugcauggaguccgucaagaacggcaccuacgacuaccccaaguacuccgaggaggccaagcucaaccgcgaggagaucgacggcgucaagcucgaguccacccgcaucuaccagauccucgccaucuacuccaccgucgccuccucccucguccucgucgucucccucggcgccaucuccuucuggaugugcuccaacggcucccuccagugccgcaucugcaucuga

SEQ ID NO: 105300 - RNA, 1701 nt, Artificial Sequence
  derived and/or modified CDS sequence (opt2) from hemagglutinin__InfluenzaA__AFN18183
augaaggccauccucgucguccuccucuacaccuucgccaccgccaacgccgacacccucugcaucggcuaccacgccaacaacuccaccgacaccgucgacaccauccucgagaagaacgucaccgucacccacuccgucaaccuccucgaggacaagcacaacggcaagcucugcaagcuccgcggcgucgccccccuccaccucggcaagugcaacaucgccggcuggauccucggcaaccccgagugcgagucccucuccaccgccuccuccugguccuacaucgucgagaccuccuccuccgacaacggcaccugcuaccccggcgacuucaucgacuacgaggagcuccgcgagcagcucuccuccgucuccuccuucgagcgcuucgagaucuuccccaagaccuccuccuggcccaaccacgacuccaacaagggcgucaccgccgccugcccccacgccggcgccaaguccuucuacaagaaccucaucuggcucgucaagaagggcaacuccuaccccaagcucuccaaguccuacaucaacgacaagggcaaggagguccucguccucuggggcauccaccaccccuccaccuccgccgaccagcagucccucuaccagaacgccgacgccuacgucuucgucggcaccucccgcuacuccaagaaguucaagcccgagaucgccauccgccccaagguccgcgaccaggagggccgcaugaacuacuacuggacccucgucgagcccggcgacaagaucaccuucgaggccaccggcaaccucauggucccccgcuacgccuucgccauggagcgcaacgccggcuccggcaucaucaucuccgacacccccguccacgacugcaacaccaccugccagacccccaagggcgccaucaacaccucccuccccuuccagaacauccaccccaucaccaucggcaagugccccaaguacgucaaguccaccaagcuccgccucgccaccggccuccgcaacguccccuccauccagucccgcggccucuucggcgccaucgccggcuucaucgagggcggcuggaccggcauggucgacggcugguacggcuaccaccaccagaacgagcagggcuccggcuacgccgccgaccucaaguccacccagaacgccaucgacgagaucaccaacaaggucaacuccgucaucgagaagaugaacacccaguucaccgccgucggcaaggaguucaaccaccucgagaagcgcaucgagaaccucaacaagaaggucgacgacggcuuccucgacaucuggaccuacaacgccgagcuccucguccuccucgagaacgagcgcacccucgacuaccacgacuccaacgucaagaaccucuacgagaagguccgcucccagcucaagaacaacgccaaggagaucggcaacggcugcuucgaguucuaccacaagugcgacaacaccugcauggaguccgucaagaacggcaccuacgacuaccccaaguacuccgaggaggccaagcucaaccgcgaggagaucgacggcgucaagcucgaguccacccgcaucuaccagauccucgccaucuacuccaccgucgccuccucccucguccucgucgucucccucggcgccaucuccuucuggaugugcuccaacggcucccuccagugccgcaucugcaucuga

SEQ ID NO: 105301 - RNA, 1701 nt, Artificial Sequence; identical to SEQ ID NO: 100257
  derived and/or modified CDS sequence (opt2) from hemagglutinin__InfluenzaA__AFN18195

SEQ ID NO: 105302 - RNA, 1701 nt, Artificial Sequence; identical to SEQ ID NO: 98705
  derived and/or modified CDS sequence (opt2) from hemagglutinin__InfluenzaA__AFN18200

SEQ ID NO: 105303 - RNA, 1701 nt, Artificial Sequence
  derived and/or modified CDS sequence (opt2) from hemagglutinin__InfluenzaA__AFN18207
augaaggccauccucgucguccuccucuacaccuucgccaccgccaacgccgacacccucugcaucggcuaccacgccaacaacuccaccgacaccgucgacaccguccucgagaagaacgucaccgucacccacuccgucaaccuccucgaggacaagcacaacggcaagcucugcaagcuccgcggcgucgccccccuccaccucggcaagugcaacaucgccggcuggauccucggcaaccccgagugcgagucccucuccaccgccuccuccugguccuacaucgucgagaccuccuccuccgacaacggcaccugcuaccccggcgacuucaucgacuacgaggagcuccgcgagcagcucuccuccgucuccuccuucgagcgcuucgagaucuuccccaagaccuccuccuggcccaaccacgacuccaacaagggcgucaccgccgccugcccccacgccggcgccaaguccuucuacaagucccucaucuggcucgucaagaagggcaacuccuaccccaagcucuccaaguccuacaucaacgacaagggccgcgagguccucguccucuggggcauccaccaccccuccaccuccgccgaccagcagucccucuaccagaacgccgacgccuacgucuucgucggcaccucccgcuacuccaagaaguucaagcccgagaucgccauccgccccaagguccgcgaccaggagggccgcaugaacuacuacuggacccucgucgagcccggcgacaagaucaccuucgaggccaccggcaaccucgucgucccccgcuacgccuucgccauggagcgcaacgccggcuccggcaucaucaucuccgacacccccguccacgacugcaacaccaccugccagacccccaagggcgccaucaacaccucccuccccuuccagaacauccaccccaucaccaucggcaagugccccaaguacgucaaguccaccaagcuccgccucgccaccggccuccgcaacguccccuccauccagucccgcggccucuucggcgccaucgccggcuucaucgagggcggcuggaccggcauggucgacggcugguacggcuaccaccaccagaacgagcagggcuccggcuacgccgccgaccucaaguccacccagaacgccaucgacgagaucaccaacaaggucaacuccgucaucgagaagaugaacacccaguucaccgccgucggcaaggaguucaaccaccucgagaagcgcaucgagaaccucaacaagaaggucgacgacggcuuccucgacaucuggaccuacaacgccgagcuccucguccuccucgagaacgagcgcacccucgacuaccacgacuccaacgucaagaaccucuacgagaagguccgcucccagcucaagaacaacgccaaggagaucggcaacggcugcuucgaguucuaccacaagugcgacaacaccugcauggaguccgucaagaacggcaccuacgacuaccccaaguacuccgaggaggccaagcucaaccgcgaggagaucgacggcgucaagcucgaguccacccgcaucuaccagauccucgccaucuacuccaccgucgccuccucccucguccucgucgucucccucggcgccaucuccuucuggaugugcuccaacggcucccuccagugccgcaucugcaucuga

SEQ ID NO: 105304 - RNA, 1701 nt, Artificial Sequence
  derived and/or modified CDS sequence (opt2) from hemagglutinin__InfluenzaA__AFN18214
augaaggccauccucgucguccuccucuacaccuucgccaccgccaacgccgacacccucugcaucggcuaccacgccaacaacuccaccgacaccgucgacaccguccucgagaagaacgucaccgucacccacuccgucaacauccucgaggacaagcacaacggcaagcucugcaagcuccgcggcgucgccccccuccaccucggcaagugcaacaucgccggcuggauccucggcaaccccgagugcgagucccucuccaccgccuccuccugguccuacaucgucgagaccuccuccuccgacaacggcaccugcuaccccggcgacuucaucaacuacgaggagcuccgcgagcagcucuccuccgucuccuccuucgagcgcuucgagaucuuccccaagaccuccuccuggcccaaccacgacuccaacaagggcgucaccgccgccugcccccacgccggcgccaaguccuucuacaagaaccucaucuggcucgucaagaagggcaacuccuaccccaagcucuccaaguccuacaucaacgacaagggcaaggagguccucguccucuggggcauccaccaccccuccaccuccgccgaccagcagucccucuaccagaacgccgacgccuacgucuucgucggcuccucccgcuacuccaagaaguucaagcccgagaucgccauccgccccaagguccgcgaccaggagggccgcaugaacuacuacuggacccucgucgagcccggcgacaagaucaccuucgaggccaccggcaaccucgucgucccccgcuacgccuucgccauggagcgcaacgccggcuccggcaucaucaucuccgacacccccguccacgacugcaacaccaccugccagacccccaagggcgccaucaacaccucccuccccuuccagaacauccaccccaucaccaucggcaagugccccaaguacgucaaguccaccaagcuccgccucgccaccggccuccgcaacguccccuccauccagucccgcggccucuucggcgccaucgccggcuucaucgagggcggcuggaccggcauggucgacggcugguacggcuaccaccaccagaacgagcagggcuccggcuacgccgccgaccucaaguccacccagaacgccaucgacgagaucaccaacaaggucaacuccgucaucgagaagaugaacacccaguucaccgccgucggcaaggaguucaaccaccucgagaagcgcaucgagaaccucaacaagaaggucgacgacggcuuccucgacaucuggaccuacaacgccgagcuccucguccuccucgagaacgagcgcacccucgacuaccacgacuccaacgucaagaaccucuacgagaagguccgcucccagcucaagaacaacgccaaggaggucggcaacggcugcuucgaguucuaccacaagugcgacaacaccugcauggaguccgucaagaacggcaccuacgacuaccccaaguacuccgaggaggccaagcucaaccgcgaggagaucgacggcgucaagcucgaguccacccgcaucuaccagauccucgccaucuacuccaccgccgccuccucccucguccucgucgucucccucggcgccaucuccuucuggaugugcuccaacggcucccuccagugccgcaucugcaucuga

SEQ ID NO: 105305 - RNA, 1701 nt, Artificial Sequence; identical to SEQ ID NO: 101260
  derived and/or modified CDS sequence (opt2) from hemagglutinin__InfluenzaA__AFN18224

SEQ ID NO: 105306 - RNA, 1701 nt, Artificial Sequence; identical to SEQ ID NO: 100257
  derived and/or modified CDS sequence (opt2) from hemagglutinin__InfluenzaA__AFN18231

SEQ ID NO: 105307 - RNA, 1701 nt, Artificial Sequence
  derived and/or modified CDS sequence (opt2) from hemagglutinin__InfluenzaA__AFN18233
augaaggccauccucgucguccuccucuacaccuucgccaccgccaacgccgacacccucugcaucggcuaccacgccaacaacuccaccgacaccgucgacaccguccucgagaagaacgucaccgucacccacuccgucaaccuccucgaggacaagcacaacggcaagcucugcaagcuccgcggcgucgccccccuccaccucggcaagugcaacaucgccggcuggauccucggcaaccccgagugcgagucccucuccaccgccuccuccugguccuacaucgucgagaccuccuccuccgacaacggcaccugcuaccccggcgacuucaucgacuacgaggagcuccgcgagcagcucuccuccgucuccuccuucgagcgcuucgagaucuuccccaagaccuccuccuggcccaaccacgaccccaacaagggcgucaccgccgccugcccccacgccggcgccaaguccuucuacaagaaccucaucuggcucgucaagaagggcaacuccuaccccaagcucuccaaguccuacaucaacgacaagggcaaggagguccucguccucuggggcauccaccaccccuccaccuccgccgaccagcagucccucuaccagaacgccgacgccuacgucuucgucggcaccucccgcuacucccgcaaguucaagcccgagaucgccauccgccccaagguccgcgaccaggagggccgcaugaacuacuacuggacccucgucgagcccggcgacaagaucaccuucgaggccaccggcaaccucgucgucccccgcuacgccuucgccauggagcgcaacgccggcuccggcaucaucaucuccgacacccccguccacgacugcaacaccaccugccagacccccaagggcgccaucaacaccucccuccccuuccagaacauccaccccaucaccaucggcaagugccccaaguacgucaaguccaccaagcuccgccucgccaccggccuccgcaacguccccuccauccagucccgcggccucuucggcgccaucgccggcuucaucgagggcggcuggaccggcauggucgacggcugguacggcuaccaccaccagaacgagcagggcuccggcuacgccgccgaccucaaguccacccagaacgccaucgacgagaucaccaacaaggucaacuccgucaucgagaagaugaacacccaguucaccgccgucggcaaggaguucaaccaccucgagaagcgcaucgagaaccucaacaagaaggucgacgacggcuuccucgacaucuggaccuacaacgccgagcuccucguccuccucgagaacgagcgcacccucgacuaccacgacuccaacgucaagaagcucuacgagaagguccgcucccagcucaagaacaacgccaaggagaucggcaacggcugcuucgaguucuaccacaagugcgacaacaccugcauggaguccgucaagaacggcaccuacgacuaccccaaguacuccgaggaggccaagcucaaccgcgaggagaucgacggcgucaagcucgaguccacccgcaucuaccagauccucgccaucuacuccaccgucgccuccucccucguccucgucgucucccucggcgccaucuccuucuggaugugcuccaacggcucccuccagugccgcaucugcaucuga

SEQ ID NO: 105308 - RNA, 1701 nt, Artificial Sequence
  derived and/or modified CDS sequence (opt2) from hemagglutinin__InfluenzaA__AFN18243
augaaggccauccucgucguccuccucuacaccuucgccaccgccaacgccgacacccucugcaucggcuaccacgccaacaacuccaccgacaccgucgacaccguccucgagaagaacgucaccgucacccacuccgucaaccuccucgaggacaagcacaacggcaagcucugcaagcuccgcggcgucgccccccuccaccucggcaagugcaacaucgccggcuggauccucggcaaccccgagugcgagucccucuccaccgccuccuccugguccuacaucgucgagaccuccuccuccgacaacggcaccugcuaccccggcgacuucaucgacuacgaggagcuccgcgagcagcucuccuccgucuccuccuucgagcgcuucgagaucuuccccaagaccuccuccuggcccaaccacgacuccaacaagggcgucaccgccgccugcccccacgccggcgccaaguccuucuacaagaaccucaucuggcucgucaagaagggcaacuccuaccccaagcucuccaaguccuacaucaacgacaagggcaaggagguccucguccucuggggcauccaccaccccuccaccuccgccgaccagcagucccucuaccagaacgccgacaccuacgucuucgucggcaccucccgcuacuccaagaaguucaagcccgagaucgccauccgccccaagguccgcgaccaggagggccgcaugaacuacuacuggacccucgucgagcccggcgacaagaucaccuucgaggccaccggcaaccucgucgucccccgcuacgccuucgccauggagcgcaacgccggcuccggcaucaucaucuccgacacccccguccacgacugcaacaccaccugccagacccccaagggcgccaucaacaccucccuccccuuccagaacauccaccccaucaccaucggcaagugccccaaguacgucaaguccaccaagcuccgccucgccaccggccuccgcaacguccccuccauccagucccgcggccucuucggcgccaucgccggcuucaucgagggcggcuggaccggcauggucgacggcugguacggcuaccaccaccagaacgagcagggcuccggcuacgccgccgaccucaaguccacccagaacgccaucgacgagaucaccaacaaggucaacuccgucaucgagaagaugaacacccaguucaccgccgucggcaaggaguucaaccaccucgagaagcgcaucgagaaccucaacaagaaggucgacgacggcuuccucgacaucuggaccuacaacgccgagcuccucguccuccucgagaacgagcgcacccucgacuaccacgacuccaacgucaagaaccucuacgagaagguccgcucccagcucaagaacaacgccaaggagaucggcaacggcugcuucgaguucuaccacaagugcgacaacaccugcauggaguccgucaagaacggcaccuacgacuaccccaaguacuccgaggaggccaagcucaaccgcgaggagaucgacggcgucaagcucgaguccacccgcaucuaccagauccucgccaucuacuccaccgucgccuccucccucguccucgucgucucccucggcgccaucuccuucuggaugugcuccaacggcucccuccagugccgcaucugcaucuga

SEQ ID NO: 105309 - RNA, 1701 nt, Artificial Sequence; identical to SEQ ID NO: 104794
  derived and/or modified CDS sequence (opt2) from hemagglutinin__InfluenzaA__AFN18245

SEQ ID NO: 105310 - RNA, 1701 nt, Artificial Sequence; identical to SEQ ID NO: 101260
  derived and/or modified CDS sequence (opt2) from hemagglutinin__InfluenzaA__AFN18255

SEQ ID NO: 105311 - RNA, 1701 nt, Artificial Sequence; identical to SEQ ID NO: 105308
  derived and/or modified CDS sequence (opt2) from hemagglutinin__InfluenzaA__AFN18260

SEQ ID NO: 105312 - RNA, 1701 nt, Artificial Sequence; identical to SEQ ID NO: 105308
  derived and/or modified CDS sequence (opt2) from hemagglutinin__InfluenzaA__AFN18267

SEQ ID NO: 105313 - RNA, 1701 nt, Artificial Sequence
  derived and/or modified CDS sequence (opt2) from hemagglutinin__InfluenzaA__AFN18269
augaaggccauccucgucguccuccucuacaccuucgccaccgccaacgccgacacccucugcaucggcuaccacgccaacaacuccaccgacaccgucgacaccguccucgagaagaacgucaccgucacccacuccgucaaccuccucgaggacaagcacaacggcaagcucugcaagcuccgcggcgucgccccccuccaccucggcaagugcaacaucgccggcuggauccucggcaaccccgagugcgagucccucuccaccgccuccuccugguccuacaucgucgagaccuccuccuccgacaacggcaccugcuaccccggcgacuucaucgacuacgaggagcuccgcgagcagcucuccuccgucuccuccuucgagaaguucgagaucuuccccaagaccuccuccuggcccaaccacgacuccaacaagggcgucaccgccgccugcccccacgccggcgccaaguccuucuacaagaaccucaucuggcucgucaagaagggcaacuccuaccccaagcucuccaaguccuacaucaacgacaagggcaaggagguccucguccucuggggcauccaccaccccuccaccuccgccgaccagcagucccucuaccagaacgccgacgccuacgucuucgucggcaccucccgcuacuccaagaaguucaagcccgagaucgccauccgccccaagguccgcgaccaggagggccgcaugaacuacuacuggacccucgucgagcccggcgacaagaucaccuucgaggccaccggcaaccucgucgucccccgcuacgccuucgccauggagcgcaacgccggcuccggcaucaucaucuccgacacccccguccacgacugcaacaccaccugccagacccccaagggcgccaucaacaccucccuccccuuccagaacauccaccccaucaccaucggcaagugccccaaguacgucaaguccaccaagcuccgccucgccaccggccuccgcaacguccccuccauccagucccgcggccucuucggcgccaucgccggcuucaucgagggcggcuggaccggcauggucgacggcugguacggcuaccaccaccagaacgagcagggcuccggcuacgccgccgaccucaaguccacccagaacgccaucgacgagaucaccaacaaggucaacuccgucaucgagaagaugaacacccaguucaccgccgucggcaaggaguucaaccaccucgagaagcgcaucgagaaccucaacaagaaggucgacgacggcuuccucgacaucuggaccuacaacgccgagcuccucguccuccucgagaacgagcgcacccucgacuaccacgacuccaacgucaagaaccucuacgagaagguccgcucccagcucaagaacaacgccaaggagaucggcaacggcugcuucgaguucuaccacaagugcgacaacaccugcauggaguccgucaagaacggcaccuacgacuaccccaaguacuccgaggaggccaagcucaaccgcgaggagaucgacggcgucaagcucgaguccacccgcaucuaccagauccucgccaucuacuccaccgucgccuccucccucguccucgucgucucccucggcgccaucuccuucuggaugugcuccaacggcucccuccagugccgcaucugcaucuga

SEQ ID NO: 105314 - RNA, 1701 nt, Artificial Sequence; identical to SEQ ID NO: 99869
  derived and/or modified CDS sequence (opt2) from hemagglutinin__InfluenzaA__AFN18271

SEQ ID NO: 105315 - RNA, 1701 nt, Artificial Sequence; identical to SEQ ID NO: 100257
  derived and/or modified CDS sequence (opt2) from hemagglutinin__InfluenzaA__AFN18273

SEQ ID NO: 105316 - RNA, 1701 nt, Artificial Sequence; identical to SEQ ID NO: 99869
  derived and/or modified CDS sequence (opt2) from hemagglutinin__InfluenzaA__AFN18280

SEQ ID NO: 105317 - RNA, 1701 nt, Artificial Sequence; identical to SEQ ID NO: 99503
  derived and/or modified CDS sequence (opt2) from hemagglutinin__InfluenzaA__AFN18303

SEQ ID NO: 105318 - RNA, 1701 nt, Artificial Sequence
  derived and/or modified CDS sequence (opt2) from hemagglutinin__InfluenzaA__AFN18305
augaaggccauccucgucguccuccucuacaccuucgccaccgccaacgccgacacccucugcaucggcuaccacgccaacaacuccaccgacaccgucgacaccguccucgagaagaacgucaccgucacccacuccgccaaccuccucgaggacaagcacaacggcaagcucugcaagcuccgcggcgucgccccccuccaccucggcaagugcaacaucgccggcuggauccucggcaaccccgagugcgagucccucuccaccgccuccuccugguccuacaucgucgagaccuccuccuccgacaacggcaccugcuaccccggcgacuucaucgacuacgaggagcuccgcgagcagcucuccuccgucuccuccuucgagcgcuucgagaucuuccccaagaccuccuccuggcccaaccacgacuccaacaagggcgucaccgccgccugcccccacgccggcgccaaguccuucuacaagaaccucaucuggcucgucaagaagggcaacuccuaccccaagcucuccaaguccuacaucaacgacaagggcaaggagguccucguccucuggggcauccaccaccccuccaccuccgccgaccagcagucccucuaccagaacgccgacgccuacgucuucgucggcaccucccgcuacuccaagaaguucaagcccgagaucgccauccgccccaagguccgcgaccaggagggccgcaugaacuacuacuggacccucgucgagcccggcgacaagaucaccuucgaggccaccggcaaccucgucgucccccgcuacgccuucgccauggagcgcaacgccggcuccggcaucaucaucuccgacacccccguccacgacugcaacaccaccugccagacccccaagggcgccaucaacaccucccuccccuuccagaacauccaccccaucaccaucggcaagugccccaaguacgucaaguccaccaagcuccgccucgccaccggccuccgcaacguccccuccauccagucccgcggccucuucggcgccaucgccggcuucaucgagggcggcuggaccggcauggucgacggcugguacggcuaccaccaccagaacgagcagggcuccggcuacgccgccgaccucaaguccacccagaacgccaucgacaagaucaccaacaaggucaacuccgucaucgagaagaugaacacccaguucaccgccgucggcaaggaguucaaccaccucggcaagcgcaucgagaaccucaacaagaaggucgacgacggcuuccucgacaucuggaccuacaacgccgagcuccucguccuccucgagaacgagcgcacccucgacuaccacgacuccaacgucaagaaccucuacgagaagguccgcucccagcucaagaacaacgccaaggagaucggcaacggcugcuucgaguucuaccacaagugcgacaacaccugcauggaguccgucaagaacggcaccuacgacuaccccaaguacuccgaggaggccaagcucaaccgcgaggagaucgacggcgucaagcucgaguccacccgcaucuaccagauccucgccaucuacuccaccgucgccuccucccucguccucgucgucucccucggcgccaucuccuucuggaugugcuccaacggcucccuccagugccgcaucugcaucuga

SEQ ID NO: 105319 - RNA, 1701 nt, Artificial Sequence
  derived and/or modified CDS sequence (opt2) from hemagglutinin__InfluenzaA__AFN18307
augaaggccauccucgucguccuccucuacaccuucgccgccgccaacgccgacacccucugcaucggcuaccacgccaacaacuccaccgacaccgucgacaccguccucgagaagaacgucaccgucacccacuccgucaaccuccucgaggacaagcacaacggcaagcucugcaagcuccgcggcgucgccccccuccaccucggcaagugcaacaucgccggcuggauccucggcaaccccgagugcgagucccucuccaccgccuccuccugguccuacaucgucgagaccuccuccuccgacaacggcaccugcuaccccggcgacuucaucgacuacgaggagcuccgcgagcagcucuccuccgucuccuccuucgagcgcuucgagaucuuccccaagaccuccuccuggcccaaccacgacuccaacaagggcgucaccgccgccugcccccacgccggcgccaaguccuucuacaagaaccucaucuggcucgucaagaagggcaacuccuaccccaagcucuccaaguccuacaucaacgacaagggcaaggagguccucguccucuggggcauccaccaccccuccaccuccgccgaccagcagucccucuaccagaacgccgacgccuacgucuucgucggcaccucccgcuacuccaagaaguucaagcccgagaucgccauccgccccaagguccgcgaccaggagggccgcaugaacuacuacuggacccucgucgagcccggcgacaagaucaccuucgaggccaccggcaaccucgucgucccccgcuacgccuucgccauggagcgcaacaccggcuccggcaucaucaucuccgacacccccguccacgacugcaacaccaccugccagacccccaagggcgccaucaacaccucccuccccuuccagaacauccaccccaucaccaucggcaagugccccaaguacgucaaguccaccaagcuccgccucgccaccggccuccgcaacguccccuccauccagucccgcggccucuucggcgccaucgccggcuucaucgagggcggcuggaccggcauggucgacggcugguacggcuaccaccaccagaacgagcagggcuccggcuacgccgccgaccucaaguccacccagaacgccaucgacaagaucaccaacaaggucaacuccgucaucgagaagaugaacacccaguucaccgccgucggcaaggaguucaaccaccucgagaagcgcaucgagaaccucaacaagaaggucgacgacggcuuccucgacaucuggaccuacaacgccgagcuccucguccuccucgagaacgagcgcacccucgacuaccacgacuccaacgucaagaaccucuacgagaagguccgcucccagcucaagaacaacgccaaggagaucggcaacggcugcuucgaguucuaccacaagugcgacaacaccugcauggaguccgucaagaacggcaccuacgacuaccccaaguacuccgaggaggccaagcucaaccgcgaggagaucgacggcgucaagcucgaguccacccgcaucuaccagauccucgccaucuacuccaccgucgccuccucccucguccucgucgucucccucggcgccaucuccuucuggaugugcuccaacggcucccuccagugccgcaucugcaucuga

SEQ ID NO: 105320 - RNA, 1701 nt, Artificial Sequence
  derived and/or modified CDS sequence (opt2) from hemagglutinin__InfluenzaA__AFN18312
augaaggccauccucgucguccuccucuacaccuucgccaccgccaacgccgacacccucugcaucggcuaccacgccaacaacuccaccgacaccgucgacaccguccucgagaagaacgucaccgucacccacuccgucaaccuccucgaggacaagcacaacggcaagcucugcaagcuccgcggcgucgccccccuccaccucggcaagugcaacaucgccggcuggauccucggcaaccccgagugcgagucccucuccaccgccuccuccugguccuacaucgucgagaccuccuccuccgacaacggcaccugcuaccccggcgacuucaucgacuacgaggagcuccgcgagcagcucuccuccgucuccuccuucgagcgcuucgagaucuuccccaagaccuccuccuggcccaaccacgacuccaacaagggcaucaccgccgccugcccccacgccggcgccaaguccuucuacaagaaccucaucuggcucgucaagaagggcaacuccuaccccaagcucuccaaguccuacaucaacgacaagggcaaggagguccucguccucuggggcauccaccaccccuccaccuccgccgaccagcagucccucuaccagaacgccgacgccuacgucuucgucggcaccucccgcuacuccaagaaguucaagcccgagaucgccauccgccccaagguccgcgaccaggagggccgcaugaacuacuacuggacccucgucgagcccggcgacaagaucaccuucgaggccaccggcaaccucgucgucccccgcuacgccuucgccauggagcgcaacgccggcuccggcaucaucaucuccgacacccccguccacgacugcaacaccaccugccagacccccaagggcgccaucaacaccucccuccccuuccagaacauccaccccaucaccaucggcaagugccccaaguacgucaaguccaccaagcuccgccucgccaccggccuccgcaacguccccuccauccagucccgcggccucuucggcgccaucgccggcuucaucgagggcggcuggaccggcauggucgacggcugguacggcuaccaccaccagaacgagcagggcuccggcuacgccgccgaccucaaguccacccagaacgccaucgacaagaucaccaacaaggucaacuccgucaucgagaagaugaacacccaguucaccgccgucggcaaggaguucaaccaccucgagaagcgcaucgagaaccucaacaagaaggucgacgacggcuuccucgacaucuggaccuacaacgccgagcuccucguccuccucgagaacgagcgcacccucgacuaccacgacuccaacgucaagaaccucuacgagaagguccgcucccagcucaagaacaacgccaaggagaucggcaacggcugcuucgaguucuaccacaagugcgacaacaccugcauggaguccgucaagaacggcaccuacgacuaccccaaguacuccgaggaggccaagcucaaccgcgaggagaucgacggcgucaagcucgaguccacccgcaucuaccagauccucgccaucuacuccaccgucgccuccucccucguccucgucaucucccucggcgccaucuccuucuggaugugcuccaacggcucccuccagugccgcaucugcaucuga

SEQ ID NO: 105321 - RNA, 1701 nt, Artificial Sequence; identical to SEQ ID NO: 101070
  derived and/or modified CDS sequence (opt2) from hemagglutinin__InfluenzaA__AFN18319

SEQ ID NO: 105322 - RNA, 1701 nt, Artificial Sequence; identical to SEQ ID NO: 103167
  derived and/or modified CDS sequence (opt2) from hemagglutinin__InfluenzaA__AFN18324

SEQ ID NO: 105323 - RNA, 1701 nt, Artificial Sequence; identical to SEQ ID NO: 99058
  derived and/or modified CDS sequence (opt2) from hemagglutinin__InfluenzaA__AFN18334

SEQ ID NO: 105324 - RNA, 1701 nt, Artificial Sequence; identical to SEQ ID NO: 100821
  derived and/or modified CDS sequence (opt2) from hemagglutinin__InfluenzaA__AFN18344

SEQ ID NO: 105325 - RNA, 1701 nt, Artificial Sequence; identical to SEQ ID NO: 98705
  derived and/or modified CDS sequence (opt2) from hemagglutinin__InfluenzaA__AFN18354

SEQ ID NO: 105326 - RNA, 1701 nt, Artificial Sequence
  derived and/or modified CDS sequence (opt2) from hemagglutinin__InfluenzaA__AFN18364
augaaggccauccucgucguccuccucuacaccuucgccaccgccaacgccgacacccucugcaucggcuaccacgccaacaacuccaccgacaccgucgacaccguccucgagaagaacgucaccgucacccacuccgucaaccuccucgaggacaagcacaacggcaagcucugcaagcuccgcggcgucgccccccuccaccucggcaagugcaacaucgccggcuggauccucggcaaccccgagugcgagucccucuccaccgccuccuccugguccuacaucgucgagaccuccuccuccgacaacggcaccugcuaccccggcgacuucaucgacuacgaggagcuccgcgagcagcucuccuccgucuccuccuucgagcgcuucgagaucuuccccaagaccuccuccuggcccaaccacgaccucaacaagggcgucaccgccgccugcccccacgccggcgccaaguccuucuacaagaaccucaucuggcucgucaagaagggcaacuccuaccccaagcucuccaaguccuacaucaacgacaagggcaaggagguccucguccucuggggcauccaccaccccuccaccuccgccgaccagcagucccucuaccagaacgccgacgccuacgucuucgucggcaccucccgcuacuccaagaaguucaagcccgagaucgccauccgccccaagguccgcgaccaggagggccgcaugaacuacuacuggacccucgucgagcccggcgacaagaucaccuucgaggccaccggcaaccucgucgucccccgcuacgccuucgccauggagcgcaacgccggcuccggcaucaucaucuccgacacccccguccacgacugcaacaccaccugccagacccccaagggcgccaucaacaccucccuccccuuccagaacauccaccccaucaccaucggcaagugccccaaguacgucaaguccaccaagcuccgccucgccaccggccuccgcaacguccccuccauccagucccgcggccucuucggcgccaucgccggcuucaucgagggcggcuggaccggcauggucgacggcugguacggcuaccaccaccagaacgagcagggcuccggcuacgccgccgaccucaaguccacccagaacgccaucgacgagaucaccaacaaggucaacuccgucaucgagaagaugaacacccaguucaccgccgucggcaaggaguucaaccaccucgagaagcgcaucgagaaccucaacaagaagaucgacgacggcuuccucgacaucuggaccuacaacgccgagcuccucguccuccucgagaacgagcgcacccucgacuaccacgacuccaacgucaagaaccucuacgagaagguccgcucccagcucaagaacaacgccaaggagaucggcaacggcugcuucgaguucuaccacaagugcgacaacaccugcauggaguccgucaagaacggcaccuacgacuaccccaaguacuccgaggaggccaagcucaaccgcgaggagaucgacggcgucaagcucgaguccacccgcaucuaccagauccucgccaucuacuccaccgucgccuccucccucguccucgucgucucccucggcgccaucuccuucuggaugugcuccaacggcucccuccagugccgcaucugcaucuga

SEQ ID NO: 105327 - RNA, 1701 nt, Artificial Sequence; identical to SEQ ID NO: 98705
  derived and/or modified CDS sequence (opt2) from hemagglutinin__InfluenzaA__AFN18374

SEQ ID NO: 105328 - RNA, 1701 nt, Artificial Sequence
  derived and/or modified CDS sequence (opt2) from hemagglutinin__InfluenzaA__AFN18381
augaaggccauccucgucguccuccucuacaccuucgccaccgccaacgccgacacccucugcaucggcuaccacgccaacaacuccaccgacaccgucgacaccguccucgagaagaacgucaccgucacccacuccgucaaccuccucgaggacaagcacaacggcaagcucugcaagcuccgcggcgucgccccccuccaccucggcaagugcaacaucgccggcuggauccucggcaaccccgagugcgagucccucuccaccgccuccuccugguccuacaucgucgagaccuccuccuccgacaacggcaccugcuaccccggcgacuucaucgacuacgaggagcuccgcgagcagcucuccuccgucuccuccuucgagcgcuucgagaucuuccccaagaccuccuccuggcccaaccacgacuccaacaagggcgucaccgccgccugcccccacgccggcgccaaguccuucuacaagaaccucaucuggcucgucaagaagggcaacuccuaccccaagcucuccaaguccuacaucaacgacaagggcaaggagguccucguccucuggggcauccaccaccccuccaccuccgccgaccagcagucccucuaccagaacgccgacgccuacgucuucgucggcaccuccaaguacuccaagaaguucaagcccgagaucgccauccgccccaagguccgcgaccaggagggccgcaugaacuacuacuggacccucgucaagcccggcgacaagaucaccuucgaggccaccggcaaccucgucgucccccgcuacgccuucgccauggagcgcaacgccggcuccggcaucaucaucuccgacacccccguccaggacugcaacaccaccugccagacccccaagggcgccaucaacaccucccuccccuuccagaacauccaccccaucaccaucggcaagugccccaaguacgucaaguccaccaagcuccgccucgccaccggccuccgcaacguccccuccauccagucccgcggccucuucggcgccaucgccggcuucaucgagggcggcuggaccggcauggucgacggcugguacggcuaccaccaccagaacgagcagggcuccggcuacgccgccgaccucaaguccacccagaacgccaucgacgagaucaccaacaaggucaacuccgucaucgagaagaugaacacccaguucaccgccgucggcaaggaguucaaccaccucgagaagcgcaucgagaaccucaacaagaaggucgacgacggcuuccucgacaucuggaccuacaacgccgagcuccucguccuccucgagaacgagcgcacccucgacuaccacgacuccaacgucaagaaccucuacgagaagguccgcucccagcucaagaacaacgccaaggagaucggcaacggcugcuucgaguucuaccacaagugcgacaacaccugcauggaguccgucaagaacggcaccuacgacuaccccaaguacuccgaggaggccaagcucaaccgcgaggagaucgacggcgucaagcucgaguccacccgcaucuaccagauccucgccaucuacuccaccgucgccuccucccucguccucgucgucucccucggcgccaucuccuucuggaugugcuccaacggcucccuccagugccgcaucugcaucuga

SEQ ID NO: 105329 - RNA, 1701 nt, Artificial Sequence
  derived and/or modified CDS sequence (opt2) from hemagglutinin__InfluenzaA__AFN18390
augaaggccauccucgucguccuccucuacaccuucgccaccgccaacgccgacacccucugcaucggcuaccacgccaacaacuccaccgacaccgucgacaccguccucgagaagaacgucaccgucacccacuccgucaaccuccucgaggacaagcacaacggcaagcucugcaagcuccgcggcgucgccccccuccaccucggcaagugcaacaucgccggcuggauccucggcaaccccgagugcgagucccucuccaccgccuccuccugguccuacaucgucgagaccuccuccuccgacaacggcaccugcuaccccggcgacuucaucgacuacgaggagcuccgcgagcagcucuccuccgucuccuccuucgagcgcuucgagaucuuccccaagaccuccuccuggcccaaccacgacuccaacaagggcgucaccgccgccugcccccacgccggcgccaaguccuucuacaagaaccucaucuggcucgucaagaagggcaacuccuaccccaagcucuccaaguccuacaucaacgacaagggcaaggagguccucguccucuggggcauccaccaccccuccaccuccgccgaccagcagucccucuaccagaacgccgacgccuacgucuucgucggcaccucccgcuacuccaagaaguucaagcccgagaucgccauccgccccaagguccgcgaccaggagggccgcaugaacuacuacuggacccucgucgagcccggcgacaagaucaccuucgaggccaccggcaaccucgucgucccccgcuacgccuucgccauggagcgcaacgccggcuccggcaucaucaucuccgacacccccguccacgacugcaacaccaccugccagacccccaagggcgccaucaacaccucccuccccuuccagaacauccaccccaucaccaucggcaagugccccaaguacgucaaguccaccaagcuccgccucgccaccggccuccgcaacguccccuccauccagucccgcggccucuucggcgccaucgccggcuucaucgagggcggcuggaccggcauggucgacggcugguacggcuaccaccaccagaacgagcagggcuccggcuacgccgccgaccucaaguccacccagaacgccaucgacgagaucaccaacaaggucaacuccgucaucgagaagaugaacacccaguucaccgccgucggcaaggaguucaaccaccucgagaagcgcaucgagaaccucaacaagaaggucgacgacggcuuccucgacaucuggaccuacaacgccgagcuccucguccuccucgagaacgagcgcacccucgacuaccacgacuccaacgucaagaaccucuacgagaagauccgcucccagcucaagaacaacgccaaggagaucggcaacggcugcuucgaguucuaccacaagugcgacaacaccugcauggaguccgucaagaacggcaccuacgacuaccccaaguacuccgaggaggccaagcucaaccgcgaggagaucgacggcgucaagcucgaguccacccgcaucuaccagauccucgccaucuacuccaccgucgccuccucccucguccucgucgucucccucggcgccaucuccuucuggaugugcuccaacggcucccuccagugccgcaucugcaucuga

SEQ ID NO: 105330 - RNA, 1701 nt, Artificial Sequence
  derived and/or modified CDS sequence (opt2) from hemagglutinin__InfluenzaA__AFN18400
augaaggccauccucgucguccuccucuacaccuucgccaccgccaacgccgacacccucugcaucggcuaccacgccaacaacuccaccgacaccgucgacaccguccucgagaagaacgucaccgucacccacuccgucaaccuccucgaggacaagcacaacggcaagcucugcaagcuccgcggcgucaccccccuccaccucggcaagugcaacaucgccggcuggauccucggcaaccccgagugcgagucccucuccaaggccuccuccugguccuacaucgucgagaccuccuccuccgacaacggcaccugcuaccccggcgacuucaucgacuacgaggagcuccgcgagcagcucuccuccgucuccuccuucgagcgcuucgagaucuuccccaagaccuccuccuggcccaaccacgacuccaacaagggcgucaccgccgccugcccccacgccggcgccaaguccuucuacaagaaccucaucuggcucgucaagaagggcaacuccuaccccaagcucuccaaguccuacaucaacgacaagggcaaggagguccucguccucuggggcauccaccaccccuccaccuccgccgaccagcagucccucuaccagaacgccgacgccuacgucuucgucggcaccucccgcuacuccaagaaguucaagcccgagaucgccauccgccccaagguccgcgaccaggagggccgcaugaacuacuacuggacccucgucgagcccggcgacaagaucaccuucgaggccaccggcaaccucgucgucccccgcuacgccuucgccauggagcgcaacgucggcuccggcaucaucaucuccgacacccccguccacgacugcaacaccaccugccagacccccaagggcgccaucaacaccucccuccccuuccagaacauccaccccaucaccaucggcaagugccccaaguacgucaaguccaccaagcuccgccucgccaccggccuccgcaacguccccuccauccagucccgcggccucuucggcgccaucgccggcuucaucgagggcggcuggaccggcauggucgacggcugguacggcuaccaccaccagaacgagcagggcuccggcuacgccgccgaccucaaguccacccagaacgccaucgacgagaucaccaacaaggucaacuccgucaucgagaagaugaacacccaguucaccgccgucggcaaggaguucaaccaccucgagaagcgcaucgagaaccucaacaagaaggucgacgacggcuuccucgacaucuggaccuacaacgccgagcuccucguccuccucgagaacgagcgcacccucgacuaccacgacuccaacgucaagaaccucuacgagaagguccgcucccagcucaagaacaacgccaaggagaucggcaacggcugcuucgaguucuaccacaagugcgacaacaccugcauggaguccgucaagaacggcaccuacgacuaccccaaguacuccgaggaggccaagcucaaccgcgaggagaucgacggcgucaagcucgaguccacccgcaucuaccagauccucgccaucuacuccaccgucgccuccucccucguccucgucgucucccucggcgccaucuccuucuggaugugcuccaacggcucccuccagugccgcaucugcaucuga

SEQ ID NO: 105331 - RNA, 1701 nt, Artificial Sequence; identical to SEQ ID NO: 98796
  derived and/or modified CDS sequence (opt2) from hemagglutinin__InfluenzaA__AFN18410

SEQ ID NO: 105332 - RNA, 1701 nt, Artificial Sequence; identical to SEQ ID NO: 98705
  derived and/or modified CDS sequence (opt2) from hemagglutinin__InfluenzaA__AFN18420

SEQ ID NO: 105333 - RNA, 1701 nt, Artificial Sequence
  derived and/or modified CDS sequence (opt2) from hemagglutinin__InfluenzaA__AFN18430
augaaggccauccucgucguccuccucuacaccuucgccaccgccaacgccgacacccucugcaucggcuaccacgccaacaacuccaccgacaccgucgacaccguccucgagaagaacgucaccgucacccacuccgucaaccuccucgagaacaagcacaacggcaagcucugcaagcuccgcggcgucgccccccuccaccucggcaagugcaacaucgccggcuggauccucggcaaccccgagugcgagucccucuccaccgccuccuccugguccuacaucgucgagaccuccuccuccgacaacggcaccugcuaccccggcgacuucaucgacuacgaggagcuccgcgagcagcucuccuccgucuccuccuucgagcgcuucgagaucuuccccaagaccuccuccuggcccaaccacgacuccaacaagggcgucaccgccgccugcccccacgccggcgccaaguccuucuacaagaaccucaucuggcucgucaagaagggcaacuccuaccccaagcucuccaaguccuacaucaacgacaagggcaaggagguccucguccucuggggcauccaccaccccuccaccuccgccgaccagcagucccucuaccagaacgccgacgccuacgucuucgucggcaccucccgcuacuccaagaaguucaagcccgagaucgccauccgccccaagguccgcgaccaggagggccgcaugaacuacuacuggacccucgucgagcccggcgacaagaucaccuucgaggccaccggcaaccucgucgucccccgcuacgccuucgccaugguccgcaacgccggcuccggcaucaucaucuccgacacccccguccacgacugcaacaccaccugccagacccccaagggcgccaucaacaccucccuccccuuccagaacauccaccccaucaccaucggcaagugccccaaguacgucaaguccaccaagcuccgccucgccaccggccuccgcaacguccccuccauccagucccgcggccucuucggcgccaucgccggcuucaucgagggcggcuggaccggcauggucgacggcugguacggcuaccaccaccagaacgagcagggcuccggcuacgccgccgaccucaaguccacccagaacgccaucgacgagaucaccaacaaggucaacuccgucaucgagaagaugaacacccaguucaccgccgucggcaaggaguucaaccaccucgagaagcgcaucgagaaccucaacaagaaggucgacgacggcuuccucgacaucuggaccuacaacgccgagcuccucguccuccucgagaacgagcgcacccucgacuaccacgacuccaacgucaagaaccucuacgagaagguccgcucccagcucaagaacaacgccaaggagaucggcaacggcugcuucgaguucuaccacaagugcgacaacaccugcauggaguccgucaagaacggcaccuacgacuaccccaaguacuccgaggaggccaagcucaaccgcgaggagaucgacggcgucaagcucgaguccacccgcaucuaccagauccucgccaucuacuccaccgucgccuccucccucguccucgucgucucccucggcgccaucuccuucuggaugugcuccaacggcucccuccagugccgcaucugcaucuga

SEQ ID NO: 105334 - RNA, 1701 nt, Artificial Sequence; identical to SEQ ID NO: 98705
  derived and/or modified CDS sequence (opt2) from hemagglutinin__InfluenzaA__AFN18440

SEQ ID NO: 105335 - RNA, 1701 nt, Artificial Sequence; identical to SEQ ID NO: 98705
  derived and/or modified CDS sequence (opt2) from hemagglutinin__InfluenzaA__AFN18450

SEQ ID NO: 105336 - RNA, 1701 nt, Artificial Sequence; identical to SEQ ID NO: 101260
  derived and/or modified CDS sequence (opt2) from hemagglutinin__InfluenzaA__AFN18460

SEQ ID NO: 105337 - RNA, 1701 nt, Artificial Sequence; identical to SEQ ID NO: 99566
  derived and/or modified CDS sequence (opt2) from hemagglutinin__InfluenzaA__AFN18470

SEQ ID NO: 105338 - RNA, 1701 nt, Artificial Sequence; identical to SEQ ID NO: 98796
  derived and/or modified CDS sequence (opt2) from hemagglutinin__InfluenzaA__AFN18480

SEQ ID NO: 105339 - RNA, 1701 nt, Artificial Sequence; identical to SEQ ID NO: 99566
  derived and/or modified CDS sequence (opt2) from hemagglutinin__InfluenzaA__AFN18490

SEQ ID NO: 105340 - RNA, 1701 nt, Artificial Sequence; identical to SEQ ID NO: 98705
  derived and/or modified CDS sequence (opt2) from hemagglutinin__InfluenzaA__AFN18497

SEQ ID NO: 105341 - RNA, 1701 nt, Artificial Sequence; identical to SEQ ID NO: 98705
  derived and/or modified CDS sequence (opt2) from hemagglutinin__InfluenzaA__AFN18512

SEQ ID NO: 105342 - RNA, 1701 nt, Artificial Sequence
  derived and/or modified CDS sequence (opt2) from hemagglutinin__InfluenzaA__AFN18519
augaaggccauccucgucguccuccucuacaccuucgccaccgccaacgccgacacccucugcaucggcuaccacgccaacaacuccaccgacaccgucgacaccguccucgagaagaacgucaccgucacccacuccgucaaccuccucgaggacaagcacaacggcaagcucugcaagcuccgcggcgucgccccccuccaccucggcaagugcaacaucgccggcuggauccucggcaaccccgagugcgagucccucuccaccgccuccuccugguccuacaucgucgagaccuccuccuccgacaacggcaccugcuaccccggcgacuucaucgacuacgaggagcuccgcgagcagcucuccuccgucuccuccuucgagcgcuucgagaucuuccccaagaccuccuccuggcccaaccacgacuccaacaagggcgucaccgccgccugcccccacgccggcgccaaguccuucuacaagaaccucaucuggcucgucaagaaggagaacuccuaccccaagcucuccaaguccuacaucaacgacaagggcaaggagguccucguccucuggggcauccaccaccccuccaccuccgccgaccagcagucccucuaccagaacgccgacgccuacgucuucgucggcaccucccgcuacuccaagaaguucaagcccgagaucgccauccgccccaagguccgcgaccaggagggccgcaugaacuacuacuggacccucgucgagcccggcgacaagaucaccuucgaggccaccggcaaccucgucgucccccgcuacgccuucgccauggagcgcaacgccggcuccggcaucaucaucuccgacacccccguccacgacugcaacaccaccugccagacccccaagggcgccaucaacaccucccuccccuuccagaacauccaccccaucaccaucggcaagugccccaaguacgucaaguccaccaagcuccgccucgccaccggccuccgcaacguccccuccauccagucccgcggccucuucggcgccaucgccggcuucaucgagggcggcuggaccggcauggucgacggcugguacggcuaccaccaccagaacgagcagggcuccggcuacgccgccgaccucaaguccacccagaacgccaucgacgagaucaccaacaaggucaacuccgucaucgagaagaugaacacccaguucaccgccgucggcaaggaguucaaccaccucgagaagcgcaucgagaaccucaacaagaaggucgacgacggcuuccucgacaucuggaccuacaacgccgagcuccucguccuccucgagaacgagcgcacccucgacuaccacgacuccaacgucaagaaccucuacgagaagguccgcucccagcucaagaacaacgccaaggagaucggcaacggcugcuucgaguucuaccacaagugcgacaacaccugcauggaguccgucaagaacggcaccuacgacuaccccaaguacuccgaggaggccaagcucaaccgcgaggagaucgacggcgucaagcucgaguccacccgcaucuaccagauccucgccaucuacuccaccgucgccuccucccucguccucgucgucucccucggcgccaucuccuucuggaugugcuccaacggcucccuccagugccgcaucugcaucuga

SEQ ID NO: 105343 - RNA, 1701 nt, Artificial Sequence
  derived and/or modified CDS sequence (opt2) from hemagglutinin__InfluenzaA__AFN18521
augaaggccauccucgucguccuccucuacaccuucgccaccgccaacgccgacacccucugcaucggcuaccacgccaacaacuccaccgacaccgucgacaccguccucgagaagaacgucaccgucacccacuccgucaaccuccucgaggacaagcacaacggcaagcucugcaagcuccgcggcgucgccccccuccaccucggcaagugcaacaucgccggcuggauccucggcaaccccgagugcgagucccucuccaccgccuccuccugguccuacaucgucgagaccuccuccuccgacaacggcaccugcuaccccggcgacuucaucgacuacgaggagcuccgcgagcagcucuccuccgucuccuccuucgagcgcuucgagaucuuccccaagaccuccuccuggcccaaccacgacuccaacaagggcgucaccgccgccugcccccacgccggcgccaaguccuucuacaagaaccucaucuggcucgucaagaagggcaacuccuaccccaagcucuccaaguccuacaucaacgacaagggcaaggagguccucguccucuggggcauccaccaccccuccaccuccgccgaccagcagucccucuaccagaacgccgacgccuacgucuucgucggcaccucccgcuacuccaagaaguucaagcccgagaucgccauccgccccaagguccgcgaccaggagggccgcaugaacuacuacuggacccucgucgagcccggcgacaagaucaccuucgaggccaccggcaaccucgucgucccccgcuacgccuucgccaugguccgcaacgccggcuccggcaucaucaucuccgacacccccguccacgacugcaacaccaccugccagacccccaagggcgccaucaacaccucccuccccuuccagaacauccaccccaucaccaucggcaagugccccaaguacgucaaguccaccaagcuccgccucgccaccggccuccgcaacguccccuccauccagucccgcggccucuucggcgccaucgccggcuucaucgagggcggcuggaccggcauggucgacggcugguacggcuaccaccaccagaacgagcagggcuccggcuacgccgccgaccucaaguccacccagaacgccaucgacgagaucaccaacaaggucaacuccgucaucgagaagaugaacacccaguucaccgccgucggcaaggaguucaaccaccucgagaagcgcaucgagaaccucaacaagaaggucgacgacggcuuccucgacaucuggaccuacaacgccgagcuccucguccuccucgagaacgagcgcacccucgacuaccacgacuccaacgucaagaaccucuacgagaagguccgcucccagcucaagaacaacgccaaggagaucggcaacggcugcuucgaguucuaccacaagugcgacaacaccugcauggaguccgucaagaacggcaccuacgacuaccccaaguacuccggcgaggccaagcucaaccgcgaggagaucgacggcgucaagcucgaguccacccgcaucuaccagauccucgccaucuacuccaccgucgccuccucccucguccucgucgucucccucggcgccaucuccuucuggaugugcuccaacggcucccuccagugccgcaucugcaucuga

SEQ ID NO: 105344 - RNA, 1701 nt, Artificial Sequence; identical to SEQ ID NO: 98705
  derived and/or modified CDS sequence (opt2) from hemagglutinin__InfluenzaA__AFN18528

SEQ ID NO: 105345 - RNA, 1701 nt, Artificial Sequence; identical to SEQ ID NO: 98705
  derived and/or modified CDS sequence (opt2) from hemagglutinin__InfluenzaA__AFN18531

SEQ ID NO: 105346 - RNA, 1701 nt, Artificial Sequence; identical to SEQ ID NO: 101302
  derived and/or modified CDS sequence (opt2) from hemagglutinin__InfluenzaA__AFN18543

SEQ ID NO: 105347 - RNA, 1701 nt, Artificial Sequence; identical to SEQ ID NO: 103587
  derived and/or modified CDS sequence (opt2) from hemagglutinin__InfluenzaA__AFN18545

SEQ ID NO: 105348 - RNA, 1701 nt, Artificial Sequence; identical to SEQ ID NO: 99566
  derived and/or modified CDS sequence (opt2) from hemagglutinin__InfluenzaA__AFN18550

SEQ ID NO: 105349 - RNA, 1701 nt, Artificial Sequence
  derived and/or modified CDS sequence (opt2) from hemagglutinin__InfluenzaA__AFN18557
augaaggccauccucgucguccuccucuacaccuucgccaccgccaacgccgacacccucugcaucggcuaccacgccaacaacuccaccgacaccgucgacaccguccucgagaagaacgucaccgucacccacuccgucaaccuccucgaggacaagcacaacggcaagcucugcaagcuccgcggcgucgccccccuccaccucggcaagugcaacaucgccggcuggauccucggcaaccccgagugcgagucccucuccaccgccuccuccugguccuacaucgucgagaccuccuccuccgacaacggcaccugcuaccccggcgacuucaucgacuacgaggagcuccgcgagcagcucuccuccgucuccuccuucgagcgcuucgagaucuuccccaagaccuccuccuggcccaaccacgacuccaacaagggcgucaccgccgccugcccccacgccggcgccaaguccuucuacaagaaccucaucuggcucgucaagaagggcaacuccuaccccaagcucuccaaguccuacaucaacgacaagggcaaggagguccucguccucuggggcauccaccaccccuccaccuccgccgaccagcagucccucuaccagaacgccgacgccuacgucuucgucggcaccucccgcuacuccaagaaguucaagcccgagaucgccauccgccccaagguccgcgaccaggagggccgcaugaacuacuacuggacccucgucgagcccggcgacaagaucaccuucgaggccaccggcaaccucgucgucccccgcuacgccuucgccauggagcgcaacgccggcuccggcaucaucaucuccgacacccccgcccacgacugcaacaccaccugccagacccccaagggcgccaucaacaccucccuccccuuccagaacauccaccccaucaccaucggcaagugccccaaguacgucaaguccaccaagcuccgccucgccaccggccuccgcaacguccccuccauccagucccgcggccucuucggcgccaucgccggcuucaucgagggcggcuggaccggcauggucgacggcugguacggcuaccaccaccagaacgagcagggcuccggcuacgccgccgaccucaaguccacccagaacgccaucgacgagaucaccaacaaggucaacuccgucaucgagaagaugaacacccaguucaccgccgucggcaaggaguucaaccaccucgagaagcgcaucgagaaccucaacaagaaggucgacgacggcuuccucgacaucuggaccuacaacgccgagcuccucguccuccucgagaacgagcgcacccucgacuaccacgacuccaacgucaagaaccucuacgagaagguccgcucccagcucaagaacaacgccaaggagaucggcaacggcugcuucgaguucuaccacaagugcgacaacaccugcauggaguccgucaagaacggcaccuacgacuaccccaaguacuccgaggaggccaagcucaaccgcgaggagaucgacggcgucaagcucgaguccacccgcaucuaccagauccucgccaucuacuccaccgucgccuccucccucguccucgucgucucccucggcgccaucuccuucuggaugugcuccaacggcucccuccagugccgcaucugcaucuga

SEQ ID NO: 105350 - RNA, 1701 nt, Artificial Sequence
  derived and/or modified CDS sequence (opt2) from hemagglutinin__InfluenzaA__AFN18559
augaaggccauccucgucguccuccucuacaccuucgccaccgccaacgccgacacccucugcaucggcuaccacgccaacaacuccaccgacaccgucgacaccguccucgagaagaacgucaccgucacccacuccgucaaccuccucgaggacaagcacaacggcaagcucugcaagcuccgcggcgucgccccccuccaccucggcaagugcaacaucgccggcuggauccucggcaaccccgagugcgagucccucuccaccgccuccuccugguccuacaucgucgagaccuccuccuccgacaacggcaccugcuaccccggcgacuucaucgacuacgaggagcuccgcgagcagcucuccuccgucuccuccuucgagcgcuucgagaucuuccccaagaccuccuccuggcccaaccacgacuccaacaagggcgucaccgccgccugcccccacgccggcgccaaguccuucuacaagaaccucaucuggcucgucaagaagggcaacuccuaccccaagcucuccaaguccuacaucaacgacaagggcaaggagguccucguccucuggggcauccaccaccccuccaccuccgccgaccagcagaaccucuaccagaacgccgacgccuacgucuucgucggcaccucccgcuacuccaagaaguucaagcccgagaucgccauccgccccaagguccgcgaccaggagggccgcaugaacuacuacuggacccucgucgagcccggcgacaagaucaccuucgaggccaccggcaaccucgucgucccccgcuacgccuucgccauggagcgcaacgccggcuccggcaucaucaucuccgacacccccguccacgacugcaacaccaccugccagacccccaagggcgccaucaacaccucccuccccuuccagaacauccaccccaucaccaucggcaagugccccaaguacgucaaguccaccaagcuccgccucgccaccggccuccgcaacguccccuccauccagucccgcggccucuucggcgccaucgccggcuucaucgagggcggcuggaccggcauggucgacggcugguacggcuaccaccaccagaacgagcagggcuccggcuacgccgccgaccucaaguccacccagaacgccaucgacgagaucaccaacaaggucaacuccgucaucgagaagaugaacacccaguucaccgccgucggcaaggaguucaaccaccucgagaagcgcaucgagaaccucaacaagaaggucgacgacggcuuccucgacaucuggaccuacaacgccgagcuccucguccuccucgagaacgagcgcacccucgacuaccacgacuccaacgucaagaaccucuacgagaagguccgcucccagcucaagaacaacgccaaggagaucggcaacggcugcuucgaguucuaccacaagugcgacaacaccugcauggaguccgucaagaacggcaccuacgacuaccccaaguacuccgaggaggccaagcucaaccgcgaggagaucgacggcgucaagcucgaguccacccgcaucuaccagauccucgccaucuacuccaccgucgccuccucccucguccucgucgucucccucggcgccaucuccuucuggaugugcuccaacggcucccuccagugccgcaucugcaucuga

SEQ ID NO: 105351 - RNA, 1701 nt, Artificial Sequence; identical to SEQ ID NO: 99571
  derived and/or modified CDS sequence (opt2) from hemagglutinin__InfluenzaA__AFN18561

SEQ ID NO: 105352 - RNA, 1701 nt, Artificial Sequence; identical to SEQ ID NO: 99807
  derived and/or modified CDS sequence (opt2) from hemagglutinin__InfluenzaA__AFN18563

SEQ ID NO: 105353 - RNA, 1701 nt, Artificial Sequence
  derived and/or modified CDS sequence (opt2) from hemagglutinin__InfluenzaA__AFN18565
augaaggccauccucgucguccuccucuacaccuucgccaccgccaacgccgacacccucugcaucggcuaccacgccaacaacuccaccgacaccgucgacaccguccucgagaagaacgucaccgucacccacuccgucaaccuccucgaggacaagcacaacggcaagcucugcaagcuccgcggcgucgccccccuccaccucggcaagugcaacaucgccggcuggauccucggcaaccccgagugcgagucccucuccaccgccuccuccugguccuacaucgucgagaccuccuccuccgacaacggcaccugcuaccccggcgacuucaucgacuacgaggagcuccgcgagcagcucuccuccgucuccuccuucgagcgcuucgagaucuuccccaagaccuccuccuggcccaaccacgacuccaacaagggcgucaccgccgccugcccccacgccggcgccaaguccuucuacaagaaccucaucuggcucgucaagaagggcaacuccuaccccaagcucuccaaguccuacaucaacgacaagggcaaggagguccucguccucuggggcauccaccaccccuccaccuccgccgaccagcagucccucuaccagaacgccgacgccuacgucuucgucggcaccucccgcuacuccaagaaguucaagcccgagaucgccauccgccccaagguccgcgaccaggagggccgcaugaacuacuacuggacccucgucgagcccggcgacaagaucaccuucgaggccaccggcaaccucgucgucccccgcuacgccuucgccaugguccgcaacgccggcuccggcaucaucaucuccgacacccccguccacgacugcaacaccaccugccagacccccaagggcgccaucaacaccucccuccccuuccagaacauccaccccaucaccaucggcaagugccccaaguacgucaaguccaccaagcuccgccucgccaccggccuccgcaacguccccuccauccagucccgcggccucuucggcgccaucgccggcuucaucgagggcggcuggaccggcauggucgacggcugguacggcuaccaccaccagaacgagcagggcuccggcuacgccgccgaccucaaguccacccagaacgccaucgacgagaucaccaacaaggucaacuccgucaucgagaagaugaacacccaguucaccgccgucggcaaggaguucaaccaccucgagaagcgcauggagaaccucaacaagaaggucgacgacggcuuccucgacaucuggaccuacaacgccgagcuccucguccuccucgagaacgagcgcacccucgacuaccacgacuccaacgucaagaaccucuacgagaagguccgcucccagcucaagaacaacgccaaggagaucggcaacggcugcuucgaguucuaccacaagugcgacaacaccugcauggaguccgucaagaacggcaccuacgacuaccccaaguacuccgaggaggccaagcucaaccgcgaggagaucgacggcgucaagcucgaguccacccgcaucuaccagauccucgccaucuacuccaccgucgccuccucccucguccucgucgucucccucggcgccaucuccuucuggaugugcuccaacggcucccuccagugccgcaucugcaucuga

SEQ ID NO: 105354 - RNA, 1701 nt, Artificial Sequence
  derived and/or modified CDS sequence (opt2) from hemagglutinin__InfluenzaA__AFN18570
augaaggccauccucgucguccuccucuacaccuucgccaccgccaacgccgacacccucugcaucggcuaccacgccaacaacuccaccgacaccgucgacaccguccucgagaagaacgucaccgucacccacuccgucaaccuccucgaggacaagcacaacggcaagcucugcaagcuccgcggcgucgccccccuccaccucggcaagugcaacaucgccggcuggauccucggcaaccccgagugcgagucccucuccaccgucuccuccugguccuacaucgucgagaccuccuccuccgacaacggcaccugcuaccccggcgacuucaucgacuacgaggagcuccgcgagcagcucuccuccgucuccuccuucgagcgcuucgagaucuuccccaagaccuccuccuggcccaaccacgacuccaacaagggcgucaccgccgccugcccccacgccggcgccaaguccuucuacaagaaccucaucuggcucgucaagaagggcaacuccuaccccaagcucuccaaguccuacaucaacgacaagggcaaggagguccucguccucuggggcauccaccaccccuccaccuccgccgaccagcagucccucuaccagaacgccgacgccuacgucuucgucggcaccucccgcuacuccaagaaguucaagcccgagaucgccauccgccccaagguccgcgaccaggagggccgcaugaacuacuacuggacccucgucgagcccggcgacaagaucaccuucgaggccaccggcaaccucgucgucccccgcuacgccuucgccauggagcgcaacgccggcuccggcaucaucaucuccgacacccccguccacgacugcaacaccaccugccagacccccaagggcgccaucaacaccucccuccccuuccagaacauccaccccaucaccaucggcaagugccccaaguacgucaaguccaccaagcuccgccucgccaccggccuccgcaacguccccuccauccagucccgcggccucuucggcgccaucgccggcuucaucgagggcggcuggaccggcauggucgacggcugguacggcuaccaccaccagaacgagcagggcuccggcuacgccgccgaccucaaguccacccagaacgccaucgacgagaucaccaacaaggucaacuccgucaucgagaagaugaacacccaguucaccgccgucggcaaggaguucaaccaccucgagaagcgcaucgagaaccucaacaagaaggucgacgacggcuuccucgacaucuggaccuacaacgccgagcuccucguccuccucgagaacgagcgcacccucgacuaccacgacuccaacgucaagaaccucuacgagaagguccgcucccagcucaagaacaacgccaaggagaucggcaacggcugcuucgaguucuaccacaagugcgacaacaccugcauggaguccgucaagaacggcaccuacgacuaccccaaguacuccgaggaggccaagcucaaccgcgaggagaucgacggcgucaagcucgaguccacccgcaucuaccagauccucgccaucuacuccaccgucgccuccucccucguccucgucgucucccucggcgccaucuccuucuggaugugcuccaacggcucccuccagugccgcaucugcaucuga

SEQ ID NO: 105355 - RNA, 1701 nt, Artificial Sequence; identical to SEQ ID NO: 98705
  derived and/or modified CDS sequence (opt2) from hemagglutinin__InfluenzaA__AFN18580

SEQ ID NO: 105356 - RNA, 1701 nt, Artificial Sequence; identical to SEQ ID NO: 98947
  derived and/or modified CDS sequence (opt2) from hemagglutinin__InfluenzaA__AFN18590

SEQ ID NO: 105357 - RNA, 1701 nt, Artificial Sequence
  derived and/or modified CDS sequence (opt2) from hemagglutinin__InfluenzaA__AFN18600
augaaggccauccucgucguccuccucuacaccuucgccaccgccaacgccgacacccucugcaucggcuaccacgccaacaacuccaccgacaccgucgacaccguccucgagaagaacgucaccgucacccacuccgucaaccuccucgaggacaagcacaacggcaagcucugcaagcuccgcggcgucgccccccuccaccucggcaagugcaacaucgccggcuggauccucggcaaccccgagugcgagucccucuccaccgccuccuccugguccuacaucgucgagaccuccuccuccgacaacggcaccugcuaccccggcgacuucaucgacuacgaggagcuccgcgagcagcucuccuccgucuccuccuucgagcgcuucgagaucuuccccaagaccuccuccuggcccaaccacgacuccaacaagggcgucaccgccgccugcccccacgccggcgccaaguccuucuacaagaaccucaucuggcucgucaagaagggcaacuccuaccccaagcucuccaaguccuacaucaacgacaagggcaaggagguccucguccucuggggcauccaccaccccuccaccuccgccgaccagcagaaccucuaccagaacgccgacgccuacgucuucgucggcaccucccgcuacuccaagaaguucaagcccgagaucgccauccgccccaagguccgcgaccaggagggccgcaugaacuacuacuggacccucgucgagcccggcgacaagaucaccuucgaggccaccggcaaccucgucgucccccgcuacgccuucgccauggagcgcaacgccggcuccggcaucaucaucuccgacacccccguccacgacugcaacaccaccugccagacccccaagggcgccaucaacaccucccuccccuuccagaacauccaccccaucaccaucggcaagugccccaaguacgucaaguccaccaagcuccgccucgccaccggccuccgcaacguccccuccauccagucccgcggccucuucggcgccaucgccggcuucaucgagggcggcuggaccggcauggucgacggcugguacggcuaccaccaccagaacgagcagggcuccggcuacgccgccgaccucaaguccacccagaacgccaucgacgagaucaccaacaaggucaacuccgucaucgagaagaugaacacccaguucaccgccgucggcaaggaguucaaccaccucgagaagcgcaucgagaaccucaacaagaaggucgacgacggcuuccucgacaucuggaccuacaacgccgagcuccucguccuccucgagaacgagcgcacccucgacuaccacgacuccaacgucaagaaccucuacgagaagguccgcucccagcucaagaacaacgccaaggagaucggcaacggcugcuucgaguucuaccacaagugcgacaacgccugcauggaguccgucaagaacggcaccuacgacuaccccaaguacuccgaggaggccaagcucaaccgcgaggagaucgacggcgucaagcucgaguccacccgcaucuaccagauccucgccaucuacuccaccgucgccuccucccucguccucgucgucucccucggcgccaucuccuucuggaugugcuccaacggcucccuccagugccgcaucugcaucuga

SEQ ID NO: 105358 - RNA, 1701 nt, Artificial Sequence; identical to SEQ ID NO: 98705
  derived and/or modified CDS sequence (opt2) from hemagglutinin__InfluenzaA__AFN18610

SEQ ID NO: 105359 - RNA, 1701 nt, Artificial Sequence
  derived and/or modified CDS sequence (opt2) from hemagglutinin__InfluenzaA__AFN18617
augaaggccauccucgucguccuccucuacaccuucgccaccgccaacgccgacacccucugcaucggcuaccacgccaacaacuccaccgacaccgucgacaccguccucgagaagaacgucaccgucacccacuccgucaaccuccucgaggacaagcacaacggcaagcucugcaagcuccgcggcgucgccccccuccaccucggcaagugcaacaucgccggcuggauccucggcaaccccgagugcgagucccucuccaccgccuccuccugguccuacaucgucgagaccuccuccuccgacaacggcaccugcuaccccggcgacuucaucgacuacgaggagcuccgcgagcagcucuccuccgucuccuccuucgagcgcuucgagaucuuccccaagaccuccuccuggcccaaccacgacuccaacaagggcgucaccgccgccugcccccacgccggcgccaaguccuucuacaagaaccucaucuggcucgucaagaagggcaacuccuaccccaagcucuccaaguccuacaucaacgacaagggcaaggagguccucguccucuggggcauccaccaccccuccaccuccgccgaccagcagucccucuaccagaacgccgacgccuacgucuucgucggcaccucccgcuacuccaagaaguucaagcccgagaucgccauccgccccaagguccgcgaccaggagggccgcaugaacuacuacuggacccucgucgagcccggcgacaagaucaccuucgaggccaccggcaaccucgucgucccccgcuacgccuucgccaugguccgcaacgccggcuccggcaucaucaucuccgacacccccguccacgacugcaacaccaccugccagacccccaagggcgccaucaacaccucccuccccuuccagaacauccaccccaucaccaucggcaagugccccaaguacgucaaguccaccaagcuccgccucgccaccggccuccgcaacguccccuccauccagucccgcggccucuucggcgccaucgccggcuucaucgagggcggcuggaccggcauggucgacggcugguacggcuaccaccaccagaacgagcagggcuccggcuacgccgccgaccucaaguccacccaguccgccaucgacgagaucaccaacaaggucaacuccgucaucgagaagaugaacacccaguucaccgccgucggcaaggaguucaaccaccucgagaagcgcaucgagaaccucaacaagaaggucgacgacggcuuccucgacaucuggaccuacaacgccgagcuccucguccuccucgagaacgagcgcacccucgacuaccacgacuccaacgucaagaaccucuacgagaagguccgcucccagcucaagaacaacgccaaggagaucggcaacggcugcuucgaguucuaccacaagugcgacaacaccugcauggaguccgucaagaacggcaccuacgacuaccccaaguacuccgaggaggccaagcucaagcgcgaggagaucgacggcgucaagcucgaguccacccgcaucuaccagauccucgccaucuacuccaccgucgccuccucccucguccucgucgucucccucggcgccaucuccuucuggaugugcuccaacggcucccuccagugccgcaucugcaucuga

SEQ ID NO: 105360 - RNA, 1701 nt, Artificial Sequence; identical to SEQ ID NO: 99566
  derived and/or modified CDS sequence (opt2) from hemagglutinin__InfluenzaA__AFN18622

SEQ ID NO: 105361 - RNA, 1701 nt, Artificial Sequence; identical to SEQ ID NO: 98705
  derived and/or modified CDS sequence (opt2) from hemagglutinin__InfluenzaA__AFN18629

SEQ ID NO: 105362 - RNA, 1701 nt, Artificial Sequence; identical to SEQ ID NO: 98947
  derived and/or modified CDS sequence (opt2) from hemagglutinin__InfluenzaA__AFN18634

SEQ ID NO: 105363 - RNA, 1701 nt, Artificial Sequence
  derived and/or modified CDS sequence (opt2) from hemagglutinin__InfluenzaA__AFN18644
augaaggccauccucgucguccuccucuacaccuucgccaccgccaacgccgacacccucugcaucggcuaccacgccaacaacuccaccgacaccgucgacaccguccucgagaagaacgucaccgucacccacuccgucaaccuccucgaggacaagcacaacggcaagcucugcaagcuccgcggcgucgccccccuccaccucggcaagugcaacaucgccggcuggauccucggcaaccccgagugcgagucccucuccaccgccuccuccugguccuacaucgucgagaccuccuccuccgacaacggcaccugcuaccccggcgacuucaucgacuacgaggagcuccgcgagcagcucuccuccgucuccuccuucgagcgcuucgagaucuuccccaagaccuccuccuggcccaaccacgacuccaacaagggcgucaccgccgccugcccccacgccggcgccaaguccuucuacaagaaccucaucuggcucgucaagaagggcaacuccuaccccaagcucuccaaguccuacaucaacgacaagggcaaggagguccucguccucuggggcauccaccaccccuccaccuccgccgaccagcagucccucuaccagaacgccgacgccuacgucuucgucggcaccucccgcuacuccaagaaguucaagcccgagaucgccauccgccccaagguccgcgaccaggagggccgcaugaacuacuacuggacccucgucgagcccggcgacaagaucaccuucgaggccaccggcaaccucgucgucccccgcuacgccuucgccaugguccgcaacgccggcuccggcaucaucaucuccgacacccccguccacgacugcaacaccaccugccagacccccaagggcgccaucaacaccucccuccccuuccagaacauccaccccaucaccaucggcaagugccccaaguacgucaaguccaccaagcuccgccucgccaccggccuccgcaacguccccuccauccagucccgcggccucuucggcgccaucgccggcuucaucgagggcggcuggaccggcauggucgacggcugguacggcuaccaccaccagaacgagcagggcuccggcuacgccgccgaccucaaguccacccaguccgccaucgacgagaucaccaacaaggucaacuccgucaucgagaaggucaacacccaguucaccgccgucggcaaggaguucaaccaccucgagaagcgcaucgagaaccucaacaagaaggucgacgacggcuuccucgacaucuggaccuacaacgccgagcuccucguccuccucgagaacgagcgcacccucgacuaccacgacuccaacgucaagaaccucuacgagaagguccgcucccagcucaagaacaacgccaaggagaucggcaacggcugcuucgaguucuaccacaagugcgacaacaccugcauggaguccgucaagaacggcaccuacgacuaccccaaguacuccgaggaggccaagcucaaccgcgaggagaucgacggcgucaagcucgaguccacccgcaucuaccagauccucgccaucuacuccaccgucgccuccucccucguccucgucgucucccucggcgccaucuccuucuggaugugcuccaacggcucccuccagugccgcaucugcaucuga

SEQ ID NO: 105364 - RNA, 1701 nt, Artificial Sequence; identical to SEQ ID NO: 99566
  derived and/or modified CDS sequence (opt2) from hemagglutinin__InfluenzaA__AFN18654

SEQ ID NO: 105365 - RNA, 1701 nt, Artificial Sequence; identical to SEQ ID NO: 98705
  derived and/or modified CDS sequence (opt2) from hemagglutinin__InfluenzaA__AFN18664

SEQ ID NO: 105366 - RNA, 1701 nt, Artificial Sequence; identical to SEQ ID NO: 98947
  derived and/or modified CDS sequence (opt2) from hemagglutinin__InfluenzaA__AFN18674

SEQ ID NO: 105367 - RNA, 1701 nt, Artificial Sequence; identical to SEQ ID NO: 98705
  derived and/or modified CDS sequence (opt2) from hemagglutinin__InfluenzaA__AFN18684

SEQ ID NO: 105368 - RNA, 1701 nt, Artificial Sequence; identical to SEQ ID NO: 99566
  derived and/or modified CDS sequence (opt2) from hemagglutinin__InfluenzaA__AFN18694

SEQ ID NO: 105369 - RNA, 1701 nt, Artificial Sequence
  derived and/or modified CDS sequence (opt2) from hemagglutinin__InfluenzaA__AFN18704
augaaggccauccucgucguccuccucuacaccuucgccaccgccaacgccgacacccucugcaucggcuaccacgccaacaacuccaccgacaccgucgacaccguccucgagaagaacgucaccgucacccacuccgucaaccuccucgaggacaagcacaacggcaagcucugcaagcuccgcggcgucgccccccuccaccucggcaagugcaacaucgccggcuggauccucggcaaccccgagugcgagucccucuccaccgccuccuccugguccuacaucgucgagaccuccuccuccgacaacggcaccugcuaccccggcgacuucaucgacuacgaggagcuccgcgagcagcucuccuccgucuccuccuucgagcgcuucgagaucuuccccaagaccuccuccuggcccaaccacgacuccaacaagggcgucaccgccgccugcccccacgccggcgccaaguccuucuacaagaaccucaucuggcucgucaagaagggcaacuccuaccccaagcucuccaaguccuacaucaacgacaagggcaaggagguccucguccucuggggcauccaccaccccuccaccuccgccgaccagcagucccucuaccagaacgccgacgccuacgucuucgucggcaccucccgcuacuccaagaaguucaagcccgagaucgccauccgccccaagguccgcgaccaggagggccgcaugaacuacuacuggacccucgucgagcccggcgacaagaucaccuucgaggccaccggcaaccucgucgucccccgcuacgccuucgccaugguccgcaacgccggcuccggcaucaucaucuccgacacccccguccacgacugcaacaccaccugccagacccccaagggcgccaucaacaccucccuccccuuccagaacauccaccccaucaccaucggcaagugccccaaguacgucaaguccaccaagcuccgccucgccaccggccuccgcaacguccccuccauccagucccgcggccucuucggcgccaucgccggcuucaucgagggcggcuggaccggcauggucgacggcugguacggcuaccaccaccagaacgagcagggcuccggcuacgccgccgaccucaaguccacccaguccgccaucgacgagaucaccaacaaggucaacuccgucaucgagaagaugaacacccaguucaccgccgucggcaaggaguucaaccaccucgagaagcgcaucgagaaccucaacaagaaggucgacgacggcuuccucgacaucuggaccuacaacgccgagcuccucguccuccucgagaacgagcgcacccucgacuaccacgacuccaacgucaagaaccucuacgagaagguccgcucccagcucaagaacaacgccaaggagaucggcaacggcugcuucgaguucuaccacaagugcgacaacaccugcauggaguccgucaagaacggcaccuacgacuaccccaaguacuccgaggaggccaagcucaaccgcgaggagaucgacggcgucaagcucgaguccacccgcaucuaccagauccucgccaucuacuccaccgucgccuccucccucguccucgucgucucccucggcgccaucuccuucuggaugugcuccaacggcucccuccagugccgcaucugcaucuga

SEQ ID NO: 105370 - RNA, 1701 nt, Artificial Sequence; identical to SEQ ID NO: 100939
  derived and/or modified CDS sequence (opt2) from hemagglutinin__InfluenzaA__AFN18714

SEQ ID NO: 105371 - RNA, 1701 nt, Artificial Sequence; identical to SEQ ID NO: 98705
  derived and/or modified CDS sequence (opt2) from hemagglutinin__InfluenzaA__AFN18721

SEQ ID NO: 105372 - RNA, 1701 nt, Artificial Sequence; identical to SEQ ID NO: 101371
  derived and/or modified CDS sequence (opt2) from hemagglutinin__InfluenzaA__AFN18725

SEQ ID NO: 105373 - RNA, 1701 nt, Artificial Sequence
  derived and/or modified CDS sequence (opt2) from hemagglutinin__InfluenzaA__AFN18735
augaaggccauccucgucguccuccucuacaccuucgccaccgccaacgccgacacccucugcaucggcuaccacgccaacaacuccaccgacaccgucgacaccguccucgagaagaacgucaccgucacccacuccgucaaccuccucgaggacaagcacaacggcaagcucugcaagcuccgcggcgucgccccccuccaccucggcaagugcaacaucgccggcuggauccucggcaaccccgagugcgagucccucuccaccgccuccuccugguccuacaucgucgagaccuccuccuccgacaacggcaccugcuaccccggcgacuucaucgacuacgaggagcuccgcgagcagcucuccuccgucuccuccuucgagcgcuucgagaucuuccccaagaccuccuccuggcccaaccacgacuccaacaagggcgucaccgccgccugcccccacgccggcgccaaguccuucuacaagacccucaucuggcucgucaagaagggcaacuccuaccccaagcucuccaaguccuacaucaacgacaagggcaaggagguccucguccucuggggcauccaccaccccuccaccuccgccgaccagcagucccucuaccagaacgccgacgccuacgucuucgucggcaccucccgcuacuccaagaaguucaagcccgagaucgccauccgccccaagguccgcgaccaggagggccgcaugaacuacuacuggacccucgucgagcccggcgacaagaucaccuucgaggccaccggcaaccucgucgucccccgcuacgccuucgccauggagcgcaacgccggcuccggcaucaucaucuccgacacccccguccacgacugcaacaccaccugccagacccccaagggcgccaucaacaccucccuccccuuccagaacauccaccccaucaccaucggcaagugccccaaguacgucaaguccaccaagcuccgccucgccaccggccuccgcaacguccccuccauccagucccgcggccucuucggcgccaucgccggcuucaucgagggcggcuggaccggcauggucgacggcugguacggcuaccaccaccagaacgagcagggcuccggcuacgccgccgaccucaaguccacccagaacgccaucgacgagaucaccaacaaggucaacuccgucaucgagaagaugaacacccaguucaccgccgucggcaaggaguucaaccaccucgagaagcgcaucgagaaccucaacaagaaggucgacgacggcuuccucgacaucuggaccuacaacgccgagcuccucguccuccucgagaacgagcgcacccucgacuaccacgacuccaacgucaagaaccucuacgagaagguccgcucccagcucaagaacaacgccaaggagaucggcaacggcugcuucgaguucuaccacaagugcgacaacaccugcauggaguccgucaagaacggcaccuacgacuaccccaaguacuccgaggaggccaagcucaaccgcgaggagaucgacggcgucaagcucgaguccacccgcaucuaccagauccucgccaucuacuccaccgucgccuccucccucguccucgucgucucccucggcgccaucuccuucuggaugugcuccaacggcucccuccagugccgcaucugcaucuga

SEQ ID NO: 105374 - RNA, 1701 nt, Artificial Sequence; identical to SEQ ID NO: 98705
  derived and/or modified CDS sequence (opt2) from hemagglutinin__InfluenzaA__AFN18742

SEQ ID NO: 105375 - RNA, 1701 nt, Artificial Sequence; identical to SEQ ID NO: 99807
  derived and/or modified CDS sequence (opt2) from hemagglutinin__InfluenzaA__AFN18747

SEQ ID NO: 105376 - RNA, 1701 nt, Artificial Sequence
  derived and/or modified CDS sequence (opt2) from hemagglutinin__InfluenzaA__AFN18757
augaaggccauccucgucguccuccucuacaccuucgccaccgccaacgccgacacccucugcaucggcuaccacgccaacaacuccaccgacaccgucgacaccguccucgagaagaacgucaccgucacccacuccgucaaccuccucgaggacaagcacaacggcaagcucugcaagcuccgcggcgucgccccccuccaccucggcaagugcaacaucgccggcuggauccucggcaaccccgagugcgagucccucuccaccgccuccuccugguccuacaucgucgagaccuccuccuccgacaacggcaccugcuaccccggcgacuucaucgacuacgaggagcuccgcgagcagcucuccuccgucuccuccuucgagcgcuucgagaucuuccccaagaccuccuccuggcccaaccacgacuccaacaagggcgucaccgccgccugcccccacgccggcgccaaguccuucuacaagaaccucaucuggcucgucaagaagggcaacuccuaccccaagcucuccaaguccuacaucaacgacaagggcaaggagguccucguccucuggggcauccaccaccccuccaccuccgccgaccagcagucccucuaccagaacgccgacgccuacgucuucgucggcaccucccgcuacuccaagaaguucaagcccgagaucgccauccgccccaagguccgcgaccaggagggccgcaugaacuacuacuggacccucgucgagcccggcgacaagaucaccuucgaggccaccggcaaccucgccgucccccgcuacgccuucgccauggagcgcaacgccggcuccggcaucaucaucuccgacacccccguccacgacugcaacaccaccugccagacccccaagggcgccaucaacaccucccuccccuuccagaacauccaccccaucaccaucggcaagugccccaaguacgucaaguccaccaagcuccgccucgccaccggccuccgcaacguccccuccauccagucccgcggccucuucggcgccaucgccggcuucaucgagggcggcuggaccggcauggucgacggcugguacggcuaccaccaccagaacgagcagggcuccggcuacgccgccgaccucaaguccacccagaacgccaucgacgagaucaccaacaaggucaacuccgucaucgagaagaugaacacccaguucaccgccgucggcaaggaguucaaccaccucgagaagcgcaucgagaaccucaacaagaaggucgacgacggcuuccucgacaucuggaccuacaacgccgagcuccucguccuccucgagaacgagcgcacccucgacuaccacgacuccaacgucaagaaccucuacgagaagguccgcucccagcucaagaacaacgccaaggagaucggcaacggcugcuucgaguucuaccacaagugcgacaacaccugcauggaguccgucaagaacggcaccuacgacuaccccaaguacuccgaggaggccaagcucaaccgcgaggagaucgacggcgucaagcucgaguccacccgcaucuaccagauccucgccaucuacuccaccgucgccuccucccucguccucgucgucucccucggcgccaucuccuucuggaugugcuccaacggcucccuccagugccgcaucugcaucuga

SEQ ID NO: 105377 - RNA, 1701 nt, Artificial Sequence; identical to SEQ ID NO: 98705
  derived and/or modified CDS sequence (opt2) from hemagglutinin__InfluenzaA__AFN18767

SEQ ID NO: 105378 - RNA, 1701 nt, Artificial Sequence; identical to SEQ ID NO: 105369
  derived and/or modified CDS sequence (opt2) from hemagglutinin__InfluenzaA__AFN18774

SEQ ID NO: 105379 - RNA, 1701 nt, Artificial Sequence; identical to SEQ ID NO: 98705
  derived and/or modified CDS sequence (opt2) from hemagglutinin__InfluenzaA__AFN18776

SEQ ID NO: 105380 - RNA, 1701 nt, Artificial Sequence; identical to SEQ ID NO: 99571
  derived and/or modified CDS sequence (opt2) from hemagglutinin__InfluenzaA__AFN18778

SEQ ID NO: 105381 - RNA, 1701 nt, Artificial Sequence; identical to SEQ ID NO: 98705
  derived and/or modified CDS sequence (opt2) from hemagglutinin__InfluenzaA__AFN18784

SEQ ID NO: 105382 - RNA, 1701 nt, Artificial Sequence; identical to SEQ ID NO: 99571
  derived and/or modified CDS sequence (opt2) from hemagglutinin__InfluenzaA__AFN18789

SEQ ID NO: 105383 - RNA, 1701 nt, Artificial Sequence; identical to SEQ ID NO: 98705
  derived and/or modified CDS sequence (opt2) from hemagglutinin__InfluenzaA__AFN18799

SEQ ID NO: 105384 - RNA, 1701 nt, Artificial Sequence; identical to SEQ ID NO: 98705
  derived and/or modified CDS sequence (opt2) from hemagglutinin__InfluenzaA__AFN18809

SEQ ID NO: 105385 - RNA, 1701 nt, Artificial Sequence; identical to SEQ ID NO: 99807
  derived and/or modified CDS sequence (opt2) from hemagglutinin__InfluenzaA__AFN18816

SEQ ID NO: 105386 - RNA, 1701 nt, Artificial Sequence; identical to SEQ ID NO: 98705
  derived and/or modified CDS sequence (opt2) from hemagglutinin__InfluenzaA__AFN18818

SEQ ID NO: 105387 - RNA, 1701 nt, Artificial Sequence
  derived and/or modified CDS sequence (opt2) from hemagglutinin__InfluenzaA__AFN18820
augaaggccauccucgucguccuccucuacaccuucgccaccgccaacgccgacacccucugcaucggcuaccacgccaacaacuccaccgacaccgucgacaccguccucgagaagaacgucaccgucacccacuccgucaaccuccucgaggacaagcacaacggcaagcucugcaagcuccgcggcgucgccccccuccaccucggcaacugcaacaucgccggcuggauccucggcaaccccgagugcgagucccucuccaccgccuccuccugguccuacaucgucgagaccuccuccuccgacaacggcaccugcuaccccggcgacuucaucgacuacgaggagcuccgcgagcagcucuccuccgucuccuccuucgagcgcuucgagaucuuccccaagaccuccuccuggcccaaccacgacuccaacaagggcgucaccgccgccugcccccacgccggcgccaaguccuucuacaagaaccucaucuggcucgucaagaagggcaacuccuaccccaagcucuccaaguccuacaucaacgacaagggcaaggagguccucguccucuggggcauccaccaccccuccaccuccgccgaccagcagucccucuaccagaacgccgacgccuacgucuucgucggcaccucccgcuacuccaagaaguucaagcccgagaucgccauccgccccaagguccgcgaccaggagggccgcaugaacuacuacuggacccucgucgagcccggcgacaagaucaccuucgaggccaccggcaaccucgucgucccccgcuacgccuucgccauggagcgcaacgccggcuccggcaucaucaucuccgacacccccguccacgacugcaacaccaccugccagacccccaagggcgccaucaacaccucccuccccuuccagaacauccaccccaucaccaucggcaagugccccaaguacgucaaguccaccaagcuccgccucgccaccggccuccgcaacguccccuccauccagucccgcggccucuucggcgccaucgccggcuucaucgagggcggcuggaccggcauggucgacggcugguacggcuaccaccaccagaacgagcagggcuccggcuacgccgccgaccucaaguccacccagaacgccaucgacgagaucaccaacaaggucaacuccgucaucgagaagaugaacacccaguucaccgccgucggcaaggaguucaaccaccucgagaagcgcaucgagaaccucaacaagaaggucgacgacggcuuccucgacaucuggaccuacaacgccgagcuccucguccuccucgagaacgagcgcacccucgacuaccacgacuccaacgucaagaaccucuacgagaagguccgcucccagcucaagaacaacgccaaggagaucggcaacggcugcuucgaguucuaccacaagugcgacaacaccugcauggaguccgucaagaacggcaccuacgacuaccccaaguacuccgaggaggccaagcucaaccgcgaggagaucgacggcgucaagcucgaguccacccgcaucuaccagauccucgccaucuacuccaccgucgccuccucccucguccucgucgucucccucggcgccaucuccuucuggaugugcuccaacggcucccuccagugccgcaucugcaucuga

SEQ ID NO: 105388 - RNA, 1701 nt, Artificial Sequence; identical to SEQ ID NO: 98705
  derived and/or modified CDS sequence (opt2) from hemagglutinin__InfluenzaA__AFN18822

SEQ ID NO: 105389 - RNA, 1701 nt, Artificial Sequence
  derived and/or modified CDS sequence (opt2) from hemagglutinin__InfluenzaA__AFN18824
augaaggccauccucgucguccuccucuacaccuucgccaccgccaacgccgacacccucugcaucggcuaccacgccaacaacuccaccgacaccgucgacaccguccucgagaagaacgucaccgucacccacuccgucaaccuccucgaggacaagcacaacggcaagcucugcaagcuccgcggcgucgccccccuccaccucggcaagugcaacaucgccggcuggauccucggcaaccccgagugcgagucccucuccaccgccuccuccugguccuacaucgucgagaccuccuccuccgacaacggcaccugcuaccccggcgacuucaucgacuacgaggagcuccgcgagcagcucuccuccgucuccuccuucgagcgcuucgagaucuuccccaagaccuccuccuggcccaaccacgacuccaacaagggcgucaccgccgccugcccccacgccggcgccaaguccuucuacaagaaccucaucuggcucgucaagaagggcaacuccuaccccaagcucuccaaguccuacaucaacgacaagggcaaggagguccucguccucuggggcauccaccaccccuccaccuccgccgaccagcagucccucuaccagaacgccgacgccuacgucuucgucggcaccucccgcuacuccaagaaguucaagcccgagaucgccauccgccccaagguccgcgaccaggagggccgcaugaacuacuacuggacccucgucgagcccggcgacaagaucaccuucgaggccaccggcaaccucgucgucccccgcuacgccuucgccauggagcgcaacgccggcuccggcaucaucaucuccgacacccccguccacgacugcaacaccaccugccagacccccaagggcgccaucaacaccucccuccccuuccagaacauccaccccaucaccaucggcaagugccccaaguacgucaaguccaccaagcuccgccucgccaccggccuccgcaacguccccuccauccagucccgcggccucuucggcgccaucgccggcuucaucgagggcggcuggaccggcauggucgacggcugguacggcuaccaccaccagaacgagcagggcuccggcuacgccgccgaccucaaguccacccagaacgccaucgacgagaucaccaacaaggucaacuccgucaucgagaagaugaacacccaguucaccgccgucggcaaggaguucaaccaccucgagaagcgcaucgagaaccucaacaagaaggucgacgacggcuuccucgacaucuggaccuacaacgccgagcuccucguccuccucgagaacgagcgcacccucgacuaccacgacuccaacgucaagaaccucuacgagaagguccgcucccagcucaagaacaacgccaaggagaucggcaacggcugcuucgaguucuaccacaagugcgacaacaccugcauggaguccgucaagaacggcaccuacgacuaccccaaguacuccgaggaggccaagcucaaccgcgaggagaucgacggcguccgccucgaguccacccgcaucuaccagauccucgccaucuacuccaccgucgccuccucccucguccucgucgucucccucggcgccaucuccuucuggaugugcuccaacggcucccuccagugccgcaucugcaucuga

SEQ ID NO: 105390 - RNA, 1701 nt, Artificial Sequence; identical to SEQ ID NO: 105313
  derived and/or modified CDS sequence (opt2) from hemagglutinin__InfluenzaA__AFN18826

SEQ ID NO: 105391 - RNA, 1701 nt, Artificial Sequence
  derived and/or modified CDS sequence (opt2) from hemagglutinin__InfluenzaA__AFN18828
augaaggccauccucgucguccuccucuacaccuucgccaccgccaacgccgacacccucugcaucggcuaccacgccaacaacuccaccgacaccgucgacaccguccucgagaagaacgucaccgucacccacuccgucaaccuccucgaggacaagcacaacggcaagcucugcaagcuccgcggcgucgccccccuccaccucggcaagugcaacaucgccggcuggauccucggcaaccccgagugcgagucccucuccaccgccuccuccugguccuacaucgucgagaccuccuccuccgacaacggcaccugcuaccccggcgacuucaucgacuacgaggagcuccgcgagcagcucuccuccgucuccuccuucgagcgcuucgagaucuuccccaagaccuccuccuggcccaaccacgacuccaacaagggcgucaccgccgccugcccccacgccggcgccaaguccuucuacaagaaccucaucuggcucgucaagaagggcaacuccuaccccaagcucuccaaguccuacaucaacgacaagggcaaggagguccucguccucuggggcauccaccaccccuccaccuccgccgaccagcagucccucuaccagaacgccgacgccuacgucuucgucggcaccucccgcuacuccaagaaguucaagcccgagaucgccauccgccccaagguccgcgaccaggagggccgcaugaacuacuacuggacccucgucgagcccggcgacaagaucaccuucgaggccaccggcaaccucgucgucccccgcuacgccuucgccauggagcgcaacgccggcuccggcaucaucaucuccgacacccccguccacgacugcaacaccaccugccagacccccaagggcgccaucaacaccucccuccccuuccagaacauccaccccaucaccaucggcaagugccccaaguacgucaaguccaucaagcuccgccucgccaccggccuccgcaacguccccuccauccagucccgcggccucuucggcgccaucgccggcuucaucgagggcggcuggaccggcauggucgacggcugguacggcuaccaccaccagaacgagcagggcuccggcuacgccgccgaccucaaguccacccagaacgccaucgacgagaucaccaacaaggucaacuccgucaucgagaagaugaacacccaguucaccgccgucggcaaggaguucaaccaccucgagaagcgcaucgagaaccucaacaagaaggucgacgacggcuuccucgacaucuggaccuacaacgccgagcuccucguccuccucgagaacgagcgcacccucgacuaccacgacuccaacgucaagaaccucuacgagaagguccgcucccagcucaagaacaacgccaaggagaucggcaacggcugcuucgaguucuaccacaagugcgacaacaccugcauggaguccgucaagaacggcaccuacgacuaccccaaguacuccgaggaggccaagcucaaccgcgaggagaucgacggcgucaagcucgaguccacccgcaucuaccagauccucgccaucuacuccaccgucgccuccucccucguccucgucgucucccucggcgccaucuccuucuggaugugcuccaacggcucccuccagugccgcaucugcaucuga

SEQ ID NO: 105392 - RNA, 1701 nt, Artificial Sequence; identical to SEQ ID NO: 105376
  derived and/or modified CDS sequence (opt2) from hemagglutinin__InfluenzaA__AFN18830

SEQ ID NO: 105393 - RNA, 1701 nt, Artificial Sequence; identical to SEQ ID NO: 98705
  derived and/or modified CDS sequence (opt2) from hemagglutinin__InfluenzaA__AFN18832

SEQ ID NO: 105394 - RNA, 1701 nt, Artificial Sequence; identical to SEQ ID NO: 99571
  derived and/or modified CDS sequence (opt2) from hemagglutinin__InfluenzaA__AFN18834

SEQ ID NO: 105395 - RNA, 1701 nt, Artificial Sequence
  derived and/or modified CDS sequence (opt2) from hemagglutinin__InfluenzaA__AFN18849
augaaggccauccucgucguccuccucuacaccuucgccaccgccaacgccgacacccucugcaucggcuaccacgccaacaacuccaccgacaccgucgacaccguccucgagaagaacgucaccgucacccacuccgucaaccuccucgaggacaagcacaacggcaagcucugcaagcuccgcggcgucgccccccuccaccucggcaagugcaacaucgccggcuggauccucggcaaccccgagugcgagucccucuccaccgccuccuccugguccuacaucgucgagaccuccuccuccgacaacggcaccugcuaccccggcgacuucaucgacuacgaggagcuccgcgagcagcucuccuccgucuccuccuucgagcgcuucgagaucuuccccaagaccuccuccuggcccaaccacgacuccaacaagggcgucaccgccgccugcccccacgccggcgccaaguccuucuacaagaaccucaucuggcucgucaagaagggcaacuccuaccccaagcucuccaaguccuacaucaacgacaagggcaaggagguccucguccucuggggcauccaccaccccuccaccuccgccgaccagcagucccucuaccagaacgucgacgccuacgucuucgucggcaccucccgcuacuccaagaaguucaagcccgagaucgccauccgccccaagguccgcgaccaggagggccgcaugaacuacuacuggacccucgucgagcccggcgacaagaucaccuucgaggccaccggcaaccucgucgucccccgcuacgccuucgccauggagcgcaacgccggcuccggcaucaucaucuccgacacccccguccacgacugcaacaccaccugccagacccccaagggcgccaucaacaccucccuccccuuccagaacauccaccccaucaccaucggcaagugccccaaguacgucaaguccaccaagcuccgccucgccaccggccuccgcaacguccccuccauccagucccgcggccucuucggcgccaucgccggcuucaucgagggcggcuggaccggcauggucgacggcugguacggcuaccaccaccagaacgagcagggcuccggcuacgccgccgaccucaaguccacccagaacgccaucgacgagaucaccaacaaggucaacuccgucaucgagaagaugaacacccaguucaccgccgucggcaaggaguucaaccaccucgagaagcgcaucgagaaccucaacaagaaggucgacgacggcuuccucgacaucuggaccuacaacgccgagcuccucguccuccucgagaacgagcgcacccucgacuaccacgacuccaacgucaagaaccucuacgagaagguccgcucccagcucaagaacaacgccaaggagaucggcaacggcugcuucgaguucuaccacaagugcgacaacaccugcauggaguccgucaagaacggcaccuacgacuaccccaaguacuccgaggaggccaagcucaaccgcgaggagaucgacggcgucaagcucgaguccacccgcaucuaccagauccucgccaucuacuccaccgucgccuccucccucguccucgucgucucccucggcgccaucuccuucuggaugugcuccaacggcucccuccagugccgcaucugcaucuga

SEQ ID NO: 105396 - RNA, 1701 nt, Artificial Sequence
  derived and/or modified CDS sequence (opt2) from hemagglutinin__InfluenzaA__AFN18856
augaaggccauccucgucguccuccucuacaccuucgccaccgccaacgccgacacccucugcaucggcuaccacgccaacaacuccaccgacaccgucgacaccguccucgagaagaacgucaccgucacccacuccgucaaccuccucgagaacaagcacaacggcaagcucugcaagcuccgcggcgucgccccccuccaccucggcaagugcaacaucgccggcuggauccucggcaaccccgagugcgagucccucuccaccgccuccuccugguccuacaucgucgagaccuccuccuccgacaacggcaccugcuaccccggcgacuucaucgacuacgaggagcuccgcgagcagcucuccuccgucuccuccuucgagcgcuucgagaucuuccccaagaccuccuccuggcccaaccacgacuccaacaagggcgucaccgccgccugcccccacgccggcgccaaguccuucuacaagaaccucaucuggcucgucaagaagggcaacuccuaccccaagcucuccaaguccuacaucaacgacaagggcaaggagguccucguccucuggggcauccaccaccccuccaccuccgccgaccagcagucccucuaccagaacgccgacgccuacgucuucgucggcaccucccgcuacuccaagaaguucaagcccgagaucgccauccgccccaagguccgcgaccaggagggccgcaugaacuacuacuggacccucgucgagcccggcgacaagaucaccuucgaggccaccggcaaccucgucgucccccgcuacgccuucgccauggagcgcaacgccggcuccggcaucaucaucuccgacacccccguccacgacugcaacaccaccugccagacccccaagggcgccaucaacaccucccuccccuuccagaacauccaccccaucaccaucggcaagugccccaaguacgucaaguccaccaagcuccgccucgccaccggccuccgcaacguccccuccauccagucccgcggccucuucggcgccaucgccggcuucaucgagggcggcuggaccggcauggucgacggcugguacggcuaccaccaccagaacgagcagggcuccggcuacgccgccgaccucaaguccacccagaacgccaucgacgagaucaccaacaaggucaacuccgucaucgagaagaugaacacccaguucaccgccgucggcaaggaguucaaccaccucgagaagcgcaucgagaaccucaacaagaaggucgacgacggcuuccucgacaucuggaccuacaacgccgagcuccucguccuccucgagaacgagcgcacccucgacuaccacgacuccaacgucaagaaccucuacgagaagguccgcucccagcucaagaacaacgccaaggagaucggcaacggcugcuucgaguucuaccacaagugcgacaacaccugcauggaguccgucaagaacggcaccuacgacuaccccaaguacuccgaggaggccaagcucaaccgcgaggagaucgacggcgucaagcucgaguccacccgcaucuaccagauccucgccaucuacuccaccgucgccuccucccucguccucgucgucucccucggcgccaucuccuucuggaugugcuccaacggcucccuccagugccgcaucugcaucuga

SEQ ID NO: 105397 - RNA, 1701 nt, Artificial Sequence; identical to SEQ ID NO: 99566
  derived and/or modified CDS sequence (opt2) from hemagglutinin__InfluenzaA__AFN18858

SEQ ID NO: 105398 - RNA, 1701 nt, Artificial Sequence
  derived and/or modified CDS sequence (opt2) from hemagglutinin__InfluenzaA__AFN18860
augaaggccauccucgucguccuccucuacaccuucgccaccgccaacgccgacacccucugcaucggcuaccacgccaacaacuccaccgacaccgucgacaccguccucgagaagaacgucaccgucacccacuccgucaaccuccucgaggacaagcacaacggcaagcucugcaagcuccgcggcgucgccccccuccaccucggcaagugcaacaucgccggcuggauccucggcaaccccgagugcgagucccucuccaccgccuccuccugguccuacaucgucgagaccuccuccuccgacaacggcaccugcuaccccggcgacuucaucgacuacgaggagcuccgcgagcagcucuccuccgucuccuccuucgagcgcuucgagaucuuccccaagaccuccuccuggcccaaccacgacuccaacaagggcgucaccgccgccugcucccacgccggcgccaaguccuucuacaagaaccucaucuggcucgucaagaagggcaacuccuaccccaagcucuccaaguccuacaucaacgacaagggcaaggagguccucguccucuggggcauccaccaccccuccaccuccgccgaccagcagucccucuaccagaacgccgacgccuacgucuucgucggcaccucccgcuacuccaagaaguucaagcccgagaucgccauccgccccaagguccgcgaccaggagggccgcauggacuacuacuggacccucgucgagcccggcgacaagaucaccuucgaggccaccggcaaccucgucgucccccgcuacgccuucgccauggagcgcaacgccggcuccggcaucaucaucuccgacacccccguccacgacugcaacaccaccugccagacccccaagggcgccaucaacaccucccuccccuuccagaacauccaccccaucaccaucggcaagugccccaaguacgucaaguccaccaagcuccgccucgccaccggccuccgcaacguccccuccauccagucccgcggccucuucggcgccaucgccggcuucaucgagggcggcuggaccggcauggucgacggcugguacggcuaccaccaccagaacgagcagggcuccggcuacgccgccgaccucaaguccacccagaacgccaucgacgagaucaccaacaaggucaacuccgucaucgagaagaugaacacccaguucaccgccgucggcaaggaguucaaccaccucgagaagcgcaucgagaaccucaacaagaaggucgacgacggcuuccucgacaucuggaccuacaacgccgagcuccucguccuccucgagaacgagcgcacccucgacuaccacgacuccaacgucaagaaccucuacgagaagguccgcucccagcucaagaacaacgccaaggagaucggcaacggcugcuucgaguucuaccacaagugcgacaacaccugcauggaguccgucaagaacggcaccuacgacuaccccaaguacuccgaggaggccaagcucaaccgcgaggagaucgacggcgucaagcucgaguccacccgcaucuaccagauccucgccaucuacuccaccgucgccuccucccucguccucgucgucucccucggcgccaucuccuucuggaugugcuccaacggcucccuccagugccgcaucugcaucuga

SEQ ID NO: 105399 - RNA, 1701 nt, Artificial Sequence
  derived and/or modified CDS sequence (opt2) from hemagglutinin__InfluenzaA__AFN18865
augaaggccauccucgucguccuccucuacaccuucgccaccgccaacgccgacacccucugcaucggcuaccacgccaacaacuccaccgacaccgucgacaccguccucgagaagaacgucaccgucacccacuccgucaaccuccucgaggacaagcacaacggcaagcucugcaagcuccgcggcgucgccccccuccaccucggcaagugcaacaucgccggcuggauccucggcaaccccgagugcgagucccucuccaccgccuccuccugguccuacaucgucgagaccuccuccuccgacaacggcaccugcuaccccggcgacuucaucgacuacgaggagcuccgcgagcagcucuccuccgucuccuccuucgagcgcuucgagaucuuccccaagaccuccuccuggcccaaccacgacuccaacaagggcgucaccgccgccugcccccacgccggcgccaaguccuucuacaagaaccucaucuggcucgucaagaagggcaacuccuaccccaagcucuccaaguccuacaucaacgacaagggcaaggagguccucguccucuggggcauccaccaccccuccaccuccgccgaccagcagucccucuaccagaacgccgacgccuacgucuucgucggcaccucccgcuacuccaagaaguucaagcccgagaucgccauccgccccaagguccgcgaccaggagggccgcaugaacuacuacuggacccucgucgagcccggcgacaagaucaccuucgaggccaccggcaaccucgucgucccccgcuacgccuucgccauggagcgcaacgccggcuccggcaucaucaucuccgacaccuccguccacgacugcaacaccaccugccagacccccaagggcgccaucaacaccucccuccccuuccagaacauccaccccaucaccaucggcaagugccccaaguacgucaaguccaccaagcuccgccucgccaccggccuccgcaacguccccuccauccagucccgcggccucuucggcgccaucgccggcuucaucgagggcggcuggaccggcauggucgacggcugguacggcuaccaccaccagaacgagcagggcuccggcuacgccgccgaccucaaguccacccagaacgccaucgacaagaucaccaacaaggucaacuccgucaucgagaagaugaacacccaguucaccgccgucggcaaggaguucaaccaccucgagaagcgcaucgagaaccucaacaagaaggucgacgacggcuuccucgacaucuggaccuacaacgccgagcuccucguccuccucgagaacgagcgcacccucgacuaccacgacuccaacgucaagaaccucuacgagaagguccgcucccagcucaagaacaacgccaaggagaucggcaacggcugcuucgaguucuaccacaagugcgacaacaccugcauggaguccgucaagaacggcaccuacgacuaccccaaguacuccgaggaggccaagcucaaccgcgaggagaucgacggcgucaagcucgaguccacccgcaucuaccagauccucgccaucuacuccaccgucgccuccucccucguccucgucgucucccucggcgccaucuccuucuggaugugcuccaacggcucccuccagugccgcaucugcaucuga

SEQ ID NO: 105400 - RNA, 1701 nt, Artificial Sequence
  derived and/or modified CDS sequence (opt2) from hemagglutinin__InfluenzaA__AFN18875
auggaggccauccucgucguccuccucuacaccuucgccaccgccaacgccgacacccucugcaucggcuaccacgccaacaacuccaccgacaccgucgacaccguccucgagaagaacgucaccgucacccacuccgucaaccuccucgaggacaagcacaacggcaagcucugcaagcuccgcggcgucgccccccuccaccucggcaagugcaacaucgccggcuggauccucggcaaccccgagugcgagucccucuccaccgccuccuccugguccuacaucgucgagaccuccuccuccgacaacggcaccugcuaccccggcgacuucaucgacuacgaggagcuccgcgagcagcucuccuccgucuccuccuucgagcgcuucgagaucuuccccaagaccuccuccuggcccaaccacgacuccaacaagggcgucaccgccgccugcccccacgccggcgccaaguccuucuacaagaaccucaucuggcucgucaagaagggcaacuccuaccccaagcucuccaaguccuacaucaacgacaagggcaaggagguccucguccucuggggcauccaccaccccuccaccuccgccgcccagcagucccucuaccagaacgccgacgccuacgucuucgucggcuccucccgcuacuccaagaaguucaagcccgagaucgccauccgccccaagguccgcgaccaggagggccgcaugaacuacuacuggacccucgucgagcccggcgacaagaucaccuucgaggccaccggcaaccucgucgucccccgcuacgccuucgccauggagcgcaacgccggcuccggcaucaucaucuccgacacccccguccacgacugcaacaccaccugccagacccccaagggcgccaucaacaccucccuccccuuccacaacauccaccccaucaccaucggcaagugccccaaguacgucaaguccaccaagcuccgccucgccaccggccuccgcaacguccccuccauccagucccgcggccucuucggcgccaucgccggcuucaucgagggcggcuggaccggcauggucgacggcugguacggcuaccaccaccagaacgagcagggcuccggcuacgccgccgaccucaaguccacccagaacgccaucgacgagaucaccaacaaggucaacuccgucaucgagaagaugaacacccaguucaccgccgucggcaaggaguucaaccaccucgagaagcgcaucgagaaccucaacaagaaggucgacgacggcuuccucgacaucuggaccuacaacgccgagcuccucguccuccucgagaacgagcgcacccucgacuaccacgacuccaacgucaagaaccucuacgagaagguccgcucccagcucaagaacaacgccaaggagaucggcaacggcugcuucgaguucuaccacaagugcgacaacaccugcauggaguccgucaagaacggcaccuacgacuaccccaaguacuccgaggaggccaagcucaaccgcgaggagaucgacggcgucaagcucgaguccacccgcaucuaccagauccucgccaucuacuccaccgucgccuccucccucguccucgucgucucccucggcgccaucuccuucuggaugugcuccaacggcucccuccagugccgcaucugcaucuga

SEQ ID NO: 105401 - RNA, 1701 nt, Artificial Sequence
  derived and/or modified CDS sequence (opt2) from hemagglutinin__InfluenzaA__AFN18885
augaaggccauccucaucguccuccucuacaccuucgccaccgccaacgccgacacccucugcaucggcuaccacgccaacaacuccaccgacaccgucgacaccguccucgagaagaacgucaccgucacccacuccgucaaccuccucgaggacaagcacaacggcaagcucugcaagcuccgcggcgucgccccccuccaccucggcaagugcaacaucgccggcuggauccucggcaaccccgagugcgagucccucuccaccgccuccuccugguccuacaucgucgagaccuccuccuccgacaacggcaccugcuaccccggcgacuucaucgacuacgaggagcuccgcgagcagcucuccuccgucuccuccuucgagcgcuucgagaucuuccccaagaccuccuccuggcccaaccacgacuccaacaagggcgucaccgccgccugcccccacgccggcgccaaguccuucuacaagaaccucaucuggcucgucaagaagggcaacuccuaccccaagcucuccaaguccuacaucaacgacaagggcaaggagguccucguccucuggggcauccaccaccccuccaccuccgccgaccagcagucccucuaccagaacgccgacgccuacgucuucgucggcaccucccgcuacuccaagaaguucaagcccgagaucgccauccgccccaagguccgcgaccaggagggccgcaugaacuacuacuggacccucgucgagcccggcgacaagaucaccuucgaggccaccggcaaccucgucgucccccgcuacgccuucgccauggagcgcaacgccggcuccggcaucaucaucuccgacacccccguccacgacugcaacaccaccugccagacccccaagggcgccaucaacaccaaccuccccuuccagaacauccaccccaucaccaucggcaagugccccaaguacgucaaguccaccaagcuccgccucgccaccggccuccgcaacguccccuccacccagucccgcggccucuucggcgccaucgccggcuucaucgagggcggcuggaccggcauggucgacggcugguacggcuaccaccaccagaacgagcagggcuccggcuacgccgccgaccucaaguccacccagaacgccaucgacgagaucaccaacaaggucaacuccgucaucgagaagaugaacacccaguucaccgccgucggcaaggaguucaaccaccucgagaagcgcaucgagaaccucaacaagaaggucgacgacggcuuccucgacaucuggaccuacaacgccgagcuccucguccuccucgagaacgagcgcacccucgacuaccacgacuccaacgucaagaaccucuacgagaagguccgcucccagcucaagaacaacgccaaggagaucggcaacggcugcuucgaguucuaccacaagugcgacaacaccugcauggaguccgucaagaacggcaccuacgacuaccccaaguacuccgaggaggccaagcucaaccgcgaggagaucgacggcgucaagcucgaguccacccgcaucuaccagauccucgccaucuacuccaccgucgccuccucccucguccucgucgucucccucggcgccaucuccuucuggaugugcuccaacggcucccuccagugcaagaucugcaucuga

SEQ ID NO: 105402 - RNA, 1701 nt, Artificial Sequence; identical to SEQ ID NO: 98705
  derived and/or modified CDS sequence (opt2) from hemagglutinin__InfluenzaA__AFN18892

SEQ ID NO: 105403 - RNA, 1701 nt, Artificial Sequence; identical to SEQ ID NO: 98947
  derived and/or modified CDS sequence (opt2) from hemagglutinin__InfluenzaA__AFN18894

SEQ ID NO: 105404 - RNA, 1701 nt, Artificial Sequence; identical to SEQ ID NO: 105369
  derived and/or modified CDS sequence (opt2) from hemagglutinin__InfluenzaA__AFN18903

SEQ ID NO: 105405 - RNA, 1701 nt, Artificial Sequence; identical to SEQ ID NO: 99807
  derived and/or modified CDS sequence (opt2) from hemagglutinin__InfluenzaA__AFN18910

SEQ ID NO: 105406 - RNA, 1701 nt, Artificial Sequence
  derived and/or modified CDS sequence (opt2) from hemagglutinin__InfluenzaA__AFN18912
auggaggccauccucgucguccuccucuacaccuucgccaccgccaacgccgacacccucugcaucggcuaccacgccaacaacuccaccgacaccgucgacaccguccucgagaagaacgucaccgucacccacuccgucaaccuccucgaggacaagcacaacggcaagcucugcaagcuccgcggcgucgccccccuccaccucggcaagugcaacaucgccggcuggauccucggcaaccccgagugcgagucccucuccaccgccuccuccugguccuacaucgucgagaccuccuccuccgacaacggcaccugcuaccccggcgacuucaucgacuacgaggagcuccgcgagcagcucuccuccgucuccuccuucgagcgcuucgagaucuuccccaagaccuccuccuggcccaaccacgacuccaacaagggcgucaccgccgccugcccccacgccggcgccaaguccuucuacaagaaccucaucuggcucgucaagaagggcaacuccuaccccaagcucuccaaguccuacaucaacgacaagggcaaggagguccucguccucuggggcauccaccaccccuccaccuccgccgaccagcagucccucuaccagaacgccgacgccuacgucuucgucggcuccucccgcuacuccaagaaguucaagcccgagaucgccauccgccccaagguccgcgaccaggagggccgcaugaacuacuacuggacccucgucgagcccggcgacaagaucaccuucgaggccaccggcaaccucgucgucccccgcuacgccuucgccauggagcgcaacgccggcuccggcaucaucaucuccgacaccuccguccacgacugcaacaccaccugccagacccccaagggcgccaucaacaccucccuccccuuccacaacauccaccccaucaccaucggcaagugccccaaguacgucaaguccaccaagcuccgccucgccaccggccuccgcaacguccccuccauccagucccgcggccucuucggcgccaucgccggcuucaucgagggcggcuggaccggcauggucgacggcugguacggcuaccaccaccagaacgagcagggcuccggcuacgccgccgaccucaaguccacccagaacgccaucgacgagaucaccaacaaggucaacuccgucaucgagaagaugaacacccaguucaccgccgucggcaaggaguucaaccaccucgagaagcgcaucgagaaccucaacaagaaggucgacgacggcuuccucgacaucuggaccuacaacgccgagcuccucguccuccucgagaacgagcgcacccucgacuaccacgacuccaacgucaagaaccucuacgagaagguccgcucccagcucaagaacaacgccaaggagaucggcaacggcugcuucgaguucuaccacaagugcgacaacaccugcauggaguccgucaagaacggcaccuacgacuaccccaaguacuccgaggaggccaagcucaaccgcgaggagaucgacggcgucaagcucgaguccacccgcaucuaccagauccucgccaucuacuccaccgucgccuccucccucguccucgucgucucccucggcgccaucuccuucuggaugugcuccaacggcucccuccagugccgcaucugcaucuga

SEQ ID NO: 105407 - RNA, 1701 nt, Artificial Sequence; identical to SEQ ID NO: 99807
  derived and/or modified CDS sequence (opt2) from hemagglutinin__InfluenzaA__AFN18917

SEQ ID NO: 105408 - RNA, 1701 nt, Artificial Sequence; identical to SEQ ID NO: 98705
  derived and/or modified CDS sequence (opt2) from hemagglutinin__InfluenzaA__AFN18927

SEQ ID NO: 105409 - RNA, 1701 nt, Artificial Sequence; identical to SEQ ID NO: 101371
  derived and/or modified CDS sequence (opt2) from hemagglutinin__InfluenzaA__AFN18937

SEQ ID NO: 105410 - RNA, 1701 nt, Artificial Sequence
  derived and/or modified CDS sequence (opt2) from hemagglutinin__InfluenzaA__AFN18952
augaaggccauccucgucguccuccucuacaccuucgccaccgccaacgccgacacccucugcaucggcuaccacgccaacaacuccaccgacaccgucgacaccguccucgagaagaacgucaccgucacccacuccgucaacauccucgaggacaagcacaaccgcaagcucugcaagcuccgcggcgucgccccccuccaccucggcaagugcaacaucgccggcuggauccucggcaaccccgagugcgagucccucuccaccgccuccuccugguccuacaucgucgagaccuccuccuccgacaacggcaccugcuaccccggcgacuucaucgacuacgaggagcuccgcgagcagcucuccuccgucuccuccuucgagcgcuucgagaucuuccccaagaccuccuccuggcccaaccacgacuccaacaagggcgucaccgccgccugcccccacgccggcgccaaguccuucuacaagaaccucaucuggcucgucaagaagggcaacuccuaccccaagcucuccaaguccuacaucaacgacaagggcaaggagguccucguccucuggggcauccaccaccccuccaccuccgccgaccagcagucccucuaccagaacgccgacgccuacgucuucgucggcaccucccgcuacuccaagaaguucaagcccgagaucgccauccgccccaagguccgcgaccaggagggccgcaugaacuacuacuggacccucgucgagcccggcgacaagaucaccuucgaggccaccggcaaccucgucgucccccgcuacgccuucgccauggagcgcaacgccggcuccggcaucaucaucuccgacacccccguccacgacugcaacaccaccugccagacccccaagggcgccaucaacaccucccuccccuuccagaacauccaccccaucaccaucggcaagugccccaaguacgucaaguccaccaagcuccgccucgccaccggccuccgcaacguccccuccauccagucccgcggccucuucggcgccaucgccggcuucaucgagggcggcuggaccggcauggucgacggcugguacggcuaccaccaccagaacgagcagggcuccggcuacgccgccgaccucaaguccacccagaacgccaucgacgagaucaccaacaaggucaacuccgucaucgagaagaugaacacccaguucaccgccgucggcaaggaguucaaccaccucgagaagcgcaucgagaaccucaacaagaaggucgacgacggcuuccucgacaucuggaccuacaacgccgagcuccucguccuccucgagaacgagcgcacccucgacuaccacgacuccaacgucaagaaccucuacgagaagguccgcucccagcucaagaacaacgccaaggagaucggcaacggcugcuucgaguucuaccacaagugcgacaacaccugcauggaguccgucaagaacggcaccuacgacuaccccaaguacuccgaggaggccaagcucaaccgcgagaagaucgacggcgucaagcucgaguccacccgcaucuaccagauccucgccaucuacuccaccgucgccuccucccucguccucgucgucucccucggcgccaucuccuucuggaugugcuccaacggcucccuccagugccgcaucugcaucuga

SEQ ID NO: 105411 - RNA, 1701 nt, Artificial Sequence
  derived and/or modified CDS sequence (opt2) from hemagglutinin__InfluenzaA__AFN18957
augaaggccauccucgucguccuccucuacaccuucgccaccgccaacgccgacacccucugcaucggcuaccacgccaacaacuccaccgacaccgucgacaccguccucgagaagaacgucaccgucacccacuccgucaaccuccucgaggacaaccacaacggcaagcucugcaagcuccgcggcgucgccccccuccaccucggcaagugcaacaucgccggcuggauccucggcaaccccgagugcgagucccucuccaccgccuccuccugguccuacaucgucgagaccuccuccuccgacaacggcaccugcuaccccggcgacuucaucgacuacgaggagcuccgcgagcagcucuccuccgucuccuccuucgagcgcuucgagaucuuccccaagaccuccuccuggcccaaccacgacuccaacaagggcgucaccgccgccugcccccacgccggcgccaaguccuucuacaagaaccucaucuggcucgucaagaagggcaacuccuaccccaagcucuccaaguccuacaucaacgacaagggcaaggagguccucguccucuggggcauccaccaccccuccaccuccgccgaccagcagucccucuaccagaacgccgacgccuacgucuucgucggcaccucccgcuacuccaagaaguucaagcccgagaucgccauccgccccaagguccgcgaccaggagggccgcaugaacuacuacuggacccucgucgagcccggcgacaagaucaccuucgaggccaccggcaaccucgucgucccccgcuacgccuucgccauggagcgcaacgccggcuccggcaucaucaucuccgacacccccguccacgacugcaacaccaccugccagacccccaagggcgccaucaacaccucccuccccuuccagaacauccaccccaucaccaucggcaagugccccaaguacgucaaguccaccaagcuccgccucgccaccggccuccgcaacguccccuccauccagucccgcggccucuucggcgccaucgccggcuucaucgagggcggcuggaccggcauggucgacggcugguacggcuaccaccaccagaacgagcagggcuccggcuacgccgccgaccucaaguccacccagaacgccaucgacgagaucaccaacaaggucaacuccgucaucgagaagaugaacacccaguucaccgccgucggcaaggaguucaaccaccucgagaagcgcaucgagaaccucaacaagaaggucgacgacggcuuccucgacaucuggaccuacaacgccgagcuccucguccuccucgagaacgagcgcacccucgacuaccacgacuccaacgucaagaaccucuacgagaagguccgcucccagcucaagaacaacgccaaggagaucggcaacggcugcuucgaguucuaccacaagugcgacaacaccugcauggaguccgucaagaacggcaccuacgacuaccccaaguacuccgaggaggccaagcucaaccgcgaggagaucgacggcgucaagcucgaguccacccgcaucuaccagauccucgccaucuacuccaccgucgccuccucccucguccucgucgucucccucggcgccaucuccuucuggaugugcuccaacggcucccuccagugccgcaucugcaucuga

SEQ ID NO: 105412 - RNA, 1701 nt, Artificial Sequence; identical to SEQ ID NO: 104794
  derived and/or modified CDS sequence (opt2) from hemagglutinin__InfluenzaA__AFN18964

SEQ ID NO: 105413 - RNA, 1701 nt, Artificial Sequence
  derived and/or modified CDS sequence (opt2) from hemagglutinin__InfluenzaA__AFN18974
augaaggccauccucgucguccuccucuacaccuucgccaccgccaacgccgacacccucugcaucggcuaccacgccaacaacuccaccgacaccgucgacaccguccucgagaagaacgucaccgucacccacuccgucaaccuccucgaggacaagcacaacggcaagcucugcaagcuccgcggcgucgccccccuccaccucggcaagugcaacaucgccggcuggauccucggcaaccccgagugcgagucccucuccaccgccuccuccugguccuacaucgucgagaccuccuccuccgacaacggcaccugcuaccccggcgacuucaucgacuacgaggagcuccgcgagcagcucuccuccauguccuccuucgagcgcuucgagaucuuccccaagaccuccuccuggcccaaccacgaccccaacaagggcgucaccgccgccugcccccacgccggcgccaaguccuucuacaagaaccucaucuggcucgucaagaagggcaacuccuaccccaagcucuccaaguccuacaucaacgacaagggcaagaagguccucguccucuggggcauccaccaccccuccaccuccgccgaccagcagucccucuaccagaacgccgacgccuacgucuucgucggcaccucccgcuacuccaagaaguucaagcccgagaucgccauccgccccaagguccgcgaccaggagggccgcaugaacuacuacuggacccucgucgagcccggcgacaagaucaccuucgaggccaccggcaaccucgucgucccccgcuacgccuucgccauggagcgcaacgccggcuccggcaucaucaucuccgacacccccguccacgacugcaacaccaccugccagacccccaagggcgccaucaacaccucccuccccuuccagaacauccaccccaucaccaucggcaagugccccaaguacgucaaguccaccaagcuccgccucgccaccggccuccgcaacguccccuccauccagucccgcggccucuucggcgccaucgccggcuucaucgagggcggcuggaccggcauggucgacggcugguacggcuaccaccaccagaacgagcagggcuccggcuacgccgccgaccucaaguccacccagaacgccaucgacgagaucaccaacaaggucaacuccgucaucgagaagaugaacacccaguucaccgccgucggcaaggaguucaaccaccucgagaagcgcaucgagaaccucaacaagaaggucgacgacggcuuccucgacaucuggaccuacaacgccgagcuccucguccuccucgagaacgagcgcacccucgacuaccacgacuccaacgucaagaaccucuacgagaagguccgcucccagcucaagaacaacgccaaggagaucggcaacggcugcuucgaguucuaccacaagugcgacaacaccugcauggaguccgucaagaacggcaccuacgacuaccccaaguacuccgacgaggccaagcucaaccgcgaggagaucgacggcgucaagcucgaguccacccgcaucuaccagauccucgccaucuacuccaccgucgccuccucccucguccucgucgucucccucggcgccaucuccuucuggaugugcuccaacggcucccuccagugccgcaucugcaucuga

SEQ ID NO: 105414 - RNA, 1701 nt, Artificial Sequence; identical to SEQ ID NO: 100257
  derived and/or modified CDS sequence (opt2) from hemagglutinin__InfluenzaA__AFN18979

SEQ ID NO: 105415 - RNA, 1701 nt, Artificial Sequence
  derived and/or modified CDS sequence (opt2) from hemagglutinin__InfluenzaA__AFN18982
augaaggccauccucgucguccuccucuacaccuucgccaucgccaacgccgacacccucugcaucggcuaccacgccaacaacuccaccgacaccgucgacaccguccucgagaagaacgucaccgucacccacuccgucaaccuccucgaggacaagcacaacggcaagcucugcaagcuccgcggcgucgccccccuccaccucggcaagugcaacaucgccggcuggauccucggcaaccccgagugcgagucccucuccaccgccuccuccugguccuacaucgucgagaccuccuccuccgacaacggcaccugcuaccccggcgacuucaucgacuacgaggagcuccgcgagcagcucuccuccgucuccuccuucgagcgcuucgagaucuuccccaagaccaacuccuggcccaaccacgacuccaacaagggcgucaccgccgccugcccccacgccggcgccaaguccuucuacaagaaccucaucuggcucgucaagaagggcaacuccuaccccaagcucuccaaguccuacaucaacgacaagggcaaggagguccucguccucuggggcauccaccaccccuccaccuccgccgaccagcagucccucuaccagaacgccgacgccuacgucuucgucggcaccucccgcuacuccaagaaguucaagcccgagaucgccauccgccccaagguccgcgaccaggagggccgcaugaacuacuacuggacccucgucgagcccggcgacaagaucaccuucgaggccaccggcaaccucgucgucccccgcuacgccuucgccauggagcgcaacgccggcuccggcaucaucaucuccgacacccccguccacgacugcaacaccaccugccagacccccaagggcgccaucaacaccucccuccccuuccagaacauccaccccaucaccaucggcaagugccccaaguacgucaaguccaccaagcuccgccucgccaccggccuccgcaacguccccuccauccagucccgcggccucuucggcgccaucgccggcuucaucgagggcggcuggaccggcauggucgacggcugguacggcuaccaccaccagaacgagcagggcuccggcuacgccgccgaccucaaguccacccagcacgccaucgacgagaucaccaacaaggucaacuccgucaucgagaagaugaacacccaguucaccgccgucggcaaggaguucaaccaccucgagaagcgcaucgagaaccucaacaagaaggucgacgacggcuuccucgacaucuggaccuacaacgccgagcuccucguccuccucgagaacgagcgcacccucgacuaccacgacuccaacgucaagaaccucuacgagaagguccgcucccagcucaagaacaacgccaaggagaucggcaacggcugcuucgaguucuaccacaagugcgacaacaccugcauggaguccgucaagaacggcaccuacgacuaccccaaguacuccgaggaggccaagcucaaccgcgaggagaucaacggcgucaagcucgaguccacccgcaucuaccagauccucgccaucuacuccaccgucgccuccucccucguccucgucgucucccucggcgccaucuccuucuggaugugcuccaacggcucccuccagugccgcaucugcaucuga

SEQ ID NO: 105416 - RNA, 1701 nt, Artificial Sequence; identical to SEQ ID NO: 105308
  derived and/or modified CDS sequence (opt2) from hemagglutinin__InfluenzaA__AFN18984

SEQ ID NO: 105417 - RNA, 1701 nt, Artificial Sequence; identical to SEQ ID NO: 98705
  derived and/or modified CDS sequence (opt2) from hemagglutinin__InfluenzaA__AFN18986

SEQ ID NO: 105418 - RNA, 1701 nt, Artificial Sequence; identical to SEQ ID NO: 98705
  derived and/or modified CDS sequence (opt2) from hemagglutinin__InfluenzaA__AFN18988

SEQ ID NO: 105419 - RNA, 1701 nt, Artificial Sequence; identical to SEQ ID NO: 99869
  derived and/or modified CDS sequence (opt2) from hemagglutinin__InfluenzaA__AFN18993

SEQ ID NO: 105420 - RNA, 1701 nt, Artificial Sequence; identical to SEQ ID NO: 99869
  derived and/or modified CDS sequence (opt2) from hemagglutinin__InfluenzaA__AFN18999

SEQ ID NO: 105421 - RNA, 1701 nt, Artificial Sequence; identical to SEQ ID NO: 99503
  derived and/or modified CDS sequence (opt2) from hemagglutinin__InfluenzaA__AFN19006

SEQ ID NO: 105422 - RNA, 1701 nt, Artificial Sequence; identical to SEQ ID NO: 98705
  derived and/or modified CDS sequence (opt2) from hemagglutinin__InfluenzaA__AFN19026

SEQ ID NO: 105423 - RNA, 1701 nt, Artificial Sequence; identical to SEQ ID NO: 99845
  derived and/or modified CDS sequence (opt2) from hemagglutinin__InfluenzaA__AFN19036

SEQ ID NO: 105424 - RNA, 1701 nt, Artificial Sequence; identical to SEQ ID NO: 98705
  derived and/or modified CDS sequence (opt2) from hemagglutinin__InfluenzaA__AFN19043

SEQ ID NO: 105425 - RNA, 1701 nt, Artificial Sequence; identical to SEQ ID NO: 98705
  derived and/or modified CDS sequence (opt2) from hemagglutinin__InfluenzaA__AFN19053

SEQ ID NO: 105426 - RNA, 1701 nt, Artificial Sequence; identical to SEQ ID NO: 98705
  derived and/or modified CDS sequence (opt2) from hemagglutinin__InfluenzaA__AFN19063

SEQ ID NO: 105427 - RNA, 1701 nt, Artificial Sequence; identical to SEQ ID NO: 98705
  derived and/or modified CDS sequence (opt2) from hemagglutinin__InfluenzaA__AFN19070

SEQ ID NO: 105428 - RNA, 1701 nt, Artificial Sequence
  derived and/or modified CDS sequence (opt2) from hemagglutinin__InfluenzaA__AFN19076
augaaggccauccucgucguccuccucuacaccuucgccaccgccaacgccgacacccucugcaucggcuaccacgccaacaacuccaccgacaccgucgacaccguccucgagaaggacgucaccgucacccacuccgucaaccuccucgaggacaagcacaacggcaagcucugcaagcuccgcggcgucgccccccuccaccucggcaagugcaacaucgccggcuggauccucggcaaccccgagugcgagucccucuccaccgccuccuccugguccuacaucgucgagaccuccuccuccgacaacggcaccugcuaccccggcgacuucaucgacuacgaggagcuccgcgagcagcucuccuccgucuccuccuucgagcgcuucgagaucuuccccaagaccuccuccuggcccaaccacgacuccaacaagggcgucaccgccgccugcccccacgccggcgccaaguccuucuacaagaaccucaucuggcucgucaagaagggcaacuccuaccccaagcucuccaaguccuacaucaacgacaagggcaaggagguccucguccucuggggcauccaccaccccuccaccuccgccgaccagcagucccucuaccagaacgccgacgccuacgucuucgucggcaccucccgcuacuccaagaaguucaagcccgagaucgccauccgccccaagguccgcgaccaggagggccgcaugaacuacuacuggacccucgucgagcccggcgacaagaucaccuucgaggccaccggcaaccucgucgucccccgcuacgccuucgccauggagcgcaacgccggcuccggcaucaucaucuccgacacccccguccacgacugcaacaccaccugccagacccccaagggcgccaucaacaccucccuccccuuccagaacauccaccccaucaccaucggcaagugccccaaguacgucaaguccaccaagcuccgccucgccaccggccuccgcaacguccccuccauccagucccgcggccucuucggcgccaucgccggcuucaucgagggcggcuggaccggcauggucgacggcugguacggcuaccaccaccagaacgagcagggcuccggcuacgccgccgaccucaaguccacccagaacgccaucgacgagaucaccaacaaggucaacuccgucaucgagaagaugaacacccaguucaccgccgucggcaaggaguucaaccaccucgagaagcgcaucgagaaccucaacaagaaggucgacgacggcuuccucgacaucuggaccuacaacgccgagcuccucguccuccucgagaacgagcgcacccucgacuaccacgacuccaacgucaagaaccucuacgagaagguccgcucccagcucaagaacaacgccaaggagaucggcaacggcugcuucgaguucuaccacaagugcgacaacaccugcauggaguccgucaagaacggcaccuacgacuaccccaaguacuccgaggaggccaagcucaaccgcgaggagaucgacggcgucaagcucgaguccacccgcaucuaccagauccucgccaucuacuccaccgucgccuccucccucguccucgucgucucccucggcgccaucuccuucuggaugugcuccaacggcucccuccagugccgcaucugcaucuga

SEQ ID NO: 105429 - RNA, 1701 nt, Artificial Sequence; identical to SEQ ID NO: 98705
  derived and/or modified CDS sequence (opt2) from hemagglutinin__InfluenzaA__AFN19082

SEQ ID NO: 105430 - RNA, 1701 nt, Artificial Sequence; identical to SEQ ID NO: 98705
  derived and/or modified CDS sequence (opt2) from hemagglutinin__InfluenzaA__AFN19088

SEQ ID NO: 105431 - RNA, 1701 nt, Artificial Sequence; identical to SEQ ID NO: 98705
  derived and/or modified CDS sequence (opt2) from hemagglutinin__InfluenzaA__AFN19097

SEQ ID NO: 105432 - RNA, 1701 nt, Artificial Sequence; identical to SEQ ID NO: 98705
  derived and/or modified CDS sequence (opt2) from hemagglutinin__InfluenzaA__AFN19104

SEQ ID NO: 105433 - RNA, 1701 nt, Artificial Sequence; identical to SEQ ID NO: 98705
  derived and/or modified CDS sequence (opt2) from hemagglutinin__InfluenzaA__AFN19113

SEQ ID NO: 105434 - RNA, 1701 nt, Artificial Sequence; identical to SEQ ID NO: 98705
  derived and/or modified CDS sequence (opt2) from hemagglutinin__InfluenzaA__AFN19119

SEQ ID NO: 105435 - RNA, 1701 nt, Artificial Sequence; identical to SEQ ID NO: 101216
  derived and/or modified CDS sequence (opt2) from hemagglutinin__InfluenzaA__AFN19125

SEQ ID NO: 105436 - RNA, 1701 nt, Artificial Sequence; identical to SEQ ID NO: 98705
  derived and/or modified CDS sequence (opt2) from hemagglutinin__InfluenzaA__AFN19134

SEQ ID NO: 105437 - RNA, 1701 nt, Artificial Sequence; identical to SEQ ID NO: 98705
  derived and/or modified CDS sequence (opt2) from hemagglutinin__InfluenzaA__AFN19144

SEQ ID NO: 105438 - RNA, 1701 nt, Artificial Sequence; identical to SEQ ID NO: 101260
  derived and/or modified CDS sequence (opt2) from hemagglutinin__InfluenzaA__AFN19154

SEQ ID NO: 105439 - RNA, 1701 nt, Artificial Sequence; identical to SEQ ID NO: 98705
  derived and/or modified CDS sequence (opt2) from hemagglutinin__InfluenzaA__AFN19164

SEQ ID NO: 105440 - RNA, 1701 nt, Artificial Sequence; identical to SEQ ID NO: 98705
  derived and/or modified CDS sequence (opt2) from hemagglutinin__InfluenzaA__AFN19174

SEQ ID NO: 105441 - RNA, 1701 nt, Artificial Sequence; identical to SEQ ID NO: 98705
  derived and/or modified CDS sequence (opt2) from hemagglutinin__InfluenzaA__AFN19184

SEQ ID NO: 105442 - RNA, 1701 nt, Artificial Sequence; identical to SEQ ID NO: 98705
  derived and/or modified CDS sequence (opt2) from hemagglutinin__InfluenzaA__AFN19194

SEQ ID NO: 105443 - RNA, 1701 nt, Artificial Sequence; identical to SEQ ID NO: 98705
  derived and/or modified CDS sequence (opt2) from hemagglutinin__InfluenzaA__AFN19203

SEQ ID NO: 105444 - RNA, 1701 nt, Artificial Sequence; identical to SEQ ID NO: 98705
  derived and/or modified CDS sequence (opt2) from hemagglutinin__InfluenzaA__AFN19213

SEQ ID NO: 105445 - RNA, 1701 nt, Artificial Sequence; identical to SEQ ID NO: 98705
  derived and/or modified CDS sequence (opt2) from hemagglutinin__InfluenzaA__AFN19223

SEQ ID NO: 105446 - RNA, 1701 nt, Artificial Sequence; identical to SEQ ID NO: 98705
  derived and/or modified CDS sequence (opt2) from hemagglutinin__InfluenzaA__AFN19233

SEQ ID NO: 105447 - RNA, 1701 nt, Artificial Sequence
  derived and/or modified CDS sequence (opt2) from hemagglutinin__InfluenzaA__AFN19243
augaaggccauccucgucguccuccucuacaccuucgccaccgccaacgccgacacccucugcaucggcuaccacgccaacaacuccaccgacaccgucgacaccguccucgagaagaacgucaccgucacccacuccgucaaccuccucgaggacaagcacaacggcaagcucugcaagcuccgcggcgucgccccccuccaccucggcaagugcaacaucgccggcuggauccucggcaaccccgagugcgagucccucuccaccgccuccuccugguccuacaucgucgagaccuccuccuccgacaacggcaccugcuaccccggcgacuucaucgacuacgaggagcuccgcgagcagcucuccuccgucuccuccuucgagcgcuucgagaucuuccccaagaccuccuccuggcccaaccacgacuccaacaagggcgucaccgccgccugcccccacgccggcgccaaguccuucuacaagaaccucaucuggcucgucaagaagggcaacuccuaccccaagcucuccaaguccuacaucaacgacaagggcaaggagguccucguccucuggggcauccaccaccccuccaccuccgccgaccagcagucccucuaccagaacgccgacgccuacgucuucgucggcaccuccaaguacuccaagaaguucaagcccgagaucgccauccgccccaagguccgcgaccaggagggccgcaugaacuacuacuggacccucgucgagcccggcgacaagaucaccuucgaggccaccggcaaccucgucgucccccgcuacgccuucgccauggagcgcaacgccggcuccggcaucaucaucuccgacacccccguccaggacugcaacaccaccugccagacccccaagggcgccaucaacaccucccuccccuuccagaacauccaccccaucaccaucggcaagugccccaaguacgucaaguccaccaagcuccgccucgccaccggccuccgcaacguccccuccauccagucccgcggccucuucggcgccaucgccggcuucaucgagggcggcuggaccggcauggucgacggcugguacggcuaccaccaccagaacgagcagggcuccggcuacgccgccgaccucaaguccacccagaacgccaucgacgagaucaccaacaaggucaacuccgucaucgagaagaugaacacccaguucaccgccgucggcaaggaguucaaccaccucgagaagcgcaucgagaaccucaacaagaaggucgacgacggcuuccucgacaucuggaccuacaacgccgagcuccucguccuccucgagaacgagcgcacccucgacuaccacgacuccaacgucaagaaccucuacgagaagguccgcucccagcucaagaacaacgccaaggagaucggcaacggcugcuucgaguucuaccacaagugcgacaacaccugcauggaguccgucaagaacggcaccuacgacuaccccaaguacuccgaggaggccaagcucaaccgcgaggagaucgacggcgucaagcucgaguccacccgcaucuaccagauccucgccaucuacuccaccgucgccuccucccucguccucgucgucucccucggcgccaucuccuucuggaugugcuccaacggcucccuccagugccgcaucugcaucuga

SEQ ID NO: 105448 - RNA, 1701 nt, Artificial Sequence; identical to SEQ ID NO: 100821
  derived and/or modified CDS sequence (opt2) from hemagglutinin__InfluenzaA__AFN19250

SEQ ID NO: 105449 - RNA, 1701 nt, Artificial Sequence; identical to SEQ ID NO: 98705
  derived and/or modified CDS sequence (opt2) from hemagglutinin__InfluenzaA__AFN19259

SEQ ID NO: 105450 - RNA, 1701 nt, Artificial Sequence; identical to SEQ ID NO: 98705
  derived and/or modified CDS sequence (opt2) from hemagglutinin__InfluenzaA__AFN19269

SEQ ID NO: 105451 - RNA, 1701 nt, Artificial Sequence; identical to SEQ ID NO: 98705
  derived and/or modified CDS sequence (opt2) from hemagglutinin__InfluenzaA__AFN19279

SEQ ID NO: 105452 - RNA, 1701 nt, Artificial Sequence; identical to SEQ ID NO: 99566
  derived and/or modified CDS sequence (opt2) from hemagglutinin__InfluenzaA__AFN19286

SEQ ID NO: 105453 - RNA, 1701 nt, Artificial Sequence; identical to SEQ ID NO: 98705
  derived and/or modified CDS sequence (opt2) from hemagglutinin__InfluenzaA__AFN19295

SEQ ID NO: 105454 - RNA, 1701 nt, Artificial Sequence; identical to SEQ ID NO: 98705
  derived and/or modified CDS sequence (opt2) from hemagglutinin__InfluenzaA__AFN19305

SEQ ID NO: 105455 - RNA, 1701 nt, Artificial Sequence; identical to SEQ ID NO: 99571
  derived and/or modified CDS sequence (opt2) from hemagglutinin__InfluenzaA__AFN19315

SEQ ID NO: 105456 - RNA, 1701 nt, Artificial Sequence; identical to SEQ ID NO: 98705
  derived and/or modified CDS sequence (opt2) from hemagglutinin__InfluenzaA__AFN19325

SEQ ID NO: 105457 - RNA, 1701 nt, Artificial Sequence; identical to SEQ ID NO: 98705
  derived and/or modified CDS sequence (opt2) from hemagglutinin__InfluenzaA__AFN19335

SEQ ID NO: 105458 - RNA, 1701 nt, Artificial Sequence; identical to SEQ ID NO: 98705
  derived and/or modified CDS sequence (opt2) from hemagglutinin__InfluenzaA__AFN19344

SEQ ID NO: 105459 - RNA, 1701 nt, Artificial Sequence
  derived and/or modified CDS sequence (opt2) from hemagglutinin__InfluenzaA__AFN19351
augaagaccaucaucgcccucuccuacauccucugccucgucuucgcccagaagcuccccggcaacgacaacuccauggccacccucugccucggccaccacgccguccccaacggcaccaucgucaagaccaucaccaacgaccagaucgaggucaccaacgccaccgagcucguccagaacuccuccaucggcgagaucugcgacuccccccaccagauccucgacggcgagaacugcacccucaucgacgcccuccucggcgacccccagugcgacggcuuccagaacaagaagugggaccucuucgucgagcgcuccaaggccuacuccaacugcuaccccuacgacguccccgacuacgccucccuccgcucccucgucgccuccuccggcacccucgaguucaacaacgaguccuucaacuggaccggcgucacccagaacggcaccuccuccgccugcauccgccgcuccaacaacuccuucuucucccgccucaacuggcucacccaccucaacuucaaguaccccgcccucaacgucaccaugcccaacaacgagcaguucgacaagcucuacaucuggggcguccaccaccccggcaccgacaaggaccagaucuuccucuacgcccaguccuccggccgcaucaccgucuccaccaagcgcucccagcaggccgucauccccaacaucggcucccgcccccgcauccgcaacauccccucccgcaucuccaucuacuggaccaucgucaagcccggcgacauccuccucaucaacuccaccggcaaccucaucgccccccgcggcuacuucaagauccgcuccggcaaguccuccaucaugcgcuccgacgcccccaucggcaagugcaacuccgagugcaucacccccaacggcuccauccccaacgacaagcccuuccagaacgucaaccgcaucaccuacggcgccugcccccgcuacgucaagcaguccacccucaagcucgccaccggcaugcgcaacguccccgagaagcagacccgcggcaucuucggcgccaucgccggcuucaucgagaacggcugggagggcauggucgacggcugguacggcuuccgccaccagaacuccgagggccgcggccaggccgccgaccucaaguccacccaggccgccaucgaccagaucaacggcaagcucaaccgccucaucggcaagaccaacgagaaguuccaccagaucgagaaggaguucuccgaggucgagggccgcauccaggaccucgagaaguacgucgaggacaccaagaucgaccucugguccuacaacgccgagcuccucgucgcccucgagaaccagcacaccaucgaccucaccgacuccgagaugaacaagcucuucgagaagaccaagaagcagcuccgcgagaacgccgaggacaugggcaacggcugcuucaagaucuaccacaagugcgacaacgccugcaucggcuccauccgcaacggcaccuacgaccacgacgucuaccgcgacgaggcccucaacaaccgcuuccagaucaagggcgucgagcucaaguccggcuacaaggacuggauccucuggaucuccuucgccaucuccugcuuccuccucugcgucgcccuccucggcuucaucaugugggccugccagaagggcaacguccgcugcaacaucugcaucuga

SEQ ID NO: 105460 - RNA, 1701 nt, Artificial Sequence; identical to SEQ ID NO: 105110
  derived and/or modified CDS sequence (opt2) from hemagglutinin__InfluenzaA__AFN19355

SEQ ID NO: 105461 - RNA, 1701 nt, Artificial Sequence; identical to SEQ ID NO: 105110
  derived and/or modified CDS sequence (opt2) from hemagglutinin__InfluenzaA__AFN19357

SEQ ID NO: 105462 - RNA, 1701 nt, Artificial Sequence; identical to SEQ ID NO: 105110
  derived and/or modified CDS sequence (opt2) from hemagglutinin__InfluenzaA__AFN19361

SEQ ID NO: 105463 - RNA, 1701 nt, Artificial Sequence
  derived and/or modified CDS sequence (opt2) from hemagglutinin__InfluenzaA__AFN19363
augaagaccaucaucgcccucuccuacauccucugccucgucuucgcccagaagcuccccggcaacgacaacuccaccgccacccucugccucggccaccacgccguccccaacggcaccaucgucaagaccaucaccaacgaccagaucgaggucaccaacgccaccgagcucguccagaucuccuccaccggcgagaucugcgacuccccccaccagauccucgacggcgagaacugcacccucaucgacgcccuccucggcgacccccagugcgacggcuuccagaacaagaagugggaccucuucgucgagcgcuccaaggccuacuccaacugcuaccccuacgacguccccgacuacgccucccuccgcucccucgucgccuccuccggcacccucgaguucaacaacgaguccuucaacuggaccggcgucacccagaacggcaccuccuccgccugcauccgccgcuccaacuccuccuucuucucccgccucaacuggcucacccaccucaacuucaaguaccccgcccucaacgucaccaugcccaacaacgagcaguucgacaagcucuacaucuggggcguccaccaccccggcaccgacaaggaccagaucuuccucuacgcccaguccuccggccgcaucaccgucuccaccaagcgcucccagcaggccgucauccccaacaucggcucccgcccccgcauccgcaacauccccucccgcaucuccaucuacuggaccaucgucaagcccggcgacauccuccucaucaacuccaccggcaaccucaucgccccccgcggcuacuucaagauccgcuccggcaaguccuccaucaugcgcuccgacgcccccaucggcaagugcaacuccgagugcaucacccccaacggcuccauccccaacgacaagcccuuccagaacgucaaccgcaucaccuacggcgccugcccccgcuacgucaagcaguccacccucaagcucgccaccggcaugcgcaacguccccgagaagcagacccgcggcaucuucggcgccaucgccggcuucaucgagaacggcugggagggcauggucgacggcugguacggcuuccgccaccagaacuccgagggccgcggccaggccgccgaccucaaguccacccaggccgccaucgaccagaucaacggcaagcucaaccgccucaucggcaagaccaacgagaaguuccaccagaucgagaaggaguucuccgaggucgagggccgcauccaggaccucgagaaguacgucgaggacaccaagaucgaccucugguccuacaacgccgagcuccucgucgcccucgagaaccagcacaccaucgaccucaccgacuccgagaugaacaagcucuucgagaagaccaagaagcagcuccgcgagaacgccgaggacaugggcaacggcugcuucaagaucuaccacaagugcgacaacgccugcaucggcuccauccgcaacggcaccuacaaccacgacgucuaccgcgacgaggcccucaacaaccgcuuccagaucaagggcgucgagcucaaguccggcuacaaggacuggauccucuggaucuccuucgccaucuccugcuuccuccucugcgucgcccuccucggcuucaucaugugggccugccagaagggcaacauccgcugcaacaucugcaucuga

SEQ ID NO: 105464 - RNA, 1701 nt, Artificial Sequence; identical to SEQ ID NO: 103018
  derived and/or modified CDS sequence (opt2) from hemagglutinin__InfluenzaA__AFN19365

SEQ ID NO: 105465 - RNA, 1701 nt, Artificial Sequence
  derived and/or modified CDS sequence (opt2) from hemagglutinin__InfluenzaA__AFN19367
augaagaccaucaucgcccucuccuacauccucugccucgucuucgcccagaagcuccccgagaacgacaacuccaccgccacccucugccucggccaccacgccguccccaacggcaccaucgucaagaccaucaccaacgaccagaucgaggucaccaacgccaccgagcucguccaguccuccuccaccggcgagaucugcgacuccccccaccagauccucgacggcgucaacugcacccucaucgacgcccuccucggcgacccccagugcgacggcuuccagaacaagaagugggaccucuucgucgagcgcuccaaggccuacuccaacugcuaccccuacgacguccccgacuacgccucccuccgcucccucgucgccuccuccggcacccucgaguucaacaacgaguccuucaacuggaccggcgucacccagaacggcaccuccuccgccugcauccgccgcuccaacuccuccuucuucucccgccucaacuggcucacccaccucaacuucaaguaccccgcccucaacgucaccaugcccaacaacgagcaguucgacaagcucuacaucuggggcguccaccaccccggcaccgacaaggaccagaucuuccucuacgcccaguccuccggccgcaucaccgucuccaccaagcgcucccagcaggccgucauccccaacaucggcucccgcccccgcauccgcaacauccccucccgcaucuccaucuacuggaccaucgucaagcccggcgacauccuccucaucaacuccaccggcaaccucaucgccccccgcggcuacuucaagauccaguccggcaaguccuccaucaugcgcuccgacgcccccaucggcaagugcaacuccgagugcaucacccccaacggcuccauccccaacgacaagcccuuccagaacgucaaccgcaucaccuacggcgccugcccccgcuacgucaagcaguccacccucaagcucgccaccggcaugcgcaacguccccgagaagcagacccgcggcaucuucggcgccaucgccggcuucaucgagaacggcugggagggcauggucgacggcugguacggcuuccgccaccagaacuccgagggccgcggccaggccgccgaccucaaguccacccaggccgccaucgaccagaucaacggcaagcucaaccgccucaucggcaagaccaacgagaaguuccaccagaucgagaaggaguucuccgaggucgagggccgcauccaggaccucgagaaguacgucgaggacaccaagaucgaccucugguccuacaacgccgagcuccucgucgcccucgagaaccagcacaccaucgaccucaccgacuccgagaugaacaagcucuucgagaagaccaagaagcagcuccgcgagaacgccgaggacaugggcaacggcugcuucaagaucuaccacaagugcgacaacgccugcaucggcuccauccgcaacggcaccuacaaccacgacgucuaccgcgacgaggcccucaacaaccgcuuccagaucaagggcgucgagcucaaguccggcuacaaggacuggauccucuggaucuccuucgccaucuccugcuuccuccucugcgucgcccuccucggcuucaucaugugggccugccagaagggcaacauccgcugcaacaucugcaucuga

SEQ ID NO: 105466 - RNA, 1701 nt, Artificial Sequence
  derived and/or modified CDS sequence (opt2) from hemagglutinin__InfluenzaA__AFN19369
augaagaccaucaucgcccucuccuacauccucugccucgucuucgcccagaagcuccccgagaacgacaacuccaccgccacccucugccucggccaccacgccguccccaacggcaccaucgucaagaccaucaccaacgaccagaucgaggucaccaacgccaccgagcucguccaguccuccuccaccggcgagaucugcgacuccccccaccagauccucgacggcgucaacugcacccucaucgacgcccuccucggcgacccccagugcgacggcuuccagaacaagaagugggaccucuucgucgagcgcuccaaggccuacuccaacugcuaccccuacgacguccccgacuacgccucccuccgcucccucgucgccuccuccggcacccucgaguucaacaacgaguccuucaacuggaccggcgucacccagaacggcaccuccuccgccugcauccgccgcuccaacuccuccuucuucucccgccucaacuggcucacccaccucaacuucaaguaccccgcccucaacgucaccaugcccaacaacgagcaguucgacaagcucuacaucuggggcguccaccaccccggcaccgacaaggaccagaucuuccucuacgcccaguccuccggccgcaucaccgucuccaccaagcgcucccagcaggccgucauccccaacaucggcucccgcccccgcauccgcaacauccccucccgcaucuccaucuacuggaccaucgucaagcccggcgacauccuccucaucaacuccaccggcaaccucaucgccccccgcggcuacuucaagauccgcuccggcaaguccuccaucaugcgcuccgacgcccccaucggcaagugcaacuccgagugcaucacccccaacggcuccauccccaacgacaagcccuuccagaacgucaaccgcaucaccuacggcgccugcccccgcuacgucaagcaguccacccucaagcucgccaccggcaugcgcaacguccccgagaagcagacccgcggcaucuucggcgccaucgccggcuucaucgagaacggcugggagggcauggucgacggcugguacggcuuccgccaccagaacuccgagggccgcggccaggccgccgaccucaaguccacccaggccgccaucgaccagaucaacggcaagcucaaccgccucaucggcaagaccaacgagaaguuccaccagaucgagaaggaguucuccgaggucgagggccgcauccaggaccucgagaaguacgucgaggacaccaagaucgaccucugguccuacaacgccgagcuccucgucgcccucgagaaccagcacaccaucgaccucaccgacuccgagaugaacaagcucuucgagaagaccaagaagcagcuccgcgagaacgccgaggacaugggcaacggcugcuucaagaucuaccacaagugcgacaacgccugcaucggcuccauccgcaacggcaccuacaaccacgacgucuaccgcgacgaggcccucaacaaccgcuuccagaucaagggcgucgagcucaaguccggcuacaaggacuggauccucuggaucuccuucgccaucuccugcuuccuccucugcgucgcccuccucggcuucaucaugugggccugccagaagggcaacauccgcugcaacaucugcaucuga

SEQ ID NO: 105467 - RNA, 1701 nt, Artificial Sequence
  derived and/or modified CDS sequence (opt2) from hemagglutinin__InfluenzaA__AFN19373
augaagaccaucaucgcccucuccuacauccucugccucgucuucgcccagaagcuccccggcaacgacaacuccaccgccacccucugccucggccaccacgccguccccaacggcaccaucgucaagaccaucaccaacgaccagaucgaggucaccaacgccaccgagcucguccagaacuccuccaucggcgagaucugcgacuccccccaccagauccucgacggcgagaacugcacccucaucgacgcccuccucggcgacccccagugcgacggcuuccagaacaagaagugggaccucuucgucgagcgcuccaaggccuacuccaacugcuaccccuacgacguccccgacuacgccucccuccgcucccucgucgccuccuccggcacccucgaguucaacaacgaguccuucaacuggaccggcgucacccagaacggcaccuccuccgccugcauccgccgcuccaacaacuccuucuucucccgccucaacuggcucacccaccucaacuucaaguaccccgcccucaacgucaccaugcccaacaacgagcaguucgacaagcucuacaucuggggcguccaccaccccggcaccgacaaggaccagaucuuccucuacgcccaguccuccggccgcaucaccgucuccaccaagcgcucccagcaggccgucauccccaacaucggcucccgcccccgcauccgcaacauccccucccgcaucuccaucuacuggaccaucgucaagcccggcgacauccuccucaucaacuccaccggcaaccucaucgccccccgcggcuacuucaagauccgcuccggcaaguccuccaucaugcgcuccgacgcccccaucggcaagugcaacuccgagugcaucacccccaacggcuccauccccaacgacaagcccuuccagaacgucaaccgcaucaccuacggcgccugcccccgcuacgucaagcaguccacccucaagcucgccaccggcaugcgcaacguccccgagaagcagacccgcggcaucuucggcgccaucgccggcuucaucgagaacggcugggagggcauggucgacggcugguacggcuuccgccaccagaacuccgagggccgcggccaggccgccgaccucaaguccacccaggccgccaucgaccagaucaacggcaagcucaaccgccucaucggcaagaccaacgagaaguuccaccagaucgagaaggaguucuccgaggucgagggccgcauccaggaccucgagaaguacgucgaggacaccaagaucgaccucugguccuacaacgccgagcuccucgucgcccucgagaaccagcacaccaucgaccucaccgacuccgagaugaacaagcucuucgagaagaccaagaagcagcuccgcgagaacgccgaggacaugggcaacggcugcuucaagaucuaccacaagugcgacaacgccugcaucggcuccauccgcaacggcaccuacgaccacgacgucuaccgcgacgaggcccucaacaaccgcuuccagaucaagggcgucgagcucaaguccggcuacaaggacuggauccucuggaucuccuucgccaucuccugcuuccuccucugcgucgcccuccucggcuucaucaugugggccugccagaagggcaacauccgcugcaacaucugcaucuga

SEQ ID NO: 105468 - RNA, 1701 nt, Artificial Sequence; identical to SEQ ID NO: 105110
  derived and/or modified CDS sequence (opt2) from hemagglutinin__InfluenzaA__AFN19375

SEQ ID NO: 105469 - RNA, 1701 nt, Artificial Sequence
  derived and/or modified CDS sequence (opt2) from hemagglutinin__InfluenzaA__AFN19377
augaagaccaucaucgcccucuccuacauccucugccucgucuucgcccagaagcuccccgagaacgacaacuccaccgccacccucugccucggccaccacgccguccccaacggcaccaucgucaagaccaucaccaacgaccagaucgaggucaccaacgccaccgagcucguccaguccuccuccaccggcgagaucugcgacuccccccaccagauccucgacggcgucaacugcacccucaucgacgcccuccucggcgacccccagugcgacggcuuccagaacaagaagugggaccucuucgucgagcgcuccaaggccuacuccaacugcuaccccuacgacguccccgacuacgccucccuccgcucccucgucgccuccuccggcacccucgaguucaacaacgaguccuucaacuggaccggcgucacccagaacggcaccuccuccgccugcauccgccgcuccaacuccuccuucuucucccgccucaacuggcucacccaccucaacuucaaguaccccgcccucaacgucaccaugcccaacaacgagcaguucgacaagcucuacaucuggggcguccaccaccccggcaccgacaaggaccagaucuuccucuacgcccaguccuccggccgcaucaccgucuccaccaagcgcucccagcaggccgucauccccaacaucggcucccgcccccgcauccgcaacauccccucccgcaucuccaucuacuggaccaucgucaagcccggcgacauccuccucaucaacuccaccggcaaccucaucgccccccgcggcuacuucaagauccgcuccggcaaguccuccaucaugcgcuccgacgcccccaucggcaagugcaacuccgagugcaucacccccaacggcuccauccccaacgacaagcccuuccagaacgucaaccgcaucaccuacggcgccugcccccgcuacgucaagcaguccacccucaagcucgccaccggcaugcgcaacguccccgagaagcagacccgcggcaucuucggcgccaucgccggcuucaucgagaacggcugggagggcauggucgacggcugguacggcuuccgccaccagaacuccgagggccgcggccaggccgccgaccucaaguccacccaggccgccaucgaccagaucaacggcaagcucaaccgccucaucggcaagaccaacgagaaguuccaccagaucgagaaggaguucuccgaggucgagggccgcauccaggaccucgagaaguacgucgaggacaccaagaucgaccucugguccuacaacgccgagcuccucgucgcccucgagaaccagcacaccaucgaccucaccgacuccgagaugaacaagcucuucgagaagaccaagaagcagcuccgcgagaacgccgaggacaugggcaacggcugcuucaagaucuaccacaagugcgacaacgccugcaucggcuccauccgcaacggcaccuacaaccacgacgucuaccgcgacgaggcccucaacaaccgcuuccagaucaagggcgucgagcucaaguccggcuacaaggacuggauccucuggaucuccuucgccaucuccugcuuccuccucugcgucgcccuccucggcuucaucaugugggccugccagaacggcaacauccgcugcaacaucugcaucuga

SEQ ID NO: 105470 - RNA, 1701 nt, Artificial Sequence; identical to SEQ ID NO: 105110
  derived and/or modified CDS sequence (opt2) from hemagglutinin__InfluenzaA__AFN19379

SEQ ID NO: 105471 - RNA, 1701 nt, Artificial Sequence; identical to SEQ ID NO: 105467
  derived and/or modified CDS sequence (opt2) from hemagglutinin__InfluenzaA__AFN19381

SEQ ID NO: 105472 - RNA, 1701 nt, Artificial Sequence; identical to SEQ ID NO: 105466
  derived and/or modified CDS sequence (opt2) from hemagglutinin__InfluenzaA__AFN19383

SEQ ID NO: 105473 - RNA, 1701 nt, Artificial Sequence
  derived and/or modified CDS sequence (opt2) from hemagglutinin__InfluenzaA__AFN19385
augaagaccaucaucgcccucuccuacauccucugccucgucuucgcccagaagcuccccgagaacgacaacuccaccgccacccucugccucggccaccacgccguccccaacggcaccaucgucaagaccaucaccaacgaccagaucgaggucaccaacgccaccgagcucguccaguccuccuccaccggcgagaucugcgacuccccccaccagauccucgacggcgucaacugcacccucaucgacgcccuccucggcgacccccagugcgacggcuuccagaacaagaagugggaccucuucgucgagcgcuccaaggccuacuccaacugcuaccccuacgacguccccgacuacgccucccuccgcucccucgucgccuccuccggcacccucgaguucaacaacgaguccuucaacuggaccggcgucacccagaacggcaccuccuccgccugcauccgccgcuccaacuccuccuucuucucccgccucaacuggcucacccaccucaacuucaaguaccccgcccucaacgucaccaugcccaacaacgagcaguucgacaagcucuacaucuggggcguccaccaccccggcaccgacaaggaccagaucuuccucuacgcccaguccuccggccgcaucaccgucuccaccaagcgcucccagcaggccgucauccccaacaucggcucccgcccccgcauccgcaacauccccucccgcaucuccaucuacuggaccaucgucaagcccggcgacauccuccucaucaacuccaccggcaaccucaucgccccccgcggcuacuucaagauccaguccggcaaguccuccaucaugcgcuccgacgcccccaucggcaagugcaacuccgagugcaucacccccaacggcuccauccccaacgacaagcccuuccagaacgucaaccgcaucaccuacggcgccugcccccgcuacgucaagcaguccacccucaagcucgccaccggcaugcgcaacguccccgagaagcagacccgcggcaucuucggcgccaucgccggcuucaucgagaacggcugggagggcauggucgacggcugguacggcuuccgccaccagaacuccgagggccgcggccaggccgccgaccucaaguccacccaggccgccaucgaccagaucaacggcaagcucaaccgccucaucggcaagaccaacgagaaguuccaccagaucgagaaggaguucuccgaggucgagggccgcauccaggaccucgagaaguacgucgaggacaccaagaucgacaucugguccuacaacgccgagcuccucgucgcccucgagaaccagcacaccaucgaccucaccgacuccgagaugaacaagcucuucgagaagaccaagaagcagcuccgcgagaacgccgaggacaugggcaacggcugcuucaagaucuaccacaagugcgacaacgccugcaucggcuccauccgcaacggcaccuacaaccacgacgucuaccgcgacgaggcccucaacaaccgcuuccagaucaagggcgucgagcucaaguccggcuacaaggacuggauccucuggaucuccuucgccaucuccugcuuccuccucugcgucgcccuccucggcuucaucaugugggccugccagaagggcaacauccgcugcaacaucugcaucuga

SEQ ID NO: 105474 - RNA, 1701 nt, Artificial Sequence; identical to SEQ ID NO: 105466
  derived and/or modified CDS sequence (opt2) from hemagglutinin__InfluenzaA__AFN19387

SEQ ID NO: 105475 - RNA, 1701 nt, Artificial Sequence; identical to SEQ ID NO: 105110
  derived and/or modified CDS sequence (opt2) from hemagglutinin__InfluenzaA__AFN19389

SEQ ID NO: 105476 - RNA, 1701 nt, Artificial Sequence; identical to SEQ ID NO: 105110
  derived and/or modified CDS sequence (opt2) from hemagglutinin__InfluenzaA__AFN19391

SEQ ID NO: 105477 - RNA, 1701 nt, Artificial Sequence
  derived and/or modified CDS sequence (opt2) from hemagglutinin__InfluenzaA__AFN19393
augaagaccaucaucgcccucuccuacauccucugccucgucuucgcccagaagcuccccggcaacgacaacuccaccgccacccucugccucggccaccacgccguccccaacggcaccaucgucaagaccaucaccaacgaccagaucgaggucaccaacgccaccgagcucguccaguccuccuccgccggcgagaucugcgacuccccccaccacauccucgacggcgagaacugcacccucaucgacgcccuccucggcgacccccagugcgacggcuuccagaacaagaagugggaccucuucgucgagcgcucccgcgccuacuccaacugcuaccccuacgacguccccgacuacgccucccuccgcucccucgucgccuccuccggcacccucgaguucaacaacgaguccuucaacuggaccggcgucacccagaacggcaccuccuccgccugcauccgccgcuccaacaacuccuucuucucccgccucaacuggcucacccaccucaacuucaaguaccccgcccucaacgucaccaugcccaacaacgagcaguucgacaagcucuacaucuggggcguccaccaccccggcaccgacaaggaccagaucuuccucuacgcccaggccuccggccgcaucaccgucuccaccaagcgcucccagcaggccgucauccccaacaucggcucccgcccccgcguccgcaacauccccucccgcaucuccaucuacuggaccaucgucaagcccggcgacauccuccucaucaacuccaccggcaaccucaucgccccccgcggcuacuucaagauccgcuccggcaaguccuccaucaugcgcuccgacgcccccaucggcaagugcaacuccgagugcaucacccccaacggcuccauccccaacgacaagcccuuccagaacgucaaccgcaucaccuacggcgccugcccccgcuacgucaagcaguccacccucaagcucgccaccggcaugcgcaacguccccgagaagcagacccgcggcaucuucggcgccaucgccggcuucaucgagaacggcugggagggcaugauggacggcugguacggcuuccgccaccagaacuccgagggccgcggccaggccgccgaccucaaguccacccaggccgccaucgaccagaucaacggcaagcucaaccgccucaucggcaagaccaacgagaaguuccaccagaucgagaaggaguucuccgaggucgagggccgcauccaggaccucgagaaguacgucgaggacaccaagaucgaccucugguccuacaacgccgagcuccucgucgcccucgagaaccagcacaccaucgaccucaccgacuccgagaugaacaagcucuucgagaagaccaagaagcagcuccgcgagaacgccgaggacaugggcaacggcugcuucaagaucuaccacaagugcgacaacgccugcaucggcuccauccgcaacggcaccuacgaccacgacgucuaccgcgacgaggcccucuccaaccgcuuccagaucaagggcgucgagcucaaguccggcuacaaggacuggauccucuggaucuccuucgccaucuccugcuuccuccucugcgucgcccuccucggcuucaucaugugggccugccagaagggcaacauccgcugcaacaucugcaucuga

SEQ ID NO: 105478 - RNA, 1701 nt, Artificial Sequence; identical to SEQ ID NO: 105466
  derived and/or modified CDS sequence (opt2) from hemagglutinin__InfluenzaA__AFN19397

SEQ ID NO: 105479 - RNA, 1701 nt, Artificial Sequence; identical to SEQ ID NO: 105110
  derived and/or modified CDS sequence (opt2) from hemagglutinin__InfluenzaA__AFN19399

SEQ ID NO: 105480 - RNA, 1701 nt, Artificial Sequence; identical to SEQ ID NO: 105466
  derived and/or modified CDS sequence (opt2) from hemagglutinin__InfluenzaA__AFN19401

SEQ ID NO: 105481 - RNA, 1701 nt, Artificial Sequence; identical to SEQ ID NO: 105110
  derived and/or modified CDS sequence (opt2) from hemagglutinin__InfluenzaA__AFN19403

SEQ ID NO: 105482 - RNA, 1701 nt, Artificial Sequence; identical to SEQ ID NO: 105466
  derived and/or modified CDS sequence (opt2) from hemagglutinin__InfluenzaA__AFN19405

SEQ ID NO: 105483 - RNA, 1701 nt, Artificial Sequence
  derived and/or modified CDS sequence (opt2) from hemagglutinin__InfluenzaA__AFN19407
augaagaccaucaucgcccucuccuacauccucugccucgucuucgcccagaagcuccccggcaacgacaacuccaccgccacccucugccucggccaccacgccguccccaacggcaccaucgucaagaccaucaccaacgaccagaucgaggucaccaacgccaccgagcucguccagaacuccuccaucggcgagaucugcgacuccccccaccagauccucgacggcgagaacugcacccucaucgacgcccuccucggcgacccccagugcgacggcuuccagaacaagaagugggaccucuucgucgagcgcuccaaggccuacuccaacugcuaccccuacgacguccccgacuacgccucccuccgcucccucgucgccuccuccggcacccucgaguucaacaacgaguccuucaacugguccggcgucacccagaacggcaccuccuccgccugcaugcgccgcuccaacuccuccuucuucucccgccucaacuggcucacccaccucaacuucaaguaccccgcccucaacgucaccaugcccaacaacgagcaguucgacaagcucuacaucuggggcguccaccaccccggcaccgacaaggaccagaucuuccucuacgcccaguccuccggccgcaucaccgucuccaccaagcgcucccagcaggccgucauccccaacaucggcucccgcccccgcauccgcaacauccccucccgcaucuccaucuacuggaccaucgucaagcccggcgacauccuccucaucaacuccaccggcaaccucaucgccccccgcggcuacuucaagauccgcuccggcaaguccuccaucaugcgcuccgacgcccccaucggcaagugcaacuccgagugcaucacccccaacggcuccauccccaacgacaagcccuuccagaacgucaaccgcaucaccuacggcgccugcccccgcuacgucaagcaguccacccucaagcucgccaccggcaugcgcaacguccccgagaagcagacccgcggcaucuucggcgccaucgccggcuucaucgagaacggcugggagggcauggucgacggcugguacggcuuccgccaccagaacuccgagggccgcggccaggccgccgaccucaaguccacccaggccgccaucgaccagaucaacggcaagcucaaccgccucaucggcaagaccaacgagaaguuccaccagaucgagaaggaguucuccgaggucgagggccgcauccaggaccucgagaaguacgucgaggacaccaagaucgaccucugguccuacaacgccgagcuccucgucgcccucgagaaccagcacaccaucgaccucaccgacuccgagaugaacaagcucuucgagaagaccaagaagcagcuccgcgagaacgccgaggacaugggcaacggcugcuucaagaucuaccacaagugcgacaacgccugcaucggcuccauccgcaacggcaccuacgaccacgacgucuaccgcgacgaggcccucaacaaccgcuuccagaucaagggcgucgagcucaaguccggcuacaaggacuggauccucuggaucuccuucgccaucuccugcuuccuccucugcgucgcccuccucggcuucaucaugugggccugccagaagggcaacauccgcugcaacaucugcaucuga

SEQ ID NO: 105484 - RNA, 1701 nt, Artificial Sequence
  derived and/or modified CDS sequence (opt2) from hemagglutinin__InfluenzaA__AFN19409
augaagaccaucaucgcccucuccuacauccucugccucgucuucgcccagaagcuccccggcaacgacaacuccaccgccacccucugccucggccaccacgccguccccaacggcaccaucgucaagaccaucaccaacgaccagaucgaggucaccaacgccaccgagcucguccaguccuccuccaucggcgagaucugcgacuccccccaccagauccucgacggcgagaacugcacccucaucgacgcccuccucggcgacccccagugcgacggcuuccagaacaagaagugggaccucuucgucgagcgcuccaaggccuacuccaacugcuaccccuacgacguccccgacuacgccucccuccgcucccucgucgccuccuccggcacccucgaguucaacaacgaguccuucaacuggaccggcgucacccagaacggcaccuccuccgccugcauccgccgcuccaacuccuccuucuucucccgccucaacuggcucacccaccucaacuucaaguaccccgcccucaacgucaccaugcccaacaacgagcaguucgacaagcucuacaucuggggcguccaccaccccggcaccgacaaggaccagaucuuccucuacgcccaguccuccggccgcaucaccgucuccaccaagcgcucccagcaggccgucauccccaacaucggcucccgcccccgcauccgcaacauccccucccgcaucuccaucuacuggaccaucgucaagcccggcgacauccuccucaucaacuccaccggcaaccucaucgccccccgcggcuacuucaagauccgcuccggcaaguccuccaucaugcgcuccgacgcccccaucggcaagugcaacuccgagugcaucacccccaacggcuccauccccaacgacaagcccuuccagaacgucaaccgcaucaccuacggcgccugcccccgcuacgucaagcaguccacccucaagcucgccaccggcaugcgcaacguccccgagaagcagacccgcggcaucuucggcgccaucgccggcuucaucgagaacggcugggagggcauggucgacggcugguacggcuuccgccaccagaacuccgagggccgcggccaggccgccgaccucaaguccacccaggccgccaucgaccagaucaacggcaagcucaaccgccucaucggcaagaccaacgagaaguuccaccagaucgagaaggaguucuccgaggucgagggccgcauccaggaccucgagaaguacgucgaggacaccaagaucgaccucugguccuacaacgccgagcuccucgucgcccucgagaaccagcacaccaucgaccucaccgacuccgagaugaacaagcucuucgagaagaccaagaagcagcuccgcgagaacgccgaggacaugggcaacggcugcuucaagaucuaccacaagugcgacaacgccugcaucggcuccauccgcaacggcaccuacaaccacgacgucuaccgcgacgaggcccucaacaaccgcuuccagaucaagggcgucgagcucaaguccggcuacaaggacuggauccucuggaucuccuucgccaucuccugcuuccuccucugcgucgcccuccucggcuucaucaugugggccugccagaagggcaacauccgcugcaacaucugcaucuga

SEQ ID NO: 105485 - RNA, 1701 nt, Artificial Sequence; identical to SEQ ID NO: 105466
  derived and/or modified CDS sequence (opt2) from hemagglutinin__InfluenzaA__AFN19411

SEQ ID NO: 105486 - RNA, 1701 nt, Artificial Sequence; identical to SEQ ID NO: 105110
  derived and/or modified CDS sequence (opt2) from hemagglutinin__InfluenzaA__AFN19413

SEQ ID NO: 105487 - RNA, 1701 nt, Artificial Sequence
  derived and/or modified CDS sequence (opt2) from hemagglutinin__InfluenzaA__AFN19415
augaagaccaucaucgcccucuccuacauccucugccucgucuucgcccagaagcuccccggcaacgacaacuccaccgccacccucugccucggccaccacgccguccccaacggcaccaucgucaagaccaucaccaacgaccagaucgaggucaccaacgccaccgagcucguccaguccuccuccaccggcgagaucugcgacuccccccaccagauccucgacggcgagaacugcacccucaucgacgcccuccucggcgacccccagugcgacggcuuccagaacaagaagugggaccucuucgucgagcgcuccaaggccuacuccaacugcuaccccuacgacguccccgacuacgccucccuccgcucccucgucgccuccuccggcacccucgaguucaacaacgaguccuucaacuggaccggcgucacccagaacggcaccuccuccgccugcauccgccgcuccaacuccuccuucuucucccgccucaacuggcucacccaccucaacuucaaguaccccgcccucaacgucaccaugcccaacaacgagcaguucgacaagcucuacaucuggggcguccaccaccccggcaccgacaaggaccagaucuuccucuacgcccaguccuccggccgcaucaccgucuccaccaagcgcucccagcaggccgucauccccaacaucggcucccgcccccgcauccgcaacauccccucccgcaucuccaucuacuggaccaucgucaagcccggcgacauccuccucaucaacuccaccggcaaccucaucgccccccgcggcuacuucaagauccgcuccggcaaguccuccgucaugcgcuccgacgcccccaucggcaagugcaacuccgagugcaucacccccaacggcuccauccccaacgacaagcccuuccagaacgucaaccgcaucaccuacggcgccugcccccgcuacgucaagcaguccacccucaagcucgccaccggcaugcgcaacguccccgagaagcagacccgcggcaucuucggcgccaucgccggcuucaucgagaacggcugggagggcauggucgacggcugguacggcuuccgccaccagaacuccgagggccgcggccaggccgccgaccucaaguccacccaggccgccaucgaccagaucaacggcaagcucaaccgccucaucggcaagaccaacgagaaguuccaccagaucgagaaggaguucuccgaggucgagggccgcauccaggaccucgagaaguacgucgaggacaccaagaucgaccucugguccuacaacgccgagcuccucgucgcccucgagaaccagcacaccaucgaccucaccgacuccgagaugaacaagcucuucgagaagaccaagaagcagcuccgcgagaacgccgaggacaugggcaacggcugcuucaagaucuaccacaagugcgacaacgccugcaucggcuccauccgcaacggcaccuacaaccacgacgucuaccgcgacgaggcccucaacaaccgcuuccagaucaagggcgucgagcucaaguccggcuacaaggacuggauccucuggaucuccuucgccaucuccugcuuccuccucugcgucgcccuccucggcuucaucaugugggccugccagaagggcaacauccgcugcaacaucugcaucuga

SEQ ID NO: 105488 - RNA, 1701 nt, Artificial Sequence
  derived and/or modified CDS sequence (opt2) from hemagglutinin__InfluenzaA__AFN19417
augaagaccaucaucgcccucuccuacauccucugccucgucuucgcccagaagcuccccggcaacgacaacuccaccgccacccucugccucggccaccacgccguccccaacggcaccaucgucaagaccaucaccaacgaccagaucgaggucaccaacgccaccgagcucguccaguccuccuccaccggcgagaucugcgacuccccccaccagauccucgacggcgagaacugcacccucaucgacgcccuccucggcgacccccagugcgacggcuuccagaacaagaagugggaccucuucgucgagcgcuccaaggccuacuccaacugcuaccccuacgacguccccgacuacgccucccuccgcucccucaucgccuccuccggcacccucgaguucaacaacgaguccuucaacuggaccggcgucacccagaacggcaccuccuccgccugcauccgccgcuccaacuccuccuucuucucccgccucaacuggcucacccaccucaacuucaaguaccccgcccucaacgucaccaugcccaacaacgagcaguucgacaagcucuacaucuggggcguccaccaccccggcaccgacaaggaccagaucuuccucuacgcccaguccuccggccgcaucaccgucuccaccaagcgcucccagcaggccgucauccccaacaucggcucccgcccccgcauccgcaacauccccucccgcaucuccaucuacuggaccaucgucaagcccggcgacauccuccucaucaacuccaccggcaaccucaucgccccccgcggcuacuucaagauccgcuccggcaaguccuccaucaugcgcuccgacgcccccaucggcaagugcaacuccgagugcaucacccccaacggcuccauccccaacgacaagcccuuccagaacgucaaccgcaucaccuacggcgccugcccccgcuacgucaagcaguccacccucaagcucgccaccggcaugcgcaacguccccgagaagcagacccgcggcaucuucggcgccaucgccggcuucaucgagaacggcugggagggcauggucgacggcugguacggcuuccgccaccagaacuccgagggccgcggccaggccgccgaccucaaguccacccaggccgccaucgaccagaucaacggcaagcucaaccgccucaucggcaagaccaacgagaaguuccaccagaucgagaaggaguucuccgaggucgagggccgcauccaggaccucgagaaguacgucgaggacaccaagaucgaccucugguccuacaacgccgagcuccucgucgcccucgagaaccagcacaccaucgaccucaccgacuccgagaugaacaagcucuucgagaagaccaagaagcagcuccgcgagaacgccgaggacaugggcaacggcugcuucaagaucuaccacaagugcgacaacgccugcaucggcuccauccgcaacggcaccuacaaccacgacgucuaccgcgacgaggcccucaacaaccgcuuccagaucaagggcgucgagcucaaguccggcuacaaggacuggauccucuggaucuccuucgccaucuccugcuuccuccucugcgucgcccuccucggcuucaucaugugggccugccagaagggcaacauccgcugcaacaucugcaucuga

SEQ ID NO: 105489 - RNA, 1701 nt, Artificial Sequence
  derived and/or modified CDS sequence (opt2) from hemagglutinin__InfluenzaA__AFN19423
augaagaccaucaucgcccucuccuacauccucugccucgucuucgcccagaagcuccccggcaacgacaacuccaccgccacccucugccucggccaccacgccguccccaacggcaccaucgucaagaccaucaccaacgaccgcaucgaggucaccaacgccaccgagcucguccagaacuccuccaucggcgagaucugcgacuccccccaccagauccucgacggcgagaacugcacccucaucgacgcccuccucggcgacccccagugcgacggcuuccagaacaagaagugggaccucuucgucgagcgcuccaaggccuacuccaacugcuaccccuacgacguccccgacuacgccucccuccgcucccucgucgccuccuccggcacccucgaguucaacaacgaguccuucaacuggaccggcgucacccagaacggcaccuccuccgccugcauccgccgcuccaacaacuccuucuucucccgccucaacuggcucacccaccucaacuucaaguaccccgcccucaacgucaccaugcccaacaacgagcaguucgacaagcucuacaucuggggcguccaccaccccggcaccgacaaggaccagaucuuccucuacgcccaguccuccggccgcaucaccgucuccaccaagcgcucccagcaggccgucauccccaacaucggcucccgcccccgcauccgcaacauccccucccgcaucuccaucuacuggaccaucgucaagcccggcgacauccuccucaucaacuccaccggcaaccucaucgccccccgcggcuacuucaagauccgcuccggcaaguccuccaucaugcgcuccgacgcccccaucggcaagugcaaguccgagugcaucacccccaacggcuccauccccaacgacaagcccuuccagaacgucaaccgcaucaccuacggcgccugcccccgcuacgucaagcaguccacccucaagcucgccaccggcaugcgcaacguccccgagaagcagacccgcggcaucuucggcgccaucgccggcuucaucgagaacggcugggagggcauggucgacggcugguacggcuuccgccaccagaacuccgagggccgcggccaggccgccgaccucaaguccacccaggccgccaucgaccagaucaacggcaagcucaaccgccucaucggcaagaccaacgagaaguuccaccagaucgagaaggaguucuccgaggucgagggccgcauccaggaccucgagaaguacgucgaggacaccaagaucgaccucugguccuacaacgccgagcuccucgucgcccucgagaaccagcacaccaucgaccucaccgacuccgagaugaacaagcucuucgagaagaccaagaagcagcuccgcgagaacgccgaggacaugggcaacggcugcuucaagaucuaccacaagugcgacaacgccugcaucggcuccauccgcaacggcaccuacgaccacgacgucuaccgcgacgaggcccucaacaaccgcuuccagaucaagggcgucgagcucaaguccggcuacaaggacuggauccucuggaucuccuucgccaucuccugcuuccuccucugcgucgcccuccucggcuucaucaugugggccugccagaagggcaacauccgcugcaacaucugcaucuga

SEQ ID NO: 105490 - RNA, 1701 nt, Artificial Sequence; identical to SEQ ID NO: 105466
  derived and/or modified CDS sequence (opt2) from hemagglutinin__InfluenzaA__AFN19425

SEQ ID NO: 105491 - RNA, 1701 nt, Artificial Sequence
  derived and/or modified CDS sequence (opt2) from hemagglutinin__InfluenzaA__AFN19437
augaagaccaucaucgcccucuccuacauccucugccucgucuucgcccagaagcuccccggcaacgacaacuccaccgccacccucugccucggccaccacgccguccccaacggcaccaucgucaagaccaucaccaacgaccagaucgaggucaccaacgccaccgagcucguccagaacuccuccaucggcgagaucugcgacuccccccaccagauccucgacggcgagaacugcacccucaucgacgcccuccucggcgacccccagugcgacggcuuccagaacaagaagugggaccucuucgucgagcgcuccaaggccuacuccaacugcuaccccuacgacguccccgacuacgccucccuccgcucccucgucgccuccuccggcacccucgaguucaacaacgaguccuucaacuggaccggcgucacccagaacggcaccuccuccgccugcauccgccgcuccaacuccuccuucuucucccgccucaacuggcucacccaccucaacuucaaguaccccgcccucaacgucaccaugcccaacaacgagcaguucgacaagcucuacaucuggggcguccaccaccccggcaccgacaaggaccagaucuuccucuacgcccaguccuccggccgcaucaccgucuccaccaagcgcucccagcaggccgucauccccaacaucggcucccgcccccgcauccgcaacauccccucccgcaucuccaucuacuggaccaucgucaagcccggcgacauccuccucaucaacuccaccggcaaccucaucgccccccgcggcuacuuccgcauccgcuccggcaaguccuccaucaugcgcuccgacgcccccaucggcaagugcaacuccgagugcaucacccccaacggcuccauccccaacgacaagcccuuccagaacgucaaccgcaucaccuacggcgccugcccccgcuacgucaagcaguccacccucaagcucgccaccggcaugcgcaacguccccgagaagcagacccgcggcaucuucggcgccaucgccggcuucaucgagaacggcugggagggcauggucgacggcugguacggcuuccgccaccagaacuccgagggccgcggccaggccgccgaccucaaguccacccaggccgccaucgaccagaucaaccgcaagcucaaccgccucaucggcaagaccaacgagaaguuccaccagaucgagaaggaguucuccgaggucgagggccgcauccaggaccucgagaaguacgucgaggacaccaagaucgaccucugguccuacaacgccgagcuccucgucgcccucgagaaccagcacaccaucgaccucaccgacuccgagaugaacaagcucuucgagaagaccaagaagcagcuccgcgagaacgccgaggacaugggcaacggcugcuucaagaucuaccacaagugcgacaacgccugcaucggcuccauccgcaacggcaccuacgaccacuacgucuaccgcgacgaggcccucaacaaccgcuuccagaucaagggcgucgagcucaaguccggcuacaaggacuggauccucuggaucuccuucgccaucuccugcuuccuccucugcgucgcccuccucggcuucaucaugugggccugccagaagggcaacauccgcugcaacaucugcaucuga

SEQ ID NO: 105492 - RNA, 1701 nt, Artificial Sequence
  derived and/or modified CDS sequence (opt2) from hemagglutinin__InfluenzaA__AFN19439
augaagaccaucaucgcccucucccacauccucugccucgucuucgcccagaagcuccccgagaacgacaacuccaccgccacccucugccucggccaccacgccguccccaacggcaccaucgucaagaccaucaccaacgaccagaucgaggucaccaacgccaccgagcucguccaguccuccuccaccggcgagaucugcgacuccccccaccagauccucgacggcaucaacugcacccucaucgacgcccuccucggcgacccccagugcgacggcuuccagaacaagaagugggaccucuucgucgagcgcuccaaggccuacuccaacugcuaccccuacgacguccccgacuacgccucccuccgcucccucgucgccuccuccggcacccucgaguucaacaacgaguccuucaacuggaccggcgucacccagaacggcaccuccuccgccugcauccgccgcuccaacuccuccuucuucucccgccucaacuggcucacccaccucaacuucaaguaccccgcccucaacgucaccaugcccaacaacgagcaguucgacaagcucuacaucuggggcguccaccaccccggcaccgacaaggaccagaucuuccucuacgcccagcccuccggccgcaucaccgucuccaccaagcgcucccagcaggccgucauccccaacaucggcucccgcccccgcauccgcaacauccccucccgcaucuccaucuacuggaccaucgucaagcccggcgacauccuccucaucaacuccaccggcaaccucaucgccccccgcggcuacuucaagauccgcuccggcaaguccuccaucaugcgcuccgacgcccccaucggcaagugcaacuccgagugcaucacccccaacggcuccauccccaacgacaagcccuuccagaacgucaaccgcaucaccuacggcgccugcccccgcuacgucaagcaguccacccucaagcucgccaccggcaugcgcaacguccccgagaagcagacccgcggcaucuucggcgccaucgccggcuucaucgagaacggcugggagggcauggucgacggcugguacggcuuccgccaccagaacuccgagggccgcggccaggccgccgaccucaaguccacccaggccgccaucgaccagaucaacggcaagcucaaccgccucaucggcaagaccaacgagaaguuccaccagaucgagaaggaguucuccgaggucgagggccgcauccaggaccucgagaaguacgucgaggacaccaagaucgaccucugguccuacaacgccgagcuccucgucgcccucgagaaccagcacaccaucgaccucaccgacuccgagaugaacaagcucuucgagaagaccaagaagcagcuccgcgagaacgccgaggacaugggcaacggcugcuucaagaucuaccacaagugcgacaacgccugcaucggcuccauccgcaacggcaccuacaaccacgacgucuaccgcgacgaggcccucaacaaccgcuuccagaucaagggcgucgagcucaaguccggcuacaaggacuggauccucuggaucuccuucgccaucuccugcuuccuccucugcgucgcccuccucggcuucaucaugugggccugccagaagggcaacauccgcugcaacaucugcaucuga

SEQ ID NO: 105493 - RNA, 1701 nt, Artificial Sequence; identical to SEQ ID NO: 105467
  derived and/or modified CDS sequence (opt2) from hemagglutinin__InfluenzaA__AFN19443

SEQ ID NO: 105494 - RNA, 1701 nt, Artificial Sequence
  derived and/or modified CDS sequence (opt2) from hemagglutinin__InfluenzaA__AFN19445
augaagaccaucaucgcccucuccuacauccucugccucgucuucgcccagaagcuccccggcaacgacaacuccaccgccacccucugccucggccaccacgccguccccaacggcaccaucgucaagaccaucaccaacgaccgcaucgaggucaccaacgccaccgagcucguccagaacuccuccaucggcgagaucugcgacuccccccaccagauccucgacggcgagaacugcacccucaucgacgcccuccucggcgacccccagugcgacggcuuccagaacaagaagugggaccucuucgucgagcgcuccaaggccuacuccaacugcuaccccuacgacguccccgacuacgccucccuccgcucccucgucgccuccuccggcacccucgaguucaacaacgaguccuucaacuggaccggcgucacccagaacggcaccuccuccgccugcauccgccgcuccaacaacuccuucuucucccgccucaacuggcucacccaccucaacuucaaguaccccgcccucaacgucaccaugcccaacaacgagcaguucgacaagcucuacaucuggggcguccaccaccccggcaccgacaaggaccagaucuuccucuacgcccaguccuccggccgcaucaccgucuccaccaagcgcucccagcaggccgucauccccaacaucggcucccgcccccgcauccgcaacauccccucccgcaucuccaucuacuggaccaucgucaagcccggcgacauccuccucaucaacuccaccggcaaccucaucgccccccgcggcuacuucaagauccgcuccggcaaguccuccaucaugcgcuccgacgcccccaucggcaagugcaaguccgagugcaucacccccaacggcuccauccccaacgacaagcccuuccagaacgucaaccgcaucaccuacggcgccugcccccgcuacgucaagcaguccacccuccgccucgccaccggcaugcgcaacguccccgagaagcagacccgcggcaucuucggcgccaucgccggcuucaucgagaacggcugggagggcauggucgacggcugguacggcuuccgccaccagaacuccgagggccgcggccaggccgccgaccucaaguccacccaggccgccaucgaccagaucaacggcaagcucaaccgccucaucggcaagaccaacgagaaguuccaccagaucgagaaggaguucuccgaggucgagggccgcauccaggaccucgagaaguacgucgaggacaccaagaucgaccucugguccuacaacgccgagcuccucgucgcccucgagaaccagcacaccaucgaccucaccgacuccgagaugaacaagcucuucgagaagaccaagaagcagcuccgcgagaacgccgaggacaugggcaacggcugcuucaagaucuaccacaagugcgacaacgccugcaucggcuccauccgcaacggcaccuacgaccacgacgucuaccgcgacgaggcccucaacaaccgcuuccagaucaagggcgucgagcucaaguccggcuacaaggacuggauccucuggaucuccuucgccaucuccugcuuccuccucugcgucgcccuccucggcuucaucaugugggccugccagaagggcaacauccgcugcaacaucugcaucuga

SEQ ID NO: 105495 - RNA, 1701 nt, Artificial Sequence; identical to SEQ ID NO: 105489
  derived and/or modified CDS sequence (opt2) from hemagglutinin__InfluenzaA__AFN19447

SEQ ID NO: 105496 - RNA, 1701 nt, Artificial Sequence
  derived and/or modified CDS sequence (opt2) from hemagglutinin__InfluenzaA__AFN19451
augaagaccaucaucgcccucuccuacauccucugccucgucuucgcccagaagcuccccggcaacgacaacuccaccgccacccucugccucggccaccacgccguccccaacggcaccaucgucaagaccaucaccaacgaccagaucgaggucaccaacgccaccgagcucguccagaacuccuccaucggcgagaucugcgacuccccccaccagauccucgacggcgagaacugcacccucaucgacgcccuccucggcgacccccagugcgacggcuuccagaacaagaagugggaccucuucgucgagcgcuccaaggccuacuccaacugcuaccccuacgacguccccgacuacgccucccuccgcucccucgucgccuccuccggcacccucgaguucaacaacgaguccuucaacuggaccggcgucacccagaacggcaccuccuccgccugcauccgccgcuccaacuccuccuucuucucccgccucaacuggcucacccaccucaacuucaaguaccccgcccucaacgucaccaugcccaacaacgagcaguucgacaagcucuacaucuggggcguccaccaccccggcaccgacaaggaccagaucuuccucuacgcccaguccuccggccgcaucaccgucuccaccaagcgcucccagcaggccgucauccccaacaucggcucccgcccccgcauccgcaacauccccucccgcaucuccaucuacuggaccaucgucaagcccggcgacauccuccucaucaacuccaccggcaaccucaucgccccccgcggcuacuucaagauccgcuccggcaaguccuccaucaugcgcuccgacgcccccaucggcaagugcaacuccgagugcaucacccccaacggcuccauccccaacgacaagcccuuccagaacgucaaccgcaucaccuacggcgccugcccccgcuacgucaagcaguccacccucaagcucgccaccggcaugcgcaacguccccgagaagcagacccgcggcaucuucggcgccaucgccggcuucaucgagaacggcugggagggcauggucgacggcugguacggcuuccgccaccagaacuccgagggccgcggccaggccgccgaccucaaguccacccaggccgccaucgaccagaucaacggcaagcucaaccgccucaucggcaagaccaacgagaaguuccaccagaucgagaaggaguucuccgaggucgagggccgcauccaggaccucgagaaguacgucgaggacaccaagaucgaccucugguccuacaacgccgagcuccucgucgcccucgagaaccagcacaccaucgaccucaccgacuccgagaugaacaagcucuucgagaagaccaagaagcagcuccgcgagaacgccgaggacaugggcaacggcugcuucaagaucuaccacaagugcgacaacgccugcaucggcuccauccgcaacggcaccuacgaccacgacgucuaccgcgacgaggcccucaacaaccgcuuccagaucaacggcgucgagcucaaguccggcuacaaggacuggauccucuggaucuccuucgccaucuccugcuuccuccucugcgucgcccuccucggcuucaucaugugggccugccagaagggcaacauccgcugcaacaucugcaucuga

SEQ ID NO: 105497 - RNA, 1701 nt, Artificial Sequence
  derived and/or modified CDS sequence (opt2) from hemagglutinin__InfluenzaA__AFN19453
augaagaccaucaucgcccucuccuacauccucugccucgucuucgcccagaagcuccccggcaacgacaacuccaccgccacccucugccucggccaccacgccguccccaacggcaccaucgucaagaccaucaccaacgaccagaucgaggucaccaacgccaccgagcucguccagaacuccuccaucggcgagaucugcgacuccccccaccagauccucgacggcgagaacugcacccucaucgacgcccuccucggcgacccccagugcgacggcuuccagaacaagaagugggaccucuucgucgagcgcuccaaggccuacuccaacugcuaccccuacgacguccccgacuacgccucccuccgcucccucgucgccuccuccggcacccucgaguucaacaacgaguccuucaacuggaccggcgucacccagaacggcaccuccuccgccugcauccgccgcuccaacuccuccuucuucucccgccucaacuggcucacccaccucaacuucaaguaccccgcccucaacgucaccaugcccaacaacgagcaguucgacaagcucuacaucuggggcguccaccaccccggcaccgacaaggaccagaucuuccucuacgcccaguccuccggccgcaucaccgucuccaccaagcgcucccagcaggccgucauccccaacaucggcucccgcccccgcauccgcaacauccccucccgcaucuccaucuacuggaccaucgucaagcccggcgacauccuccucaucaacuccaccggcaaccucaucgccccccgcggcuacuucaagauccgcuccggcaaguccuccaucaugcgcuccgacgcccccaucggcaagugcaacuccgagugcaucacccccaacggcuccauccccaacgacaagcccuuccagaacgucaaccgcaucaccuacggcgccugcccccgcuacgucaagcaguccacccucaagcucgccaccggcaugcgcaacguccccgagaagcagacccgcggcaucuucggcgccaucgccggcuucaucgagaacggcugggagggcauggucgacggcugguacggcuuccgccaccagaacuccgagggccgcggccaggccgccgaccucaaguccacccaggccgccaucgaccagaucaacggcaagcucaaccgccucaucggcaagaccaacgagaaguuccaccagaucgagaaggaguucuccgaggucgagggccgcauccaggaccucgagaaguacgucgaggacaccaagaucgaccucugguccuacaacgccgagcuccucgucgcccucgagaaccagcacaccaucgaccucaccgacuccgagaugaacaagcucuucgagaagaccaagaagcagcuccgcgagaacgccgaggacaugggcaacggcugcuucaagaucuaccacaagugcgacaacgccugcaucggcuccauccgcaacggcaccuacgaccacgacgucuaccgcgacgaggcccucaacaaccgcuuccaggucaagggcgucgagcucaaguccggcuacaaggacuggauccucuggaucuccuucgccaucuccugcuuccuccucugcgucgcccuccucggcuucaucaugugggccugccagaagggcaacauccgcugcaacaucugcaucuga

SEQ ID NO: 105498 - RNA, 1701 nt, Artificial Sequence; identical to SEQ ID NO: 105489
  derived and/or modified CDS sequence (opt2) from hemagglutinin__InfluenzaA__AFN19455

SEQ ID NO: 105499 - RNA, 1701 nt, Artificial Sequence; identical to SEQ ID NO: 105110
  derived and/or modified CDS sequence (opt2) from hemagglutinin__InfluenzaA__AFN19457

SEQ ID NO: 105500 - RNA, 1701 nt, Artificial Sequence; identical to SEQ ID NO: 105110
  derived and/or modified CDS sequence (opt2) from hemagglutinin__InfluenzaA__AFN19459

SEQ ID NO: 105501 - RNA, 1701 nt, Artificial Sequence; identical to SEQ ID NO: 105467
  derived and/or modified CDS sequence (opt2) from hemagglutinin__InfluenzaA__AFN19461

SEQ ID NO: 105502 - RNA, 1701 nt, Artificial Sequence
  derived and/or modified CDS sequence (opt2) from hemagglutinin__InfluenzaA__AFN19465
augaagaccaucaucgcccucuccuacauccucugccucgucuucgcccagaagcuccccggcaacgacaacuccaccgccacccucugccucggccaccacgccguccccaacggcaccaucgucaagaccaucaccaacgaccagaucgaggucaccaacgccaccgagcucguccaguccuccuccaccggcgagaucugcgacuccccccaccagauccucgacggcgagaacugcacccucaucgacgcccuccucggcgacccccagugcgacggcuuccagaacaagaagugggaccucuucgucgagcgcuccaaggccuacuccaacugcuaccccuacgacguccccgacuacgccucccuccgcucccucgucgccuccuccggcacccucgaguucaacaacgaguccuucaacuggaccggcgucacccagaacggcaccuccuccgccugcauccgccgcuccaacuccuccuucuucucccgccucaacuggcucacccaccucaacuucaaguaccccgcccucaacgucaccaugcccaacaacgagcaguucgacaagcucuacaucuggggcguccaccaccccggcaccgacaaggaccagaucuuccucuacgcccaguccuccggccgcaucaccgucuccaccaagcgcucccagcaggccgucauccccaacaucggcucccgcccccgcauccgcaacauccccucccgcaucuccaucuacuggaccaucgucaagcccggcgacauccuccucaucaacuccaccggcaaccucaucgccccccgcggcuacuucaagauccgcuccggcaaguccuccaucaugcgcuccgacgcccccaucggcaagugcaacuccgagugcaucacccccaacggcuccauccccaacgacaagcccuuccagaacgucaaccgcaucaccuacggcgccugcccccgcuacgucaagcaguccacccucaagcucgccaccggcaugcgcaacguccccgagaagcagacccgcggcaucuucggcgccaucgccggcuucaucgagaacggcugggagggcauggucgacggcugguacggcuuccgccaccagaacuccgagggccgcggccaggccgccgaccucaaguccacccaggccgccaucgaccagaucaacggcaagcucaaccgccucaucggcaagaccaacgagaaguuccaccagaucgagaaggaguucuccgaggucgagggccgcauccaggaccucgagaaguacgucgaggacaccaagaucgaccucugguccuacaacgccgagcuccucgucgcccucgagaaccagcacaccaucgaccucaccgacuccgagaugaacaagcucuucgagaagaccaagaagcagcuccgcgagaacgccgaggacaucggcaacggcugcuucaagaucuaccacaagugcgacaacgccugcaucggcuccauccgcaacggcaccuacaaccacgacgucuaccgcgacgaggcccucaacaaccgcuuccagaucaagggcgucgagcucaaguccggcuacaaggacuggauccucuggaucuccuucgccaucuccugcuuccuccucugcaucgcccuccucggcuucaucaugugggccugccagaagggcaacauccgcugcaacaucugcaucuga

SEQ ID NO: 105503 - RNA, 1701 nt, Artificial Sequence; identical to SEQ ID NO: 105489
  derived and/or modified CDS sequence (opt2) from hemagglutinin__InfluenzaA__AFN19467

SEQ ID NO: 105504 - RNA, 1701 nt, Artificial Sequence; identical to SEQ ID NO: 105497
  derived and/or modified CDS sequence (opt2) from hemagglutinin__InfluenzaA__AFN19469

SEQ ID NO: 105505 - RNA, 1701 nt, Artificial Sequence; identical to SEQ ID NO: 105110
  derived and/or modified CDS sequence (opt2) from hemagglutinin__InfluenzaA__AFN19471

SEQ ID NO: 105506 - RNA, 1701 nt, Artificial Sequence
  derived and/or modified CDS sequence (opt2) from hemagglutinin__InfluenzaA__AFN19473
augaagaccaucaucgcccucuccuacauccucugccucgucuucgcccagaagcuccccggcaacgacaacuccaccgccacccucugccucggccaccacgccguccccaacggcaccaucgucaagaccaucaccaacgaccagaucgaggucaccaacgccaccgagcucguccaguccuccuccaccggcgagaucugcggcuccccccaccagauccucgacggcgagaacugcacccucaucgacgcccuccucggcgacccccagugcgacggcuuccagaacaagaagugggaccucuucgucgagcgcuccaaggccuacuccaacugcuaccccuacgacguccccgacuacgccucccuccgcucccucgucgccuccuccggcacccucgaguucaacaacgaguccuucaacuggaccggcgucacccagaacggcaccuccuccgccugcauccgccgcuccaacuccuccuucuucucccgccucaacuggcucacccaccucaacuucaaguaccccgcccucaacgucaccaugcccaacaacgagcaguucgacaagcucuacaucuggggcguccaccaccccggcaccgacaaggaccagaucuuccucuacgcccaguccuccggccgcaucaccgucuccaccaagcgcucccagcaggccgucauccccaacaucggcucccgcccccgcauccgcaacauccccucccgcaucuccaucuacuggaccaucgucaagcccggcgacauccuccucaucaacuccaccggcaaccucaucgccccccgcggcuacuucaagauccgcuccggcaaguccuccaucaugcgcuccgacgcccccaucggcaagugcaacuccgagugcaucacccccaacggcuccauccccaacgacaagcccuuccagaacgucaaccgcaucaccuacggcgccugcccccgcuacgucaagcaguccacccucaagcucgccaccggcaugcgcaacguccccgagaagcagacccgcggcaucuucggcgccaucgccggcuucaucgagaacggcugggagggcauggucgacggcugguacggcuuccgccaccagaacuccgagggccgcggccaggccgccgaccucaaguccacccaggccgccaucgaccagaucaacggcaagcucaaccgccucaucggcaagaccaacgagaaguuccaccagaucgagaaggaguucuccgaggucgagggccgcauccaggaccucgagaaguacgucgaggacaccaagaucgaccucugguccuacaacgccgagcuccucgucgcccucgagaaccagcacaccaucgaccucaccgacuccgagaugaacaagcucuucgagaagaccaagaagcagcuccgcgagaacgccgaggacaugggcaacggcugcuucaagaucuaccacaagugcgacaacgccugcaucggcuccauccgcaacggcaccuacaaccacgacgucuaccgcgacgaggcccucaacaaccgcuuccagaucaagggcgucgagcucaaguccggcuacaaggacuggauccucuggaucuccuucgccaucuccugcuuccuccucugcgucgcccuccucggcuucaucaugugggccugccagaagggcaacauccgcugcaacaucugcaucuga

SEQ ID NO: 105507 - RNA, 1701 nt, Artificial Sequence; identical to SEQ ID NO: 105489
  derived and/or modified CDS sequence (opt2) from hemagglutinin__InfluenzaA__AFN19475

SEQ ID NO: 105508 - RNA, 1701 nt, Artificial Sequence; identical to SEQ ID NO: 105110
  derived and/or modified CDS sequence (opt2) from hemagglutinin__InfluenzaA__AFN19477

SEQ ID NO: 105509 - RNA, 1701 nt, Artificial Sequence
  derived and/or modified CDS sequence (opt2) from hemagglutinin__InfluenzaA__AFN19479
augaagaccaucaucgcccucuccugcauccucugccucgucuucgcccagaagcuccccggcaacgacaacuccaccgccacccucugccucggccaccacgccguccccaacggcaccaucgucaagaccaucaccaacgaccagaucgaggucaccaacgccaccgagcucguccagaacuccuccaucggcgagaucugcgacuccccccaccagauccucgacggcgagaacugcacccucaucgacgcccuccucggcgacccccagugcgacggcuuccagaacaagaagugggaccucuucgucgagcgcuccaaggccuacuccaacugcuaccccuacgacguccccgacuacgccucccuccgcucccucgucgccuccuccggcacccucgaguucaacaacgaguccuucaacuggaccggcgucacccagaacggcaccuccuccgccugcauccgccgcuccaacuccuccuucuucucccgccucaacuggcucacccaccucaacuucaaguaccccgcccucaacgucaccaugcccaacaacgagcaguucgacaagcucuacaucuggggcguccaccaccccggcaccgacaaggaccagaucuuccucuacgcccaguccuccggccgcaucaccgucuccaccaagcgcucccagcaggccgucauccccaacaucggcucccgcccccgcauccgcaacauccccucccgcaucuccaucuacuggaccaucgucaagcccggcgacauccuccucaucaacuccaccggcaaccucaucgccccccgcggcuacuucaagauccgcuccggcaaguccuccaucaugcgcuccgacgcccccaucggcaagugcaacuccgagugcaucacccccaacggcuccauccccaacgacaagcccuuccagaacgucaaccgcaucaccuacggcgccugcccccgcuacgucaagcaguccacccucaagcucgccaccggcaugcgcaacguccccgagaagcagacccgcggcaucuucggcgccaucgccggcuucaucgagaacggcugggagggcauggucgacggcugguacggcuuccgccaccagaacuccgagggccgcggccaggccgccgaccucaaguccacccaggccgccaucgaccagaucaacggcaagcucaaccgccucaucggcaagaccaacgagaaguuccaccagaucgagaaggaguucuccgaggucgagggccgcauccaggaccucgagaaguacgucgaggacaccaagaucgaccucugguccuacaacgccgagcuccucgucgcccucgagaaccagcacaccaucgaccucaccgacuccgagaugaacaagcucuucgagaagaccaagaagcagcuccgcgagaacgccgaggacaugggcaacggcugcuucaagaucuaccacaagugcgacaacgccugcaucggcuccauccgcaacggcaccuacgaccacgacgucuaccgcgacgaggcccucaacaaccgcuuccagaucaagggcgucgagcucaaguccggcuacaaggacuggauccucuggaucuccuucgccaucuccugcuuccuccucugcgucgcccuccucggcuucaucaugugggccugccagaagggcaacauccgcugcaacaucugcaucuga

SEQ ID NO: 105510 - RNA, 1701 nt, Artificial Sequence; identical to SEQ ID NO: 105489
  derived and/or modified CDS sequence (opt2) from hemagglutinin__InfluenzaA__AFN19483

SEQ ID NO: 105511 - RNA, 1701 nt, Artificial Sequence; identical to SEQ ID NO: 102891
  derived and/or modified CDS sequence (opt2) from hemagglutinin__InfluenzaA__AFN19485

SEQ ID NO: 105512 - RNA, 1701 nt, Artificial Sequence; identical to SEQ ID NO: 105110
  derived and/or modified CDS sequence (opt2) from hemagglutinin__InfluenzaA__AFN19487

SEQ ID NO: 105513 - RNA, 1701 nt, Artificial Sequence
  derived and/or modified CDS sequence (opt2) from hemagglutinin__InfluenzaA__AFN19491
augaagaccaucaucgcccucuccuacauccucugccucgucuucgcccagaagcuccccggcaacgacaacuccaccgccacccucugccucggccaccacgccguccccaacggcaccaucgucaagaccaucaccaacgaccagaucgaggucaccaacgccaccgagcucguccaguccuccuccaccggcgagaucugcgacuccccccaccagauccucgacggcgagaacugcacccucaucgacgcccuccucggcgacccccagugcgacggcuuccagaacaagaagugggaccucuucgucgagcgcuccaaggccuacuccaacugcuaccccuacgacguccccgacuacgccucccuccgcucccucgucgccuccuccggcacccucgaguucaacaacgaguccuucaacuggaccggcgucacccagaacggcaccuccuccgccugcauccgccgcuccaacuccuccuucuucucccgccucaacuggcucacccaccucaacuucaaguaccccgcccucaacgucaccaugcccaacaacgagcaguucgacaagcucuacaucuggggcguccaccaccccggcaccgacaaggaccagaucuuccucuacgcccaguccuccggccgcaucaccgucuccaccaagcgcucccagcaggccgucauccccaacaucggcucccgcccccgcauccgcaacauccccucccgcaucuccaucuacuggaccaucgucaagcccggcgacauccuccucaucaacuccaccggcaaccucaucgccccccgcggcuacuucaagauccgcuccggcaaguccuccaucaugcgcuccgacgcccccaucggcaagugcaacuccgagugcaucacccccaacggcuccauccccaacgacaagcccuuccagaacgucaaccgcaucaccuacggcgccugcccccgcuacgucaagcaguccacccucaagcucgccaccggcaugcgcaacguccccgagaagcagacccgcggcaucuucggcgccaucgccggcuucaucgagaacggcugggagggcauggucgacggcugguacggcuuccgccaccagaacuccgagggccgcggccaggccgccgaccucaaguccacccaggccgccaucgaccagaucaacggcaagcucaaccgccucaucggcaagaccaacgagaaguuccaccagaucgagaaggaguucuccgaggucgagggccgcauccaggaccucgagaaguacgucgaggacaccaagaucgaccucugguccuacaacgccgagcuccucgucgcccucgagaaccagcacaccaucgaccucaccgacuccgagaugaacaagcucuucgagaagaccaagaagcagcuccgcgagaacgccgaggacaugggcaacggcugcuucaagaucuaccacaagugcgacaacgccugcaucggcuccauccgcaacggcaccuacaaccacgacgucuaccgcgacgaggcccucaacaaccgcuuccagaucaagggcgucgagcucaaguccggcuacaaggacuggauccucuggaucuccuucgccaucuccugcuuccuccucugcgucguccuccucggcuucaucaugugggccugccagaagggcaacauccgcugcaacaucugcaucuga

SEQ ID NO: 105514 - RNA, 1701 nt, Artificial Sequence
  derived and/or modified CDS sequence (opt2) from hemagglutinin__InfluenzaA__AFN19493
augaagaccaucaucgcccucuccuacauccucugccucgucuucgcccagaagcuccccggcaacgacaacuccaccgccacccucugccucggccaccacgccguccccaacggcaccaucgucaagaccaucaccaacgaccagaucgaggucaccaacgccaccgagcucguccaguccuccuccaccggcgagaucugcaacuccccccaccagauccucgacggcgagaacugcacccucaucgacgcccuccucggcgacccccagugcgacggcuuccagaacaagaagugggaccucuucgucgagcgcuccaaggcccacuccaacugcuaccccuacgacguccccgacuacgccucccuccgcucccucgucgccuccuccggcacccucgaguucaacaacgaguccuucaacuggaccggcgucacccagaacggcaccuccuccgccugcauccgccgcuccaacaacuccuucuucucccgccucaacuggcucacccaccucaacuucaaguaccccgcccucaacgucaccaugcccaacaacgagcaguucgacaagcucuacaucuggggcguccaccaccccggcaccgacaaggaccagaucuuccucuacgcccaggccuccggccgcaucaccgucuccaccaagcgcucccagcagaccgucauccccaacaucggcucccgcccccgcguccgcaacauccccucccgcgucuccaucuacuggaccaucgucaagcccggcgacauccuccucaucaacuccaccggcaaccucaucgccccccgcggcuacuucaagauccgcuccggcaaguccuccaucaugcgcuccgacgcccccaucggcaagugcaacuccgccugcaucacccccaacggcuccauccccaacgacaagcccuuccagaacgucaaccgcaucaccuacggcgccugcccccgcuacgucaagcagaacacccucaagcucgccaccggcaugcgcaacguccccgagaagcagacccgcggcaucuucggcgccaucgccggcuucaucgagaacggcugggagggcauggucgacggcugguacggcuuccgccaccagaacuccgagggccgcggccaggccgccgaccucaaguccacccaggccgccaucgaccagaucaacggcaagcucaaccgccucaucggcaagaccaacgagaaguuccaccagaucgagaaggaguucuccgaggucgagggccgcauccaggaccucgagaaguacgucgaggacaccaagaucgaccucugguccuacaacgccgagcuccucgucgcccucgagaaccagcacaccaucgaccucaccgacuccgagaugaacaagcucuucgagaagaccaagaagcagcuccgcgagaacgccgaggacaugggcaacggcugcuucaagaucuaccacaagugcgacaacgccugcaucggcuccauccgcaacggcaccuacgaccacgacgucuaccgcgacgaggcccucaacaaccgcuuccagaucaagggcgucgagcucaaguccggcuacaaggacuggauccucuggaucuccuucgccaucuccugcuuccuccucugcgucgcccuccucggcuucaucaugugggccugccagaagggcaacauccgcugcaacaucugcaucuga

SEQ ID NO: 105515 - RNA, 1701 nt, Artificial Sequence
  derived and/or modified CDS sequence (opt2) from hemagglutinin__InfluenzaA__AFN19495
augaagaccaucaucgcccucuccuacauccucugccucgucuucgcccagaagauccccggcaacgacaacuccaccgccacccucugccucggccaccacgccguccccaacggcaccaucgucaagaccaucaccaacgaccagaucgaggucaccaacgccaccgagcucguccaguccuccuccgccggcgagaucugcgacuccccccaccacauccucgacggcgagaacugcacccucaucgacgcccuccucggcgacccccagugcgacggcuuccagaacaagaagugggaccucuucgucgagcgcucccgcgccuacuccaacugcuaccccuacgacguccccgacuacgccucccuccgcucccucgucgccuccuccggcacccucgaguucaacaacgaguccuucaacuggaccggcgucacccagaacggcaccuccuccgccugcauccgccgcuccaacaacuccuucuucucccgccucaacuggcucacccaccucaacuucaaguaccccgcccucaacgucaccaugcccaacaacgagcaguucgacaagcucuacaucuggggcguccaccaccccggcaccgacaaggaccagaucuuccucuacgcccaggccuccggccgcaucaccgucuccaccaagcgcucccagcaggccgucauccccaacaucggcucccgcccccgcguccgcaacauccccucccgcaucuccaucuacuggaccaucgucaagcccggcgacauccuccucaucaacuccaccggcaaccucaucgccccccgcggcuacuucaagauccgcuccggcaaguccuccaucaugcgcuccgacgcccccaucggcaagugcaacuccgagugcaucacccccaacggcuccauccccaacgacaagcccuuccagaacgucaaccgcaucaccuacggcgccugcccccgcuacgucaagcaguccacccucaagcucgccaccggcaugcgcaacguccccgagaagcagacccgcggcaucuucggcgccaucgccggcuucaucgagaacggcugggagggcaugauggacggcugguacggcuuccgccaccagaacuccgagggccgcggccaggccgccgaccucaaguccacccaggccgccaucgaccagaucaacggcaagcucaaccgccucaucggcaagaccaacgagaaguuccaccagaucgagaaggaguucuccgaggucgagggccgcauccaggaccucgagaaguacgucgaggacaccaagaucgaccucugguccuacaacgccgagcuccucgucgcccucgagaaccagcacaccaucgaccucaccgacuccgagaugaacaagcucuucgagaagaccaagaagcagcuccgcgagaacgccgaggacaugggcaacggcugcuucaagaucuaccacaagugcgacaacgccugcaucggcuccauccgcaacggcaccuacgaccacgacgucuaccgcgacgaggcccucaacaaccgcuuccagaucaagggcgucgagcucaaguccggcuacaaggacuggauccucuggaucuccuucgccaccuccugcuuccuccucugcgucgcccuccucggcuucaucaugugggccugccagaagggcaacauccgcugcaacaucugcaucuga

SEQ ID NO: 105516 - RNA, 1701 nt, Artificial Sequence
  derived and/or modified CDS sequence (opt2) from hemagglutinin__InfluenzaA__AFN19497
augaagaccaucaucgcccucuccuacauccucugccucgucuucgcccagaagcuccccgagaacgacaacuccaccgccacccucugccucggccaccacgccguccccaacggcaccaucgucaagaccaucaccaacgaccagaucgaggucaccaacgccaccgagcucguccaguccuccuccaccggcgagaucugcaacuccccccaccagauccucgacggcgagaacugcacccucaucgacgcccuccucggcgacccccagugcgacggcuuccagaacaagaagugggaccucuucgucgagcgcuccaaggcccacuccaacugcuaccccuacgacguccccgacuacgccucccuccgcucccucgucgccuccuccggcacccucgaguucaacaacgaguccuucaacuggaccggcgucacccagaacggcaccuccuccgccugcauccgccgcuccaacaacuccuucuucucccgccucaacuggcucacccaccucaacuucaaguaccccgcccucaacgucaccaugcccaacaacgagcaguucgacaagcucuacaucuggggcguccaccaccccggcaccgacaaggaccagaucuuccucuacgcccaggccuccggccgcaucaccgucuccaccaagcgcucccagcaggccgucauccccaacaucggcucccgcccccgcguccgcaacauccccucccgcgucuccaucuacuggaccaucgucaagcccggcgacauccuccucaucaacuccaccggcaaccucaucgccccccgcggcuacuucaagauccgcuccggcaaguccuccaucaugcgcuccgacgcccccaucggcaagugcaacuccaccugcaucacccccaacggcuccauccccaacgacaagcccuuccagaacgucaaccgcaucaccuacggcgccugcccccgcuacgucaagcagaacacccucaagcucgccaccggcaugcgcaacguccccgagaagcagacccgcggcaucuucggcgccaucgccggcuucaucgagaacggcugggagggcauggucgacggcugguacggcuuccgccaccagaacuccgagggccgcggccaggccgccgaccucaaguccacccaggccgccaucgaccagaucaacggcaagcucaaccgccucaucggcaagaccaacgagaaguuccaccagaucgagaaggaguucuccgaggucgagggccgcauccaggaccucgagaaguacgucgaggacaccaagaucgaccucugguccuacaacgccgagcuccucgucgcccucgagaaccagcacaccaucgaccucaccgacuccgagaugaacaagcucuucgagaagaccaagaagcagcuccgcgagaacgccgaggacaugggcaacggcugcuucaagaucuaccacaagugcgacaacgccugcaucggcuccauccgcaacggcaccuacgaccacgacgucuaccgcgacgaggcccucaacaaccgcuuccagaucaagggcgucgagcucaaguccggcuacaaggacuggauccucuggaucuccuucgccaucuccugcuuccuccucugcgucgcccuccucggcuucaucaugugggccugccagaagggcaacauccgcugcaacaucugcaucuga

SEQ ID NO: 105517 - RNA, 1701 nt, Artificial Sequence; identical to SEQ ID NO: 105467
  derived and/or modified CDS sequence (opt2) from hemagglutinin__InfluenzaA__AFN19499

SEQ ID NO: 105518 - RNA, 1701 nt, Artificial Sequence; identical to SEQ ID NO: 105466
  derived and/or modified CDS sequence (opt2) from hemagglutinin__InfluenzaA__AFN19501

SEQ ID NO: 105519 - RNA, 1701 nt, Artificial Sequence; identical to SEQ ID NO: 103018
  derived and/or modified CDS sequence (opt2) from hemagglutinin__InfluenzaA__AFN19503

SEQ ID NO: 105520 - RNA, 1701 nt, Artificial Sequence; identical to SEQ ID NO: 105467
  derived and/or modified CDS sequence (opt2) from hemagglutinin__InfluenzaA__AFN19507

SEQ ID NO: 105521 - RNA, 1701 nt, Artificial Sequence; identical to SEQ ID NO: 105466
  derived and/or modified CDS sequence (opt2) from hemagglutinin__InfluenzaA__AFN19509

SEQ ID NO: 105522 - RNA, 1701 nt, Artificial Sequence; identical to SEQ ID NO: 105467
  derived and/or modified CDS sequence (opt2) from hemagglutinin__InfluenzaA__AFN19513

SEQ ID NO: 105523 - RNA, 1701 nt, Artificial Sequence; identical to SEQ ID NO: 105466
  derived and/or modified CDS sequence (opt2) from hemagglutinin__InfluenzaA__AFN19515

SEQ ID NO: 105524 - RNA, 1701 nt, Artificial Sequence; identical to SEQ ID NO: 105467
  derived and/or modified CDS sequence (opt2) from hemagglutinin__InfluenzaA__AFN19517

SEQ ID NO: 105525 - RNA, 1701 nt, Artificial Sequence; identical to SEQ ID NO: 105467
  derived and/or modified CDS sequence (opt2) from hemagglutinin__InfluenzaA__AFN19519

SEQ ID NO: 105526 - RNA, 1701 nt, Artificial Sequence; identical to SEQ ID NO: 105110
  derived and/or modified CDS sequence (opt2) from hemagglutinin__InfluenzaA__AFN19521

SEQ ID NO: 105527 - RNA, 1701 nt, Artificial Sequence; identical to SEQ ID NO: 105466
  derived and/or modified CDS sequence (opt2) from hemagglutinin__InfluenzaA__AFN19523

SEQ ID NO: 105528 - RNA, 1701 nt, Artificial Sequence
  derived and/or modified CDS sequence (opt2) from hemagglutinin__InfluenzaA__AFN19527
augaagaccaucaucgcccucuccuacacccucugccucgucuucgcccagaagcuccccggcaacgacaacuccaccgccacccucugccucggccaccacgccguccccaacggcaccaucgucaagaccaucaccaacgaccagaucgaggucaccaacgccaccgagcucguccagaacuccuccaucggcgagaucugcgacuccccccaccagauccucgacggcgagaacugcacccucaucgacgcccuccucggcgacccccagugcgacggcuuccagaacaagaagugggaccucuucgucgagcgcuccaaggccuacuccaacugcuaccccuacgacguccccgacuacgccucccuccgcucccucgucgccuccuccggcacccucgaguucaacaacgaguccuucaacuggaccggcgucacccagaacggcaccuccuccgccugcauccgccgcuccaacuccuccuucuucucccgccucaacuggcucacccaccucaacuucaaguaccccgcccucaacgucaccaugcccaacaacgagcaguucgacaagcucuacaucuggggcguccaccaccccggcaccgacaaggaccagaucuuccucuacgcccaguccuccggccgcaucaccgucuccaccaagcgcucccagcaggccgucauccccaacaucggcucccgcccccgcauccgcaacauccccucccgcaucuccaucuacuggaccaucgucaagcccggcgacauccuccucaucaacuccaccggcaaccucaucgccccccgcggcuacuucaagauccgcuccggcaaguccuccaucaugcgcuccgacgcccccaucggcaagugcaacuccgagugcaucacccccaacggcuccauccccaacgacaagcccuuccagaacgucaaccgcaucaccuacggcgccugcccccgcuacgucaagcaguccacccucaagcucgccaccggcaugcgcaacguccccgagaagcagacccgcggcaucuucggcgccaucgccggcuucaucgagaacggcugggagggcauggucgacggcugguacggcuuccgccaccagaacuccgagggccgcggccaggccgccgaccucaaguccacccaggccgccaucgaccagaucaacggcaagcucaaccgccucaucggcaagaccaacgagaaguuccaccagaucgagaaggaguucuccgaggucgagggccgcauccaggaccucgagaaguacgucgaggacaccaagaucgaccucugguccuacaacgccgagcuccucgucgcccucgagaaccagcacaccaucgaccucaccgacuccgagaugaacaagcucuucgagaagaccaagaagcagcuccgcgagaacgccgaggacaugggcaacggcugcuucaagaucuaccacaagugcgacaacgccugcaucggcuccauccgcaacggcaccuacgaccacgacgucuaccgcgacgaggcccucaacaaccgcuuccagaucaagggcgucgagcucaaguccggcuacaaggacuggauccucuggaucuccuucgccaucuccugcuuccuccucugcgucgcccuccucggcuucaucaugugggccugccagaagggcaacauccgcugcaacaucugcaucuga

SEQ ID NO: 105529 - RNA, 1701 nt, Artificial Sequence
  derived and/or modified CDS sequence (opt2) from hemagglutinin__InfluenzaA__AFN19529
augaagaccaucaucgcccucuccuacauccucugccucgucuucgcccagaagcuccccggcaacgacaacuccaccgccacccucugccucggccaccacgccguccccaacggcaccaucgucaagaccaucaccaacgaccagaucgaggucaccaacgccaccgagcucguccagaacuccuccaucggcgagaucugcgacuccccccaccagauccucgacggcgagaacugcacccucaucgacgcccuccucggcgacccccagugcgacggcuuccagaacaagaagugggaccucuucgucgagcgcuccaaggccuacuccaacugcuaccccuacgacguccccgacuacgccucccuccgcucccucgucgccuccuccggcacccucgaguucaacaacgaguccuucaacuggaccggcgucacccagaacggcaccuccuccgccugcauccgccgcuccaacuccuccuucuucucccgccucaacuggcucacccaccucaacuucaaguaccccgcccucaacgucaccaugcccaacaacgagcaguucgacaagcucuacaucuggggcguccaccaccccggcaccgacaaggaccagaucuuccucuacgcccaguccuccggccgcaucaccgucuccaccaagcgcucccagcaggccgucauccccaacaucggcucccgcccccgcauccgcaacauccccucccgcaucuccaucuacuggaccaucgucaagcccggcgacauccuccucaucaacuccaccggcaaccucaucgccccccgcggcuacuucaagauccgcuccggcaaguccuccaucaugcgcuccgacgcccccaucggcaagugcaacuccgagugcaucacccccaacggcuccauccccaacgacaagcccuuccagaacgucaaccgcaucaccuacggcgccugcccccgcuacgucaagcaguccacccucaagcucgccaccggcaugcgcaacguccccgagaagcagacccgcggcaucuucggcgccaucgccggcuucaucgagaacggcugggagggcauggucgacggcugguacggcuuccgccaccagaacuccgagggccgcggccaggccgccgaccucaaguccacccaggccgccaucgaccagaucaacggcaagcucaaccgccucaucggcaagaccaacgagaaguuccaccagaucgagaaggaguucuccgaggucgagggccgcauccaggaccucgagaaguacgucgaggacaccaagaucgaccucugguccuacaacgccgagcuccucgucgcccucgagaaccagcacaccaucgaccucaccgacuccgagaugaacaagcucuucgagaagaccaagaagcagcuccgcgagaacgccgaggacaugggcaacggcugcuucaagaucuaccacaagugcgacaacgccugcaucggcuccauccgcaacggcaccuacgaccacgacgucuaccgcgacgaggcccucaacaaccgcuuccagaucaagggcgucgagcucaaguccggcuacaaggacuggauccucuggaucuccuucgccaucuccugcuuccuccucugcgucgcccuccucggcuucaucaugugggccugccagaagggcaacauccgcugcaacaucugcaucuga

SEQ ID NO: 105530 - RNA, 1701 nt, Artificial Sequence; identical to SEQ ID NO: 105110
  derived and/or modified CDS sequence (opt2) from hemagglutinin__InfluenzaA__AFN19531

SEQ ID NO: 105531 - RNA, 1701 nt, Artificial Sequence; identical to SEQ ID NO: 105529
  derived and/or modified CDS sequence (opt2) from hemagglutinin__InfluenzaA__AFN19533

SEQ ID NO: 105532 - RNA, 1701 nt, Artificial Sequence
  derived and/or modified CDS sequence (opt2) from hemagglutinin__InfluenzaA__AFN19535
augaagaccaucaucgcccucuccuacauccucugccucgucuucgcccagaagauccccggcaacgacaacuccaccgccacccucugccucggccaccacgccguccccaacggcaccaucgucaagaccaucaccaacgaccagaucgaggucaccaacgccaccgagcucguccaguccuccuccaccggcgagaucugcgacuccccccaccagauccucgacggcgagaacugcacccucaucgacgcccuccucggcgacccccagugcgacggcuuccagaacaagaagugggaccucuucgucgagcgcuccaaggccuacuccaacugcuaccccuacgacguccccgacuacgccucccuccgcucccucgucgccuccuccggcacccucgaguucaacaacgaguccuucaacuggaccggcgucacccagaacggcaccuccuccgccugcauccgccgcuccaacuccuccuucuucucccgccucaacuggcucacccaccucaacuucaaguaccccgcccucaacgucaccaugcccaacaacgagcaguucgacaagcucuacaucuggggcguccaccaccccggcaccgacaaggaccagaucuuccucuacgcccaguccuccggccgcaucaccgucuccaccaagcgcucccagcaggccgucauccccaacaucggcucccgcccccgcauccgcaacauccccucccgcaucuccaucuacuggaccaucgucaagcccggcgacauccuccucaucaacuccaccggcaaccucaucgccccccgcggcuacuucaagauccgcuccggcaaguccuccaucaugcgcuccgacgcccccaucggcaagugcaacuccgagugcaucacccccaacggcuccauccccaacgacaagcccuuccagaacgucaaccgcaucaccuacggcgccugcccccgcuacgucaagcaguccacccucaagcucgccaccggcaugcgcaacguccccgagaagcagacccgcggcaucuucggcgccaucgccggcuucaucgagaacggcugggagggcauggucgacggcugguacggcuuccgccaccagaacuccgagggccgcggccaggccgccgaccucaaguccacccaggccgccaucgaccagaucaacggcaagcucaaccgccucaucggcaagaccaacgagaaguuccaccagaucgagaaggaguucuccgaggucgagggccgcauccaggaccucgagaaguacgucgaggacaccaagaucgaccucugguccuacaacgccgagcuccucgucgcccucgagaaccagcacaccaucgaccucaccgacuccgagaugaacaagcucuucgagaagaccaagaagcagcuccgcgagaacgccgaggacaugggcaacggcugcuucaagaucuaccacaagugcgacaacgccugcaucggcuccauccgcaacggcaccuacaaccacgacgucuaccgcgacgaggcccucaacaaccgcuuccagaucaagggcgucgagcucaaguccggcuacaaggacuggauccucuggaucuccuucgccaucuccugcuuccuccucugcgucgcccuccucggcuucaucaugugggccugccagaagggcaacauccgcugcaacaucugcaucuga

SEQ ID NO: 105533 - RNA, 1701 nt, Artificial Sequence; identical to SEQ ID NO: 105110
  derived and/or modified CDS sequence (opt2) from hemagglutinin__InfluenzaA__AFN19537

SEQ ID NO: 105534 - RNA, 1701 nt, Artificial Sequence; identical to SEQ ID NO: 105110
  derived and/or modified CDS sequence (opt2) from hemagglutinin__InfluenzaA__AFN19539

SEQ ID NO: 105535 - RNA, 1701 nt, Artificial Sequence; identical to SEQ ID NO: 105110
  derived and/or modified CDS sequence (opt2) from hemagglutinin__InfluenzaA__AFN19543

SEQ ID NO: 105536 - RNA, 1701 nt, Artificial Sequence
  derived and/or modified CDS sequence (opt2) from hemagglutinin__InfluenzaA__AFN19545
augaagaccaucaucgcccucuccuacauccucugccucgucuucgcccagaagcuccccggcuccgacaacuccaccgccacccucugccucggccaccacgccguccccaacggcaccaucgucaagaccaucaccaacgaccgcaucgaggucaccaacgccaccgagcucguccagaacuccuccaucggcgagaucugcgacuccccccaccagauccucgacggcgagaacugcacccucaucgacgcccuccucggcgacccccagugcgacggcuucaagaacaagaagugggaccucuucgucgagcgcuccaaggccuacuccaacugcuaccccuacgacguccccgacuacgccucccuccgcucccucgucgccuccuccggcacccucgaguucaacaacgaguccuucaacuggaccggcgucacccagaacggcaccuccuccgccugcauccgccgcuccaacaacuccuucuucucccgccucaacuggcucacccaccucaacuucaaguaccccgcccucaacgucaccaugcccaacaacgagcaguucgacaagcucuacaucuggggcguccaccaccccggcaccgacaaggaccagaucuuccucuacgcccaguccuccggccgcaucaccgucuccaccaagcgcucccagcaggccgucauccccaacaucggcucccgcccccgcauccgcaacauccccucccgcaucuccaucuacuggaccaucgucaagcccggcgacauccuccucaucaacuccaccggcaaccucaucgccccccgcggcuacuucaagauccaguccggcaaguccuccaucaugcgcuccgacgcccccaucggcaagugcaaguccgagugcaucacccccaacggcuccauccccaacgacaagcccuuccagaacgucaaccgcaucaccuacggcgccugcccccgcuacgucaagcaguccacccucaagcucgccaccggcaugcgcaacguccccgagaagcagacccgcggcaucuucggcgccaucgccggcuucaucgagaacggcugggagggcauggucgacggcugguacggcuuccgccaccagaacuccgagggccgcggccaggccgccgaccucaaguccacccaggccgccaucgaccagaucaacggcaagcucaaccgccucaucggcaagaccaacgagaaguuccaccagaucgagaaggaguucuccgaggucgagggccgcauccaggaccucgagaaguacgucgaggacaccaagaucgaccucugguccuacaacgccgagcuccucgucgcccucgagaaccagcacaccaucgaccucaccgacuccgagaugaacaagcucuucgagaagaccaagaagcagcuccgcgagaacgccgaggacaugggcaacggcugcuucaagaucuaccacaagugcgacaacgccugcaucggcuccauccgcaacggcaccuacgaccacgacgucuaccgcgacgaggcccucaacaaccgcuuccagaucaagggcgucgagcucaaguccggcuacaaggacuggauccucuggaucuccuucgccaucuccugcuuccuccucugcgucgcccuccucggcuucaucaugugggccugccagaagggcaacauccgcugcaacaucugcaucuga

SEQ ID NO: 105537 - RNA, 1701 nt, Artificial Sequence; identical to SEQ ID NO: 105110
  derived and/or modified CDS sequence (opt2) from hemagglutinin__InfluenzaA__AFN19547

SEQ ID NO: 105538 - RNA, 1701 nt, Artificial Sequence
  derived and/or modified CDS sequence (opt2) from hemagglutinin__InfluenzaA__AFN19549
augaagaccaucaucgcccucuccuacauccucugccucgucuucgcccagaagcuccccggcaacgacaacuccaccgccacccucugccucggccaccacgccguccccaacggcaccaucgucaagaccaucaccaacgaccagaucgaggucaccaacgccaccgagcucguccaguccuccuccaagggcgagaucugcaacuccccccaccagauccucgacggcggcaacugcacccucaucgacgcccuccucggcgacccccagugcgacggcuuccagaacaagaagugggaccucuucgucgagcgcuccaaggcccacuccaacugcuaccccuacgacguccccgacuacgccucccuccgcucccucgucgccuccuccggcacccucgaguucaacaacgaguccuucaacuggaccggcgucacccagaacggcaccuccuccgccugcaugcgccgcuccaacaacuccuucuucucccgccucaacuggcucacccaccucaacuucaaguaccccgcccucaacgucaccaugcccaacaacgagcaguucgacaagcucuacaucuggggcguccaccaccccggcaccgacaaggaccagaucuuccucuacgcccaggccuccggccgcaucaccgucuccaccaagcgcucccagcaggccgucauccccaacaucggcucccgcccccgcguccgcaacauccccucccgcgucuccaucuacuggaccaucgucaagcccggcgacauccuccucaucaacuccaccggcaaccucaucgccccccgcggcuacuucaagauccgcuccggcaaguccuccaucaugcgcuccgacgcccccaucggcaagugcaacuccgccugcaucacccccaacggcuccauccccaacgacaagcccuuccagaacgucaaccgcaucaccuacggcgccugcccccgcuacgucaagcagaacacccucaagcucgccaccggcaugcgcaacguccccgagaagcagacccgcggcaucuucggcgccaucgccggcuucaucgagaacggcugggagggcauggucgacggcugguacggcuuccgccaccagaacuccgagggccgcggccaggccgccgaccucaaguccacccaggccgccaucgaccagaucaacggcaagcucaaccgccucaucggcaagaccaacgagaaguuccaccagaucgagaaggaguucuccgaggucgagggccgcauccaggacaucgagaaguacgucgaggacaccaagaucgaccucugguccuacaacgccgagcuccucgucgcccucgagaaccagcacaccaucgaccucaccgacuccgagaugaacaagcucuucgagaagaccaagaagcagcuccgcgagaacgccgaggacaugggcaacggcugcuucaagaucuaccacaagugcgacaacgccugcaucggcuccauccgcaacggcaccuacgaccacgacgucuaccgcgacgaggcccucaacaaccgcuuccagaucaagggcgucgagcucaaguccggcuacaaggacuggauccucuggaucuccuucgccaucuccugcuuccuccucugcgucgcccuccucggcuucaucaugugggccugccagaagggcaacauccgcugcaacaucugcaucuga

SEQ ID NO: 105539 - RNA, 1701 nt, Artificial Sequence
  derived and/or modified CDS sequence (opt2) from hemagglutinin__InfluenzaA__AFN19551
augaagaccaucaucgcccucuccuacauccucugccucgucuucgcccagaagauccccggcaacgacaacuccaccgccacccucugccucggccaccacgccguccccaacggcaccaucgucaagaccaucaccaacgaccagaucgaggucaccaacgccaccgagcucguccaguccuccuccaccggcgagaucugcgacuccccccaccagauccucgacggcgagaacugcacccucaucgacgcccuccucggcgacccccacugcgacggcuuccagaacaagaagugggaccucuucgucgagcgcuccaaggccuacuccaacugcuaccccuacgacguccccgacuacgccucccuccgcucccucgucgccuccuccggcacccucgaguucaacaacgaguccuucaacuggaccggcgucacccagaacggcaccuccuccgccugcauccgccgcuccaacuccuccuucuucucccgccucaacuggcucacccaccucaacuucaaguaccccgcccucaacgucaccaugcccaacaacgagcaguucgacaagcucuacaucuggggcguccaccaccccggcaccgacaaggaccagaucuuccucuacgcccaguccuccggccgcaucaccgucuccaccaagcgcucccagcaggccgucauccccaacaucggcucccgcccccgcauccgcaacauccccucccgcaucuccaucuacuggaccaucgucaagcccggcgacauccuccucaucaacuccaccggcaaccucaucgccccccgcggcuacuucaagauccgcuccggcaaguccuccaucaugcgcuccgacgcccccaucggcaagugcaacuccgagugcaucacccccaacggcuccauccccaacgacaagcccuuccagaacgucaaccgcaucaccuacggcgccugcccccgcuacgucaagcaguccacccucaagcucgccaccggcaugcgcaacguccccgagaagcagacccgcggcaucuucggcgccaucgccggcuucaucgagaacggcugggagggcauggucgacggcugguacggcuuccgccaccagaacuccgagggccgcggccaggccgccgaccucaaguccacccaggccgccaucgaccagaucaacggcaagcucaaccgccucaucggcaagaccaacgagaaguuccaccagaucgagaaggaguucuccgaggucgagggccgcauccaggaccucgagaaguacgucgaggacaccaagaucgaccucugguccuacaacgccgagcuccucgucgcccucgagaaccagcacaccaucgaccucaccgacuccgagaugaacaagcucuucgagaagaccaagaagcagcuccgcgagaacgccgaggacaugggcaacggcugcuucaagaucuaccacaagugcgacaacgccugcaucggcuccauccgcaacggcaccuacaaccacgacgucuaccgcgacgaggcccucaacaaccgcuuccagaucaagggcgucgagcucaaguccggcuacaaggacuggauccucuggaucuccuucgccaucuccugcuuccuccucugcgucgcccuccucggcuucaucaugugggccugccagaagggcaacauccgcugcaacaucugcaucuga

SEQ ID NO: 105540 - RNA, 1701 nt, Artificial Sequence; identical to SEQ ID NO: 105489
  derived and/or modified CDS sequence (opt2) from hemagglutinin__InfluenzaA__AFN19553

SEQ ID NO: 105541 - RNA, 1701 nt, Artificial Sequence; identical to SEQ ID NO: 105489
  derived and/or modified CDS sequence (opt2) from hemagglutinin__InfluenzaA__AFN19555

SEQ ID NO: 105542 - RNA, 1701 nt, Artificial Sequence; identical to SEQ ID NO: 105110
  derived and/or modified CDS sequence (opt2) from hemagglutinin__InfluenzaA__AFN19557

SEQ ID NO: 105543 - RNA, 1701 nt, Artificial Sequence; identical to SEQ ID NO: 105489
  derived and/or modified CDS sequence (opt2) from hemagglutinin__InfluenzaA__AFN19559

SEQ ID NO: 105544 - RNA, 1701 nt, Artificial Sequence; identical to SEQ ID NO: 105497
  derived and/or modified CDS sequence (opt2) from hemagglutinin__InfluenzaA__AFN19561

SEQ ID NO: 105545 - RNA, 1701 nt, Artificial Sequence
  derived and/or modified CDS sequence (opt2) from hemagglutinin__InfluenzaA__AFN19563
augaagaccaucaucgcccucuccuacauccucugccucgucuucgcccagaagcuccccggcaacgacaacuccaccgccacccucugccucggccaccacgccguccccaacggcaccaucgucaagaccaucaccaacgaccgcaucgaggucaccaacgccaccgagcucguccagaacuccuccaucggcgagaucugcgacuccccccaccagauccucgacggcgagaacugcacccucaucgacgcccuccucggcgacccccagugcgacggcuuccagaacaagaagugggaccucuucgucgagcgcuccaaggccuacuccaacugcuaccccuacgacguccccgacuacgccucccuccgcucccucgucgccuccuccggcacccucgaguucaacaacgaguccuucaacuggaccggcgucacccagaacggcaccuccuccgccugcauccgccgcuccaacaacuccuucuucucccgccucaacuggcucacccaccucaacuucaaguaccccgcccucaacgucaccaugcccaacaacgagcaguucgacaagcucuacaucuggggcguccaccaccccggcaccgacaaggaccagaucuuccucuacgcccaguccuccggccgcaucaccgucuccaccaagcgcucccagcaggccgucauccccaacaucggcucccgcccccgcauccgcaacauccccucccgcaucuccaucuacuggaccaucgucaagcccggcgacauccuccucaucaacuccaccggcaaccucaucgccccccgcggcuacuucaagauccgcuccggcaaguccuccaucaugcgcuccgacgcccccaucggcaagugcaaguccgagugcaucacccccaacggcuccauccccaacgacaagcccuuccagaacgucaaccgcaucaccuacggcgccugcccccgcuacgucaagcaguccacccucaagcucgccaccggcaugcgcaacguccccgagaagcagacccgcggcaucuucggcgccaucgccggcuucaucgagaacggcugggagggcauggucgacggcugguacggcuuccgccaccagaacuccgagggccgcggccaggccgccgaccucaaguccacccaggccgccaucgaccagaucaacggcaagcucaaccgccucaucggcaagaccaacgagaaguuccaccagaucgagaaggaguucuccgaggucgagggccgcauccaggaccucgagaaguacgucgaggacaccaagaucgaccucugguccuacaacgccgagcuccucgucgcccucgagaaccagcacaccaucgaccucaccgacuccgagaugaacaagcucuucgagaagaccaagaagcagcuccgcgagaacgccgaggacaugggcaacggcugcuucaagaucuaccacaagugcgacaacgccugcaucggcuccauccgcaacggcaccuacgaccacgacgucuaccgcgacgaggcccucaacaaccgcuuccagaucaagggcgucgagcucaaguccggcuacaaggacuggauccucuggaucuccuucgccaccuccugcuuccuccucugcgucgcccuccucggcuucaucaugugggccugccagaagggcaacauccgcugcaacaucugcaucuga

SEQ ID NO: 105546 - RNA, 1701 nt, Artificial Sequence; identical to SEQ ID NO: 105467
  derived and/or modified CDS sequence (opt2) from hemagglutinin__InfluenzaA__AFN19565

SEQ ID NO: 105547 - RNA, 1701 nt, Artificial Sequence
  derived and/or modified CDS sequence (opt2) from hemagglutinin__InfluenzaA__AFN19567
augaagaccaucaucgcccucuccuacauccucugccucgucuucgcccagaagauccccggcaacgacaacuccaccgccacccucugccucggccaccacgccguccccaacggcaccaucgucaagaccaucaccaacgaccgcaucgaggucaccaacgccaccgagcucguccagaacuccuccaucggcgagaucugcgacuccccccaccagauccucgacggcgagaacugcacccucaucgacgcccuccucggcgacccccagugcgacggcuuccagaacaagaagugggaccucuucgucgagcgcuccaaggccuacuccaacugcuaccccuacgacguccccgacuacgccucccuccgcucccucgucgccuccuccggcacccucgaguucaacaacgaguccuucaacuggaccggcgucacccagaacggcaccuccuccgccugcauccgccgcuccaacaacuccuucuucucccgccucaacuggcucacccaccucaacuucaaguaccccgcccucaacgucaccaugcccaacaacgagcaguucgacaagcucuacaucuggggcguccaccaccccggcaccgacaaggaccagaucuuccucuacgcccaguccuccggccgcaucaccgucuccaccaagcgcucccagcaggccgucauccccaacaucggcucccgcccccgcauccgcaacauccccucccgcaucuccaucuacuggaccaucgucaagcccggcgacauccuccucaucaacuccaccggcaaccucaucgccccccgcggcuacuucaagauccgcuccggcaaguccuccaucaugcgcuccgacgcccccaucggcaagugcaaguccgagugcaucacccccaacggcuccauccccaacgacaagcccuuccagaacgucaaccgcaucaccuacggcgccugcccccgcuacgucaagcaguccacccucaagcucgccaccggcaugcgcaacguccccgagaagcagacccgcggcaucuucggcgccaucgccggcuucaucgagaacggcugggagggcauggucgacggcugguacggcuuccgccaccagaacuccgagggccgcggccaggccgccgaccucaaguccacccaggccgccaucgaccagaucaacggcaagcucaaccgccucaucggcaagaccaacgagaaguuccaccagaucgagaaggaguucuccgaggucgagggccgcauccaggaccucgagaaguacgucgaggacaccaagaucgaccucugguccuacaacgccgagcuccucgucgcccucgagaaccagcacaccaucgaccucaccgacuccgagaugaacaagcucuucgagaagaccaagaagcagcuccgcgagaacgccgaggacaugggcaacggcugcuucaagaucuaccacaagugcgacaacgccugcaucggcuccauccgcaacggcaccuacgaccacgacgucuaccgcgacgaggcccucaacaaccgcuuccagaucaagggcgucgagcucaaguccggcuacaaggacuggauccucuggaucuccuucgccaucuccugcuuccuccucugcgucgcccuccucggcuucaucaugugggccugccagaagggcaacauccgcugcaacaucugcaucuga

SEQ ID NO: 105548 - RNA, 1701 nt, Artificial Sequence; identical to SEQ ID NO: 105110
  derived and/or modified CDS sequence (opt2) from hemagglutinin__InfluenzaA__AFN19569

SEQ ID NO: 105549 - RNA, 1701 nt, Artificial Sequence
  derived and/or modified CDS sequence (opt2) from hemagglutinin__InfluenzaA__AFN19571
augaagaccaucaucgcccucuccuacauccucugccucgucuucgcccagaagcuccccggcaacgacaacuccaccgccacccucugccucggccaccacgccguccccaacggcaccaucgucaagaccaucaccaacgaccagaucgaggucaccaacgccaccgagcucguccaguccuccuccaccggcgagaucugcgacuccccccaccagauccucgacggcgagaacugcacccucaucgacgcccuccucggcgacccccagugcgacggcuuccagaacaagaagugggaccucuucgucgagcgcuccaaggccuacuccaacugcuaccccuacgacguccccgacuacgccucccuccgcucccucgucgccuccuccggcacccucgaguucaacaacgaguccuucaacuggaccggcgucacccagaacggcaccuccuccgccugcauccgccgcuccaacuccuccuucuucucccgccucaacuggcucacccaccucaacuucaaguaccccgcccucaacgucaccaugcccaacaacgagcaguucgacaagcucuacaucuggggcguccaccaccccggcaccgacaaggaccagaucuuccucuacucccaguccuccggccgcaucaccgucuccaccaagcgcucccagcaggccgucauccccaacaucggcucccgcccccgcauccgcaacauccccucccgcaucuccaucuacuggaccaucgucaagcccggcgacauccuccucaucaacuccaccggcaaccucaucgccccccgcggcuacuuccgcauccgcuccggcaaguccuccaucaugcgcuccgacgcccccaucggcaagugcaacuccgagugcaucacccccaacggcuccauccccaacgacaagcccuuccagaacgucaaccgcaucaccuacggccccugcccccgcuacgucaagcaguccacccucaagcucgccaccggcaugcgcaacguccccgagaagcagacccgcggcaucuucggcgccaucgccggcuucaucgagaacggcugggagggcauggucgacggcugguacggcuaccgccaccagaacuccgagggccgcggccaggccgccgaccucaaguccacccaggccgccaucgaccagaucaacggcaagcucaaccgccucaucggcaagaccaacgagaaguuccaccagaucgagaaggaguucuccgaggucgagggccgcauccaggaccucgagaaguacgucgaggacaccaagaucgaccucuggaccuacaacgccgagcuccucgucgcccucgagaaccagcacaccaucgaccucaccgacuccgagaugaacaagcucuucgagaagaccaagaagcagcuccgcgagaacgccgaggacaugggcaacggcugcuucaagaucuaccacaagugcgacaacgccugcaucggcuccauccgcaacggcaccuacaaccacgacgucuaccgcgacgaggcccucaacaaccgcuuccagaucaagggcgucgagcucaaguccggcuacaaggacuggauccucuggaucuccuucgccaucuccugcuuccuccucugcgucgcccuccucggcuucaucaugugggccugccagaagggcaacauccgcugcaacaucugcaucuga

SEQ ID NO: 105550 - RNA, 1701 nt, Artificial Sequence
  derived and/or modified CDS sequence (opt2) from hemagglutinin__InfluenzaA__AFN19573
augaagaccaucaucgcccucuccuacauccucugccucgucuucgcccagaagcuccccggcaacgacaacuccaccgccacccucugccucggccaccacgccguccccaacggcaccaucgucaagaccaucaccaacgaccagaucgaggucaccaacgccaccgagcucguccaguccuccuccaccggcaagaucugcgacuccccccaccagauccucgacggcaagaacugcacccucaucgacgcccuccucggcgacccccagugcgacggcuuccagaacaagaagugggaccucuucgucgagcgcuccaaggccuacuccaacugcuaccccuacgacguccccgacuacgccucccuccgcucccucgucgccuccuccggcacccucgaguucaacaacgaguccuucaacuggaccggcgucacccagaacggcaccuccuccgccugcauccgccgcuccaagaacuccuucuucucccgccucaacuggcucacccaccucaacuucaaguacuccgcccucaacgucaccaugcccaacaaggagcaguucgacaagcucuacaucuggggcguccaccaccccggcaccgacaaggaccagaucucccucuacgcccaggccuccggccgcaucaccgucuccaccaagcgcucccagcagaccgucauccccaacaucggcucccgcccccgcguccgcaacauccccucccgcaucuccaucuacuggaccaucgucaagcccggcgacauccuccucaucaacuccaccggcaaccucaucgccccccgcggcuacuucaagaugcaguccggcaaguccuccaucaugcgcuccgacgcccccaucggcaagugcaacuccgagugcaucacccccaacggcuccauccccaacgacaagcccuuccagaacgucaaccgcaucaccuacggcgccugcccccgcuacgucaagcagaacacccucaagcucgccaccggcaugcgcaacguccccgagaagcagacccgcggcaucuucggcgccaucgccggcuucaucgagaacggcugggagggcauggucgacggcugguacggcuuccgccaccagaacuccgagggccgcggccaggccgccgaccucaaguccacccaggccgccaucgaccagaucaacggcaagcucaaccgccucaucggcaagaccaacgagaaguuccaccagaucgagaaggaguucuccgaggucgagggccgcauccaggaccucgagaaguacgucgaggacaccaagaucgaccucugguccuacaacgccgagcuccucgucgcccucgagaaccagcacaccaucgaccucaccgacuccgagaugaacaagcucuucgagaagaccaagaagcagcuccgcgagaacgccgaggacaugggcaacggcugcuucaagaucuaccacaagugcgacaacgccugcaucggcuccauccgcaacggcaccuacgaccacgacgucuaccgcgacgaggcccucaacaaccgcuuccagaucaagggcgucgagcucaaguccggcuacaaggacuggauccucuggaucuccuucgccaucuccugcuuccuccucugcgucgcccuccucggcuucaucaugugggccugccagaagggcaacauccgcugcaacaucugcaucuga

SEQ ID NO: 105551 - RNA, 1701 nt, Artificial Sequence
  derived and/or modified CDS sequence (opt2) from hemagglutinin__InfluenzaA__AFN19575
augaagaccaucaucgcccucuccuacauccucugccucgucuucgcccagaagcuccccggcaacgacaacuccaccgccacccucugccucggccaccacgccguccccaacggcaccaucgucaagaccaucaccaacgaccagaucgaggucaccaacgccaccgagcucguccaguccuccuccaccggcgagaucugcgacaacccccaccagauccucgacggcgagaacugcacccucaucgacgcccuccucggcgacccccagugcgacggcuuccagaacaagaagugggaccucuucgucgagcgcuccaaggccuacuccaacugcuaccccuacgacguccccgacuacgccucccuccgcucccucgucgccuccuccggcacccucgaguucaacaacgaguccuucaacuggaccggcgucacccagaacggcaccuccuccgccugcauccgccgcuccaacaacuccuucuucucccgccucaacuggcucacccaccucaacuucaaguaccccgcccucaacgucaccaugcccaacaacgagcaguucgacaagcucuacaucuggggcguccaccaccccggcaccgacaaggaccagaucuuccucuacgcccaguccuccggccgcaucaccgucuccaccaagcgcucccagcaggccgucauccccaacaucggcucccgcccccgcguccgcaacauccccucccgcaucuccaucuacuggaccaucgucaagcccggcgacauccuccucaucaacuccaccggcaaccucaucgccccccgcggcuacuucaagauccgcuccggcaaguccuccaucaugcgcuccgacgcccccaucggcaagugcaacuccgagugcaucacccccaacggcuccauccccaacgacaagcccuuccagaacgucaaccgcaucaccuacggcgccugcccccgcuacgucaagcaguccacccucaagcucgccaccggcaugcgcaacguccccgagaagcagacccgcggcaucuucggcgccaucgccggcuucaucgagaacggcugggagggcauggucgacggcugguacggcuuccgccaccagaacuccgagggccgcggccaggccgccgaccucaaguccacccaggccgccaucgaccagaucaacggcaagcucaaccgccucaucggcaagaccaacgagaaguuccaccagaucgagaaggaguucuccgaggucgagggccgcauccaggaccucgagaaguacgucgaggacaccaagaucgaccucugguccuacaacgccgagcuccucgucgcccucgagaaccagcacaccaucgaccucaccgacuccgagaugaacaagcucuucgagaagaccaagaagcagcuccgcgagaacgccgaggacaugggcaacggcugcuucaagaucuaccacaagugcgacaacgccugcaucggcuccauccgcaacggcaccuacgaccacgacgucuaccgcgacgaggcccucaacaaccgcuuccagaucaagggcgucgagcucaaguccggcuacaaggacuggauccucuggaucuccuucgccaucuccugcuuccuccucugcgucgcccuccucggcuucaucaugugggccugccagaagggcaacauccgcugcaacaucugcaucuga

SEQ ID NO: 105552 - RNA, 1701 nt, Artificial Sequence; identical to SEQ ID NO: 105466
  derived and/or modified CDS sequence (opt2) from hemagglutinin__InfluenzaA__AFN19577

SEQ ID NO: 105553 - RNA, 1701 nt, Artificial Sequence; identical to SEQ ID NO: 105466
  derived and/or modified CDS sequence (opt2) from hemagglutinin__InfluenzaA__AFN19579

SEQ ID NO: 105554 - RNA, 1701 nt, Artificial Sequence; identical to SEQ ID NO: 105466
  derived and/or modified CDS sequence (opt2) from hemagglutinin__InfluenzaA__AFN19581

SEQ ID NO: 105555 - RNA, 1701 nt, Artificial Sequence; identical to SEQ ID NO: 105466
  derived and/or modified CDS sequence (opt2) from hemagglutinin__InfluenzaA__AFN19583

SEQ ID NO: 105556 - RNA, 1701 nt, Artificial Sequence
  derived and/or modified CDS sequence (opt2) from hemagglutinin__InfluenzaA__AFN19587
augaagaccaucaucgcccucuccuacauccucugccucgucuucgcccagaagcuccccgagaacgacaacuccaccgccacccucugccucggccaccacgccguccccaacggcaccaucgucaagaccaucaccaacgaccagaucgaggucaccaacgccaccgagcucguccaguccuccuccaccggcgagaucugcgacuccccccaccagauccucgacggcgucaacugcacccucaucgacgcccuccucggcgacccccagugcgacggcuuccagaacaagaagugggaccucuucgucgagcgcuccaaggccuacuccaacugcuaccccuacgacguccccgacuacgccucccuccgcucccucgucgccuccuccggcacccucgaguucaacaacgaguccuucaacuggaccggcgucacccagaacggcaccuccuccgccugcauccgccgcuccaacuccuccuucuucucccgccucaacuggcucacccaccucaacuucaaguaccccgcccucaacgucaccaugcccaacaacgagcaguucgacaagcucuacaucuggggcguccaccaccccggcaccgacaaggaccagaucuuccucuacgcccaguccuccggccgcaucaccgucuccaccaagcgcucccagcaggccgucauccccaacaucggcucccgcccccgcauccgcaacauccccucccgcaucuccaucuacuggaccaucgucaagcccggcgacauccuccucaucaacuccaccggcaaccucaucgccccccgcggcuacuucaagauccgcuccggcaaguccuccaucaugcgcuccgacgcccccaucggcaagugcaacuccgagugcaucacccccaacggcuccauccccaacgacaagcccuuccagaacgucaaccgcaucaccuacggcgccugcccccgcuacgucaagcaguccacccucaagcucgccaccggcaugcgcaacguccccgagaagcagacccgcggcaucuucggcgccaucgccggcuucaucgagaacggcugggagggcauggucgacggcugguacggcuuccgccaccagaacuccgagggccgcggccaggccgccgaccucaaguccacccaggccgccaucgaccagaucaacggcaagcucaaccgccucaucggcaagaccaacgagaaguuccaccagaucgagaaggaguucuccgaggucgagggccgcauccaggaccucgagaaguacgucgaggacaccaagaucgaccucugguccuacaacgccgagcuccucgucgcccucgagaaccagcacaccaucgaccucaccgacuccgagaugaacaagcucuucgagaagaccaagaagcagcuccgcgagaacgccgaggacaugggcaacggcugcuucaagaucuaccacgagugcgacaacgccugcaucggcuccauccgcaacggcaccuacaaccacgacgucuaccgcgacgaggcccucaacaaccgcuuccagaucaagggcgucgagcucaaguccggcuacaaggacuggauccucuggaucuccuucgccaucuccugcuuccuccucugcgucgcccuccucggcuucaucaugugggccugccagaagggcaacauccgcugcaacaucugcaucuga

SEQ ID NO: 105557 - RNA, 1701 nt, Artificial Sequence; identical to SEQ ID NO: 105466
  derived and/or modified CDS sequence (opt2) from hemagglutinin__InfluenzaA__AFN19589

SEQ ID NO: 105558 - RNA, 1701 nt, Artificial Sequence
  derived and/or modified CDS sequence (opt2) from hemagglutinin__InfluenzaA__AFN19591
augaagaccaucaucgcccucuccuacauccucugccucgucuucgcccagaagcuccccggcaacgacaacuccaccgccacccucugccucggccaccacgccguccccaacggcaccaucgucaagaccaucaccaacgaccagaucgaggucaccaacgccaccgagcucguccagaacuccuccaucggcgagaucugcgacuccccccaccagauccucgacggcgagaacugcacccucaucgacgcccuccucggcgacccccagugcgacggcuuccagaacaagaagugggaccucuucgucgagcgcuccaaggccuacuccaacugcuaccccuacgacguccccgacuacgccucccuccgcucccucgucgccuccuccggcacccucgaguucaacaacgaguccuucaacuggaccggcgucacccagaacggcaccuccuccgccugcaugcgccgcuccaacuccuccuucuucucccgccucaacuggcucacccaccucaacuucaaguaccccgcccucaacgucaccaugcccaacaacgagcaguucgacaagcucuacaucuggggcguccaccaccccggcaccgacaaggaccagaucuuccucuacgcccaguccuccggccgcaucaccgucuccaccaagcgcucccagcaggccgucauccccaacaucggcucccgcccccgcauccgcaacauccccucccgcaucuccaucuacuggaccaucgucaagcccggcgacauccuccucaucaacuccaccggcaaccucaucgccccccgcggcuacuucaagauccgcuccggcaaguccuccaucaugcgcuccgacgcccccaucggcaagugcaacuccgagugcaucacccccaacggcuccauccccaacgacaagcccuuccagaacgucaaccgcaucaccuacggcgccugcccccgcuacgucaagcaguccacccucaagcucgccaccggcaugcgcaacguccccgagaagcagacccgcggcaucuucggcgccaucgccggcuucaucgagaacggcugggagggcauggucgacggcugguacggcuuccgccaccagaacuccgagggccgcggccaggccgccgaccucaaguccacccaggccgccaucgaccagaucaacggcaagcucaaccgccucaucggcaagaccaacgagaaguuccaccagaucgagaaggaguucuccgaggucgagggccgcauccaggaccucgagaaguacgucgaggacaccaagaucgaccucugguccuacaacgccgagcuccucgucgcccucgagaaccagcacaccaucgaccucaccgacuccgagaugaacaagcucuucgagaagaccaagaagcagcuccgcgagaacgccgaggacaugggcaacggcugcuucaagaucuaccacaagugcgacaacgccugcaucggcuccauccgcaacggcaccuacgaccacgacgucuaccgcgacgaggcccucaacaaccgcuuccagaucaagggcgucgagcucaaguccggcuacaaggacuggauccucuggaucuccuucgccaucuccugcuuccuccucugcgucgcccuccucggcuucaucaugugggccugccagaacggcaacauccgcugcaacaucugcaucuga

SEQ ID NO: 105559 - RNA, 1701 nt, Artificial Sequence; identical to SEQ ID NO: 105466
  derived and/or modified CDS sequence (opt2) from hemagglutinin__InfluenzaA__AFN19593

SEQ ID NO: 105560 - RNA, 1701 nt, Artificial Sequence; identical to SEQ ID NO: 105467
  derived and/or modified CDS sequence (opt2) from hemagglutinin__InfluenzaA__AFN19595

SEQ ID NO: 105561 - RNA, 1701 nt, Artificial Sequence; identical to SEQ ID NO: 105467
  derived and/or modified CDS sequence (opt2) from hemagglutinin__InfluenzaA__AFN19599

SEQ ID NO: 105562 - RNA, 1701 nt, Artificial Sequence; identical to SEQ ID NO: 105529
  derived and/or modified CDS sequence (opt2) from hemagglutinin__InfluenzaA__AFN19601

SEQ ID NO: 105563 - RNA, 1701 nt, Artificial Sequence; identical to SEQ ID NO: 105110
  derived and/or modified CDS sequence (opt2) from hemagglutinin__InfluenzaA__AFN19607

SEQ ID NO: 105564 - RNA, 1701 nt, Artificial Sequence; identical to SEQ ID NO: 105466
  derived and/or modified CDS sequence (opt2) from hemagglutinin__InfluenzaA__AFN19609

SEQ ID NO: 105565 - RNA, 1701 nt, Artificial Sequence
  derived and/or modified CDS sequence (opt2) from hemagglutinin__InfluenzaA__AFN19611
augaagaccaucaucgcccucuccuacauccucugccucgucuucgcccagaagcuccccggcaacgacaacuccaccgccacccucugccucggccaccacgccguccccaacggcaccaucgucaagaccaucaccaacgaccagaucgaggucaccaacgccaccgagcucguccagaacuccuccaucggcgagaucugcgacuccccccaccagauccucgacggcgagaacugcacccucaucgacgcccuccucggcgacccccagugcgacggcuuccagaacaagaagugggaccucuucgucgagcgcuccaaggccuacuccaacugcuaccccuacgacguccccgacuacgccucccuccgcucccucgucgccuccuccggcacccucgaguucaacaacgaguccuucaacuggaccggcgucacccagaacggcaccuccuccgccugcauccgccgcuccaacaacuccuucuucucccgccucaacuggcucacccaccucaacuucaaguaccccgcccucaacgucaccaugcccaacaacgagcaguucgacaagcucuacaucuggggcguccaccaccccggcaccgacaaggaccagaucuuccucuacgcccaguccuccggccgcaucaccgucuccaccaagcgcucccagcaggccgucauccccaacaucggcucccgcccccgcauccgcaacauccccucccgcaucuccaucuacuggaccaucgucgagcccggcgacauccuccucaucaacuccaccggcaaccucaucgccccccgcggcuacuucaagauccgcuccggcaaguccuccaucaugcgcuccgacgcccccaucggcaagugcaacuccgagugcaucacccccaacggcuccauccccaacgacaagcccuuccagaacgucaaccgcaucaccuacggcgccugcccccgcuacgucaagcaguccacccucaagcucgccaccggcaugcgcaacguccccgagaagcagacccgcggcaucuucggcgccaucgccggcuucaucgagaacggcugggagggcauggucgacggcugguacggcuuccgccaccagaacuccgagggccgcggccaggccgccgaccucaaguccacccaggccgccaucgaccagaucaacggcaagcucaaccgccucaucggcaagaccaacgagaaguuccaccagaucgagaaggaguucuccgaggucgagggccgcauccaggaccucgagaaguacgucgaggacaccaagaucgaccucugguccuacaacgccgagcuccucgucgcccucgagaaccagcacaccaucgaccucaccgacuccgagaugaacaagcucuucgagaagaccaagaagcagcuccgcgagaacgccgaggacaugggcaacggcugcuucaagaucuaccacaagugcgacaacgccugcaucggcuccauccgcaacggcaccuacgaccacgacgucuaccgcgacgaggcccucaacaaccgcuuccagaucaagggcgucgagcucaaguccggcuacaaggacuggauccucuggaucuccuucgccaucuccugcuuccuccucugcgucgcccuccucggcuucaucaugugggccugccagaagggcaacauccgcugcaacaucugcaucuga

SEQ ID NO: 105566 - RNA, 1701 nt, Artificial Sequence; identical to SEQ ID NO: 105489
  derived and/or modified CDS sequence (opt2) from hemagglutinin__InfluenzaA__AFN19613

SEQ ID NO: 105567 - RNA, 1701 nt, Artificial Sequence; identical to SEQ ID NO: 105467
  derived and/or modified CDS sequence (opt2) from hemagglutinin__InfluenzaA__AFN19617

SEQ ID NO: 105568 - RNA, 1701 nt, Artificial Sequence
  derived and/or modified CDS sequence (opt2) from hemagglutinin__InfluenzaA__AFN19619
augaagaccaucaucgcccucucccacauccucugccucgucuucgcccagaagcuccccggcaacgacaacuccaccgccacccucugccucggccaccacgccguccccaacggcaccaucgucaagaccaucaccaacgaccagaucgaggucaccaacgccaccgagcucguccaguccuccuccaccggcgagaucugcgacuccccccaccagauccucgacggcgagaacugcacccucaucgacgcccuccucggcgacccccagugcgacggcuuccagaacaagaagugggaccucuucgucgagcgcuccaaggccuacuccaacugcuaccccuacgacguccccgacuacgccucccuccgcucccucgucgccuccuccggcacccucgaguucaacaacgaguccuucaacuggaccggcgucacccagaacggcaccuccuccgccugcauccgccgcuccaacuccuccuucuucucccgccucaacuggcucacccaccucaacuucaaguaccccgcccucaacgucaccaugcccaacaacgagcaguucgacaagcucuacaucuggggcguccaccaccccggcaccgacaaggaccagaucuuccucuacgcccaguccuccggccgcaucaccgucuccaccaagcgcucccagcaggccgucauccccaacaucggcuccaagccccgcauccgcaacauccccucccgcaucuccaucuacuggaccaucgucaagcccggcgacauccuccucaucaacuccaccggcaaccucaucgccccccgcggcuacuucaagauccgcuccggcaaguccuccaucaugcgcuccgacgcccccaucggcaagugcaacuccgagugcaucacccccaacggcuccauccccaacgacaagcccuuccagaacgucaaccgcaucaccuacggcgccugcccccgcuacgucaagcaguccacccucaagcucgccaccggcaugcgcaacguccccgagaagcagacccgcggcaucuucggcgccaucgccggcuucaucgagaacggcugggagggcauggucgacggcugguacggcuuccgccaccagaacuccgagggccgcggccaggccgccgaccucaaguccacccaggccgccaucgaccagaucaacggcaagcucaaccgccucaucggcaagaccaacgagaaguuccaccagaucgagaaggaguucuccgaggucgagggccgcauccaggaccucgagaaguacgucgaggacaccaagaucgaccucugguccuacaacgccgagcuccucgucgcccucgagaaccagcacaccaucgaccucaccgacuccgagaugaacaagcucuucgagaagaccaagaagcagcuccgcgagaacgccgaggacaugggcaacggcugcuucaagaucuaccacaagugcgacaacgccugcaucggcuccauccgcaacggcaccuacaaccacgacgucuaccgcgacgaggcccucaacaaccgcuuccagaucaagggcgucgagcucaaguccggcuacaaggacuggauccucuggaucuccuucgccaucuccugcuuccuccucugcgucguccuccucggcuucaucaugugggccugccagaagggcaacauccgcugcaacaucugcaucuga

SEQ ID NO: 105569 - RNA, 1701 nt, Artificial Sequence; identical to SEQ ID NO: 105529
  derived and/or modified CDS sequence (opt2) from hemagglutinin__InfluenzaA__AFN19623

SEQ ID NO: 105570 - RNA, 1701 nt, Artificial Sequence; identical to SEQ ID NO: 105466
  derived and/or modified CDS sequence (opt2) from hemagglutinin__InfluenzaA__AFN19629

SEQ ID NO: 105571 - RNA, 1701 nt, Artificial Sequence
  derived and/or modified CDS sequence (opt2) from hemagglutinin__InfluenzaA__AFN19631
augaagaccaucaucgcccucuccuacauccucugccucgucuucgcccagaagcuccccgagaacgacuacuccaccgccacccucugccucggccaccacgccguccccaacggcaccaucgucaagaccaucaccaacgaccagaucgaggucaccaacgccaccgagcucguccaguccuccuccaccggcgagaucugcgacuccccccaccagauccucgacggcaucaacugcacccucaucgacgcccuccucggcgacccccagugcgacggcuuccagaacaagaagugggaccucuucgucgagcgcuccaaggccuacuccaacugcuaccccuacgacguccccgacuacgccucccuccgcucccucgucgccuccuccggcacccucgaguucaacaacgaguccuucaacuggaccggcgucacccagaacggcaccuccuccgccugcauccgccgcuccaccuccuccuucuucucccgccucaacuggcucacccaccucaacuucaaguaccccgcccucaacgucaccaugcccaacaacgagcaguucgacaagcucuacaucuggggcguccaccaccccggcaccgacaaggaccagaucuuccucuacgcccagcccuccggccgcaucaccgucuccaccaagcgcucccagcaggccgucauccccaacaucggcucccgcccccgcauccgcaacauccccucccgcaucuccaucuacuggaccaucgucaagcccggcgacauccuccucaucaacuccaccggcaaccucaucgccccccgcggcuacuucaagauccgcuccggcaaguccuccaucaugcgcuccgacgcccccaucggcaagugcaacuccgagugcaucacccccaacggcuccauccccaacgacaagcccuuccagaacgucaaccgcaucaccuacggcgccugcccccgcuacgucaagcaguccacccucaagcucgccaccggcaugcgcaacguccccgagaagcagacccgcggcaucuucggcgccaucgccggcuucaucgagaacggcugggagggcauggucgacggcugguacggcuuccgccaccagaacuccgagggccgcggccaggccgccgaccucaaguccacccaggccgccaucgaccagaucaacggcaagcucaaccgccucaucggcaagaccaacgagaaguuccaccagaucgagaaggaguucuccgaggucgagggccgcauccaggaccucgagaaguacgucgaggacaccaagaucgaccucugguccuacaacgccgagcuccucgucgcccucgagaaccagcacaccaucgaccucaccgacuccgagaugaacaagcucuucgagaagaccaagaagcagcuccgcgagaacgccgaggacaugggcaacggcugcuucaagaucuaccacaagugcgacaacgccugcaucggcuccauccgcaacggcaccuacaaccacgacgucuaccgcgacgaggcccucaacaaccgcuuccagaucaagggcgucgagcucaaguccggcuacaaggacuggauccucuggaucuccuucgccaucuccugcuuccuccucugcgucgcccuccucggcuucaucaugugggccugccagaagggcaacauccgcugcaacaucugcaucuga

SEQ ID NO: 105572 - RNA, 1701 nt, Artificial Sequence
  derived and/or modified CDS sequence (opt2) from hemagglutinin__InfluenzaA__AFN19633
augaagaccaucaucgcccucuccuacauccucugccucgucuucgcccagaagcuccccggcaacgacaacuccaccgccacccucugccucggccaccacgccguccccaacggcaccaucgucaagaccaucaccaacgaccagaucgaggucaccaacgccaccgagcucguccaguccuccuccaccggcgagaucugcgacuccccccaccagauccucgacggcgagaacugcacccucaucgacgcccuccucggcgacccccagugcgacggcuuccagaacaagaagugggaccucuucgucgagcgcuccaaggccuacuccaacugcuaccccuacgacguccccgacuacgccucccuccgcucccucgucgccuccuccggcacccucgaguucaacaacgaguccuucaacuggaccggcgucacccagaacggcaccuccuccgccugcauccgccgcuccaacuccuccuucuucucccgccucaacuggcucacccaccucaacuucaaguaccccgcccucaacgucaccaugcccaacaacgagcaguucgacaagcucuacaucuggggcguccaccaccccggcaccgacaaggaccagaucuuccucuacgcccaguccuccggccgcaucaccaucuccaccaagcgcucccagcaggccgucauccccaacaucggcucccgcccccgcauccgcaacauccccucccgcaucuccaucuacuggaccaucgucaagcccggcgacauccuccucaucaacuccaccggcaaccucaucgccccccgcggcuacuucaagauccgcuccggcaaguccuccaucaugcgcuccgacgcccccaucggcaagugcaacuccgagugcaucacccccaacggcuccauccccaacgacaagcccuuccagaacgucaaccgcaucaccuacggcgccugcccccgcuacgucaagcaguccacccucaagcucgccaccggcaugcgcaacguccccgagaagcagacccgcggcaucuucggcgccaucgccggcuucaucgagaacggcugggagggcauggucgacggcugguacggcuuccgccaccagaacuccgagggccgcggccaggccgccgaccucaaguccacccaggccgccaucgaccagaucaacggcaagcucaaccgccucaucggcaagaccaacgagaaguuccaccagaucgagaaggaguucuccgaggucgagggccgcauccaggaccucgagaaguacgucgaggacaccaagaucgaccucugguccuacaacgccgagcuccucgucgcccucgagaaccagcacaccaucgaccucaccgacuccgagaugaacaagcucuucgagaagaccaagaagcagcuccgcgagaacgccgaggacaugggcaacggcugcuucaagaucuaccacaagugcgacaacgccugcaucggcuccauccgcaacggcaccuacaaccacgacgucuaccgcgacgaggcccucaacaaccgcuuccagaucaagggcgucgagcucaaguccggcuacaaggacuggauccucuggaucuccuucgccaucuccugcuuccuccucugcgucgcccuccucggcuucaucaugugggccugccagaagggcaacauccgcugcaacaucugcaucuga

SEQ ID NO: 105573 - RNA, 1701 nt, Artificial Sequence
  derived and/or modified CDS sequence (opt2) from hemagglutinin__InfluenzaA__AFN19635
augaagaccaucaucgcccucuccuacauccucugccucgucuucgcccagaagcuccccgagaacgacaacuccaccgccacccucugccucggccaccacgccguccccaacggcaccaucgucaagaccaucaccaacgaccagaucgaggucaccaacgccaccgagcucguccaguccuccuccaccggcgagaucugcgacuccccccaccagauccucgacggcaucaacugcacccucaucgacgcccuccucggcgacccccagugcgacggcuuccagaacaagaagugggaccucuucgucgagcgcuccaaggccuacuccaacugcuaccccuacgacguccccgacuacgccucccuccgcucccucgucgccuccuccggcacccucgaguucaacaacgaguccuucaacuggaccggcgucacccagaacggcaccuccuccgccugcauccgccgcuccaacuccuccuucuucucccgccucaacuggcucacccaccucaacuucaaguaccccgcccucaacgucaccaugcccaacaacgagcaguucgacaagcucuacaucuggggcguccaccaccccggcaccgacaaggaccagaucuuccucuacgcccagcccuccggccgcaucaccgucuccaccaagcgcucccagcaggccgucauccccaacaucggcucccgcccccgcauccgcaacauccccucccgcaucuccaucuacuggaccaucgucaagcccggcgacauccuccucaucaacuccaccggcaaccucaucgccccccgcggcuacuucaagauccgcuccggcaaguccuccaucaugcgcuccgacgcccccaucggcaagugcaacuccgagugcaucacccccaacggcuccauccccaacgacaagcccuuccagaacgucaaccgcaucaccuacggcgccugcccccgcuacgucaagcaguccacccucaagcucgccaccggcaugcgcaacguccccgagaagcagacccgcggcaucuucggcgccaucgccggcuucaucgagaacggcugggagggcauggucgacggcugguacggcuuccgccaccagaacuccgagggccgcggccaggccgccgaccucaaguccacccaggccgccaucgaccagaucaacggcaagcucaaccgccucaucggcaagaccaacgagaaguuccaccagaucgagaaggaguucuccgaggucgagggccgcauccaggaccucgagaaguacgucgaggacaccaagaucgaccucugguccuacaacgccgagcuccucgucgcccucgagaaccagcacaccaucgaccucaccgacuccgagaugaacaagcucuucgagaagaccaagaagcagcuccgcgagaacgccgaggacaugggcaacggcugcuucaagaucuaccacaagugcgacaacgccugcaucggcuccauccgcaacggcaccuacaaccacgacgucuaccgcgacgaggcccucaacaaccgcuuccagaucaagggcgucgagcucaaguccggcuacaaggacuggauccucuggaucuccuucgccaucuccugcuuccuccucugcgucgcccuccucggcuucaucaugugggccugccagaagggcaacauccgcugcaacaucugcaucuga

SEQ ID NO: 105574 - RNA, 1701 nt, Artificial Sequence; identical to SEQ ID NO: 105573
  derived and/or modified CDS sequence (opt2) from hemagglutinin__InfluenzaA__AFN19637

SEQ ID NO: 105575 - RNA, 1701 nt, Artificial Sequence; identical to SEQ ID NO: 105110
  derived and/or modified CDS sequence (opt2) from hemagglutinin__InfluenzaA__AFN19639

SEQ ID NO: 105576 - RNA, 1701 nt, Artificial Sequence; identical to SEQ ID NO: 105529
  derived and/or modified CDS sequence (opt2) from hemagglutinin__InfluenzaA__AFN19641

SEQ ID NO: 105577 - RNA, 1701 nt, Artificial Sequence; identical to SEQ ID NO: 105573
  derived and/or modified CDS sequence (opt2) from hemagglutinin__InfluenzaA__AFN19643

SEQ ID NO: 105578 - RNA, 1701 nt, Artificial Sequence; identical to SEQ ID NO: 105110
  derived and/or modified CDS sequence (opt2) from hemagglutinin__InfluenzaA__AFN19645

SEQ ID NO: 105579 - RNA, 1701 nt, Artificial Sequence
  derived and/or modified CDS sequence (opt2) from hemagglutinin__InfluenzaA__AFN19647
augaagaccaucaucgcccucuccuacauccucugccucgucuucgcccagaagcuccccgagaacgacaacuccaccgccacccucugccucggccaccacgccguccccaacggcaccaucgucaagaccaucaccaacgaccagaucgaggucaccaacgccaccgagcucguccaguccuccuccaccggcgagaucugcgacuccccccaccagauccucgacggcgucaacugcacccucaucgacgcccuccucggcgacccccagugcgacggcuuccagaacaagaagugggaccucuucgucgagcgcuccaaggccuacuccaacugcuaccccuacgacguccccgacuacgccucccucaagucccucgucgccuccuccggcacccucgaguucaacaacgaguccuucaacuggaccggcgucacccagaacggcaccuccuccgccugcauccgccgcuccaacuccuccuucuucucccgccucaacuggcucacccaccucaacuucaaguaccccgcccucaacgucaccaugcccaacaacgagcaguucgacaagcucuacaucuggggcguccaccaccccggcaccgacaaggaccagaucuuccucuacgcccaguccuccggccgcaucaccgucuccaccaagcgcucccagcaggccgucauccccaacaucggcucccgcccccgcauccgcaacauccccucccgcaucuccaucuacuggaccaucgucaagcccggcgacauccuccucaucaacuccaccggcaaccucaucgccccccgcggcuacuucaagauccaguccggcaaguccuccaucaugcgcuccgacgcccccaucggcaagugcaacuccgagugcaucacccccaacggcuccauccccaacgacaagcccuuccagaacgucaaccgcaucaccuacggcgccugcccccgcuacgucaagcaguccacccucaagcucgccaccggcaugcgcaacguccccgagaagcagacccgcggcaucuucggcgccaucgccggcuucaucgagaacggcugggagggcauggucgacggcugguacggcuuccgccaccagaacuccgagggccgcggccaggccgccgaccucaaguccacccaggccgccaucgaccagaucaacggcaagcucaaccgccucaucggcaagaccaacgagaaguuccaccagaucgagaaggaguucuccgaggucgagggccgcauccaggaccucgagaaguacgucgaggacaccaagaucgaccucugguccuacaacgccgagcuccucgucgcccucgagaaccagcacaccaucgaccucaccgacuccgagaugaacaagcucuucgagaagaccaagaagcagcuccgcgagaacgccgaggacaugggcaacggcugcuucaagaucuaccacaagugcgacaacgccugcaucggcuccauccgcaacggcaccuacaaccacgacgucuaccgcgacgaggcccucaacaaccgcuuccagaucaagggcgucgagcucaaguccggcuacaaggacuggauccucuggaucuccuucgccaucuccugcuuccuccucugcgucgcccuccucggcuucaucaugugggccugccagaagggcaacauccgcugcaacaucugcaucuga

SEQ ID NO: 105580 - RNA, 1701 nt, Artificial Sequence
  derived and/or modified CDS sequence (opt2) from hemagglutinin__InfluenzaA__AFN19649
augaagaccaucaucgcccucuccuacauccucugccucgucuucgcccagaagcuccccggcaacgacaacuccaccgccacccucugccucggccaccacgccguccccaacggcaccaucgucaagaccaucaccaacgaccagaucgaggucaccaacgccaccgagcucguccagaacuccuccaucuccgagaucugcgacuccccccaccagauccucgacggcgagaacugcacccucaucgacgcccuccucggcgacccccagugcgacggcuuccagaacaagaagugggaccucuucgucgagcgcuccaaggccuacuccaacugcuaccccuacgacguccccgacuacgccucccuccgcucccucgucgccuccuccggcacccucgaguucaacaacgaguccuucaacuggaccggcgucacccagaacggcaccuccuccgccugcauccgccgcuccaacuccuccuucuucucccgccucaacuggcucacccaccucaacuucaaguaccccgcccucaacgucaccaugcccaacaacgagcaguucgacaagcucuacaucuggggcguccaccaccccggcaccgacaaggaccagaucuuccucuacgcccaguccuccggccgcaucaccgucuccaccaagcgcucccagcaggccgucauccccaacaucggcucccgcccccgcauccgcaacauccccucccgcaucuccaucuacuggaccaucgucaagcccggcgacauccuccucaucaacuccaccggcaaccucaucgccccccgcggcuacuucaagauccgcuccggcaaguccuccaucaugcgcuccgacgcccccaucggcaagugcaacuccgagugcaucacccccaacggcuccauccccaacgacaagcccuuccagaacgucaaccgcaucaccuacggcgccugcccccgcuacgucaagcaguccacccucaagcucgccaccggcaugcgcaacguccccgagaagcagacccgcggcaucuucggcgccaucgccggcuucaucgagaacggcugggagggcaugauggacggcugguacggcuuccgccaccagaacuccgagggccgcggccaggccgccgaccucaaguccacccaggccgccaucgaccagaucaacggcaagcucaaccgccucaucggcaagaccaacgagaaguuccaccagaucgagaaggaguucuccgaggucgagggccgcauccaggaccucgagaaguacgucgaggacaccaagaucgaccucugguccuacaacgccgagcuccucgucgcccucgagaaccagcacaccaucgaccucaccgacuccgagaugaacaagcucuucgagaagaccaagaagcagcuccgcgagaacgccgaggacaugggcaacggcugcuucaagaucuaccacaagugcgacaacgccugcaucggcuccauccgcaacggcaccuacgaccacgacgucuaccgcgacgaggcccucaacaaccgcuuccagaucaagggcgucgagcucaaguccggcuacaaggacuggauccucuggaucuccuucgccaucuccugcuuccuccucugcgucgcccuccucggcuucaucaugugggccugccagaagggcaacauccgcugcaacaucugcaucuga

SEQ ID NO: 105581 - RNA, 1701 nt, Artificial Sequence; identical to SEQ ID NO: 105573
  derived and/or modified CDS sequence (opt2) from hemagglutinin__InfluenzaA__AFN19653

SEQ ID NO: 105582 - RNA, 1701 nt, Artificial Sequence; identical to SEQ ID NO: 105489
  derived and/or modified CDS sequence (opt2) from hemagglutinin__InfluenzaA__AFN19663

SEQ ID NO: 105583 - RNA, 1701 nt, Artificial Sequence; identical to SEQ ID NO: 105497
  derived and/or modified CDS sequence (opt2) from hemagglutinin__InfluenzaA__AFN19665

SEQ ID NO: 105584 - RNA, 1701 nt, Artificial Sequence
  derived and/or modified CDS sequence (opt2) from hemagglutinin__InfluenzaA__AFN19667
augaagaccaucaucgcccucuccuacauccucugccucgucuucgcccagaagcuccccggcaacgacaacuccaccgccacccucugccucggccaccacgccguccccaacggcaccaucgucaagaccaucaccaacgaccagaucgaggucaccaacgccaccgagcucguccagaacuccuccaucggcgagaucugcgacuccccccaccagauccucgacggcgagaacugcacccucaucgacgcccuccucggcgacccccagugcgacggcuuccagaacaagaagugggaccucuucgucgagcgcuccaaggccuacuccaacugcuaccccuacgacguccccgacuacgccucccuccgcucccucgucgccuccuccggcacccucgaguucaacaacgaguccuucaacuggaccggcgucacccagaacggcaccuccuccgccugcaugcgccgcuccaacuccuccuucuucucccgccucaacuggcucacccaccucaacuucaaguaccccgcccucaacgucaccaugcccaacaacgagcaguucgacaagcucuacaucuggggcguccaccaccccggcaccgacaaggaccagaucuuccucuacgcccaguccuccggccgcaucaccgucuccaccaagcgcucccagcaggccgucauccccaacaucggcucccgcccccgcauccgcaacauccccucccgcaucuccaucuacuggaccaucgucaagcccggcgacauccuccucaucaacuccaccggcaaccucaucgccccccgcggcuacuucaagauccgcuccggcaaguccuccaucaugcgcuccgacgcccccaucggcaagugcaacuccgagugcaucacccccaacggcuccauccccaacgacaagcccuuccagaacgucaaccgcaucaccuacggcgccugcccccgcuacgucaagcaguccacccucaagcucgccaccggcaugcgcaacguccccgagaagcagacccgcggcaucuucggcgccaucgccggcuucaucgagaacggcugggagggcauggucgacggcugguacggcuuccgccaccagaacuccgagggccgcggccaggccgccgaccucaaguccacccaggccgccaucgaccagaucaacggcaagcucaaccgccucaucggcaagaccaacgagaaguuccaccagaucgagaaggaguucuccgaggucgagggccgcauccaggaccucgagaaguacgucgaggacaccaagaucgaccucugguccuacaacgccgagcuccucgucgcccucgagaaccagcacaccaucgaccucaccgacuccgagaugaacaagcucuucgagaagaccaagaagcagcuccgcgagaacgccgaggacaugggcaacggcugcuucaagaucuaccacaagugcgacaacgccugcaucggcuccauccgcaacggcaccuacgaccacgacgucuaccgcgacgaggcccucaacaaccgcuuccagaucaagggcgucgagcucaaguccggcuacaaggacuggauccucuggaucuccuucgccaucuccugcuuccuccucugcgucgcccuccucggcuucaucaugugggccugccagaagggcaacauccgcugcaacaucugcaucuga

SEQ ID NO: 105585 - RNA, 1701 nt, Artificial Sequence
  derived and/or modified CDS sequence (opt2) from hemagglutinin__InfluenzaA__AFN19669
augaagaccaucaucgcccucuccuacauccucugcauggucuucgcccagaagcuccccggcaacgacaacuccaccgccacccucugccucggccaccacgccguccccaacggcaccaucgucaagaccaucaccaacgaccagaucgaggucaccaacgccaccgagcucguccagaacuccuccaucggcgagaucugcgacuccccccaccagauccucgacggcgagaacugcacccucaucgacgcccuccucggcgacccccagugcgacggcuuccagaacaagaagugggaccucuucgucgagcgcuccaaggccuacuccaacugcuaccccuacgacguccccaacuacgccucccuccgcucccucgucgccuccuccggcacccucgaguucaacaacgaguccuucaacuggaccggcgucacccagaacggcaccuccuccgccugcaugcgccgcuccaacuccuccuucuucucccgccucaacuggcucacccaccucaacuucaaguaccccgcccucaacgucaccaugcccaacaacgagcaguucgacaagcucuacaucuggggcguccaccaccccggcaccgacaaggaccagaucuuccucuacgcccaguccuccggccgcaucaccgucuccaccaagcgcucccagcaggccgucauccccaacaucggcucccgcccccgcauccgcaacauccccucccgcaucuccaucuacuggaccaucgucaagcccggcgacauccuccucaucaacuccaccggcaaccucaucgccccccgcggcuacuucaagauccgcuccggcaaguccuccaucaugcgcuccgacgcccccaucggcaagugcaacuccgagugcaucacccccaacggcuccauccccaacgacaagcccuuccagaacgucaaccgcaucaccuacggcgccugcccccgcuacgucaagcaguccacccucaagcucgccaccggcaugcgcaacguccccgagaagcagacccgcggcaucuucggcgccaucgccggcuucaucgagaacggcugggagggcauggucgacggcugguacggcuuccgccaccagaacuccgagggccgcggccaggccgccgaccucaaguccacccaggccgccaucgaccagaucaacggcaagcucaaccgccucaucggcaagaccaacgagaaguuccaccagaucgagaaggaguucuccgaggucgagggccgcauccaggaccucgagaaguacgucgaggacaccaagaucgaccucugguccuacaacgccgagcuccucgucgcccucgagaaccagcacaccaucgaccucaccgacuccgagaugaacaagcucuucgagaagaccaagaagcagcuccgcgagaacgccgaggacaugggcaacggcugcuucaagaucuaccacaagugcgacaacgccugcaucggcuccauccgcaacggcaccuacgaccacgacgucuaccgcgacgaggcccucaacaaccgcuuccagaucaagggcgucgagcucaaguccggcuacaaggacuggauccucuggaucuccuucgccaucuccugcuuccuccucugcgucgcccuccucggcuucaucaugugggccugccagaagggcaacauccgcugcaacaucugcaucuga

SEQ ID NO: 105586 - RNA, 1701 nt, Artificial Sequence
  derived and/or modified CDS sequence (opt2) from hemagglutinin__InfluenzaA__AFN19671
augaagaccaucaucgcccucuccuacauccucugccucgucuucgcccagaagcuccccggcaacgacaacuccaccgccacccucugccucggccaccacgccguccccaacggcaccaucgucaagaccaucaccaacgaccgcaucgaggucaccaacgccaccgagcucguccagaacuccuccaucggcgagaucugcgacuccccccaccagauccucgacggcgagaacugcacccucaucgacgcccuccucggcgacccccagugcgacggcuuccagaacaagaagugggaccucuucgucgagcgcuccaaggccuacuccaacugcuaccccuacgacguccccgacuacgccucccuccgcucccucgucgccuccuccggcacccucgaguucaacaacgaguccuucaacuggaccggcgucacccagaacggcaccuccuccgccugcauccgccgcuccaacaacuccuucuucucccgccucaacuggcucacccaccucaacuucaaguaccccgcccucaacgucaccaugcccaacaacgagcaguucgacaagcucuacaucuggggcguccaccaccccggcaccgacaaggaccagaucuuccucuacgcccaguccuccggccgcaucaccgucuccaccaagcgcucccagcaggccgucauccccaacaucggcucccgcccccgcauccgcaacauccccucccgcaucuccaucuacuggaccaucgucaagcccggcgacauccuccucaucaacuccaccggcaaccucaucgccccccgcggcuacuucaagauccgcuccggcaaguccuccaucaugcgcuccgacgcccccaucggcaagugcaaguccgagugcaucacccccaacggcuccauccccaacgacaagcccuuccagaacgucaaccgcaucaccuacggcgccugcccccgcuacgucaagcaguccacccucaagcucgccaccggcaugcgcaacguccccgagaagcagacccgcggcaucuucggcgccaucgccggcuucaucgagaacggcugggagggcauggucgacggcugguacggcuuccgccaccagaacuccgagggccgcggccaggccgccgaccucaaguccacccaggccgccaucgaccagaucaacggcaagcucaaccgccucaucggcaagaccaacgagaaguuccaccagaucgagaaggaguucuccgaggucgagggccgcauccaggaccucgagaaguacgucgaggacaccaagaucgaccucugguccuacaacgccgagcuccucgucgcccucgagaaccagcacaccaucgaccucaccgacuccgagaugaacaagcucuucgagaagaccaagaagcagcuccgcgagaacgccgaggacaugggcaacggcugcuucaagaucuaccacaagugcgacaacgccugcaucgaguccauccgcaacggcaccuacgaccacgacgucuaccgcgacgaggcccucaacaaccgcuuccagaucaagggcgucgagcucaaguccggcuacaaggacuggauccucuggaucuccuucgccaucuccugcuuccuccucugcgucgcccuccucggcuucaucaugugggccugccagaagggcaacauccgcugcaacaucugcaucuga

SEQ ID NO: 105587 - RNA, 1701 nt, Artificial Sequence; identical to SEQ ID NO: 105110
  derived and/or modified CDS sequence (opt2) from hemagglutinin__InfluenzaA__AFN19674

SEQ ID NO: 105588 - RNA, 1701 nt, Artificial Sequence; identical to SEQ ID NO: 105110
  derived and/or modified CDS sequence (opt2) from hemagglutinin__InfluenzaA__AFN19676

SEQ ID NO: 105589 - RNA, 1701 nt, Artificial Sequence; identical to SEQ ID NO: 105497
  derived and/or modified CDS sequence (opt2) from hemagglutinin__InfluenzaA__AFN19678

SEQ ID NO: 105590 - RNA, 1701 nt, Artificial Sequence
  derived and/or modified CDS sequence (opt2) from hemagglutinin__InfluenzaA__AFN19682
augaagaccaucaucgcccucuccuacauccucugccucgucuucgcccagaagcuccccggcaacgacaacuccaccgccacccucugccucggccaccacgccguccccaacggcaccaucgucaagaccaucaccaacgaccagaucgaggucaccaacgccaccgagcucguccagaacuccuccaucggcgagaucugcgacuccccccaccagauccucgacggcgagaacugcacccucaucgacgcccuccucggcgacccccagugcgacggcuuccagaacaagaagugggaccucuucgucgagcgcuccaaggccuacuccaacugcuaccccuacgacguccccaacuacgccucccuccgcucccucgucgccuccuccggcacccucgaguucaacaacgaguccuucaacuggaccggcgucacccagaacggcaccuccuccgccugcaugcgccgcuccaacuccuccuucuucucccgccucaacuggcucacccaccucaacuucaaguaccccgcccucaacgucaccaugcccaacaacgagcaguucgacaagcucuacaucuggggcguccaccaccccggcaccgacaaggaccagaucuuccucuacgcccaguccuccggccgcaucaccgucuccaccaagcgcucccagcaggccgucauccccaacaucggcucccgcccccgcauccgcaacauccccucccgcaucuccaucuacuggaccaucgucaagcccggcgacauccuccucaucaacuccaccggcaaccucaucgccccccgcggcuacuucaagauccgcuccggcaaguccuccaucaugcgcuccgacgcccccaucggcaagugcaacuccgagugcaucacccccaacggcuccauccccaacgacaagcccuuccagaacgucaaccgcaucaccuacggcgccugcccccgcuacgucaagcaguccacccucaagcucgccaccggcaugcgcaacguccccgagaagcagacccgcggcaucuucggcgccaucgccggcuucaucgagaacggcugggagggcauggucgacggcugguacggcuuccgccaccagaacuccgagggccgcggccaggccgccgaccucaaguccacccaggccgccaucgaccagaucaacggcaagcucaaccgccucaucggcaagaccaacgagaaguuccaccagaucgagaaggaguucuccgaggucgagggccgcauccaggaccucgagaaguacgucgaggacaccaagaucgaccucugguccuacaacgccgagcuccucgucgcccucgagaaccagcacaccaucgaccucaccgacuccgagaugaacaagcucuucgagaagaccaagaagcagcuccgcgagaacgccgaggacaugggcaacggcugcuucaagaucuaccacaagugcgacaacgccugcaucggcuccauccgcaacggcaccuacgaccacgacgucuaccgcgacgaggcccucaacaaccgcuuccagaucaagggcgucgagcucaaguccggcuacaaggacuggauccucuggaucuccuucgccaucuccugcuuccuccucugcgucgcccuccucggcuucaucaugugggccugccagaagggcaacaucaagugcaacaucugcaucuga

SEQ ID NO: 105591 - RNA, 1701 nt, Artificial Sequence
  derived and/or modified CDS sequence (opt2) from hemagglutinin__InfluenzaA__AFN19684
augaagaccaucaucgcccucuccuacauccucugccucgccuucgcccagaagcuccccggcaacgacaacuccaccgccacccucugccucggccaccacgccguccccaacggcaccaucgucaagaccaucaccaacgaccagaucgaggucaccaacgccaccgagcucguccaguccuccuccaccggcgagaucugcgacuccccccaccagauccucgacggcgagaacugcacccucaucgacgcccuccucggcgacccccagugcgacggcuuccagaacaagaagugggaccucuucgucgagcgcuccaaggccuacuccaacugcuaccccuacgacguccccgacuacgccucccuccgcucccucgucgccuccuccggcacccucgaguucaacaacgaguccuucaacuggaccggcgucacccagaacggcaccuccuccgccugcauccgcggcuccaacuccuccuucuucucccgccucaacuggcucacccaccucaacuucaaguaccccgcccucaacgucaccaugcccaacaacgagcaguucgacaagcucuacaucuggggcguccaccaccccggcaccgacaaggaccagaucuuccucuacgcccaguccuccggccgcaucaccgucuccaccaagcgcucccagcaggccgucauccccaacaucggcucccgcccccgcauccgcaacauccccucccgcaucuccaucuacuggaccaucgucaagcccggcgacauccuccucaucaacuccaccggcaaccucaucgccccccgcggcuacuucaagauccgcuccggcaaguccuccaucaugcgcuccgacgcccccaucggcaagugcaacuccgagugcaucacccccaacggcuccauccccaacgacaagcccuuccagaacgucaaccgcaucaccuacggcgccugcccccgcuacgucaagcaguccacccucaagcucgccaccggcaugcgcaacguccccgagaagcagacccgcggcaucuucggcgccaucgccggcuucaucgagaacggcugggagggcauggucgacggcugguacggcuuccgccaccagaacuccgagggccgcggccaggccgccgaccucaaguccacccaggccgccaucgaccagaucaacggcaagcucaaccgccucaucggcaagaccaacgagaaguuccaccagaucgagaaggaguucuccgaggucgagggccgcauccaggaccucgagaaguacgucgaggacaccaagaucgaccucugguccuacaacgccgagcuccucgucgcccucgagaaccagcacaccaucgaccucaccgacuccgagaugaacaagcucuucgagaagaccaagaagcagcuccgcgagaacgccgaggacaugggcaacggcugcuucaagaucuaccacaagugcgacaacgccugcaucggcuccauccgcaacggcaccuacaaccacaacgucuaccgcgacgaggcccucaacaaccgcuuccagaucaagggcgucgagcucaaguccggcuacaaggacuggauccucuggaucuccuucgccaucuccugcuuccuccucugcgucgcccuccucggcuucaucaugugggccugccagaagggcaacauccgcugcaacaucugcaucuga

SEQ ID NO: 105592 - RNA, 1701 nt, Artificial Sequence
  derived and/or modified CDS sequence (opt2) from hemagglutinin__InfluenzaA__AFN19686
augaagaccaucaucgcccucuccuacauccucugccucgccuucgcccagaagcuccccggcaacgacaacuccaccgccacccucugccucggccaccacgccguccccaacggcaccaucgucaagaccaucaccaacgaccagaucgaggucaccaacgccaccgagcucguccaguccuccuccaccggcgagaucugcgacuccccccaccagauccucgacggcgagaacugcacccucaucgacgcccuccucggcgacccccagugcgacggcuuccagaacaagaagugggaccucuucgucgagcgcuccaaggccuacuccaacugcuaccccuacgacguccccgacuacgccucccuccgcucccucgucgccuccuccggcacccucgaguucaacaacgaguccuucaacuggaccggcgucacccagaacggcaccuccuccgccugcauccgccgcuccaacuccuccuucuucucccgccucaacuggcucacccaccucaacuucaaguaccccgcccucaacgucaccaugcccaacaacgagcaguucgacaagcucuacaucuggggcguccaccaccccggcaccgacaaggaccagaucuuccucuacgcccaguccuccggccgcaucaccgucuccaccaagcgcucccagcaggccgucauccccaacaucggcucccgcccccgcauccgcaacauccccucccgcaucuccaucuacuggaccaucgucaagcccggcgacauccuccucaucaacuccaccggcaaccucaucgccccccgcggcuacuucaagauccgcuccggcaaguccuccaucaugcgcuccgacgcccccaucggcaagugcaacuccgagugcaucacccccaacggcuccauccccaacgacaagcccuuccagaacgucaaccgcaucaccuacggcgccugcccccgcuacgucaagcaguccacccucaagcucgccaccggcaugcgcaacauccccgagaagcagacccgcggcaucuucggcgccaucgccggcuucaucgagaacggcugggagggcauggucgacggcugguacggcuuccgccaccagaacuccgagggccgcggccaggccgccgaccucaaguccacccaggccgccaucgaccagaucaacggcaagcucaaccgccucaucggcaagaccaacgagaaguuccaccagaucgagaaggaguucuccgaggucgagggccgcauccaggaccucgagaaguacgucgaggacaccaagaucgaccucugguccuacaacgccgagcuccucgucgcccucgagaaccagcacaccaucgaccucaccgacuccgagaugaacaagcucuucgagaagaccaagaagcagcuccgcgagaacgccgaggacaugggcaacggcugcuucaagaucuaccacaagugcgacaacgccugcaucggcuccauccgcaacggcaccuacaaccacaacgucuaccgcgacgaggcccucaacaaccgcuuccagaucaagggcgucgagcucaaguccggcuacaaggacuggauccucuggaucuccuucgccaucuccugcuuccuccucugcgucgcccuccucggcuucaucaugugggccugccagaagggcaacauccgcugcaacaucugcaucuga

SEQ ID NO: 105593 - RNA, 1701 nt, Artificial Sequence
  derived and/or modified CDS sequence (opt2) from hemagglutinin__InfluenzaA__AFN19688
augaagaccaucaucgcccucuccuacauccucugccucgucuucgcccaggagcuccccggcaacgacaacuccaccgccacccucugccucggccaccacgccguccccaacggcaccaucgucaagaccaucaccaacgaccagaucgaggucaccaacgccaccgagcucguccaguccuccuccaccggcgagaucugcgacuccccccaccagauccucgacggcgagaacugcacccucaucgacgcccuccucggcgacccccagugcgacggcuuccagaacaagaagugggaccucuucgucgagcgcuccaaggccuacuccaacugcuaccccuacgacguccccgacuacgccucccuccgcucccucgucgccuccuccggcacccucgaguucaacaacgaguccuucaacuggaccggcgucacccagaacggcaccuccuccgccugcauccgccgcuccaacuccuccuucuucucccgccucaacuggcucacccaccucaacuucaaguaccccgcccucaacgucaccaugcccaacaacgagcaguucgacaagcucuacaucuggggcguccaccaccccggcaccgacaaggaccagaucuuccucuacgcccaguccuccggccgcaucaccgucuccaccaagcgcucccagcaggccgucauccccaacaucggcucccgcccccgcauccgcaacauccccucccgcaucuccaucuacuggaccaucgucaagcccggcgacauccuccucaucaacuccaccggcaaccucaucgccccccgcggcuacuucaagauccgcuccggcaaguccuccaucaugcgcuccgacgcccccaucggcaagugcaacuccgagugcaucacccccaacggcuccauccccaacgacaagcccuuccagaacgucaaccgcaucaccuacggcgccugcccccgcuacgucaagcaguccacccucaagcucgccaccggcaugcgcaacguccccgagaagcagacccgcggcaucuucggcgccaucgccggcuucaucgagaacggcugggagggcauggucgacggcugguacggcuuccgccaccagaacuccgagggccgcggccaggccgccgaccucaaguccacccaggccgccaucgaccagaucaacggcaagcucaaccgccucaucggcaagaccaacgagaaguuccaccagaucgagaaggaguucuccgaggucgagggccgcauccaggaccucgagaaguacgucgaggacaccaagaucgaccucugguccuacaacgccgagcuccucgucgcccucgagaaccagcacaccaucgaccucaccgacuccgagaugaacaagcucuucgagaagaccaagaagcagcuccgcgagaacgccgaggacaugggcaacggcugcuucaagaucuaccacaagugcgacaacgccugcaucggcuccauccgcaacggcaccuacaaccacgacgucuaccgcgacgaggcccucaacaaccgcuuccagaucaagggcgucgagcucaaguccggcuacaaggacuggauccucuggaucuccuucgccaucuccugcuuccuccucugcgucgcccuccucggcuucaucaugugggccugccagaagggcaacauccgcugcaacaucugcaucuga

SEQ ID NO: 105594 - RNA, 1701 nt, Artificial Sequence
  derived and/or modified CDS sequence (opt2) from hemagglutinin__InfluenzaA__AFN19690
augaagaccaccaucgcccucuccuacauccucugccucgucuucgcccagaagcuccccggcaacgacaacuccaccgccacccucugccucggccaccacgccguccccaacggcaccaucgucaagaccaucaccaacgaccgcaucgaggucaccaacgccaccgagcucguccagaacuccuccaucggcgagaucugcgacuccccccaccagauccucgacggcgagaacugcacccucaucgacgcccuccucggcgacccccagugcgacggcuuccagaacaagaagugggaccucuucgucgagcgcuccaaggccuacuccaacugcuaccccuacgacguccccgacuacgccucccuccgcucccucgucgccuccuccggcacccucgaguucaacaacgaguccuucaacuggaccggcgucacccagaacggcaccuccuccgccugcauccgccgcuccaacaacuccuucuucucccgccucaacuggcucacccaccucaacuucaaguaccccgcccucaacgucaccaugcccaacaacgagcaguucgacaagcucuacaucuggggcguccaccaccccggcaccgacaaggaccagaucuuccucuacgcccaguccuccggccgcaucaccgucuccaccaagcgcucccagcaggccgucauccccaacaucggcucccgcccccgcauccgcaacauccccucccgcaucuccaucuacuggaccaucgucaagcccggcgacauccuccucaucaacuccaccggcaaccucaucgccccccgcggcuacuucaagauccgcuccggcaaguccuccaucaugcgcuccgacgcccccaucggcaagugcaaguccgagugcaucacccccaacggcuccauccccaacgacaagcccuuccagaacgucaaccgcaucaccuacggcgccugcccccgcuacgucaagcaguccacccucaagcucgccaccggcaugcgcaacguccccgagaagcagacccgcggcaucuucggcgccaucgccggcuucaucgagaacggcugggagggcauggucgacggcugguacggcuuccgccaccagaacuccgagggccgcggccaggccgccgaccucaaguccacccaggccgccaucgaccagaucaacggcaagcucaaccgccucaucggcaagaccaacgagaaguuccaccagaucgagaaggaguucuccgaggucgagggccgcauccaggaccucgagaaguacgucgaggacaccaagaucgaccucugguccuacaacgccgagcuccucgucgcccucgagaaccagcacaccaucgaccucaccgacuccgagaugaacaagcucuucgagaagaccaagaagcagcuccgcgagaacgccgaggacaugggcaacggcugcuucaagaucuaccacaagugcgacaacgccugcaucggcuccauccgcaacggcaccuacgaccacgacgucuaccgcgacgaggcccucaacaaccgcuuccagaucaagggcgucgaccucaaguccggcuacaaggacuggauccucuggaucuccuucgccaucuccugcuuccuccucugcgucgcccuccucggcuucaucaugugggccugccagaagggcaacauccgcugcaacaucugcaucuga

SEQ ID NO: 105595 - RNA, 1701 nt, Artificial Sequence
  derived and/or modified CDS sequence (opt2) from hemagglutinin__InfluenzaA__AFN19692
augaagaccaucaucgcccucuccuacauccucugccucgucuucgcccagaagauccccggcaacgacaacuccaccgccacccucugccucggccaccacgccguccccaacggcaccaucgucaagaccaucaccaacgaccagaucgaggucaccaacgccaccgagcucguccaguccuccuccaccggcgagaucugcgacuccccccaccagauccucgacggcgagaacugcacccucaucgacgcccuccucggcgacccccagugcgacggcuuccagaacaagaagugggaccucuucgucgagcgcuccaaggccuacuccaacugcuaccccuacgacguccccgacuacgccucccuccgcucccucgucgccuccuccggcacccucgaguucaacaacgaguccuucaacuggaccggcgucacccagaacggcaccuccuccgccugcauccgccgcuccgacuccuccuucuucucccgccucaacuggcucacccaccucaacuucaaguaccccgcccucaacgucaccaugcccaacaacgagcaguucgacaagcucuacaucuggggcguccaccaccccggcaccgacaaggaccagaucuuccucuacgcccaggccuccggccgcaucaccgucuccaccaagcgcucccagcaggccgucauccccaacaucggcucccgcccccgcauccgcaacauccccucccgcaucuccaucuacuggaccaucgucaagcccggcgacauccuccucaucaacuccaccggcaaccucaucgccccccgcggcuacuucaagauccgcuccggcaaguccuccaucaugcgcuccgacgcccccaucggcaagugcaacuccgagugcaucacccccaacggcuccauccccaacgacaagcccuuccagaacgucaaccgcaucaccuacggcgccugcccccgcuacgucaagcagaacacccucaagcucgccaccggcaugcgcaacguccccgagaagcagacccgcggcaucuucggcgccaucgccggcuucaucgagaacggcugggagggcauggucgacggcugguacggcuuccgccaccagaacuccgagggccgcggccaggccgccgaccucaaguccacccaggccgccaucgaccagaucaacggcaagcucaaccgccucaucggcaagaccaacgagaaguuccaccagaucgagaaggaguucuccgaggucgagggccgcauccaggaccucgagaaguacgucgaggacaccaagaucgaccucugguccuacaacgccgagcuccucgucgcccucgagaaccagcacaccaucgaccucaccgacuccgagaugaacaagcucuucgagaagaccaagaagcagcuccgcgagaacgccgaggacaugggcaacggcugcuucaagaucuaccacaagugcgacaacgccugcaucggcuccauccgcaacggcaccuacaaccacgacgucuaccgcgacgaggcccucaacaaccgcuuccagaucaagggcgucgagcucaaguccggcuacaaggacuggauccucuggaucuccuucgccaucuccugcuuccuccucugcgucgcccuccucggcuucaucaugugggccugccagaagggcaacauccgcugcaacaucugcaucuga

SEQ ID NO: 105596 - RNA, 1701 nt, Artificial Sequence
  derived and/or modified CDS sequence (opt2) from hemagglutinin__InfluenzaA__AFN19694
augaagaccaucaucgcccucuccuacauccucugccucgucuucgcccagaagcuccccggcaacgacaacuccaccgccacccucugccucggccaccacgccguccccaacggcaccaucgucaagaccaucaccaacgaccgcaucgaggucaccaacgccaccgagcucguccagaacucccccaucggcgagaucugcgacuccccccaccagauccucgacggcgagaacugcacccucaucgacgcccuccucggcgacccccagugcgacggcuuccagaacaagaagugggaccucuucgucgagcgcuccaaggccuacuccaacugcuaccccuacgacguccccgacuacgccucccuccgcucccucgucgccuccuccggcacccucgaguucaacaacgaguccuucaacuggaccggcgucacccagaacggcaccuccuccgccugcauccgccgcuccaacaacuccuucuucucccgccucaacuggcucacccaccucaacuucaaguaccccgcccucaacgucaccaugcccaacaacgagcaguucgacaagcucuacaucuggggcguccaccaccccggcaccgacaaggaccagaucuuccucuacgcccaguccuccggccgcaucaccgucuccaccaagcgcucccagcaggccgucauccccaacaucggcucccgcccccgcauccgcaacauccccucccgcaucuccaucuacuggaccaucgucaagcccggcgacauccuccucaucaacuccaccggcaaccucaucgccccccgcggcuacuucaagauccgcuccggcaaguccuccaucaugcgcuccgacgcccccaucggcaagugcaaguccgagugcaucacccccaacggcuccauccccaacgacaagcccuuccagaacgucaaccgcaucaccuacggcgccugcccccgcuacgucaagcaguccacccucaagcucgccaccggcaugcgcaacguccccgagaagcagacccgcggcaucuucggcgccaucgccggcuucaucgagaacggcugggagggcauggucgacggcugguacggcuuccgccaccagaacuccgagggccgcggccaggccgccgaccucaaguccacccaggccgccaucgaccagaucaacggcaagcucaaccgccucaucggcaagaccaacgagaaguuccaccagaucgagaaggaguucuccgaggucgagggccgcauccaggaccucgagaaguacgucgaggacaccaagaucgaccucugguccuacaacgccgagcuccucgucgcccucgagaaccagcacaccaucgaccucaccgacuccgagaugaacaagcucuucgagaagaccaagaagcagcuccgcgagaacgccgaggacaugggcaacggcugcuucaagaucuaccacaagugcgacaacgccugcaucggcuccauccgcaacggcaccuacgaccacgacgucuaccgcgacgaggcccucaacaaccgcuuccagaucaagggcgucgagcucaaguccggcuacaaggacuggauccucuggaucuccuucgccaucuccugcuuccuccucugcgucgcccuccucggcuucaucaugugggccugccagaagggcaacauccgcugcaacaucugcaucuga

SEQ ID NO: 105597 - RNA, 1701 nt, Artificial Sequence
  derived and/or modified CDS sequence (opt2) from hemagglutinin__InfluenzaA__AFN19700
augaagaccaucaucgcccucuccuacauccucugccucgucuucgcccagaagcuccccggcaacgacaacuccaccgccacccucugccucggccaccacgccguccccaacggcaccaucgucaagaccaucaccaacgaccagaucgaggucaccaacgccaccgagcucguccagaacuccuccaucggcgagaucugcgacuccccccaccagauccucgacggcgagaacugcacccucaucgacgcccuccucggcgacccccagugcgacggcuuccagaacaagaagugggaccucuucgucgagcgcuccaaggccuacuccaacugcuaccccuacgacguccccgacuacgccucccuccgcucccucgucgccuccuccggcacccucgaguucaacaacgagcgcuucaacugguccggcgucacccagaacggcaccuccuccgccugcaugcgccgcuccaacuccuccuucuucucccgccucaacuggcucacccaccucaacuucaaguaccccgcccucaacgucaccaugcccaacaacgagcaguucgacaagcucuacaucuggggcguccaccaccccggcaccgacaaggaccagaucuuccucuacgcccaguccuccggccgcaucaccgucuccaccaagcgcucccagcaggccgucauccccaacaucggcucccgcccccgcauccgcaacauccccucccgcaucuccaucuacuggaccaucgucaagcccggcgacauccuccucaucaacuccaccggcaaccucaucgccccccgcggcuacuucaagauccgcuccggcaaguccuccaucaugcgcuccgacgcccccaucggcaagugcaacuccgagugcaucacccccaacggcuccauccccaacgacaagcccuuccagaacgucaaccgcaucaccuacggcgccugcccccgcuacgucaagcaguccacccucaagcucgccaccggcaugcgcaacguccccgagaagcagacccgcggcaucuucggcgccaucgccggcuucaucgagaacggcugggagggcauggucgacggcugguacggcuuccgccaccagaacuccgagggccgcggccaggccgccgaccucaaguccacccaggccgccaucgaccagaucaacggcaagcucaaccgccucaucggcaagaccaacgagaaguuccaccagaucgagaaggaguucuccgaggucgagggccgcauccaggaccucgagaaguacgucgaggacaccaagaucgaccucugguccuacaacgccgagcuccucgucgcccucgagaaccagcacaccaucgaccucaccgacuccgagaugaacaagcucuucgagaagaccaagaagcagcuccgcgagaacgccgaggacaugggcaacggcugcuucaagaucuaccacaagugcgacaacgccugcaucggcuccauccgcaacggcaccuacgaccacgacgucuaccgcgacgaggcccucaacaaccgcuuccagaucaagggcgucgagcucaaguccggcuacaaggacuggauccucuggaucuccuucgccaucuccugcuuccuccucugcgucgcccuccucggcuucaucaugugggccugccagaagggcaacauccgcugcaacaucugcaucuga

SEQ ID NO: 105598 - RNA, 1701 nt, Artificial Sequence
  derived and/or modified CDS sequence (opt2) from hemagglutinin__InfluenzaA__AFN19702
augaagaccaucaucgcccucuccuacauccucugccucgucuucgcccagaagcuccccggcaacgacaacuccaccgccacccucugccucggccaccacgccguccccaacggcaccaucgucaagaccaucaccaacgaccgcaucgaggucaccaacgccaccgagcucguccagaacuccuccaucggcgagaucugcgacuccccccaccagauccucgacggcgagaacugcacccucaucgacgcccuccucggcgacccccagugcgacggcuuccagaacaagaagugggaccucuucgucgagcgcggcaaggccuacuccaacugcuaccccuacgacguccccgacuacgccucccuccgcucccucgucgccuccuccggcacccucgaguucaacaacgaguccuucaacuggaccggcgucacccagaacggcaccuccuccgccugcauccgccgcuccaacaacuccuucuucucccgccucaacuggcucacccaccucaacuucaaguaccccgcccucaacgucaccaugcccaacaacgagcaguucgacaagcucuacaucuggggcguccaccaccccggcaccgacaaggaccagaucuuccucuacgcccaguccuccggccgcaucaccgucuccaccaagcgcucccagcaggccgucauccccaacaucggcucccgcccccgcauccgcaacauccccucccgcaucuccaucuacuggaccaucgucaagcccggcgacauccuccucaucaacuccaccggcaaccucaucgccccccgcggcuacuucaagauccgcuccggcaaguccuccaucaugcgcuccgacgcccccaucggcaagugcaaguccgagugcaucacccccaacggcuccauccccaacgacaagcccuuccagaacgucaaccgcaucaccuacggcgccugcccccgcuacgucaagcaguccacccucaagcucgccaccggcaugcgcaacguccccgagaagcagacccgcggcaucuucggcgccaucgccggcuucaucgagaacggcugggagggcauggucgacggcugguacggcuuccgccaccagaacuccgagggccgcggccaggccgccgaccucaaguccacccaggccgccaucgaccagaucaacggcaagcucaaccgccucaucggcaagaccaacgagaaguuccaccagaucgagaaggaguucuccgaggucgagggccgcauccaggaccucgagaaguacgucgaggacaccaagaucgaccucugguccuacaacgccgagcuccucgucgcccucgagaaccagcacaccaucgaccucaccgacuccgagaugaacaagcucuucgagaagaccaagaagcagcuccgcgagaacgccgaggacaugggcaacggcugcuucaagaucuaccacaagugcgacaacgccugcaucggcuccauccgcaacggcaccuacgaccacgacgucuaccgcgacgaggcccucaacaaccgcuuccagaucaagggcgucgagcucaaguccggcuacaaggacuggauccucuggaucuccuucgccaucuccugcuuccuccucugcgucgcccuccucggcuucaucaugugggccugccagaagggcaacauccgcugcaacaucugcaucuga

SEQ ID NO: 105599 - RNA, 1701 nt, Artificial Sequence; identical to SEQ ID NO: 102851
  derived and/or modified CDS sequence (opt2) from hemagglutinin__InfluenzaA__AFN19709

SEQ ID NO: 105600 - RNA, 1701 nt, Artificial Sequence
  derived and/or modified CDS sequence (opt2) from hemagglutinin__InfluenzaA__AFN19719
augaaggccauccucgucguccuccucuacaccuucgccaccgccaacgccgacacccucugcaucggcuaccacgccaacaacuccaccgacaccgucgacaccguccucgagaagaacgucaccgucacccacuccgucaaccuccucgaggacaagcacaacggcaagcucugcaagcuccgcggcgucgccccccuccaccucggcaagugcaacaucgccggcuggauccucggcaaccccgagugcgagucccucuccaccgccuccuccugguccuacaucgucgagaccuccuccuccgacaacggcaccugcuaccccggcgacuucaucgacuacgaggagcuccgcgagcagcucuccuccgucuccuccuucgagcgcuucgagaucuuccccaagaccuccuccuggcccaaccacgacuccaacaagggcgucaccgccgccugcccccacgccggcgccaaguccuucuacaagaaccucaucuggcucgucaagaagggcaacuccuaccccaagcucuccaaguccuacaucaacgacaagggcaaggagguccucguccucuggggcauccaccaccccuccaccaccgccgaccagcagucccucuaccagaacgccgacaccuacgucuucgucggcaccucccgcuacuccaagaaguucaagcccgagaucgccauccgccccaagguccgcgaccaggagggccgcaugaacuacuacuggacccucgucgagcccggcgacaagaucaccuucgaggccaccggcaaccucgucgucccccgcuacgccuucgccauggagcgcaacgccggcuccggcaucaucaucuccgacacccccguccacgacugcaacaccaccugccagacccccaagggcgccaucaacaccucccuccccuuccagaacauccaccccaucaccaucggcaagugccccaaguacgucaaguccaccaagcuccgccucgccaccggccuccgcaacguccccuccauccagucccgcggccucuucggcgccaucgccggcuucaucgagggcggcuggaccggcauggucgacggcugguacggcuaccaccaccagaacgagcagggcuccggcuacgccgccgaccucaaguccacccagaacgccaucgacaagaucaccaacaaggucaacuccgucaucgagaagaugaacacccaguucaccgccgucggcaaggaguucaaccaccucgagaagcgcaucgagaaccucaacaagaaggucgacgacggcuuccucgacaucuggaccuacaacgccgagcuccucguccuccucgagaacgagcgcacccucgacuaccacgacuccaacgucaagaaccucuacgagaagguccgcacccagcucaagaacaacgccaaggagaucggcaacggcugcuucgaguucuaccacaagugcgacaacaccugcauggaguccgucaagaacggcaccuacgacuaccccaaguacuccgaggaggccaagcucaaccgcgaggagaucgacggcgucaagcucgaguccacccgcgucuaccagauccucgccaucuacuccaccgucgccuccucccucguccucgucgucucccucggcgccaucuccuucuggaugugcuccaacggcucccuccagugccgcaucugcaucuga

SEQ ID NO: 105601 - RNA, 1701 nt, Artificial Sequence; identical to SEQ ID NO: 102471
  derived and/or modified CDS sequence (opt2) from hemagglutinin__InfluenzaA__AFN19730

SEQ ID NO: 105602 - RNA, 1701 nt, Artificial Sequence; identical to SEQ ID NO: 102851
  derived and/or modified CDS sequence (opt2) from hemagglutinin__InfluenzaA__AFN19736

SEQ ID NO: 105603 - RNA, 1701 nt, Artificial Sequence
  derived and/or modified CDS sequence (opt2) from hemagglutinin__InfluenzaA__AFN19748
augaaggccauccucgucguccuccucuacaccuucgccaccgccaacgccgacacccucugcaucggcuaccacgccaacaacuccaccgacaccgucgacaccguccucgagaagaacgucaccgucacccacuccgucaaccuccucgaggacaagcacaacggcaagcucugcaagcuccgcggcgucgccccccuccaccucggcaagugcaacaucgccggcuggauccucggcaaccccgagugcgagucccucuccaccgccuccuccugguccuacaucgucgagaccuccuccuccgacaacggcaccugcuaccccggcgacuucaucgacuacgaggagcuccgcgagcagcucuccuccgucuccuccuucgagcgcuucgagaucuuccccaagaccuccuccuggcccaaccacgacuccaacaagggcgucaccgccgccugcccccacgccggcgccaaguccuucuacaagaaccucaucuggcucgucaagaccggcaacuccuaccccaagcucuccaaguccuacaucaacgacaagggcaaggagguccucguccucuggggcauccaccaccccuccaccaccgccgaccagcagucccucuaccagaacgccgacaccuacgucuucgucggcaccucccgcuacuccaagaaguucaagcccgagaucgccauccgccccaagguccgcgaccaggagggccgcaugaacuacuacuggacccucgucgagcccggcgacaagaucaccuucgaggccaccggcaaccucgucgucccccgcuacgccuucgccauggagcgcaacgccggcuccggcaucaucaucuccgacacccccguccacgacugcaacaccaccugccagacccccaagggcgccaucaacaccucccuccccuuccagaacauccaccccaucaccaucggcaagugccccaaguacgucaaguccaccaagcuccgccucgccaccggccuccgcaacguccccuccauccagucccgcggccucuucggcgccaucgccggcuucaucgagggcggcuggaccggcauggucgacggcugguacggcuaccaccaccagaacgagcagggcuccggcuacgccgccgaccucaaguccacccagaacgccaucgacaagaucaccaacaaggucaacuccgucaucgagaagaugaacacccaguucaccgccgucggcaaggaguucaaccaccucgagaagcgcaucgagaaccucaacaagaaggucgacgacggcuuccucgacaucuggaccuacaacgccgagcuccucguccuccucgagaacgagcgcacccucgacuaccacgacuccaacgucaagaaccucuacgagaagguccgcaaccagcucaagaacaacgccaaggagaccggcaacggcugcuucgaguucuaccacaagugcgacaacaccugcauggaguccgucaagaacggcaccuacgacuaccccaaguacuccgaggaggccaagcucaaccgcgaggagaucgacggcgucaagcucgaguccacccgcaucuaccagauccucgccaucuacuccaccgucgccuccucccucguccucgucgucucccucggcgccaucuccuucuggaugugcuccaacggcucccuccagugccgcaucugcaucuga

SEQ ID NO: 105604 - RNA, 1701 nt, Artificial Sequence; identical to SEQ ID NO: 102860
  derived and/or modified CDS sequence (opt2) from hemagglutinin__InfluenzaA__AFN19757

SEQ ID NO: 105605 - RNA, 1701 nt, Artificial Sequence; identical to SEQ ID NO: 102851
  derived and/or modified CDS sequence (opt2) from hemagglutinin__InfluenzaA__AFN19768

SEQ ID NO: 105606 - RNA, 1701 nt, Artificial Sequence
  derived and/or modified CDS sequence (opt2) from hemagglutinin__InfluenzaA__AFN19781
augaaggccauccucgucguccuccucuacaccuucgccaccgccaacgccgacacccucugcaucggcuaccacgccaacaacuccaccgacaccgucgacaccguccucgagaagaacgucaccgucacccacuccgucaaccuccucgaggacaagcacaacggcaagcucugcaagcuccgcggcgucgccccccuccaccucggcaagugcaacaucgccggcuggauccucggcaaccccgagugcgagucccucuccaccgccuccuccugguccuacaucgucgagaccuccuccuccgacaacggcaccugcuaccccggcgacuucaucgacuacgaggagcuccgcgagcagcucuccuccgucuccuccuucgagcgcuucgagaucuuccccaagaccuccuccuggcccaaccacgacuccaacaagggcgucaccgccgccugcccccacgccggcgccaaguccuucuacaagaaccucaucuggcucgucaagaagggcaacuccuaccccaagcucuccaaguccuacaucaacgacaagggcaaggagguccucguccucuggggcauccaccaccccuccaccaccgccgaccagcagucccucuaccagaacgccgacaccuacgucuucgucggcaccucccgcuacuccaagaaguucaagcccgagaucgccauccgccccaagguccgcgaccaggagggccgcaugaacuacuacuggacccucgucgagcccggcgacaagaucaccuucgaggccaccggcaaccucgucgucccccgcuacgccuucgccgucgagcgcaacgccggcuccggcaucaucaucuccgacacccccguccacgacugcaacaccaccugccagacccccaagggcgccaucaacaccucccuccccuuccagaacauccaccccaucaccaucggcaagugccccaaguacgucaaguccaccaagcuccgccucgccaccggccuccgcaacguccccuccauccagucccgcggccucuucggcgccaucgccggcuucaucgagggcggcuggaccggcauggucgacggcugguacggcuaccaccaccagaacgagcagggcuccggcuacgccgccgaccucaaguccacccagaacgccaucgacaagaucaccaacaaggucaacuccgucaucgagaagaugaacacccaguucaccgccgucggcaaggaguucaaccaccucgagaagcgcaucgagaaccucaacaagaaggucgacgacggcuuccucgacaucuggaccuacaacgccgagcuccucguccuccucgagaacgagcgcacccucgacuaccacgacuccaacgucaagaaccucuacgagaagguccgcaaccagcucaagaacaacgccaaggagaucggcaacggcugcuucgaguucuaccacaagugcgacaacaccugcauggaguccgucaagaacggcaccuacgacuaccccaaguacuccgaggaggccaagcucaaccgcgaggagaucgacggcgucaagcucgaguccacccgcaucuaccagauccucgccaucuacuccaccgucgccuccucccucguccucgucgucucccucggcgccaucuccuucuggaugugcuccaacggcucccuccagugccgcaucugcaucuga

SEQ ID NO: 105607 - RNA, 1701 nt, Artificial Sequence
  derived and/or modified CDS sequence (opt2) from hemagglutinin__InfluenzaA__AFN19791
augaaggccauccucgucguccuccucuacaccuucgccaucgccaacgccgacacccucugcaucggcuaccacgccaacaacuccaccgacaccgucgacaccguccucgagaagaacgucaccgucacccacuccgucaaccuccucgaggacaagcacaacggcaagcucugcaagcuccgcggcgucgccccccuccaccucggcaagugcaacaucgccggcuggauccucggcaaccccgagugcgagucccucuccaccgccuccuccugguccuacaucgucgagaccuccuccuccgacaacggcaccugcuaccccggcgacuucaucaacuacgaggagcuccgcgagcagcucuccuccgucuccuccuucgagcgcuucgagaucuuccccaagaccuccuccuggcccaaccacgacuccaacaagggcgucaccgccgccugcccccacgccggcgccaaguccuucuacaagaaccucaucuggcucgucaagaagggcaacuccuaccccaagcucuccaaguccuacaucaacgacaagggcaaggagguccucguccucuggggcauccaccaccccuccaccuccgccgaccagcagucccucuaccagaacgccgacgccuacgucuucgucggcaccuccaaguacuccaagaaguucaagcccgagaucgccguccgccccaagguccgcgaccaggagggccgcaugaacuacuacuggacccucgucgagcccggcgacaagaucaccuucgaggccaccggcaaccuccucgucccccgcuacgccuucgccauggagcgcaacgccggcuccggcaucaucaucuccgacacccccguccacgacugcaacaccaccugccagacccccgagggcgccaucaacaccucccuccccuuccagaacauccaccccaucaccaucggcaagugccccaaguacgucaaguccaccaagcuccgccucgccaccggccuccgcaacguccccuccauccagucccgcggccucuucggcgccaucgccggcuucaucgagggcggcuggaccggcauggucgacggcugguacggcuaccaccaccagaacgagcagggcuccggcuacgccgccgaccucaaguccacccagaacgccaucgacaagaucaccaacaaggucaacuccgucaucgagaagaugaacacccaguucaccgccgucggcaaggaguucaaccaccucgagaagcgcaucgagaaccucaacaagaaggucgacgacggcuuccucgacaucuggaccuacaacgccgagcuccucguccuccucgagaacgagcgcacccucgacuaccacgacuccaacgucaagaaccucuacgagaagguccgcucccagcucaagaacaacgccaaggagaucggcaacggcugcuucgaguucuaccacaagugcgacaacaccugcauggaguccgucaagaacggcaccuacgacuaccccaaguacuccgaggaggccaagcucaaccgcgaggagaucgacggcgucaagcucgaguccacccgcaucuaccagauccucgccaucuacuccaccgucgccuccucccucguccucaucgucucccucggcgccaucuccuucuggaugugcuccaacggcucccuccagugccgcaucugcaucuga

SEQ ID NO: 105608 - RNA, 1701 nt, Artificial Sequence; identical to SEQ ID NO: 102851
  derived and/or modified CDS sequence (opt2) from hemagglutinin__InfluenzaA__AFN19806

SEQ ID NO: 105609 - RNA, 1701 nt, Artificial Sequence
  derived and/or modified CDS sequence (opt2) from hemagglutinin__InfluenzaA__AFN19808
augaaggccauccucgucguccuccucuacaccuucgccaccgccaacgccgacacccucugcaucggcuaccacgccaacaacuccaccgacaccgucgacaccguccucgagaagaacgucaccgucacccacuccgucaaccuccucgaggacaagcacaacggcaagcucugcaagcuccgcggcgucgccccccuccaccucggcaagugcaacaucgccggcuggauccucggcaaccccgagugcgagucccucuccaccgccaacuccugguccuacaucgucgagaccuccuccuccgacaacggcaccugcuaccccggcgacuucaucgacuacgaggagcuccgcgagcagcucuccuccgucuccuccuucgagcgcuucgagaucuuccccaagaccaacuccuggcccaaccacgacuccaacaagggcgucaccgccgccugcccccacgccggcgccaaguccuucuacaagaaccucaucuggcucgucaagaagggcaacuccuaccccaagcucuccaaguccuacaucaacgacaagggcaaggagguccucguccucuggggcauccaccaccccuccaccuccgccgaccagcagucccucuaccagaacgccgacgccuacgucuucgucggcaccucccgcuacuccaagaaguucaagcccgagaucgccauccgccccaagguccgcgaccaggagggccgcaugaacuacuacuggacccucgucgagcccggcgacaagaucaccuucgaggccaccggcaaccucgucgucccccgcuacgccuucgccauggagcgcaacgccggcuccggcaucaucaucuccgacacccccgcccacgacugcaacaccaccugccagacccccaagggcgccaucaacaccucccuccccuuccagaacauccaccccaucaccaucggcaagugccccaaguacgucaacuccaccaagcuccgccucgccaccggccuccgcaacguccccuccauccagucccgcggccucuucggcgccaucgccggcuucaucgagggcggcuggaccggcauggucgacggcugguacggcuaccaccaccagaacgagcagggcuccggcuacgccgccgaccucaaguccacccagaacgccaucgacaagaucaccaacaaggucaacuccgucaucgagaagaugaacacccaguucaccgccgucggcaaggaguucaaccaccucgagaagcgcaucgagaaccucaacaagaaggucgacgacggcuuccucgacaucuggaccuacaacgccgagcuccucguccuccucgagaacgagcgcacccucgacuaccacgacuccaacgucaagaaccucuacgagaagguccgcucccagcucaagaacaacgccaaggagaucggcaacggcugcuucgaguucuaccacaagugcgacaacaccugcauggaguccgucaagaacggcaccuacgacuaccccaaguacuccgaggaggccaagcucaaccgcgaggagaucgacggcgucaagcucgaguccacccgcaucuaccagauccucgccaucuacuccaccgucgccuccucccucguccucgucgucucccucggcgccaucuccuucuggaugugcuccaacggcucccuccagugccgcaucugcaucuga

SEQ ID NO: 105610 - RNA, 1701 nt, Artificial Sequence; identical to SEQ ID NO: 102860
  derived and/or modified CDS sequence (opt2) from hemagglutinin__InfluenzaA__AFN19814

SEQ ID NO: 105611 - RNA, 1701 nt, Artificial Sequence
  derived and/or modified CDS sequence (opt2) from hemagglutinin__InfluenzaA__AFN19816
augaaggccauccucgucguccuccucuacaccuucgccaccgccaacgccgacacccucugcaucggcuaccacgccaacaacuccaccgacaccgucgacaccguccucgagaagaacgucaccgucacccacuccgucaaccuccucgaggacaagcacaacggcaagcucugcaagcuccgcggcgucgccccccuccaccucggcaagugcaacaucgccggcuggauccucggcaaccccgagugcgagucccucuccaccgccuccuccugguccuacaucgucgagaccuccuccuccgacaacggcaccugcuaccccggcgacuucaucgacuacgaggagcuccgcgagcagcucuccuccgucuccuccuucgagcgcuucgagaucuuccccaagaccuccuccuggcccaaccacgacuccaacaagggcgucaccgccgccugcccccacgccggcgccaagggcuucuacaagaaccucaucuggcucgucaagaagggcaacuccuaccccaagcucuccaaguccuacaucaacgacaagggcaaggagguccucguccucuggggcauccaccaccccuccaccaccgccgaccagcagucccucuaccagaacgccgacaccuacgucuucgucggcaccucccgcuacuccaagaaguucaagcccgagaucgccauccgccccaagguccgcgaccaggagggccgcaugaacuacuacuggacccucgucgagcccggcgacaagaucaccuucgaggccaccggcaaccucgucgucccccgcuacgccuucgccauggagcgcgacgccggcuccggcaucaucaucuccgacacccccguccacgacugcaacaccaccugccagacccccaagggcgccaucaacaccucccuccccuuccagaacauccaccccaucaccaucggcaagugccccaaguacgucaaguccaccaagcuccgccucgccaccggccuccgcaacguccccuccauccagucccgcggccucuucggcgccaucgccggcuucaucgagggcggcuggaccggcauggucgacggcugguacggcuaccaccaccagaacgagcagggcuccggcuacgccgccgaccucaaguccacccagaacgccaucgacaagaucaccaacaaggucaacuccgucaucgagaagaugaacacccaguucaccgccgucggcaaggaguucaaccaccucgagaagcgcaucgagaaccucaacaagaaggucgacgacggcuuccucgacaucuggaccuacaacgccgagcuccucguccuccucgagaacgagcgcacccucgacuaccacgacuccaacgucaagaaccucuacgagaagguccgcaaccagcucaagaacaacgccaaggagaucggcaacggcugcuucgaguucuaccacaagugcgacaacaccugcauggaguccgucaagaacggcaccuacgacuaccccaaguacuccgaggaggccaagcucaaccgcgaggagaucgacggcgucaagcucgaguccacccgcaucuaccagauccucgccaucuacuccaccgucgccuccucccucguccucgucgucucccucggcgccaucuccuucuggaugugcuccaacggcucccuccagugccgcaucugcaucuga

SEQ ID NO: 105612 - RNA, 1701 nt, Artificial Sequence
  derived and/or modified CDS sequence (opt2) from hemagglutinin__InfluenzaA__AFN19821
augaaggccauccucgucguccuccucuacaccuucgccaccgccaacgccgacacccucugcaucggcuaccacgccaacaacuccaccgacaccgucgacaccguccucgagaagaacgucaccgucacccacuccgucaaccuccucgaggacaagcacaacggcaagcucugcaagcuccgcggcgucgccccccuccaccucggcaagugcaacaucgccggcuggauccucggcaaccccgagugcgagucccucuccaccgccuccuccugguccuacaucgucgagaccuccuccuccgacaacggcaccugcuaccccggcgacuucaucgacuacgaggagcuccgcgagcagcucuccuccgucuccuccuucgagcgcuucgagaucuuccccaagaccuccuccuggcccaaccacgacuccaacaagggcgucaccgccgccugcccccacgccggcgccaaguccuucuacaagaaccucaucuggcucgucaagaagggcaacuccuaccccaagcucuccaaguccuacaucaacgacaagggcaaggagguccucguccucuggggcauccaccaccccuccaccaccgccgaccagcagucccucuaccagaacgccgacaccuacgucuucgucggcaccucccgcuacuccaagaagcucaagcccgagaucgccauccgccccaagguccgcgaccaggagggccgcaugaacuacuacuggacccucgucgagcccggcggcaagaucaccuucgaggccaccggcaaccucgucgucccccgcuacgccuucgccauggagcgcaacgccggcuccggcaucaucaucuccgacacccccguccacgacugcaacaccaccugccagacccccaagggcgccaucaacaccucccuccccuuccagaacauccaccccaucaccaucggcaagugccccaaguacgucaaguccaccaagcuccgccucgccaccggccuccgcaacguccccuccauccagucccgcggccucuucggcgccaucgccggcuucaucgagggcggcuggaccggcauggucgacggcugguacggcuaccaccaccagaacgagcagggcuccggcuacgccgccgaccucaaguccacccagaacgccaucgacaagaucaccaacaaggucaacuccgucaucgagaagaugaacacccaguucaccgccgucggcaaggaguucaaccaccucgagaagcgcaucgagaaccucaacaagaaggucgacgacggcuuccucgacaucuggaccuacaacgccgagcuccucguccuccucgagaacgagcgcacccucgacuaccacgacuccaacgucaagaaccucuacgagaagguccgcaaccagcucaagaacaacgccaaggagaucggcaacggcugcuucgaguucuaccacaagugcgacaacaccugcauggaguccgucaagaacggcaccuacgacuaccccaaguacuccgaggaggccaagcucaaccgcgaggagaucgacggcgucaagcucgaguccacccgcaucuaccagauccucgccaucuacuccaccgucgccuccucccucguccucgucgucucccucggcgccaucuccuucuggaugugcuccaacggcucccuccagugccgcaucugcaucuga

SEQ ID NO: 105613 - RNA, 1701 nt, Artificial Sequence; identical to SEQ ID NO: 102471
  derived and/or modified CDS sequence (opt2) from hemagglutinin__InfluenzaA__AFN19831

SEQ ID NO: 105614 - RNA, 1701 nt, Artificial Sequence
  derived and/or modified CDS sequence (opt2) from hemagglutinin__InfluenzaA__AFN19849
augaaggccauccucgucguccuccucuacaccuucgccaccgccaacgccgacacccucugcaucggcuaccacgccaacaacuccaccgacaccgucgacaccguccucgagaagaacgucaccgucacccacuccgucaaccuccucgaggacaagcacaacggcaagcucugcaagcuccgcggcgucgccccccuccaccucggcaagugcgacaucgccggcuggauccucggcaaccccgagugcgagucccucuccaccgccuccuccugguccuacaucgucgagaccuccuccuccgacaacggcaccugcuaccccggcgacuucaucaacuacgaggagcuccgcgagcagcucuccuccgucuccuccuucgagcgcuucgagaucuuccccaagaccuccuccuggcccaaccacgacuccaacaagggcgucaccgccgccugcccccaggccggcgccaaguccuucuacaagaaccucaucuggcucgucaagaagggcaacuccuaccccaagcucuccaaguccuacaucaacgacaagggcaaggagguccucguccucuggggcauccaccaccccuccaccuccgccgaccagcagucccucuaccagaacgccgacgccuacgucuucgucggcaccuccaaguacuccaagaaguucaagcccgagaucgccguccgccccaagguccgcgaccaggagggccgcaugaacuacuacuggacccucgucgagcccggcgacaagaucaccuucgaggccaccggcaaccuccucgucccccgcuacgccuucgccauggagcgcaacgccggcuccggcaucaucaucuccgacacccccguccacgacugcaacaccaccugccagacccccaagggcgccaucaacaccucccuccccuuccagaacauccaccccaucaccaucggcaagugccccaaguacgucaaguccaccaagcuccgccucgccaccggccuccgcaacguccccuccauccagucccgcggccucuucggcgccaucgccggcuucaucgagggcggcuggaccggcauggucgacggcugguacggcuaccaccaccagaacgcccagggcuccggcuacgccgccgaccucaaguccacccagaacgccaucgacaagaucaccaacaaggucaacuccgucaucgagaagaugaacacccaguucaccgccgucggcaaggaguucaaccaccucgagaagcgcaucgagaaccucaacaagaaggucgacgacggcuuccucgacaucuggaccuacaacgccgagcuccucguccuccucgagaacgagcgcacccucgacuaccacgacuccaacgucaagaaccucuacgagaagguccgcucccagcucaagaacaacgccaaggagaucggcgacggcugcuucgaguucuaccacaagugcgacaacaccugcauggaguccgucaagaacggcaccuacgacuaccccaaguacuccgaggaggccaagcucaaccgcgaggagaucgacggcgucaagcucgaguccacccgcaucuaccagauccucgccaucuacuccaccgucgccuccucccucguccucgucgucucccucggcgccaucuccuucuggaugugcuccaacggcucccuccagugccgcaucugcaucuga

SEQ ID NO: 105615 - RNA, 1701 nt, Artificial Sequence
  derived and/or modified CDS sequence (opt2) from hemagglutinin__InfluenzaA__AFN19865
augaaggccauccucgucguccuccucuacaccuucgccaccgccaacgccgacacccucugcaucggcuaccacgccaacaacuccaccgacaccgucgacaccguccucgagaagaacgucaccgucacccacuccgucaaccuccucgaggacaagcacaacggcaagcucugcaagcuccgcggcgucgccccccuccaccucggcaagugcaacaucgccggcuggauccucggcaaccccgagugcgagucccucuccaccgccuccuccugguccuacaucgucgagaccuccuccuccgacaacggcaccugcuaccccggcgacuucaucgacuacgaggagcuccgcgagcagcucuccuccgucuccuccuucgagcgcuucgagaucuuccccaagaccuccuccuggcccaaccacgacuccaacaagggcgucaccgccgccugcccccacgccggcgccaaguccuucuacaagaaccucaucuggcucgucaagaagggcaacuccuaccccaagcucuccaaguccuacaucaacgacaagggcaaggagguccucguccucuggggcauccaccaccccuccaccaccgccgaccagcagucccucuaccagaacgccgacgccuacgucuucgucggcaccucccgcuacuccaagaaguucaagcccgagaucgccauccgccccaagguccgcgaccaggagggccgcaugaacuacuacuggacccucgucgagcccggcgacaagaucaccuucgaggccaccggcaaccucgucgucccccgcuacgccuucgccauggagcgcaacgccggcuccggcaucaucaucuccgacacccucguccacgacugcaacaccaccugccagacccccaagggcgccaucaacaccucccuccccuuccagaacauccaccccaucaccaucggcaagugccccaaguacgucaaguccaccaagcuccgccucgccaccggccuccgcaacguccccuccauccagucccgcggccucuucggcgccaucgccggcuucaucgagggcggcuggaccggcauggucgacggcugguacggcuaccaccaccagaacgagcagggcuccggcuacgccgccgaccucaaguccacccagaacgccaucgacaagaucaccaacaaggucaacuccgucaucgagaagaugaacacccaguucaccgccgucggcaaggaguucaaccaccucgagaagcgcaucgagaaccucaacaagaaggucgacgacggcuuccucgacaucuggaccuacaacgccgagcuccucguccuccucgagaacgagcgcacccucgacuaccacgacuccaacgucaagaaccucuacgagaagguccgcaaccagcucaagaacaacgccaaggagaucggcaacggcugcuucgaguucuaccacaagugcgacaacaccugcauggaguccgucaagaacggcaccuacgacuaccccaaguacuccgaggaggccaagcucaaccgcgaggagaucgacggcgucaagcucgaguccacccgcaucuaccagauccucgccaucuacuccaccgucgccuccucccucguccucgucgucucccucggcgccaucuccuucuggaugugcuccaacggcucccuccagugccgcaucugcaucuga

SEQ ID NO: 105616 - RNA, 1701 nt, Artificial Sequence
  derived and/or modified CDS sequence (opt2) from hemagglutinin__InfluenzaA__AFN19875
augaaggccauccucgucguccuccucuacaccuucgccaccgccaacgccgacacccucugcaucggcuaccacgccaacaacuccaccgacaccgucgacaccguccucgagaagaacgucaccgucacccacuccgucaaccuccucgaggacaagcacaacggcaagcucugcaagcuccgcggcgucgccccccuccaccucggcaagugcaacaucgccggcuggauccucggcaaccccgagugcgagucccucuccaccgccuccuccugguccuacaucgucgagaccuccuccuccgacaacggcaccugcuaccccggcgacuucaucaacuacgaggagcuccgcgagcagcucuccuccgucuccuccuucgagcgcuucgagaucuuccccaagaccuccuccuggcccaaccacgacuccaacaagggcgucaccgccgccugcccccacgccggcgagaaguccuucuacaagaaccucaucuggcucgucaagaagggcaacuccuaccccaagcucuccaaguccuacaucaacgacaagggcaaggagguccucguccucuggggcauccaccaccccuccaccuccgccgaccagcagucccucuaccagaacgccgacgccuacgucuucgucggcaccuccaaguacuccaagaaguucaagcccgagaucgccguccgccccaagguccgcgaccaggagggccgcaugaacuacuacuggacccucgucgagcccggcgacaagaucaccuucgaggccaccggcaaccuccucgucccccgcuacgccuucgccauggagcgcaacgccggcuccggcaucaucaucuccgacacccccguccacgacugcaacaccaccugccagacccccaagggcgccaucaacaccucccuccccuuccagaacauccaccccaucaccaucggcaagugccccaaguacgucaaguccaccaagcuccgccucgccaccggccuccgcaacguccccuccauccagucccgcggccucuucggcgccaucgccggcuucaucgagggcggcuggaccggcauggucgacggcugguacggcuaccaccaccagaacgagcagggcuccggcuacgccgccgaccucaaguccacccagaacgccaucgacaagaucaccaacaaggucaacuccgucaucgagaagaugaacacccaguucaccgccgucggcaaggaguucaaccaccucgagaagcgcaucgagaaccucaacaagaaggucgacgacggcuuccucgacaucuggaccuacaacgccgagcuccucguccuccucgagaacgagcgcacccucgacuaccacgacuccaacgucaagaaccucuacgagaagguccgcucccagcucaagaacaacgccaaggagaucggcaacggcugcuucgaguucuaccacaagugcgacaacaccugcauggaguccgucaagaacggcaccuacgacuaccccaaguacuccgaggaggccaagcucaaccgcgaggagaucgacggcgucaagcucgaguccacccgcaucuaccagauccucgccaucuacuccaccgucgccuccucccucguccucgucgucucccucggcgccaucuccuucuggaugugcuccaacggcucccuccagugccgcaucugcaucuga

SEQ ID NO: 105617 - RNA, 1701 nt, Artificial Sequence
  derived and/or modified CDS sequence (opt2) from hemagglutinin__InfluenzaA__AFN19895
augaaggccauccucgucguccuccucuacaccuucgccaccgccaacgccgacacccucugcaucggcuaccacgccaacaacuccaccgacaccgucgacaccguccucgagaagaacgucaccgucacccacuccgucaaccuccucgaggacaagcacaacggcaagcucugcaagcuccgcggcgucgccccccuccaccucggcaagugcaacaucgccggcuggauccucggcaaccccgagugcgagucccucuccaccgccuccuccugguccuacaucgucgagaccuccuccuccgacaacggcaccugcuaccccggcgacuucaucgacuacgaggagcuccgcgagcagcucuccuccgucuccuccuucgagcgcuucgagaucuuccccaagaccuccuccuggcccaaccacgacuccaacaagggcgucaccgccgccugcccccacgccggcgccaaguccuucuacaagaaccucaucuggcucgucaagaagggcaacuccuaccccaagaucuccaaguccuacaucaacgacaagggcaaggagguccucguccucuggggcauccaccaccccuccaccaccgccgaccagcagucccucuaccagaacgccgacaccuacgucuucgucggcaccucccgcuacuccaagaaguucaagcccgagaucgccauccgccccaagguccgcgaccaggagggccgcaugaacuacuacuggacccucgucgagcccggcgacaagaucaccuucgaggccaccggcaaccucgucgucccccgcuacgccuucgccauggagcgcaacgccggcuccggcaucaucaucuccgacacccccguccacgacugcaacaccaccugccagacccccaagggcgccaucaacaccucccuccccuuccagaacauccaccccaucaccaucggccgcugccccaaguacgucaaguccaccaagcuccgccucgccaccggccuccgcaacguccccuccauccagucccgcggccucuucggcgccaucgccggcuucaucgagggcggcuggaccggcauggucgacggcugguacggcuaccaccaccagaacgagcagggcuccggcuacgccgccgaccucaaguccacccagaacgccaucgacaagaucaccaacaaggucaacuccgucaucgagaagaugaacacccaguucaccgccgucggcaaggaguucaaccaccucgagaagcgcaucgagaaccucaacaagaaggucgacgacggcuuccucgacaucuggaccuacaacgccgagcuccucguccuccucgagaacgagcgcacccucgacuaccacgacuccaacgucaagaaccucuacgagaagguccgcaaccagcucaagaacaacgccaaggagaccggcaacggcugcuucgaguucuaccacaagugcgacaacaccugcauggaguccgucaagaacggcaccuacgacuaccccaaguacuccgaggaggccaagcucaaccgcgaggucaucgacggcgucaagcucgaguccacccgcaucuaccagauccucgccaucuacuccaccgucgccuccucccucguccucgucgucucccucggcgccaucuccuucuggaugugcuccaacggcucccuccagugccgcaucugcaucuga

SEQ ID NO: 105618 - RNA, 1701 nt, Artificial Sequence
  derived and/or modified CDS sequence (opt2) from hemagglutinin__InfluenzaA__AFN19905
augaaggccauccucgucguccuccucuacaccuucgccaccgccaacgccgacacccucugcaucggcuaccacgccaacaacuccaccgacaccgucgacaccguccucgagaagaacgucaccgucacccacuccgucaaccuccucgaggacaagcacaacggcaagcucugcaagcuccgcggcgucgccccccuccaccucggcaagugcaacaucgccggcuggauccucggcaaccccgagugcgagucccucuccaccgccuccuccugguccuacaucgucgagaccuccuccuccgacaacggcaccugcuaccccggcgacuucaucgacuacgaggagcuccgcgagcagcucuccuccgucuccuccuucgagcgcuucgagaucuuccccaagaccuccuccuggcccaaccacgacuccaacaagggcgucaccgccgccugcccccacgccggcgccaagggcuucuacaagaaccucaucuggcucgucaagaagggcaacuccuaccccaagcucuccaaguccuacaucaacgacaagggcaaggagguccucguccucuggggcauccaccaccccuccaccaccgccgaccagcagucccucuaccagaacgccgacaccuacgucuucgucggcaccucccgcuacuccaagaaguucaagcccgagaucgccauccgccccaagguccgcgaccaggagggccgcaugaacuacuacuggacccucgucgagcccggcgacaagaucaccuucgaggccaccggcaaccucgucgucccccgcuacgccuucgccauggagcgcaacgccggcuccggcaucaucaucuccgacacccccguccacgacugcaacaccaccugccagacccccaagggcgccaucaacaccucccuccccuuccagaacauccaccccaucaccaucggcaagugccccaaguacgucaaguccaccaagcuccgccucgccaccggccuccgcaacguccccuccauccagucccgcggccucuucggcgccaucgccggcuucaucgagggcggcuggaccggcauggucgacggcugguacggcuaccaccaccagaacgagcagggcuccggcuacgccgccgaccucaaguccacccagaacgccgucgacaagaucaccaacaaggucaacuccgucaucgagaagaugaacacccaguucaccgccgucggcaaggaguucaaccaccucgagaagcgcaucgagaaccucaacaagaaggucgacgacggcuuccucgacaucuggaccuacaacgccgagcuccucguccuccucgagaacgagcgcacccucgacuaccacgacuccaacgucaagaaccucuacgagaagguccgcaaccagcucaagaacaacgccaaggagaucggcaacggcugcuucgaguucuaccacaagugcgacaacaccugcauggaguccgucaagaacggcaccuacgacuaccccaaguacuccgaggaggccaagcucaaccgcgagaagaucgacggcgucaagcucgaguccacccgcaucuaccagauccucgccaucuacuccaccgucgccuccucccucguccucaucgucucccucggcgccaucuccuucuggaugugcuccaacggcucccuccagugccgcaucugcaucuga

SEQ ID NO: 105619 - RNA, 1701 nt, Artificial Sequence
  derived and/or modified CDS sequence (opt2) from hemagglutinin__InfluenzaA__AFN19915
augaaggccauccucgucguccuccucuacaccuucgccaccgccaacgccgacacccucugcaucggcuaccacgccaacaacuccaccgacaccgucgacaccguccucgagaagaacgucaccgucacccacuccgucaaccuccucgaggacaagcacaacggcaagcucugcaagcuccgcggcgucgccccccuccaccucggcaagugcaacaucgccggcuggauccucggcaaccccgagugcgagucccucuccaccgccuccuccugguccuacaucgucgagaccuccuccuccgacaacggcaccugcuaccccggcgacuucaucaacuacgaggagcuccgcgagcagcucuccuccgucuccuccuucgagcgcuucgagaucuuccccaagaccuccuccuggcccaaccacgacuccaacaagggcgucaccgccgccugcccccaggccggcgccaaguccuucuacaagaaccucaucuggcucgucaagaagggcaacuccuaccccaagcucuccuccuccuacaucaacgacaagggcaaggagguccucguccucuggggcauccaccaccccuccaccuccgccgaccagcagucccucuaccagaacgccgacgccuacgucuucgucggcaccuccgaguacuccaagaaguucaagcccgagaucgccguccgccccaagguccgcgaccaggagggccgcaugaacuacuacuggacccucgucgagcccggcgacaagaucaccuucgaggccaccggcaaccuccucgucccccgcuacgccuucgccauggagcgcaacgccggcuccggcaucaucaucuccgacacccccguccacgacugcaacaccaccugccagacccccaagggcgccaucaacaccucccuccccuuccagaacauccaccccaucaccaucggcaagugccccaaguacgucaaguccaccaagcuccgccucgccaccggccuccgcaacguccccuccauccagucccgcggccucuucggcgccaucgccggcuucaucgagggcggcuggaccggcauggucgacggcugguacggcuaccaccaccagaacgcccagggcuccggcuacgccgccgaccucaaguccacccagaacgccaucgacaagaucaccaacaaggucaacuccgucaucgagaagaugaacacccaguucaccgccgucggcaaggaguucaaccaccucgagaagcgcaucgagaaccucaacaagaaggucgacgacggcuuccucgacaucuggaccuacaacgccgagcuccucguccuccucgagaacgagcgcacccucgacuaccacgacuccaacgucaagaaccucuacgagaagguccgcucccagcucaagaacaacgccaaggagaucggcaacggcugcuucgaguucuaccacaagugcgacaacaccugcauggaguccgucaagaacggcaccuacgacuaccccaaguacuccgaggaggccaagcucaaccgcgaggagaucgacggcgucaagcucgaguccacccgcaucuaccagauccucgccaucuacuccaccgucgccuccucccucguccucgucgucucccucggcgccaucuccuucuggaugugcuccaacggcucccuccagugccgcaucugcaucuga

SEQ ID NO: 105620 - RNA, 1701 nt, Artificial Sequence
  derived and/or modified CDS sequence (opt2) from hemagglutinin__InfluenzaA__AFN19922
augaaggccauccucgucgucguccucuacaccuucgccaccgccaacgccgacacccucugcaucggcuaccacgccaacaacuccaccgacaccgucgacaccguccucgagaagaacgucaccgucacccacuccgucaaccuccucgaggacaagcacaacggcaagcucugcaagcuccgcggcgucgccccccuccaccucggcaagugcaacaucgccggcuggauccucggcaaccccgagugcgagucccucuccaccgccuccuccugguccuacaucgucgagaccuccuccuccgacaacggcaccugcuaccccggcgacuucaucgacuacgaggagcuccgcgagcagcucuccuccgucuccuccuucgagcgcuucgagaucuuccccaagaccuccuccuggcccaaccacgacuccaacaagggcgucaccgccgccugcccccacgccggcgccaagggcuucuacaagaaccucaucuggcucgucaagaagggcaacuccuaccccaagcucucccgcuccuacaucaacgacaagggcaaggagguccucguccucuggggcauccaccaccccuccaccaccgccgaccagcagucccucuaccagaacgccgacaccuacgucuucgucggcaccucccgcuacuccaagaaguucaagcccgagaucgccauccgccccaagguccgcgaccaggagggccgcaugaacuacuacuggacccucgucgagcccggcgacaagaucaccuucgaggccaccggcaaccucgucgucccccgcuacgccuucgccauggagcgcaacgccggcuccggcaucaucaucuccgacacccccgcccaggacugcaacaccaccugccagacccccaagggcgccaucaacaccucccuccccuuccagaacauccaccccaucaccaucggcaagugccccaaguacgucaaguccaccaagcuccgccucgccaccggccuccgcaacguccccuccauccagucccgcggccucuucggcgccaucgccggcuucaucgagggcggcuggaccggcauggucgacggcugguacggcuaccaccaccagaacgagcagggcuccggcuacgccgccgaccucaaguccacccagaacgccaucgacaagaucaccaacaaggucaacuccgucaucgagaagaugaacacccaguucaccgccgucggcaaggaguucaaccaccucgagaagcgcaucgagaaccucaacaagaaggucgacgacggcuuccucgacaucuggaccuacaacgccgagcuccucguccuccucgagaacgagcgcacccucgacuaccacgacuccaacgucaagaaccucuacgagaagguccgcaaccagcucaagaacaacgccaaggagaucggcaacggcugcuucgaguucuaccacaagugcgacaacaccugcauggaguccgucaagaacggcaccuacgacuaccccaaguacuccgaggaggccaagcucaaccgcgaggagaucgacggcgucaagcucgaguccacccgcaucuaccagauccucgccaucuacuccaccgucgccuccucccucguccucgucgucucccucggcgccaucuccuucuggaugugcuccaacggcucccuccagugccgcaucugcaucuga

SEQ ID NO: 105621 - RNA, 1701 nt, Artificial Sequence; identical to SEQ ID NO: 102490
  derived and/or modified CDS sequence (opt2) from hemagglutinin__InfluenzaA__AFN19931

SEQ ID NO: 105622 - RNA, 1701 nt, Artificial Sequence
  derived and/or modified CDS sequence (opt2) from hemagglutinin__InfluenzaA__AFN19941
augaaggccauccucgucguccuccucuacaccuucgccaccgccaacgccgacacccucugcaucggcuaccacgccaacaacuccaccgacaccgucgacaccguccucgagaagaacgucaccgucacccacuccgucaaccuccucgaggacaagcacaacggcaagcucugcaagcuccgcggcgucgccccccuccaccucggcaagugcaacaucgccggcuggauccucggcaaccccgagugcgagucccucuccaccgccuccuccugguccuacaucgucgagaccuccaucuccgacaacggcaccugcuaccccggcgacuucaucaacuacgaggagcuccgcgagcagcucuccuccgucuccuccuucgagcgcuucgagaucuuccccaagaccuccuccuggcccaaccacgacuccaacaagggcgucaccgccgccugcccccaggccggcgccaaguccuucuacaagaaccucaucuggcucgucaagaagggcaacuccuaccccaagcucuccaaguccuacaucaacgacaagggcaaggagguccucguccucuggggcauccaccaccccuccaccuccgccgaccagcagucccucuaccagaacgccgacgccuacgucuucgucggcaccuccaaguacuccaagaaguucaagcccgagaucgccguccgccccaagguccgcgaccaggagggccgcaugaacuacuacuggacccucgucgagcccggcgacaagaucaccuucgaggccaccggcaaccuccucgucccccgcuacgccuucgccauggagcgcaacgccggcuccggcaucaucaucuccgacacccccguccacgacugcaacaccaccugccagacccccaagggcgccaucaacaccucccuccccuuccagaacauccaccccaucaccaucggcaagugccccaaguacgucaaguccaccaagcuccgccucgccaccggccuccgcaacguccccuccauccagucccgcggccucuucggcgccaucgccggcuucaucgagggcggcuggaccggcauggucgacggcugguacggcuaccaccaccagaacgcccagggcuccggcuacgccgccgaccucaaguccacccagaacgccaucgacaagaucaccaacaaggucaacuccgucaucgagaagaugaacacccaguucaccgccgucggcaaggaguucaaccaccucgagaagcgcaucgagaaccucaacaagaaggucgacgacggcuuccucgacaucuggaccuacaacgccgagcuccucguccuccucgagaacgagcgcacccucgacuaccacgacuccaacgucaagaaccucuacgagaagguccgcucccagcucaagaacaacgccaaggagaucggcaacggcugcuucgaguucuaccacaagugcgacaacaccugcauggaguccgucaagaacggcaccuacgacuaccccaaguacuccgaggaggccaagcucaaccgcgaggagaucgacggcgucaagcucgaguccacccgcaucuaccagauccucgccaucuacuccaccgucgccuccucccucguccucgucgucucccucggcgccaucuccuucuggaugugcuccaacggcucccuccagugccgcaucugcaucuga

SEQ ID NO: 105623 - RNA, 1701 nt, Artificial Sequence
  derived and/or modified CDS sequence (opt2) from hemagglutinin__InfluenzaA__AFN19951
augaaggccauccucgucguccuccucuacaccuucgccaccgccaacgccgacacccucugcaucggcuaccacgccaacaacuccaccgacaccgucgacaccguccucgagaagaacgucaccgucacccacuccgucaaccuccucgaggacaagcacaacggcaagcucugcaagcuccgcggcgucgccccccuccaccucggcaagugcaacaucgccggcuggauccucggcaaccccgagugcgagucccucuccaccgccuccuccugguccuacaucgucgagaccuccuccuccgacaacggcaccugcuaccccggcgacuucaucgacuacgaggagcuccgcgagcagcucuccuccgucuccuccuucgagcgcuucgagaucuuccccaagaccuccuccuggcccaaccacgacuccaacaagggcgucaccgccgccugcccccacgccggcgccaaguccuucuacaagaaccucaucuggcucgucaagaagggcaacuccuaccccaagcucuccaaguccuacaucaacgacaagggcaaggagguccucguccucuggggcauccaccaccccuccaccaccgccgaccagcagucccucuaccagaacgccgacaccuacgucuucgucggcaccucccgcuacuccaagaaguucaagcccgagaucgccauccgccccaagguccgcgaccaggagggccgcaugaacuacuacuggacccucgucgagcccggcgacaagaucaccuucgaggccaccggcaaccucgucgucccccgcuacgccuucgccauggagcgcaacgccggcuccggcaucaucaucuccgacacccccguccacgacugcaacaccaccugccagacccccaagggcgccaucaacaccucccuccccuuccagaacauccaccccaucaccaucggcaagugccccaaguacgucaaguccaccaagcuccgccucgccaccggccuccgcaacguccccuccauccagucccgcggccucuucggcgccaucgccggcuucaucgagggcggcuggaccggcauggucgacggcugguacggcuaccaccaccagaacgagcagggcuccggcuacgccgccgaccucaaguccacccagaacgccaucgacaagaucaccaacaaggucaacuccgucaucgagaagaugaacacccaguucaccgccgucggcaaggaguucaaccaccucgagaagcgcaucgagaaccucaacaagaaggucgacgacggcuuccucgacaucuggaccuacaacgccgagcuccucguccuccucgagaacgagcgcacccucgacuaccacgacuccaacgucaagaaccucuacgagaagguccgcaaccagcucaagaacaacgccaaggagaccggcaacggcugcuucgaguucuaccacaagugcgacaacaccugcauggaguccgucaagaacggcaccuacgacuaccccaaguacuccgaggaggccaagcucaaccgcgaggagaucgacggcgucaagcucgaguccacccgcaucuaccagauccucgccaucuacuccaccgccgccuccucccucguccucgucgucucccucggcgccaucuccuucuggaugugcuccaacggcucccuccagugccgcaucugcaucuga

SEQ ID NO: 105624 - RNA, 1701 nt, Artificial Sequence; identical to SEQ ID NO: 102851
  derived and/or modified CDS sequence (opt2) from hemagglutinin__InfluenzaA__AFN19966

SEQ ID NO: 105625 - RNA, 1701 nt, Artificial Sequence
  derived and/or modified CDS sequence (opt2) from hemagglutinin__InfluenzaA__AFN19972
augaaggccauccucgucguccuccucuacaccuucgccaccgccaacgccgacacccucugcaucggcuaccacgccaacaacuccaccgacaccgucgacaccguccucgagaagaacgucaccgucacccacuccgucaaccuccucgaggacaagcacaacggcaagcucugcaagcuccgcggcgucgccccccuccaccucggcaagugcaacaucgccggcuggauccucggcaaccccgagugcgagucccucuccaccgccuccuccugguccuacaucgucgagaccuccuccuccgacaacggcaccugcuaccccggcgacuucaucgacaacgaggagcuccgcgagcagcucuccuccgucuccuccuucgagcgcuucgagaucuuccccaagaccuccuccuggcccaaccacgacuccaacaagggcgucaccgccgccugcccccacgccggcgccaaguccuucuacaagaaccucaucuggcucgucaagaagggcaacuccuaccccaagcucuccaaguccuacaucaacgacaagggcaaggagguccucguccucuggggcauccaccaccccuccaccaccgccgaccagcagucccucuaccagaacgccgacaccuacgucuucgucggcaccucccgcuacuccaagaaguucaagcccgagaucgccauccgccccaagguccgcgaccaggagggccgcaugaacuacuacuggacccucgucgagcccggcgacaagaucaccuucgaggccaccggcaaccucgucgucccccgcuacgccuucgccauggagcgcaacgccggcuccggcaucaucaucuccgacacccccguccacgacugcaacaccaccugccagacccccaagggcgccaucaacaccucccuccccuuccagaacauccaccccaucaccaucggcaagugccccaaguacgucaaguccaccaagcuccgccucgccaccggccuccgcaacguccccuccauccagucccgcggccucuucggcgccaucgccggcuucaucgagggcggcuggaccggcauggucgacggcugguacggcuaccaccaccagaacgagcagggcuccggcuacgccgccgaccucaaguccacccagaacgccaucgacaagaucaccaacaaggucaacuccgucaucgagaagaugaacacccaguucaccgccgucggcaaggaguucaaccaccucgagaagcgcaucgagaaccucaacaagaaggucgacgacggcuuccucgacaucuggaccuacaacgccgagcuccucguccuccucgagaacgagcgcacccucgacuaccacgacuccaacgucaagaaccucuacgagaagguccgcaaccagcucaagaacaacgccaaggagaucggcaacggcugcuucgaguucuaccacaagugcgacaacaccugcauggaguccgucaagaacggcaccuacgacuaccccaaguacuccgaggaggccaagcucaaccgcgaggagaucgacggcgucaagcucgaguccacccgcgucuaccagauccucgccaucuacuccaccgucgccuccucccucguccucgucgucucccucggcgccaucuccuucuggaugugcuccaacggcucccuccagugccgcaucugcaucuga

SEQ ID NO: 105626 - RNA, 1701 nt, Artificial Sequence
  derived and/or modified CDS sequence (opt2) from hemagglutinin__InfluenzaA__AFN19978
augaaggccauccucgucgucaugcucuacaccuucgccaccgccaacgccgacacccucugcaucggcuaccacgccaacaacuccaccgacaccgucgacaccguccucgagaagaacgucaccgucacccacuccgucaaccuccucgaggacaagcacaacggcaagcucugcaagcuccgcggcgucgccccccuccaccucggcaagugcaacaucgccggcuggauccucggcaaccccgagugcgagucccucuccaccgccuccuccugguccuacaucgucgagaccuccuccuccgacaacggcaccugcuaccccggcgacuucaucgacuacgaggagcuccgcgagcagcucuccuccgucuccuccuucgagcgcuucgagaucuuccccaagaccuccuccuggcccaaccacgacuccaacaagggcgucaccgccgccugcccccacgccggcgccaagggcuucuacaagaaccucaucuggcucgucaagaagggcaacuccuaccccaagcucuccaaguccuacaucaacgacaagggcaaggagguccucguccucuggggcauccaccaccccuccaccaccgccgaccagcagucccucuaccagaacgccgacaccuacgucuucgucggcaccucccgcuacuccaagaaguucaagcccgagaucgccauccgccccaagguccgcgaccaggagggccgcaugaacuacuacuggacccucgucgagcccggcgacaagaucaccuucgaggccaccggcaaccucgucgucccccgcuacgccuucgccauggagcgcaacgccggcuccggcaucaucaucuccgacacccccguccacgacugcaacaccaccugccagacccccaagggcgccaucaacaccucccuccccuuccagaacauccaccccaucaccaucggcaagugccccaaguacgucaaguccaccaagcuccgccucgccaccggccuccgcaacguccccuccauccagucccgcggccucuucggcgccaucgccggcuucaucgagggcggcuggaccggcauggucgacggcugguacggcuaccaccaccagaacgagcagggcuccggcuacgccgccgaccucaaguccacccagaacgccaucgacaagaucaccaacaaggucaacuccgucaucgagaagaugaacacccaguucaccgccgucggcaaggaguucaaccaccucgagaagcgcaucgagaaccucaacaagaaggucgacgacggcuuccucgacaucuggaccuacaacgccgagcuccucguccuccucgagaacgagcgcacccucgacuaccacgacuccaacgucaagaaccucuacgagaagguccgcaaccagcucaagaacaacgccaaggagaucggcaacggcugcuucgaguucuaccacaagugcgacaacaccugcauggaguccgucaagaacggcaccuacgacuaccccaaguacuccgaggaggccaagcucaaccgcgagaagaucgacggcgucaagcucgaguccacccgcaucuaccagauccucgccaucuacuccaccgucgccuccucccucguccucgucgucucccucggcgccaucuccuucuggaugugcuccaacggcucccuccagugccgcaucugcaucuga

SEQ ID NO: 105627 - RNA, 1701 nt, Artificial Sequence; identical to SEQ ID NO: 102851
  derived and/or modified CDS sequence (opt2) from hemagglutinin__InfluenzaA__AFN19983

SEQ ID NO: 105628 - RNA, 1701 nt, Artificial Sequence
  derived and/or modified CDS sequence (opt2) from hemagglutinin__InfluenzaA__AFN19993
augaaggccauccucgucguccuccucuacaccgucgccaccaccaacgccgacacccucugcaucggcuaccacgccaacaacuccaccgacaccgucgacaccguccucgagaagaacgucaccgucacccacuccgucaaccuccucgaggacaagcacaacggcaagcucugcaagcuccgcggcgucgccccccuccaccucggcaagugcaacaucgccggcuggauccucggcaaccccgagugcgagucccucuccaccgccuccuccugguccuacaucgucgagaccuccuccuccgacaacggcaccugcuaccccggcgacuucaucgacuacgaggagcuccgcgagcagcucuccuccgucuccuccuucgagcgcuucgagaucuuccccaagaccuccuccuggcccaaccacgacuccaacaagggcgucaccgccgccugcccccacgccggcgccaagggcuucuacaagaaccucaucuggcucgucaagaagggcaacuccuaccccaagcucuccaaguccuacaucaacgacaagggcaaggagguccucguccucuggggcauccaccaccccuccaccaccgccgaccagcagucccucuaccagaacgccgacaccuacgucuucgucggcaccucccgcuacuccaagaaguucaagcccgagaucgccauccgccccaagguccgcgaccaggagggccgcaugaacuacuacuggacccucgucgagcccggcgacaagaucaccuucgaggccaccggcaaccucgucgucccccgcuacgccuucgccauggagcgcaacgccggcuccggcaucaucaucuccgacacccccguccacgacugcaacaccaccugccagacccccaagggcgccaucaacaccucccuccccuuccagaacauccaccccaucaccaucggcaagugccccaaguacgucaaguccaccaagcuccgccucgccaccggccuccgcaacguccccuccauccagucccgcggccucuucggcgccaucgccggcuucaucgagggcggcuggaccggcauggucgacggcugguacggcuaccaccaccagaacgagcagggcuccggcuacgccgccgaccucaaguccacccagaacgccaucgacaagaucaccaacaaggucaacuccgucaucgagaagaugaacacccaguucaccgccgucggcaaggaguucaaccaccucgagaagcgcaucgagaaccucaacaagaaggucgacgacggcuuccucgacaucuggaccuacaacgccgagcuccucguccuccucgagaacgagcgcacccucgacuaccacgacuccaacgucaagaaccucuacgagaagguccgcaaccagcucaagaacaacgccaaggagaucggcaacggcugcuucgaguucuaccacaagugcgacaacaccugcauggaguccgucaagaacggcaccuacgacuaccccaaguacuccgaggaggccaagcucaaccgcgaggagaucgacggcgucaagcucgaguccacccgcaucuaccagauccucgccaucuacuccaccgucgccuccucccucguccucgucgucucccucggcgccaucuccuucuggaugugcuccaacggcucccuccagugccgcaucugcaucuga

SEQ ID NO: 105629 - RNA, 1701 nt, Artificial Sequence; identical to SEQ ID NO: 102851
  derived and/or modified CDS sequence (opt2) from hemagglutinin__InfluenzaA__AFN20000

SEQ ID NO: 105630 - RNA, 1701 nt, Artificial Sequence; identical to SEQ ID NO: 102858
  derived and/or modified CDS sequence (opt2) from hemagglutinin__InfluenzaA__AFN20006

SEQ ID NO: 105631 - RNA, 1701 nt, Artificial Sequence; identical to SEQ ID NO: 102490
  derived and/or modified CDS sequence (opt2) from hemagglutinin__InfluenzaA__AFN20012

SEQ ID NO: 105632 - RNA, 1701 nt, Artificial Sequence
  derived and/or modified CDS sequence (opt2) from hemagglutinin__InfluenzaA__AFN20018
augaaggccauccucgucguccuccucuacaccuucgccaccgccaacgccgacacccucugcaucggcuaccacgccaacaacuccaccgacaccgucgacaccguccucgagaagaacgucaccgucacccacuccgucaaccuccucgaggacaagcacaacggcaagcucugcaagcuccgcggcgucgccccccuccaccucggcaagugcaacaucgccggcuggauccucggcaaccccgagugcgagucccucuccaccgccuccuccugguccuacaucgucgagaccuccuccuccgacaacggcaccugcuaccccggcgacuucaucaacuacgaggagcuccgcgagcagcucuccuccgucuccuccuucgagcgcuucgagaucuuccccaagaccuccuccuggcccaaccacgacuccaacaagggcgucaccgccgccugcccccaggccggcgccaaguccuucuacaagaaccucaucuggcucgucaagaagggcaacuccuaccccaagcucuccaacuccuacaucaacgacaagggcaaggagguccucguccucuggggcauccaccaccccuccaccuccgccgaccagcagucccucuaccagaacgccgacgccuacgucuucgucggcaccuccaaguacuccaagaaguucaagcccgagaucgccguccgccccaagguccgcgaccaggagggccgcaugaacuacuacuggacccucgucgagcccggcgacaagaucaccuucgaggccaccggcaaccuccucgucccccgcuacgccuucgccauggagcgcaacgccggcuccggcaucaucaucuccgacacccccguccacgacugcaacaccaccugccagacccccaagggcgccaucaacaccucccuccccuuccagaacauccaccccaucaccaucggcaagugccccaaguacgucaaguccaccaagcuccgccucgccaccggccuccgcaacguccccuccauccagucccgcggccucuucggcgccaucgccggcuucaucgagggcggcuggaccggcauggucgacggcugguacggcuaccaccaccagaacgcccagggcuccggcuacgccgccgaccucaaguccacccagaacgccaucgacaagaucaccaacaaggucaacuccgucaucgagaagaugaacacccaguucaccgccgucggcaaggaguucaaccaccucgagaagcgcaucgagaaccucaacaagaaggucgacgacggcuuccucgacaucuggaccuacaacgccgagcuccucguccuccucgagaacgagcgcacccucgacuaccacgacuccaacgucaagaaccucuacgagaagguccgcucccagcucaagaacaacgccaaggagaucggcaacggcugcuucgaguucuaccacaagugcgacaacaccugcauggaguccgucaagaacggcaccuacgacuaccccaaguacuccgaggaggccaagcucaaccgcgaggagaucgacggcgucaagcucgaguccacccgcaucuaccagauccucgccaucuacuccaccgucgccuccucccucguccucgucgucucccucggcgccaucuccuucuggaugugcuccaacggcucccuccagugccgcaucugcaucuga

SEQ ID NO: 105633 - RNA, 1701 nt, Artificial Sequence; identical to SEQ ID NO: 102860
  derived and/or modified CDS sequence (opt2) from hemagglutinin__InfluenzaA__AFN20019

SEQ ID NO: 105634 - RNA, 1701 nt, Artificial Sequence; identical to SEQ ID NO: 102490
  derived and/or modified CDS sequence (opt2) from hemagglutinin__InfluenzaA__AFN20021

SEQ ID NO: 105635 - RNA, 1701 nt, Artificial Sequence; identical to SEQ ID NO: 102860
  derived and/or modified CDS sequence (opt2) from hemagglutinin__InfluenzaA__AFN20034

SEQ ID NO: 105636 - RNA, 1701 nt, Artificial Sequence; identical to SEQ ID NO: 102851
  derived and/or modified CDS sequence (opt2) from hemagglutinin__InfluenzaA__AFN20040

SEQ ID NO: 105637 - RNA, 1701 nt, Artificial Sequence; identical to SEQ ID NO: 105623
  derived and/or modified CDS sequence (opt2) from hemagglutinin__InfluenzaA__AFN20046

SEQ ID NO: 105638 - RNA, 1701 nt, Artificial Sequence; identical to SEQ ID NO: 102860
  derived and/or modified CDS sequence (opt2) from hemagglutinin__InfluenzaA__AFN20052

SEQ ID NO: 105639 - RNA, 1701 nt, Artificial Sequence; identical to SEQ ID NO: 102860
  derived and/or modified CDS sequence (opt2) from hemagglutinin__InfluenzaA__AFN20061

SEQ ID NO: 105640 - RNA, 1701 nt, Artificial Sequence
  derived and/or modified CDS sequence (opt2) from hemagglutinin__InfluenzaA__AFN20076
augaaggccauccucgucguccuccucuacaccuucgccaccgccaacgccgacacccucugcaucggcuaccacgccaacaacuccaccgacaccgucgacaccguccucgagaagaacgucaccgucacccacuccgucaaccuccucgaggacaagcacaacggcaagcucugcaagcuccgcggcgucgccccccuccaccucggcaagugcaacaucgccggcuggauccucggcaaccccgacugcgagucccucuccaccgccuccuccugguccuacaucgucgagaccuccuccuccgacaacggcaccugcuaccccggcgacuucaucgacuacgaggagcuccgcgagcagcucuccuccgucuccuccuucgagcgcuucgagaucuuccccaagaccuccuccuggcccaaccacgacuccaacaagggcgucaccgccgccugcccccacgccggcgccaaguccuucuacaagaaccucaucuggcucgucaagaagggcaacuccuaccccaagcucuccaaguccuacaucaacgacaagggcaaggagguccucguccucuggggcauccaccaccccuccaccaccgccgaccagcagucccucuaccagaacgccgacaccuacgucuucgucggcaccucccgcuacuccaagaaguucaagcccgagaucgccauccgccccaagguccgcgaccaggagggccgcaugaacuacuacuggacccucgucgagcccggcgacaagaucaccuucgaggccaccggcaaccucgucgucccccgcuacgccuucgccauggagcgcaacgccggcuccggcaucaucaucuccgacacccccguccacgacugcaacaccaccugccagacccccaagggcgccaucaacaccucccuccccuuccagaacauccaccccaucaccaucggcaagugccccaaguacgucaaguccaccaagcuccgccucgccaccggccuccgcaacguccccuccauccagucccgcggccucuucggcgccaucgccggcuucaucgagggcggcuggaccggcauggucgacggcugguacggcuaccaccaccagaacgagcagggcuccggcuacgccgccgaccucaaguccacccagaacgccaucgacaagaucaccaacaaggucaacuccgucaucgagaagaugaacacccaguucaccgccgucggcaaggaguucaaccaccucgagaagcgcaucgagaaccucaacaagaaggucgacgacggcuuccucgacaucuggaccuacaacgccgagcuccucguccuccucgagaacgagcgcacccucgacuaccacgacuccaacgucaagaaccucuacgagaagguccgcaaccagcucaagaacaacgccaaggagaccggcaacggcugcuucgaguucuaccacaagugcgacaacaccugcauggaguccgucaagaacggcaccuacgacuaccccaaguacuccgaggaggccaagcucaaccgcgaggagaucgacggcgucaagcucgaguccacccgcaucuaccagauccucgccaucuacuccaccgucgccuccucccucguccucgucgucucccucggcgccaucuccuucuggaugugcuccaacggcucccuccagugccgcaucugcaucuga

SEQ ID NO: 105641 - RNA, 1701 nt, Artificial Sequence
  derived and/or modified CDS sequence (opt2) from hemagglutinin__InfluenzaA__AFN20081
augaaggccauccucgucguccuccucuacaccuucgccaccgccaacgccgacacccucugcaucggcuaccacgccaacaacuccaccgacaccgucgacaccguccucgagaagaacgucaccgucacccacuccgucaaccuccucgaggacaagcacaacggcaagcucugcaagcuccgcggcgucgccccccuccaccucggcaagugcaacaucgccggcuggauccucggcaaccccgagugcgagucccucuccaccgccuccuccugguccuacaucgucgagaccuccuccuccgacaacggcaccugcuaccccggcgacuucaucgacuacgaggagcuccgcgagcagcucuccuccgucuccuccuucgagcgcuucgagaucuuccccaagaccuccuccuggcccaaccacgacuccaacaagggcgucaccgccgccugcccccacgccggcgccaaguccuucuacaagaaccucaucuggcucgucaagaagggcaacuccuaccccaagaucuccaaguccuacaucaacgacaagggcaaggagguccucguccucuggggcauccaccaccccuccaccaccgccgaccagcagucccucuaccagaacgccgacaccuacgucuucgucggcaccucccgcuacuccaagaaguucaagcccgagaucgccauccgccccaagguccgcgaccaggagggccgcaugaacuacuacuggacccucgucgagcccggcgacaagaucaccuucgaggccaccggcaaccucgucaucccccgcuacgccuucgccauggagcgcaacgccggcuccggcaucaucaucuccgacacccccguccacgacugcaacaccaccugccagacccccaagggcgccaucaacaccucccuccccuuccagaacauccaccccaucaccaucggccgcugccccaaguacgucaaguccaccaagcuccgccucgccaccggccuccgcaacguccccuccauccagucccgcggccucuucggcgccaucgccggcuucaucgagggcggcuggaccggcauggucgacggcugguacggcuaccaccaccagaacgagcagggcuccggcuacgccgccgaccucaaguccacccagaacgccaucgacaagaucaccaacaaggucaacuccgucaucgagaagaugaacacccaguucaccgccgucggcaaggaguucaaccaccucgagaagcgcaucgagaaccucaacaagaaggucgacgacggcuuccucgacaucuggaccuacaacgccgagcuccucguccuccucgagaacgagcgcacccucgacuaccacgacuccaacgucaagaaccucuacgagaagguccgcaaccagcucaagaacaacgccaaggagaccggcaacggcugcuucgaguucuaccacaagugcgacaacaccugcauggaguccgucaagaacggcaccuacgacuaccccaaguacuccgaggaggccaagcucaaccgcgaggucaucgacggcgucaagcucgaguccacccgcaucuaccagauccucgccaucuacuccaccgucgccuccucccucguccucgucgucucccucggcgccaucuccuucuggaugugcuccaacggcucccuccagugccgcaucugcaucuga

SEQ ID NO: 105642 - RNA, 1701 nt, Artificial Sequence; identical to SEQ ID NO: 102860
  derived and/or modified CDS sequence (opt2) from hemagglutinin__InfluenzaA__AFN20092

SEQ ID NO: 105643 - RNA, 1701 nt, Artificial Sequence; identical to SEQ ID NO: 105622
  derived and/or modified CDS sequence (opt2) from hemagglutinin__InfluenzaA__AFN20099

SEQ ID NO: 105644 - RNA, 1701 nt, Artificial Sequence
  derived and/or modified CDS sequence (opt2) from hemagglutinin__InfluenzaA__AFN20112
augaaggccauccucgucguccuccucuacaccuucgccaccgccaacgccgacacccucugcaucggcuaccacgccaacaacuccaccgacaccgucgacaccguccucgagaagaacgucaccgucacccacuccgucaaccuccucgaggacaagcacaacggcaagcucugcaagcuccgcggcgucgccccccuccaccucggcaagugcaacaucgccggcuggauccucggcaaccccgagugcaagucccucuccaccgccuccuccugguccuacaucgucgagaccuccuccuccgacaacggcaccugcuaccccggcgacuucaucgacuacgaggagcuccgcgagcagcucuccuccgucuccuccuucgagcgcuucgagaucuuccccaagaccuccuccuggcccaaccacaaccccaacaagggcgucaccgccgccugcccccacgccggcgccaaguccuucuacaagaaccucaucuggcucgucaagaacggcaacuccuaccccaagcucaacaccuccuacaucaacgacaagggcaaggagguccucguccucuggggcauccaccaccccuccaccuccgccgaccagcagucccucuaccagaacgccgacgccuacgccuucgucggcaccucccgcuacuccaagaaguucaagcccgagaucgccauccgccccaagguccgcgaccaggagggccgcaugaacuacuacuggacccucgucgagcccggcgacaagaucaccuucgaggccaccggcaaccucgucgucccccgcuacgccuucgccauggagcgcaacgccggcuccggcaucaucaucuccgacaccuccguccacgacugcaacaccaccugccagacccccaagggcgccaucaacaccucccuccccuuccagaacguccaccccaucaccaucggcaagugccccaaguacgucaaguccaccaagcuccgccucgccaccggccuccgcaacguccccuccauccagucccgcggccucuucggcgccaucgccggcuucaucgagggcggcuggaccggcauggucgacggcugguacggcuaccaccaccagaacgagcagggcuccggcuacgccgccgaccucaaguccacccagaacgccuucgacaagaucaccaacaaggucaacuccgucaucgagaagaugaacacccaguucaccgccgucggcaaggaguucaaccaccucgagaagcgcaucgagaaccucaacaagaaggucgacgacggcuuccucgacaucuggaccuacaacgccgagcuccucguccuccucgagaacgagcgcacccucgacuaccacgacuccaacgucaagaaccucuacgagaagguccgcucccagcucaagaccaacgccaaggagaucggcaacggcugcuucgaguucuaccacaagugcgacaacaccugcauggaguccgucaagaacggcaccuacgacuaccccaaguacuccgaggaggccaagcucaaccgcgaggagaucgacggcgucaagcucgaguccacccgcaucuaccagauccucgccaucuacuccaccgucgccuccucccucguccucgucgucucccucggcgccaucuccuucuggaugugcuccaacggcucccuccagugccgcaucugcaucuga

SEQ ID NO: 105645 - RNA, 1701 nt, Artificial Sequence
  derived and/or modified CDS sequence (opt2) from hemagglutinin__InfluenzaA__AFN87924
augaaggccauccucgucguccuccucuacaccuucgccaccgccaacgccgacacccucugcaucggcuaccacgccaacaacuccaccgacaccgucgacaccguccucgagaagaacgucaccgucacccacuccgucaaccuccucgaggacaagcacaacggcaagcucugcaagcuccgcggcgucgccccccuccaccucggcaagugcaacaucgccggcuggauccucggcaaccccgagugcgagucccucuccaccgccuccuccugguccuacaucgucgagaccuccuccuccgacaacggcaccugcuaccccggcgacuucaucgacuacgaggagcuccgcgagcagcucuccuccgucuccuccuucgagcgcuucgagaucuuccccaagaccuccuccuggcccaaccacgaccccaacaagggcgucaccgccgccugcccccacgccggcgccaaguccuucuacaagaaccucaucuggcucgucaagaagggcaacuccuaccccaagcucuccaccuccuacaucaacgacaagcgcaaggagguccucguccucuggggcauccaccaccccuccaccuccgccgaccagcagucccucuaccagaacgccgacgccuacgccuucgucggcaccucccgcuacuccaagaaguucaagcccgagaucgccauccgccccaagguccgcgaccaggagggccgcaugaacuacuacuggacccucgucgagcccggcgacaagaucaccuucgaggccaccggcaaccucgucgucccccgcuacgccuucgccauggagcgcaacgccggcuccggcaucaucaucuccgacaccuccguccacgacugcaacaccaccugccagacccccaagggcgccaucaacaccucccuccccuuccagaacguccaccccaucaccaucggcaagugccccaaguacgucaaguccaccaagcuccgccucgccaccggccuccgcaacguccccuccauccagucccgcggccucuucggcgccaucgccggcuucaucgagggcggcuggaccggcauggucgacggcugguacggcuaccaccaccagaacgagcagggcuccggcuacgccgccgaccucaaguccacccagaacgccuucgacaagaucaccaacaaggucaacuccgucaucgagaagaugaacacccaguucaccgccgucggcaaggaguucaaccaccucgagaagcgcaucgagaaccucaacaagaaggucgacgacggcuuccucgacaucuggaccuacaacgccgagcuccucguccuccucgagaacgagcgcacccucgacuaccacgacuccaacgucaagaaccucuacgagaagguccgcucccagcucaagaacaacgccaaggagaucggcaacggcugcuucgaguucuaccacaagugcgacaacaccugcauggaguccgucaagaacggcaccuacgacuaccccaaguacuccgaggaggccaagcucaaccgcgaggagaucgacggcgucaagcucgaguccacccgcaucuaccagauccucgccaucuacuccaccgucgccuccucccucguccucgucgucucccucggcgccaucuccuucuggaugugcuccaacggcucccuccagugccgcaucugcaucuga

SEQ ID NO: 105646 - RNA, 1701 nt, Artificial Sequence; identical to SEQ ID NO: 98705
  derived and/or modified CDS sequence (opt2) from hemagglutinin__InfluenzaA__AFN87926

SEQ ID NO: 105647 - RNA, 1701 nt, Artificial Sequence
  derived and/or modified CDS sequence (opt2) from hemagglutinin__InfluenzaA__AFN87927
augaaggccauccucgucguccuccucuacaccuucgccaccgccaacgccgacacccucugcaucggcuaccacgccaacaacuccaccgacaccgucgacaccguccucgagaagaacgucaccgucacccacuccgucaaccuccucgaggacaagcacaacggcaagcucugcaagcuccgcggcgucgccccccuccaccucggcaagugcaacaucgccggcuggauccucggcaaccccgagugcgagucccucuccaccgccuccuccugguccuacaucgucgagaccuccuccuccgacaacggcaccugcuaccccggcgacuucaucgacuacgaggagcuccgcgagcagcucuccuccgucuccuccuucgagcgcuucgagaucuuccccaagaccuccuccuggcccaaccacgacuccaacaagggcgucaccgccgccugcccccacgccggcgccaaguccuucuacaagaaccucaucuggcucgucaagaagggcaacuccuaccccaagcucuccaaguccuacaucaacgacaagcgcaaggagguccucguccucuggggcauccaccaccccuccaccuccgccgaccagcagucccucuaccagaacgccgacgccuacgucuucgucggcaccucccgcuacuccaagaaguucaagcccgagaucgccauccgccccaagguccgcgaccaggagggccgcaugaacuacuacuggacccucgucgagcccggcgacaagaucaccuucgaggccaccggcaaccucgucgucccccgcuacgccuucgccauggagcgcaacgccggcuccggcaucaucaucuccggcacccccguccacgacugcaacaccaccugccagacccccaagggcgccaucaacaccucccuccccuuccagaacauccaccccaucaccaucggcaagugccccaaguacgucaaguccaccaagcuccgccucgccaccggccuccgcaacguccccuccauccagucccgcggccucuucggcgccaucgccggcuucaucgagggcggcuggaccggcauggucgacggcugguacggcuaccaccaccagaacgagcagggcuccggcuacgccgccgaccucaaguccacccagaacgccaucgacaagaucaccaaccgcgucaacuccgucaucgagaagaugaacacccaguucaccgccgucggcaaggaguucaaccaccucgagaagcgcaucgagaaccucaacaagaaggucgacgacggcuuccucgacaucuggaccuacaacgccgagcuccucguccuccucgagaacgagcgcacccucgacuaccacgacuccaacgucaagaaccucuacgagaagguccgcucccagcucaagaacaacgccaaggagaucggcaacggcugcuucgaguucuaccacaagugcgacaacaccugcauggaguccgucaagaacggcaccuacgacuaccccaaguacuccgaggaggccaagcucaaccgcgaggagaucgacggcgucaagcucgaguccacccgcaucuaccagauccucgccaucuacuccaccgucgccuccucccucguccucgucgucucccucggcgccaucuccuucuggaugugcuccaacggcucccuccagugccgcaucugcaucuga

SEQ ID NO: 105648 - RNA, 1701 nt, Artificial Sequence
  derived and/or modified CDS sequence (opt2) from hemagglutinin__InfluenzaA__AFN87928
augaaggccauccucgucguccuccucuacaccuucgccaccgccaacgccgacacccucugcaucggcuaccacgccaacaacuccaccgacaccgucgacaccguccucgagaagaacgucaccgucacccacuccgucaaccuccucgaggacaagcacaacggcaagcucugcaagcuccgcggcgucgccccccuccaccucggcaagugcaacaucgccggcuggauccucggcaaccccgagugcgagucccucuccaccgccuccuccugguccuacaucgucgagaccuccuccuccgacaacggcaccugcuaccccggcgacuucaucgacuacgaggagcuccgcgagcagcucuccuccgucuccuccuucgagcgcuucgagaucuuccccaagaccuccuccuggcccaaccacgacuccaacaagggcgucaccgccgccugcccccacgccggcgccaaguccuucuacaagaaccucaucuggcucgucaagaagggcaacuccuaccccaagcucuccaaguccuacaucaacgacaagggcaaggagguccucguccucuggggcauccaccaccccuccaccuccgccgaccagcagucccucuaccagaacgccgacgccuacgucuucgucggcaccucccgcuacuccaagaaguucaagcccgagaucgccauccgccccaagguccgcgaccgcgagggccgcaugaacuacuacuggacccucgucgagcccggcgacaagaucaccuucgaggccaccggcaaccucgucgucccccgcuacgccuucgccauggagcgcaacgccggcuccggcaucaucaucuccgacacccccguccacgacugcaacaccaccugccagacccccaagggcgccaucaacaccucccuccccuuccagaacauccaccccaucaccaucggcaagugccccaaguacgucaaguccaccaagcuccgccucgccaccggccuccgcaacguccccuccauccagucccgcggccucuucggcgccaucgccggcuucaucgagggcggcuggaccggcauggucgacggcugguacggcuaccaccaccagaacgagcagggcuccggcuacgccgccgaccucaaguccacccagaacgccaucgacaagaucaccaacaaggucaacuccgucaucgagaagaugaacacccaguucaccgccgucggcaaggaguucaaccaccucgagaagcgcaucgagaaccucaacaagaaggucgacgacggcuuccucgacaucuggaccuacaacgccgagcuccucguccuccucgagaacgagcgcacccucgacuaccacgacuccaacgucaagaaccucuacgagaagguccgcucccagcucaagaacaacgccaaggagaucggcaacggcugcuucgaguucuaccacaagugcgacaacaccugcauggaguccgucaagaacggcaccuacgacuaccccaaguacuccgaggaggccaagcucaaccgcgaggagaucgacggcgucaagcucgaguccacccgcaucuaccagauccucgccaucuacuccaccgucgccuccucccucguccucgccgucucccucggcgccaucuccuucuggaugugcuccaacggcucccuccagugccgcaucugcaucuga

SEQ ID NO: 105649 - RNA, 1701 nt, Artificial Sequence; identical to SEQ ID NO: 99869
  derived and/or modified CDS sequence (opt2) from hemagglutinin__InfluenzaA__AFN87929

SEQ ID NO: 105650 - RNA, 1701 nt, Artificial Sequence; identical to SEQ ID NO: 99869
  derived and/or modified CDS sequence (opt2) from hemagglutinin__InfluenzaA__AFN87930

SEQ ID NO: 105651 - RNA, 1701 nt, Artificial Sequence
  derived and/or modified CDS sequence (opt2) from hemagglutinin__InfluenzaA__AFN87931
augaaggccauccucgucguccuccucuacaccuucgccaccgccaacgccgacacccucugcaucggcuaccacgccaacaacuccaccgacaccgucgacaccguccucgagaagaacgucaccgucacccacuccgucaaccuccucgaggagaagcacaacggcaagcucugcaagcuccgcggcgucgccccccuccaccucggcaagugcaacaucgccggcuggauccucggcaaccccgagugcgagucccucuccaccgccuccuccugguccuacaucgucgagaccuccuccuccgacaacggcaccugcuaccccggcgacuucaucgacuacgaggagcuccgcgagcagcucuccuccgucuccuccuucgagcgcuucgagaucuuccccaagaccuccuccuggcccaaccacgacuccaacaagggcgucaccgccgccugcccccacgccggcgccaaguccuucuacaagaaccucaucuggcucgucaagaagggcaacuccuaccccaagcucuccaaguccuacaucaacgacaagggcaaggagguccucguccucuggggcauccaccaccccuccaccuccgccgaccagcaguccaucuaccagaacgccgacgccuacgucuucgucggcaccucccgcuacuccaagaaguucaagcccgagaucgccauccgccccaagguccgcgaccaggagggccgcaugaacuacuacuggacccucgucgagcccggcgacaagaucaccuucgaggccaccggcaaccucgucgucccccgcuacgccuucaccauggagcgcaacgccggcuccggcaucaucaucuccgacacccccguccacgacugcaacaccaccugccagacccccaagggcgccaucaacaccucccuccccuuccagaacauccaccccaucaccaucggcaagugccccaaguacgucaaguccaccaagcuccgccucgccaccggccuccgcaacguccccuccauccagucccgcggccucuucggcgccaucgccggcuucaucgagggcggcuggaccggcauggucgacggcugguacggcuaccaccaccagaacgagcagggcuccggcuacgccgccgaccucaaguccacccagaacgccaucgacaagaucaccaacaaggucaacuccgucaucgagaagaugaacacccaguucaccgccgucggcaaggaguucaaccaccucgagaagcgcaucgagaaccucaacaagaaggucgacgacggcuuccucgacaucuggaccuacaacgccgagcuccucguccuccucgagaacgagcgcacccucgacuaccacgacuccaacgucaagaaccucuacgagaagguccgcucccagcucaagaacaacgccaaggagaucggcaacggcugcuucgaguucuaccacaagugcgacaacaccugcauggaguccgucaagaacggcaccuacgacuaccccaaguacuccgaggaggccaagcucaaccgcgaggagaucgacggcgucaagcucgaguccacccgcaucuaccagauccucgccaucuacuccaccgucgccuccucccucguccucgucgucucccucggcgccaucuccuucuggaugugcuccaacggcucccuccagugccgcaucugcaucuga

SEQ ID NO: 105652 - RNA, 1701 nt, Artificial Sequence
  derived and/or modified CDS sequence (opt2) from hemagglutinin__InfluenzaA__AFN87932
auggaggccauccucgucguccuccucuacaccuucgccaccgccaacgccgacacccucugcaucggcuaccacgccaacaacuccaccgacaccgucgacaccguccucgagaagaacgucaccgucacccacuccgucaaccuccucgaggacaagcacaacggcaagcucugcaagcuccgcggcgucgccccccuccaccucggcaagugcaacaucgccggcuggauccucggcaaccccgagugcgagucccucuccaccgccuccuccugguccuacaucgucgagaccuccuccuccgacaacggcaccugcuaccccggcgacuucaucgacuacgaggagcuccgcgagcagcucuccuccgucuccuccuucgagcgcuucgagaucuuccccaagaccuccuccuggcccaaccacgacuccaacaagggcgucaccgccgccugcccccacgccggcgccaaguccuucuacaagaaccucaucuggcucgucaagaagggcaacuccuaccccaagcucuccaaguccuacaucaacgacaagggcaaggagguccucguccucuggggcauccaccaccccuccaccuccgccgaccagcagucccucuaccagaacgccgacgccuacgucuucgucggcuccucccgcuacuccaagaaguucaagcccgagaucgccauccgccccaagguccgcgaccgcgagggccgcaugaacuacuacuggacccucgucgagcccggcgacaagaucaccuucgaggccaccggcaaccucgucgucccccgcuacgccuucgccauggagcgcaacgccggcuccggcaucaucaucuccgacacccccguccacgacugcaacaccaccugccagacccccaagggcgccaucaacaccucccuccccuuccacaacauccaccccaucaccaucggcaagugccccaaguacgucaaguccaccaagcuccgccucgccaccggccuccgcaacguccccuccauccagucccgcggccucuucggcgccaucgccggcuucaucgagggcggcuggaccggcauggucgacggcugguacggcuaccaccaccagaacgagcagggcuccggcuacgccgccgaccucaaguccacccagaacgccaucgacgagaucaccaacaaggucaacuccgucaucgagaagaugaacacccaguucaccgccgucggcaaggaguucaaccaccucgagaagcgcaucgagaaccucaacaagaaggucgacgacggcuuccucgacaucuggaccuacaacgccgagcuccucguccuccucgagaacgagcgcacccucgacuaccacgacuccaacgucaagaaccucuacgagaagguccgcucccagcucaagaacaacgccaaggagaucggcaacggcugcuucgaguucuaccacaagugcgacaacaccugcauggaguccgucaagaacggcaccuacgacuaccccaaguacuccgaggaggccaagcucaaccgcgaggagaucgacggcgucaagcucgaguccacccgcaucuaccagauccucgccaucuacuccaccgucgccuccucccucguccucgucgucucccucggcgccaucuccuucuggaugugcuccaacggcucccuccagugccgcaucugcaucuga

SEQ ID NO: 105653 - RNA, 1701 nt, Artificial Sequence; identical to SEQ ID NO: 99869
  derived and/or modified CDS sequence (opt2) from hemagglutinin__InfluenzaA__AFN87933

SEQ ID NO: 105654 - RNA, 1701 nt, Artificial Sequence
  derived and/or modified CDS sequence (opt2) from hemagglutinin__InfluenzaA__AFN87934
augaaggccauccucgucgucaugcucuacaccuucgccaccgccaacgccgacacccucugcaucggcuaccacgccaacaacuccaccgacaccgucgacaccguccucgagaagaacgucaccgucacccacuccgucaaccuccucgaggacaagcacaacggcaagcucugcaagcuccgcggcgucgccccccuccagcucggcaagugcaacaucgccggcuggauccucggcaaccccgagugcgagucccucuccaccgccuccuccugguccuacaucgucgagaccuccuccuccgacaacggcaccugcuaccccggcgacuucaucgacuacgaggagcuccgcgagcagcucuccuccgucuccuccuucgagcgcuucgagaucuuccccaagaccuccuccuggcccaaccacgacuccaacaagggcgucaccgccgccugcccccacgccggcgccaagggcuucuacaagaaccucaucuggcucgucaagaagggcaacuccuaccccaagcucuccaaguccuacaucaacgacaagggcaaggagguccucguccucuggggcauccaccaccccuccaccuccgccgaccagcagucccucuaccagaacgccgacaccuacgucuucgucggcaccucccgcuacuccaagaaguucaagcccgagaucgccauccgccccaagguccgcgaccaggagggccgcaugaacuacuacuggacccucgucgagcccggcgacaagaucaccuucgaggccaccggcaaccucgucgucccccgcuacgccuucgccauggagcgcaacgccggcuccggcaucaucaucuccgacacccccguccacgacugcaacaccaccugccagacccccaagggcgccaucaacaccucccuccccuuccagaacauccaccccaucaccaucggcaagugccccaaguacgucaaguccaccaagcuccgccucgccaccggccuccgcaacguccccuccauccagucccgcggccucuucggcgccaucgccggcuucaucgagggcggcuggaccggcauggucgacggcugguacggcuaccaccaccagaacgagcagggcuccggcuacgccgccgaccucaaguccacccagaacgccaucgacaagaucaccaacaaggucaacuccgucaucgagaagaugaacacccaguucaccgccgucggcaaggaguucaaccaccucgagaagcgcaucgagaaccucaacaagaaggucgacgacggcuuccucgacaucuggaccuacaacgccgagcuccucguccuccucgagaacgagcgcacccucgacuaccacgacuccaacgucaagaaccucuacgagaagguccgcucccagcucaagaacaacgccaaggagaucggcaacggcugcuucgaguucuaccacaagugcgacaacaccugcauggaguccgucaagaacggcaccuacgacuaccccaaguacuccgaggaggccaagcucaaccgcgaggagaucgacggcgucaagcucgaguccacccgcaucuaccagauccucgccaucuacuccaccgucgccuccucccucguccucgucgucucccucggcgccaucuccuucuggaugugcuccaacggcucccuccagugccgcaucugcaucuga

SEQ ID NO: 105655 - RNA, 1701 nt, Artificial Sequence
  derived and/or modified CDS sequence (opt2) from hemagglutinin__InfluenzaA__AFN87936
augaaggccauccucgucguccuccucuacaccuucgccaccgccaacgccgacacccucugcaucggcuaccacgccaacaacuccaccgacaccgucgacaccguccucgagaagaacgucaccgucacccacuccgucaaccuccucgaggacaagcacaacggcaagcucugcaagcuccgcggcgucgccccccuccaccucggcaagugcaacaucgccggcuggauccucggcaaccccgagugcgagucccucuccaccgccuccuccugguccuacaucgucgagaccuccaucuccgacaacggcaccugcuaccccggcgacuucaucgacuacgaggagcuccgcgagcagcucuccuccgucuccuccuucgagcgcuucgagaucuuccccaagaccuccuccuggcccaaccacgaccccaacaagggcgucaccgccgccugcccccacgccggcgccaaguccuucuacaagaaccucaucuggcucgucaagaagggcaacuccuaccccaagcucuccaccuccuacaucaacgacaagggcaaggagguccucguccucuggggcauccaccaccccuccaccuccgccgaccagcagucccucuaccagaacgccgacgccuacgccuucgucggcaccucccgcuacuccaagaaguucaagcccgagaucgccauccgccccaagguccgcgaccaggagggccgcaugaacuacuacuggacccucgucgagcccggcgacaagaucaccuucgaggccaccggcaaccucgucgucccccgcuacgccuucgccauggagcgcaacgccggcuccggcaucaucaucuccgacaccuccguccacgacugcaacaccaccugccagacccccaagggcgccaucaacaccucccuccccuuccagaacguccaccccaucaccaucggcaagugccccaaguacgucaaguccaccaagcuccgccucgccaccggccuccgcaucguccccuccauccagucccgcggccucuucggcgccaucgccggcuucaucgagggcggcuggaccggcauggucgacggcugguacggcuaccaccaccagaacgagcagggcuccggcuacgccgccgaccucaaguccacccagaacgccuucgacaagaucaccaacaaggucaacuccgucaucgagaagaugaacacccaguucaccgccgucggcaaggaguucaaccaccucgagaagcgcaucgagaaccucaacaagaaggucgacgacggcuuccucgacaucuggaccuacaacgccgagcuccucguccuccucgagaacgagcgcacccucgacuaccacgacuccaacgucaagaaccucuacgagaagguccgcucccagcucaagaacaacgccaaggagaucggcaacggcugcuucgaguucuaccacaagugcgacaacaccugcauggaguccgucaagaacggcaccuacgacuaccccaaguacuccgaggaggccaagcucaaccgcgaggagaucgacggcgucaagcucgaguccacccgcaucuaccagauccucgccaucuacuccaccgucgccuccucccucguccucgucgucucccucggcgccaucuccuucuggaugugcuccaacggcucccuccagugccgcaucugcaucuga

SEQ ID NO: 105656 - RNA, 1701 nt, Artificial Sequence
  derived and/or modified CDS sequence (opt2) from hemagglutinin__InfluenzaA__AFN87938
augaaggccauccucgucguccuccucuacaccuucgccaccgccaacgccgacacccucugcaucggcuaccacgccaacaacuccaccgacaccgucgacaccguccucgagaagaacgucaccgucacccacuccgucaaccuccucgaggacaagcacaacggcaagcucugcaagcuccgcggcgucgccccccuccaccucggcaagugcaacaucgccggcuggauccucggcaaccccgagugcgagucccucuccaccgccuccuccugguccuacaucgucgagaccuccuccuccgacaacggcaccugcuaccccggcgacuucaucgacuacgaggagcuccgcgagcagcucuccuccgucuccuccuucgagcgcuucgagaucuuccccaagaccuccuccuggcccaaccacgaccccaacaagggcgucaccgccgccugcccccacgccggcgccaaguccuucuacaagaaccucaucuggcucgucaagaagggcaacuccuaccccaagcucuccaaguccuacaucaacgacaagggcaaggagguccucguccucuggggcauccaccaccccuccaccuccgccgaccagcagucccucuaccagaacgccgacgccuacgucuucgucggcaccucccgcuacuccaagaaguucaagcccgagaucgccauccgccccaagguccgcgaccaggagggccgcaugaacuacuacuggacccucgucgagcccggcgacaagaucaccuucgaggccaccggcaaccucgucgucccccgcuacgccuucgccauggagcgcaacgccggcuccggcaucaucaucuccgacacccccguccacgacugcaacaccaccugccagaccuccaagggcgccaucaacaccucccuccccuuccagaacauccaccccaucaccaucggcaagugccccaaguacgucaaguccaccaagcuccgccucgccaccggccuccgcaacguccccuccauccagucccgcggccucuucggcgccaucgccggcuucaucgagggcggcuggaccggcauggucgacggcugguacggcuaccaccaccagaacgagcagggcuccggcuacgccgccgaccucaaguccacccagaacgccaucgacgagaucaccaacaaggucaacuccgucaucgagaagaugaacacccaguucaccgccgucggcaaggaguucaaccaccucgagaagcgcaucgagaaccucaacaagaaggucgacgacggcuuccucgacaucuggaccuacaacgccgagcuccucguccuccucgagaacgagcgcacccucgacuaccacgacuccaacgucaagaaccucuacgagaagguccgcaaccagcucaagaacaacgccaaggagaucggcaacggcugcuucgaguucuaccacaagugcgacaacaccugcauggaguccgucaagaacggcaccuacgacuaccccaaguacuccgaggaggccaagcucaaccgcgaggagaucgacggcgucaagcucgaguccacccgcaucuaccagauccucgccaucuacuccaccgucgccuccucccucguccucgucgucucccucggcgccaucuccuucuggaugugcuccaacggcucccuccagugccgcaucugcaucuga

SEQ ID NO: 105657 - RNA, 1701 nt, Artificial Sequence
  derived and/or modified CDS sequence (opt2) from hemagglutinin__InfluenzaA__AFN87939
augaaggccauccucgucguccuccucuacaccuucgccaccgccaacgccgacacccucugcaucggcuaccacgccaacaacuccaccgacaccgucgacaccguccucgagaagaacgucaccgucacccacuccgucaaccuccucgaggacaagcacaacggcaagcucugcaagcuccgcggcgucgccccccuccaccucggcaagugcaacaucgccggcuggauccucggcaaccccgagugcgagucccucuccaccgccuccuccugguccuacaucgucgagaccuccuccuccgacaacggcaccugcuaccccggcgacuucaucgacuacgaggagcuccgcgagcagcucuccuccgucuccuccuucgagcgcuucgagaucuuccccaagaccuccuccuggcccaaccacgaccccaacaagggcgucaccgccgccugcccccacgccggcgccaaguccuucuacaagaaccucaucuggcucgucaagaagggcaacuccuaccccaagcucuccaccuccuacaucaacgacaagggcaaggagguccucguccucuggggcauccaccaccccuccaccuccgccgaccagcagucccucuaccagaacgccgacgccuacgccuucgucggcaccucccgcuacuccaagaaguucaagcccgagaucgccauccgccccaagguccgcgaccaggagggccgcaugaacuacuacuggacccucgucgagcccggcgacaagaucaccuucgaggccaccggcaaccucgucgucccccgcuacgccuucgccauggagcgcaacgccggcuccggcaucaucaucuccgacaccuccguccacgacugcaacaccaccugccagacccccaagggcgccaucaacaccucccuccccuuccagaacguccaccccaucaccaucggcaagugccccaaguacgucaaguccaccaagcuccgccucgccaccggccuccgcaacguccccuccauccagucccgcggccucuucggcgccaucgccggcuucaucgagggcggcuggaccggcauggucgacggcugguacggcuaccaccaccagaacgagcagggcuccggcuacgccgccgaccucaaguccacccagaacgccaucgacgagaucaccaacaaggucaacuccgucaucgagaagaugaacacccaguucaccgccgucggcaaggaguucaaccaccucgagaagcgcaucgagaaccucaacaagaaggucgacgacggcuuccucgacaucuggaccuacaacgccgagcuccucguccuccucgagaacgagcgcacccucgacuaccacgacuccaacgucaagaaccucuacgagaagguccgcucccagcucaagaacaacgccaaggagaucggcaacggcugcuucgaguucuaccacaagugcgacaacaccugcauggaguccgucaagaacggcaccuacgacuaccccaaguacuccgaggaggccaagcucaaccgcgaggagaucgacggcgucaagcucgaguccacccgcaucuaccagauccucgccaucuacuccaccgucgccuccucccucguccucgucgucucccucggcgccaucuccuucuggaugugcuccaacggcucccuccagugccgcaucugcaucuga

SEQ ID NO: 105658 - RNA, 1701 nt, Artificial Sequence
  derived and/or modified CDS sequence (opt2) from hemagglutinin__InfluenzaA__AFN87941
augaaggccauccucgucguccuccucuacaccuucgccaccgccaacgccgacacccucugcaucggcuaccacgccaacaacuccaccgacaccgucgacaccguccucgagaagaacgucaccgucacccacuccgucaaccuccucgaggacaagcacaacggcaagcucugcaagcuccgcggcgucgccccccuccaccucggcaagugcaacaucgccggcuggauccucggcaaccccgagugcgagucccucuccaccgccuccuccugguccuacaucgucgagaccuccuccuccgacaacggcaccugcuaccccggcgacuucaucgacuacgaggagcuccgcgagcagcucuccuccgucuccuccuucgagcgcuucgagaucuuccccaagaccuccuccuggcccaaccacgaccccaacaagggcgucaccgccgccugcccccacgccggcgccaaguccuucuacaagaaccucaucuggcucgucaagaagggcaacuccuaccccaagcucuccaaguccuacaucaacgacaagggcaaggagguccucguccucuggggcauccaccaccccuccaccuccgccgaccagcagucccucuaccagaacgccgacgccuacgucuucgucggcaccucccgcuacuccaagaaguucaagcccgagaucgccauccgccccaagguccgcgaccaggagggccgcaugaacuacuacuggacccucgucgagcccggcgacaagaucaccuucgaggccaccggcaaccucgucgucccccgcuacgccuucgccauggagcgcaacgccggcuccggcaucaucaucuccgacacccccguccacgacugcaacaccaccugccagacccccaagggcgccaucaacaccucccuccccuuccagaacauccaccccaucaccaucggcaagugccccaaguacgucaaguccaccaagcuccgccucgccaccggccuccgcaacguccccuccauccagucccgcggccucuucggcgccaucgccggcuucaucgagggcggcuggaccggcauggucgacggcugguacggcuaccaccaccagaacgagcagggcuccggcuacgccgccgaccucaaguccacccagaacgccaucgacgagaucaccaacaaggucaacuccgucaucgagaagaugaacacccaguucaccgccgucggcaaggaguucaaccaccucgagaagcgcaucgagaaccucaacaagaaggucgacgacggcuuccucgacaucuggaccuacaacgccgagcuccucguccuccucgagaacgagcgcacccucgacuaccacgacuccaacgucaagaaccucuacgagaagguccgcaaccagcucaagaacaacgccaaggagaucggcaacggcugcuucgaguucuaccacaagugcgacaacaccugcauggaguccgucaagaacggcaccuacgacuaccccaaguacuccgaggaggccaagcucaaccgcgaggagaucgacggcgucaagcucgaguccacccgcaucuaccagauccucgccaucuacuccaccgucgccuccucccucguccucgucgucucccucggcgccaucuccuucuggaugugcuccaacggcucccuccagugccgcaucugcaucuga

SEQ ID NO: 105659 - RNA, 1701 nt, Artificial Sequence
  derived and/or modified CDS sequence (opt2) from hemagglutinin__InfluenzaA__AFN87943
augaaggccauccucgucguccuccucuacaccuucgccaccgccaacgccgacacccucugcaucggcuaccacgccaacaacuccaccgacaccgucgacaccguccucgagaagaacgucaccgucacccacuccgucaaccuccucgaggacaagcacaacggcaagcucugcaagcuccgcggcgucgccccccuccaccucggcaagugcaacaucgccggcuggauccucggcaaccccgagugcgagucccucuccaccgccuccuccugguccuacaucgucgagaccuccaucuccgacaacggcaccugcuaccccggcgacuucaucgacuacgaggagcuccgcgagcagcucuccuccgucuccuccuucgagcgcuucgagaucuuccccaagaccuccuccuggcccaaccacgaccccaacaagggcgucaccgccgccugcccccacgccggcgccaaguccuucuacaagaaccucaucuggcucgucaagaagggcaacuccuaccccaagcucuccaccuccuacaucaacgacaagggcaaggagguccucguccucuggggcauccaccaccccuccaccuccgccgaccagcagucccucuaccagaacgccgacgccuacgccuucgucggcaccucccgcuacuccaagaaguucaagcccgagaucgccauccgccccaagguccgcgaccaggagggccgcaugaacuacuacuggacccucgucgagcccggcgacaagaucaccuucgaggccaccggcaaccucgucgucccccgcuacgccuucgccauggagcgcaacgccggcuccggcaucaucaucuccgacaccuccguccacgacugcaacaccaccugccagacccccaagggcgccaucaacaccucccuccccuuccagaacguccaccccaucaccaucggcaagugccccaaguacgucaaguccaccaagcuccgccucgccaccggccuccgcaacguccccuccauccagucccgcggccucuucggcgccaucgccggcuucaucgagggcggcuggaccggcauggucgacggcugguacggcuaccaccaccagaacgagcagggcuccggcuacgccgccgaccucaaguccacccagaacgccaucgacgagaucaccaacaaggucaacuccgucaucgagaagaugaacacccaguucaccgccgucggcaaggaguucaaccaccucgagaagcgcaucgagaaccucaacaagaaggucgacgacggcuuccucgacaucuggaccuacaacgccgagcuccucguccuccucgagaacgagcgcacccucgacuaccacgacuccaacgucaagaaccucuacgagaagguccgcucccagcucaagaacaacgccaaggagaucggcaacggcugcuucgaguucuaccacaagugcgacaacaccugcauggaguccgucaagaacggcaccuacgacuaccccaaguacuccgaggaggccaagcucaaccgcgaggagaucgacggcgucaagcucgaguccacccgcaucuaccagauccucgccaucuacuccaccgucgccuccucccucguccucgucgucucccucggcgccaucuccuucuggaugugcuccaacggcucccuccagugccgcaucugcaucuga

SEQ ID NO: 105660 - RNA, 1701 nt, Artificial Sequence
  derived and/or modified CDS sequence (opt2) from hemagglutinin__InfluenzaA__AFN87945
augaaggccauccucgucguccuccucuacaccuucgccaccgccaacgccgacacccucugcaucggcuaccacgccaacaacuccaccgacaccgucgacaccguccucgagaagaacgucaccgucacccacuccgucaaccuccucgaggacaagcacgacggcaagcucugcaagcuccgcggcgucgccccccuccaccucggcaagugcaacaucgccggcuggauccucggcaaccccgagugcgagucccucuccaccgccuccuccugguccuacaucgucgagaccuccuccuccgacaacggcaccugcuaccccggcgacuucaucgacuacgaggagcuccgcgagcagcucuccuccgucuccuccuucgagcgcuucgagaucuuccccaagaccuccuccuggcccaaccacgacuccaacaagggcgucaccgccgccugcccccacgccggcgccaaguccuucuacaagaaccucaucuggcucgucaagaagggcaacuccuaccccaagcucucccaguccuacaucaacgacaagggcaaggagguccucguccucuggggcauccaccaccccuccaccuccgccgaccagcagucccucuaccagaacgccgacgccuacgucuucgucggcaccucccgcuacuccaagaaguucaagcccgagaucgccauccgccccaagguccgcgaccaggagggccgcaugaacuacuacuggacccucgucgagcccggcgacaagaucaccuucgaggccaccggcaaccucgucgucccccgcuacgccuucgccauggagcgcaacgccggcuccggcaucaucaucuccgacacccccguccacgacugcaacaccaccugccagacccccaagggcgccaucaacaccucccuccccuuccagaacauccaccccaucaccaucggcaagugccccaaguacgucaaguccaccaagcuccgccucgccaccggccuccgcaacguccccuccauccagucccgcggccucuucggcgccaucgccggcuucaucgagggcggcuggaccggcauggucgacggcugguacggcuaccaccaccagaacgagcagggcuccggcuacgccgccgaccucaaguccacccagaacgccaucgacaagaucaccaacaaggucaacuccgucaucgagaagaugaacacccaguucaccgccgucggcaaggaguucaaccaccucgagaagcgcaucgagaaccucaacaagaaggucgacgacggcuuccucgacaucuggaccuacaacgccgagcuccucguccuccucgagaacgagcgcacccucgacuaccacgacuccaacgucaagaaccucuacgagaagguccgcucccagcucaagaacaacgccaaggagaucggcaacggcugcuucgaguucuaccacaagugcgacaacaccugcauggaguccgucaagaacggcaccuacgacuaccccaaguacuccgaggaggccaagcucaaccgcgaggagaucgacggcgucaagcucgaguccacccgcaucuaccagauccucgccaucuacuccaccgucgccuccucccucguccucgucgucucccucggcgccaucuccuucuggaugugcuccaacggcucccuccagugccgcaucugcaucuga

SEQ ID NO: 105661 - RNA, 1701 nt, Artificial Sequence
  derived and/or modified CDS sequence (opt2) from hemagglutinin__InfluenzaA__AFN87947
augaaggccauccucgucguccuccucuacaccuucgccaccgccaacgccgacacccucugcaucggcuaccacgccaacaacuccaccgacaccgucgacaccguccucgagaagaacgucaccgucacccacuccgucaaccuccucgaggacaagcacaacggcaagcucugcaagcuccgcggcgucgccccccuccaccucggcaagugcaacaucgccggcuggauccucggcaaccccgagugcgagucccucuccaccgccuccuccugguccuacaucgucgagaccuccuccuccgacaacggcaccugcuaccccggcgacuucaucgacuacgaggagcuccgcgagcagcucuccuccgucuccuccuucgagcgcuucgagaucuuccccaagaccuccuccuggcccaaccacgaccccaacaagggcgucaccgccgccugcccccacgccggcgccaaguccuucuacaagaaccucaucuggcucgucaagaagggcaacuccuaccccaagcucuccaccuccuacaucaacgacaagggcaaggagguccucguccucuggggcauccaccaccccuccaccuccgccgaccagcagucccucuaccagaacgccgacgccuacgccuucgucggcaccucccgcuacuccaagaaguucaagcccgagaucgccauccgccccaagguccgcgaccaggagggccgcaugaacuacuacuggacccucgucgagcccggcgacaagaucaccuucgaggccaccggcaaccucgucgucccccgcuacgccuucgccauggagcgcaacgccggcuccggcaucaucaucuccgacaccuccguccacgacugcaacaccaccugccagacccccaagggcgccaucaacaccucccuccccuuccagaacguccaccccaucaccaucggcaagugccccaaguacgucaaguccaccaagcuccgccucgccaccggccuccgcaacguccccuccauccagucccgcggccucuucggcgccaucgccggcuucaucgagggcggcuggaccggcauggucgacggcugguacggcuaccaccaccagaacgagcagggcuccggcuacgccgccgaccucaaguccacccagaacgccuucgacgagaucaccaacaaggucaacuccgucaucgagaagaugaacacccaguucaccgccgucggcaaggaguucaaccaccucgagaagcgcaucgagaaccucaacaagaaggucgacgacggcuuccucgacaucuggaccuacaacgccgagcuccucguccuccucgagaacgagcgcacccucgacuaccacgacuccaacgucaagaaccucuacgagaagguccgcucccagcucaagaacaacgccaaggagaucggcaacggcugcuucgaguucuaccacaagugcgacaacaccugcauggaguccgucaagaacggcaccuacgacuaccccaaguacuccgaggaggccaagcucaaccgcgaggagaucgacggcgucaagcucgaguccacccgcaucuaccagauccucgccaucuacuccaccgucgccuccucccucguccucgucgucucccucggcgccaucuccuucuggaugugcuccaacggcucccuccagugccgcaucugcaucuga

SEQ ID NO: 105662 - RNA, 1701 nt, Artificial Sequence
  derived and/or modified CDS sequence (opt2) from hemagglutinin__InfluenzaA__AFN87949
augaaggccauccucgucgucaugcucuacaccuucgccaccgccaacgccgacacccucugcaucggcuaccacgccaacaacuccaccgacaccgucgacaccguccucgagaagaacgucaccgucacccacuccgucaaccuccucgaggacaagcacaacggcaagcucugcaagcuccgcggcgucgccccccuccaccucggcaagugcaacaucgccggcuggauccucggcaaccccgagugcgagucccucuccaccgccuccuccugguccuacaucgucgagaccuccuccuccgacaacggcaccugcuaccccggcgacuucaucgacuacgaggagcuccgcgagcagcucuccuccgucuccuccuucgagcgcuucgagaucuuccccaagaccuccuccuggcccaaccacgacuccaacaagggcgucaccgccgccugcccccacgccggcgccaagggcuucuacaagaaccucaucuggcucgucaagaagggcaacuccuaccccaagcucuccaaguccuacaucaacgacaagggcaaggagguccucguccucuggggcauccaccaccccuccaccuccgccgaccagcagucccucuaccagaacgccgacaccuacgucuucgucggcaccucccgcuacuccaagaaguucaagcccgagaucgccauccgccccaagguccgcgaccaggagggccgcaugaacuacuacuggacccucgucgagcccggcgacaagaucaccuucgaggccaccggcaaccucgucgucccccgcuacgccuucgccauggagcgcaacgccggcuccggcaucaucaucuccgacacccccguccacgacugcaacaccaccugccagacccccaagggcgccaucaacaccucccuccccuuccagaacauccaccccaucaccaucggcaagugccccaaguacgucaaguccaccaagcuccgccucgccaccggccuccgcaacguccccuccauccagucccgcggccucuucggcgccaucgccggcuucaucgagggcggcuggaccggcauggucgacggcugguacggcuaccaccaccagaacgagcagggcuccggcuacgccgccgaccucaaguccacccagaacgccaucgacaagaucaccaacaaggucaacuccgucaucgagaagaugaacacccaguucaccgccgucggcaaggaguucaaccaccucgagaagcgcaucgagaaccucaacaagaaggucgacgacggcuuccucgacaucuggaccuacaacgccgagcuccucguccuccucgagaacgagcgcacccucgacuaccacgacuccaacgucaagaaccucuacgagaagguccgcucccagcucaagaacaacgccaaggagaucggcaacggcugcuucgaguucuaccacaagugcgacaacaccugcauggaguccgucaagaacggcaccuacgacuaccccaaguacuccgaggaggccaagcucaaccgcgaggagaucgacggcgucaagcucgaguccacccgcaucuaccagauccucgccaucuacuccaccgucgccuccucccucguccucgucgucucccucggcgccaucuccuucuggaugugcuccaacggcucccuccagugccgcaucugcaucuga

SEQ ID NO: 105663 - RNA, 1701 nt, Artificial Sequence; identical to SEQ ID NO: 102976
  derived and/or modified CDS sequence (opt2) from hemagglutinin__InfluenzaA__AFN87951

SEQ ID NO: 105664 - RNA, 1701 nt, Artificial Sequence
  derived and/or modified CDS sequence (opt2) from hemagglutinin__InfluenzaA__AFN87953
augaaggccauccucgucguccuccucuacaccuucgccaccgccaacgccgacacccucugcaucggcuaccacgccaacaacuccaccgacaccgucgacaccguccucgagaagaacgucaccgucacccacuccgccaaccuccucgaggacaagcacaacggcaagcucugcaagcuccgcggcgucgccccccuccaccucggcaagugcaacaucgccggcuggauccucggcaaccccgagugcgagucccucuccaccgccuccuccugguccuacaucgucgagaccuccuccuccgacaacggcaccugcuaccccggcgacuucaucgacuacgaggagcuccgcgagcagcucuccuccgucuccuccuucgagcgcuucgagaucuuccccaagaccuccuccuggcccaaccacgaccucaacaagggcgucaccgccgccugcccccacgccggcgccaaguccuucuacaagaaccucaucuggcucgucaagaagggcaacuccuaccccaagcucuccaaguccuacaucaacgacaagggcaaggagguccucguccucuggggcauccaccaccccuccaccuccgccgaccagcagucccucuaccagaacgccgacgccuacgucuucgucggcaccucccgcuacuccaagaaguucaagcccgagaucgccauccgccccaagguccgcgaccaggagggccgcaugaacuacuacuggacccucgucgagcccggcgacaagaucaccuucgaggccaccggcaaccucgucgucccccgcuacgccuucgccauggagcgcaacgccggcuccggcaucaucaucuccgacacccccguccacgacugcaacaccaccugccagacccccaagggcgccaucaacaccucccuccccuuccagaacauccaccccaucaccaucggcaagugccccaaguacgucaaguccaccaagcuccgccucgccaccggccuccgcaacguccccuccauccagucccgcggccucuucggcgccaucgccggcuucaucgagggcggcuggaccggcauggucgacggcugguacggcuaccaccaccagaacgagcagggcuccggcuacgccgccgaccucaaguccacccagaacgccaucgacgagaucaccaacaaggucaacuccgucaucgagaagaugaacacccaguucaccgccgucggcaaggaguucaaccaccucgagaagcgcaucgagaaccucaacaagaaggucgacgacggcuuccucgacaucuggaccuacaacgccgagcuccucguccuccucgagaacgagcgcacccucgacuaccacgacuccaacgucaagaaccucuacgagaagguccgcucccagcucaagaacaacgccaaggagaucggcaacggcugcuucgaguucuaccacaagugcgacaacaccugcauggaguccgucaagaacggcaccuacgacuaccccaaguacuccgaggaggccaagcucaaccgcgaggagaucgacggcgucaagcucgaguccacccgcaucuaccagauccucgccaucuacuccaccgucgccuccucccucguccucgucgucucccucggcgccaucuccuucuggaugugcuccaacggcucccuccagugccgcaucugcaucuga

SEQ ID NO: 105665 - RNA, 1701 nt, Artificial Sequence
  derived and/or modified CDS sequence (opt2) from hemagglutinin__InfluenzaA__AFN87955
augaaggccauccucgucgucaugcucuacaccuucgccaccgccaacgccgacacccucugcaucggcuaccacgccaacaacuccaccgacaccgucgacaccguccucgagaagaacgucaccgucacccacuccgucaaccuccucgaggacaagcacaacggcaagcucugcaagcuccgcggcgucgccccccuccaccucggcaagugcaacaucgccggcuggauccucggcaaccccgagugcgagucccucuccaccgccuccuccugguccuacaucgucgagaccuccuccuccgacaacggcaccugcuaccccggcgacuucaucgacuacgaggagcuccgcgagcagcucuccuccgucuccuccuucgagcgcuucgagaucuuccccaagaccuccuccuggcccaaccacgacuccaacaagggcgucaccgccgccugcccccacgccggcgccaagggcuucuacaagaaccucaucuggcucgucaagaagggcaacuccuaccccaagcucuccaaguccuacaucaacgacaagggcaaggagguccucguccucuggggcauccaccaccccuccaccaccgccgaccagcagucccucuaccagaacgccgacaccuacgucuucgucggcaccucccgcuacuccaagaaguucaagcccgagaucgccauccgccccaagguccgcgaccaggagggccgcaugaacuacuacuggacccucgucgagcccggcgacaagaucaccuucgaggccaccggcaaccucgucgucccccgcuacgccuucgccauggagcgcaacgccggcuccggcaucaucaucuccgacacccccguccacgacugcaacaccaccugccagacccccaagggcgccaucaacaccucccuccccuuccagaacauccaccccaucaccaucggcaagugccccaaguacgucaaguccaccaagcuccgccucgccaccggccuccgcaacguccccuccauccagucccgcggccucuucggcgccaucgccggcuucaucgagggcggcuggaccggcauggucgacggcugguacggcuaccaccaccagaacgagcagggcuccggcuacgccgccgaccucaaguccacccagaacgccaucgacgagaucaccaacaaggucaacuccgucaucgagaagaugaacacccaguucaccgccgucggcaaggaguucaaccaccucgagaagcgcaucgagaaccucaacaagaaggucgacgacggcuuccucgacaucuggaccuacaacgccgagcuccucguccuccucgagaacgagcgcacccucgacuaccacgacuccaacgucaagaaccucuacgagaagguccgcucccagcucaagaacaacgccaaggagaucggcaacggcugcuucgaguucuaccacaagugcgacaacaccugcauggaguccgucaagaacggcaccuacgacuaccccaaguacuccgaggaggccaagcucaaccgcgaggagaucgacggcgucaagcucgaguccacccgcaucuaccagauccucgccaucuacuccaccgucgccuccucccucguccucgucgucucccucggcgccaucuccuucuggaugugcuccaacggcucccuccagugccgcaucugcaucuga

SEQ ID NO: 105666 - RNA, 1701 nt, Artificial Sequence
  derived and/or modified CDS sequence (opt2) from hemagglutinin__InfluenzaA__AFN87957
augaaggccauccucgucguccuccucuacaccuucgccaccgccaacgccgacacccucugcaucggcuaccacgccaacaacuccaccgacaccgucgacaccguccucgagaagaacgucaccgucacccacuccgucaaccuccucgaggacaagcacaacggcaagcucugcaagcuccgcggcgucgccccccuccaccucggcaagugcaacaucgccggcuggauccucggcaaccccgagugcgagucccucuccaccgccuccuccugguccuacaucgucgagaccuccaucuccgacaacggcaccugcuaccccggcgacuucaucgacuacgaggagcuccgcgagcagcucuccuccgucuccuccuucgagcgcuucgagaucuuccccaagaccuccuccuggcccaaccacgaccccaacaagggcgucaccgccgccugcccccacgccggcgccaaguccuucuacaagaaccucaucuggcucgucaagaagggcaacuccuaccccaagcucuccaccuccuacaucaacgacaagggcaaggagguccucguccucuggggcauccaccaccccuccaccuccgccgaccagcagucccucuaccagaacgccgacgccuacgccuucgucggcaccucccgcuacuccaagaaguucaagcccgagaucgccauccgccccaagguccgcgaccaggagggccgcaugaacuacuacuggacccucgucgagcccggcgacaagaucaccuucgaggccaccggcaaccucgucgucccccgcuacgccuucgccauggagcgcaacgccggcuccggcaucaucaucuccgacaccuccguccacgacugcaacaccaccugccagacccccaagggcgccaucaacaccucccuccccuuccagaacguccaccccaucaccaucggcaagugccccaaguacgucaaguccaccaagcuccgccucgccaccggccuccgcaacguccccuccauccagucccgcggccucuucggcgccaucgccggcuucaucgagggcggcuggaccggcauggucgacggcugguacggcuaccaccaccagaacgagcagggcuccggcuacgccgccgaccucaaguccacccagaacgccuucgacgagaucaccaacaaggucaacuccgucaucgagaagaugaacacccaguucaccgccgucggcaaggaguucaaccaccucgagaagcgcaucgagaaccucaacaagaaggucgacgacggcuuccucgacaucuggaccuacaacgccgagcuccucguccuccucgagaacgagcgcacccucgacuaccacgacuccaacgucaagaaccucuacgagaagguccgcucccagcucaagaacaacgccaaggagaucggcaacggcugcuucgaguucuaccacaagugcgacaacaagugcauggaguccgucaagaacggcaccuacgacuaccccaaguacuccgaggaggccaagcucaaccgcgaggagaucgacggcgucaagcucgaguccacccgcaucuaccagauccucgccaucuacuccaccgucgccuccucccucguccucgucgucucccucggcgccaucuccuucuggaugugcuccaacggcucccuccagugccgcaucugcaucuga

SEQ ID NO: 105667 - RNA, 1701 nt, Artificial Sequence
  derived and/or modified CDS sequence (opt2) from hemagglutinin__InfluenzaA__AFN87959
augaaggccauccucgucgucaugcucuacaccuucgccaccgccaacgccgacacccucugcaucggcuaccacgccaacaacuccaccgacaccgucgacaccguccucgagaagaacgucaccgucacccacuccgucaaccuccucgaggacaagcacaacggcaagcucugcaagcuccgcggcgucgccccccuccaccucggcaagugcaacaucgccggcuggauccucggcaaccccgagugcgagucccucuccaccgccuccuccugguccuacaucgucgagaccuccuccuccgacaacggcaccugcuaccccggcgacuucaucgacuacgaggagcuccgcgagcagcucuccuccgucuccuccuucgagcgcuucgagaucuuccccaagaccuccuccuggcccaaccacgacuccaacaagggcgucaccgccgccugcccccacgccggcgccaagggcuucuacaagaaccucaucuggcucgucaagaagggcaacuccuaccccaagcucuccaaguccuacaucaacgacaagggcaaggagguccucguccucuggggcauccaccaccccuccaccuccgccgaccagcagucccucuaccagaacgccgacaccuacgucuucgucggcaccucccgcuacuccaagaaguucaagcccgagaucgccauccgccccaagguccgcgaccaggagggccgcaugaacuacuacuggacccucgucgagcccggcgacaagaucaccuucgaggccaccggcaaccucgucgucccccgcuacgccuucgccauggagcgcaacgccggcuccggcaucaucaucuccgacacccccguccacgacugcaacaccaccugccagacccccaagggcgccaucaacaccucccuccccuuccagaacauccaccccaucaccaucggcaagugccccaaguacgucaaguccaccaagcuccgccucgccaccggccuccgcaacguccccuccauccagucccgcggccucuucggcgccaucgccggcuucaucgagggcggcuggaccggcauggucgacggcugguacggcuaccaccaccagaacgagcagggcuccggcuacgccgccgaccucaaguccacccagaacgccaucgacaagaucaccaacaaggucaacuccgucaucgagaagaugaacacccaguucaccgccgucggcaaggaguucaaccaccucgagaagcgcaucgagaaccucaacaagaaggucgacgacggcuuccucgacaucuggaccuacaacgccgagcuccucguccuccucgagaacgagcgcacccucgacuaccacgacuccaacgucaagaaccucuacgagaagguccgcaaccagcucaagaacaacgccaaggagaucggcaacggcugcuucgaguucuaccacaagugcgacaacaccugcauggaguccgucaagaacggcaccuacgacuaccccaaguacuccgaggaggccaagcucaaccgcgaggagaucgacggcgucaagcucgaguccacccgcaucuaccagauccucgccaucuacuccaccgucgccuccucccucguccucgucgucucccucggcgccaucuccuucuggaugugcuccaacggcucccuccagugccgcaucugcaucuga

SEQ ID NO: 105668 - RNA, 1701 nt, Artificial Sequence; identical to SEQ ID NO: 99190
  derived and/or modified CDS sequence (opt2) from hemagglutinin__InfluenzaA__AFN87961

SEQ ID NO: 105669 - RNA, 1698 nt, Artificial Sequence
  derived and/or modified CDS sequence (opt2) from hemagglutinin__InfluenzaA__AFO64802
augaaggccaagcuccucguccuccucugcaccuucaccgccaccuacgccgacaccaucugcaucggcuaccacgccaacaacuccaccgacaccgucgacaccguccucgagaagaacgucaccgucacccacuccgucaaccuccucgaggacucccacaacggcaagcucugccuccucaagggcaucgccccccuccagcucggcaacugcuccgucgccggcuggauccucggcaaccccgagugcgagcuccucaucuccaaggaguccugguccuacaucgucgagacccccaaccccgagaacggcaccugcuaccccggcuacuucgccgacuacgaggagcuccgcgagcagcucuccuccgucuccuccuucgagcgcuucgagaucuuccccaaggaguccuccuggcccaaccacaccgucaccggcgucuccgccuccugcucccacaacggcaaguccuccuucuaccgcaaccuccucuggcucaccgucaagaacggccucuaccccaaccucuccaaguccuacgucaacaacaagggcaaggagguccucguccucuggggcguccaccaccccuccaacauccgcgaccagcgcgccaucuaccacaccgagaacgccuacgucuccgucgucuccucccacuacucccgccgcuucacccccgagaucgccaagcgccccaagguccgcgaccaggagggccgcaucaacuacuacuggacccuccucgagcccggcgacaccaucaucuucgaggccaacggcaaccucaucgcccccugguacgccuucgcccucucccgcggcuucggcuccggcaucaucaccuccaacgcccccauggacgagugcgacgccaagugccagaccccccagggcgccaucaacuccucccuccccuuccagaacguccaccccgucaccaucggcgagugccccaaguacguccgcuccgccaagcuccgcauggucaccggccuccgcaacauccccuccauccagucccgcggccucuucggcgccaucgccggcuucaucgagggcggcuggaccggcaugaucgacggcugguacggcuaccaccaccagaacgagcagggcuccggcuacgccgccgaccagaaguccacccagaacgccaucaacggcaucaccaacaaggucaacuccgucaucgagaagaugaacacccaguucaccgccgucggcaaggaguucaacaagcucgagcgccgcauggagaaccucaacaagaaggucgacgacggcuuccucgacaucuggaccuacaacgccgagcuccucguccuccucgagaacgagcgcacccucgacuuccacgacuccaacgucaagaaccucuacgagaaggucaagucccagcucaagaacaacgccaaggagaucggcaacggcugcuucgaguucuaccacaagugcaacaacgagugcauggaguccgucaagaacggcaccuacgacuaccccaaguacuccgaggaguccaagcucaaccgcgagaagaucgacggcgucaagcucgaguccaugggcgucuaccagauccucgccaucuacuccaccgucgccuccucccucguccuccucgucucccucggcgccaucuccuucuggaugugcuccaacggcucccuccagugccgcaucugcaucuga

SEQ ID NO: 105670 - RNA, 1701 nt, Artificial Sequence
  derived and/or modified CDS sequence (opt2) from hemagglutinin__InfluenzaA__AFO64813
augaaggccaagcuccucguccuccucugcgccuucaccgccaccgacgccgacaccaucugcaucggcuaccacgccaacaacuccaccgacaccgucgacaccguccucgagaagaacgucaccgucacccacuccgucaaccuccucgaggacucccacaacggcaagcucugccgccucaagggcaucgccccccuccagcucggcaacugcuccaucgccggcuggauccucggcaaccccgagugcgagucccucuucuccaagaaguccugguccuacaucgccgagacccccaacuccgagaacggcaccugcuaccccggcuacuucgccgacuacgaggagcuccgcgagcagcucuccuccgucuccuccuucgagcgcuucgagaucuuccccaaggaguccuccuggcccaaccacaccgucaccaagggcgucaccgccuccugcucccacaagggccgcuccuccuucuaccgcaaccuccucuggcucaccgagaagaacggcuccuaccccaaccucuccaaguccuacgucaacaacaaggagaaggagguccucguccucuggggcguccaccaccccuccaacauccgcgaccagcgcgccaucuaccacaccgagaacgccuacgucuccgucgucuccucccacuacaaccgccgcuucacccccgagaucgccaagcgccccaagguccgcgaccaggagggccgcaucaacuacuacuggacccuccucgagcccggcgacaccaucaucuucgaggccaacggcaaccucaucgcccccugguacgccuucgcccucucccgcggcuucggcuccggcaucaucaccuccaacgccuccauggacgagugcgacgccaagugccagaccccccagggcgccaucaacuccucccuccccuuccagaacguccaccccgucaccaucggcgagugccccaaguacguccgcuccaccaagcuccgcauggucaccggccuccgcaacauccccuccauccagucccgcggccucuucggcgccaucgccggcuucaucgagggcggcuggaccggcaugaucgacggcugguacggcuaccaccaccagaacgagcagggcuccggcuacgccgccgaccagaaguccacccagaacgccaucaacggcaucaccaacaaggucaacuccgucaucgagaagaugaacacccaguucaccgccgucggcaaggaguucaacaagcucgagcgccgcauggagaaccucaacaagaaggucgacgacggcuuccucgacaucuggaccuacaacgccgagcuccucguccuccucgagaacgagcgcacccucgacuuccacgacuccaacgucaagaaccucuacgagaaggucaagucccagcucaagaacaacgccaaggagaucggcaacggcugcuucgaguucuaccacaagugcaacaacgagugcauggaguccgucaagaacggcaccuacgacuaccccaaguacuccgaggaguccaagcucaaccgcgagaagaucgacggcgucaagcucgaguccaugggcgucuaccagauccucgccaucuacuccaccgucgccuccucccucguccuccucgucucccucggcgccaucuccuucuggaugugcuccaacggcucccuccagugccgcaucugcaucuga

SEQ ID NO: 105671 - RNA, 1701 nt, Artificial Sequence
  derived and/or modified CDS sequence (opt2) from hemagglutinin__InfluenzaA__AFO64824
augaaggccauccuccucguccuccucugcgccuucaccgccaccgacgccgacaccaucugcaucggcuaccacgccaacaacuccaccgacaccgucgacaccguccucgagaagaacgucaccgucacccacuccgucaaccuccucgaggacucccacaacggcaagcucugccgccucaagggcaucgccccccuccagcucggcaacugcuccaucgccggcuggauccucggcaaccccgagugcgagucccucuucuccaagaaguccugguccuacaucgccgagacccccaacuccgagaacggcaccugcuaccccggcuacuucgccgacuacgaggagcuccgcgagcagcucuccuccgucuccuccuucgagcgcuucgagaucuuccccaaggaguccuccuggcccaaccacaccgucaccaagggcgucaccgccuccugcucccacaagggccgcuccuccuucuaccgcaaccuccucuggcucaccgagaagaacggccucuaccccaaccucuccaaguccuacgucaacaacaaggagaaggagguccucguccucuggggcguccaccaccccuccaacaucggcgaccagcgcgccaucuaccacaccgagaacgccuacgucuccgucgucuccucccacuacaaccgccgcuucacccccgagaucgccaagcgccccaagguccgcggccaggagggccgcaucaacuacuacuggacccuccucgagcccggcgacaccaucaucuucgaggccaacggcaaccucaucgcccccugguacgccuucgcccucucccgcggcuucggcuccggcaucaucaccuccaacgccuccauggacgagugcgacgccaagugccagaccccccagggcgccaucaacuccucccuccccuuccagaacguccaccccgucaccaucggcgagugccccaaguacguccgcuccaccaagcucaagauggucaccggccuccgcaacauccccuccauccagucccgcggccucuucggcgccaucgccggcuucaucgagggcggcuggaccggcaugaucgacggcugguacggcuaccaccaccagaacgagcagggcuccggcuacgccgccgaccagaaguccacccagaacgccaucaacggcaucaccaacaaggucaacuccgucaucgagaagaugaacacccaguucaccgccgucggcaaggaguucaacaagcucgagaagcgcauggagaaccucaacaagaaggucgacgacggcuuccucgacaucuggaccuacaacgccgagcuccucguccuccucgagaacgagcgcacccucgacuuccacgacuccaacgucaagaaccucuacgagaaggucaagaaccagcucaagaacaacgccaaggagaucggcaacggcugcuucgaguucuaccacaagugcaacaacgagugcauggaguccgucaagaacggcaccuacgacuaccccaaguacuccgaggaguccaagcucaaccgcgagaagaucgacggcgucaagcucgaguccaugggcgucuaccagauccucgccaucuacuccaccgucgccuccucccucguccuccucgucucccucggcgccaucuccuucuggaugugcuccaacggcucccuccagugccgcaucugcaucuga

SEQ ID NO: 105672 - RNA, 1701 nt, Artificial Sequence
  derived and/or modified CDS sequence (opt2) from hemagglutinin__InfluenzaA__AFO64835
augaaggccaagcuccucguccuccucugcgccuucaccgccaccuacgccgacaccaucugcaucggcuaccacgccaacaacuccaccgacaccgucgacaccguccucgagaagaacgucaccgucacccacuccgucaaccuccucgaggacucccacaacggcaagcucugccgccucaagggcaucgccccccuccagcucggcaacugcuccgucgccggcuggauccucggcaaccccgagugcgagucccucuucuccaaggaguccugguccuacaucgccgagacccccgaccccgagaacggcaccugcuaccccggcuacuucgccgacuacgaggagcuccgcgagcagcucuccuccgucuccuccuucgagcgcuucgagaucuuccccaaggaguccuccuggcccaaccacaccgucaccaagggcgucaccgccuccugcucccacaacggcaaguccuccuucuaccgcaaccuccucuggcucaccaagaagaacggccucuaccccaaccucuccaaguccuacgucaacaacaaggagaaggagguccucguccucuggggcguccaccaccccuccaacaucggcgagcagcgcgccaucuaccacaccgagaacgccuacgucuccgucgucuccucccacuacucccgccgcuucacccccgagaucgccaagcgccccaagguccgcgaccaggagggccgcaucaacuacuacuggacccuccucgagcccggcgacaccaucaucuucgaggccaacggcaaccucaucgcccccugguacgccuucgcccucucccgcggcuucggcuccggcaucaucaccuccaacgccuccauggacgagugcgacgccaagugccagaccccccagggcgccaucaacuccucccuccccuuccagaacguccaccccgucaccaucggcgagugccccaaguacguccgcuccaccaagcuccgcauggucaccggccuccgcaacauccccuccauccagucccgcggccucuucggcgccaucgccggcuucaucgagggcggcuggaccggcaugaucgacggcugguacggcuaccaccaccagaacgagcagggcuccggcuacgccgccgaccagaaguccacccagaacgccaucaacggcaucaccaacaaggucaacuccgucaucgagaagaugaacacccaguucaccgccgucggcaaggaguucaacaagcucgagcgccgcauggagaaccucaacaagaaggucgacgacggcuuccucgacaucuggaccuacaacgccgagcuccucguccuccucgagaacgagcgcacccucgacuuccacgacuccaacgucaagaaccucuacgagaaggucaagaaccagcucaagaacaacgccaaggagaucggcaacggcugcuucgaguucuaccacaagugcaacaacgagugcauggaguccgucaagaacggcaccuacgacuaccccaaguacuccgaggaguccaagcucaaccgcgagaagaucgacggcgucaagcucgaguccaugggcgucuaccagauccucgccaucuacuccaccgucgccuccucccucguccuccucgucucccucggcgccaucuccuucuggaugugcuccaacggcucccuccagugccgcaucugcaucuga

SEQ ID NO: 105673 - RNA, 1701 nt, Artificial Sequence
  derived and/or modified CDS sequence (opt2) from hemagglutinin__InfluenzaA__AFO64846
augaaggccaagcuccucguccuccucugcgccuucaccgccaccuacgccgacaccaucugcaucggcuaccacgccaacaacuccaccgacaccgucgacaccguccucgagaagaacgucaccgucacccacuccgucaaccuccucgaggacucccacaacggcaagcucugccgccucaagggcaucgccccccuccagcucggcaacugcuccgucgccggcuggauccucggcaaccccgagugcgagucccucuucaccaaggaguccugguccuacaucgccgagacccccaaccccgagaacggcaccugcuaccccggcuacuucgccgacuacgaggagcuccgcgagcagcucuccuccgucuccuccuucgagcgcuucgagaucuuccccaaggaguccuccuggcccaaccacaccgucaccaagggcgucaccgccuccugcucccacaacggcaaguccuccuucuaccgcaaccuccucuggcucaccgagaagaacggccucuaccccaaccucuccaaguccuacgucaacaacaaggagaaggagguccucguccucuggggcguccaccaccccuccaacaugggcgaccagcgcgccaucuaccacaccgagaacgccuacgucuccgucgucuccucccacuacucccgccgcuucacccccgagaucgccaagcgccccaagguccgcggccaggagggccgcaucaacuacuacuggacccuccucgagcccggcgacaccaucaucuucgaggccaacggcaaccucaucgccccccgcuacgccuucgcccucucccgcggcuucggcuccggcaucaucaccuccaacgccuccauggacgagugcgacgccaagugccagaccccccagggcgccaucaacuccucccuccccuuccagaacguccaccccgucaccaucggcgagugccccaaguacguccgcuccaccaagcuccgcauggucaccggccuccgcaacauccccuccauccagucccgcggccucuucggcgccaucgccggcuucaucgagggcggcuggaccggcaugaucgacggcugguacggcuaccaccaccagaacgagcagggcuccggcuacgccgccgaccagaaguccacccagaacgccaucaacggcaucaccaacaaggucaacuccgucaucgagaagaugaacacccaguucaccgccgucggcaaggaguucaacaagcucgagcgccgcauggagaaccucaacaagaaggucgacgacggcuuccucgacaucuggaccuacaacgccgagcuccucguccuccucgagaacgagcgcacccucgacuuccacgacuccaacgucaagaaccucuacgagaaggucaagucccagcucaagaacaacgccaaggagaucggcaacggcugcuucgaguucuaccacaagugcaacaacgagugcauggaguccgucaagaacggcaccuacgacuaccccaaguacuccgaggaguccaagcucaaccgcgagaagaucgacggcgucaagcucgaguccaugggcgucuaccagauccucgccaucuacuccaccgucgccuccucccucguccuccucgucucccucggcgccaucuccuucuggaugugcuccaacggcucccuccagugccgcaucugcaucuga

SEQ ID NO: 105674 - RNA, 1701 nt, Artificial Sequence
  derived and/or modified CDS sequence (opt2) from hemagglutinin__InfluenzaA__AFO64857
augaaggccaagcuccucguccuccucugcgccuucaccgccaccuacgccgacaccaucugcaucggcuaccacgccaacaacuccaccgacaccgucgacaccguccucgagaagaacgucaccgucacccacuccgucaaccuccucgaggacucccacaacggcaagcucugccgccucaagggcaccgccccccuccagcucggcaacugcuccgucgccggcuggauccucggcaaccccgagugcgagucccucuucuccaaggaguccugguccuacaucgccgagacccccaaccccgagaacggcaccugcuaccccggcuacuucgccgacuacgaggagcuccgcgagcagcucuccuccgucuccuccuucgagcgcuucgagaucuuccccaaggaguccuccuggcccaaccacaccgucaccaagggcgucaccgccuccugcucccacaacggcaaguccuccuucuacaagaaccuccucuggcucaccgagaagaacggccucuaccccaaccucuccaaguccuacgucaacaacaaggagaaggagguccucguccucuggggcguccaccaccccuccaacaucggcgaccagcgcgccaucuaccacaccgagaacgccuacgucuccgucgucuccucccacuacucccgccgcuucacccccgagaucgccaagcgccccaagguccgcggccaggagggccgcaucaacuacuacuggacccuccucgagcccggcgacaccaucaucuucgaggccaacggcaaccucaucgcccccugguacgccuucgcccucucccgcggcuucggcuccggcaucaucaccuccaccgccuccaugggcgagugcgacgccaagugccagaccccccagggcgccaucaacuccucccuccccuuccagaacguccaccccgucaccaucggcgagugccccaaguacguccgcuccaccaagcuccgcauggucaccggccuccgcaacauccccuccauccagucccgcggccucuucggcgccaucgccggcuucaucgagggcggcuggaccggcaugaucgacggcugguacggcuaccaccaccagaacgagcagggcuccggcuacgccgccgaccagaaguccacccagaacgccaucgacggcaucaccaacaaggucaacuccgucaucgagaagaugaacacccaguucaccgccgucggcaaggaguucaacaagcucgagcgccgcauggagaaccucaacaagaaggucgacgacggcuuccucgacaucuggaccuacaacgccgagcuccucguccuccucgagaacggccgcacccucgacuuccacgacuccaacgucaagaaccucuacgagaaggucaagaaccagcucaagaacaacgccaaggagaucggcaacggcugcuucgaguucuaccacaagugcaacaacgagugcauggaguccgucaagaacggcaccuacgacuaccccaaguacuccgaggaguccaagcucaaccgcgagaagaucgacggcgucaagcucgaguccaugggcgucuaccagauccucgccaucuacuccaccgucgccuccucccucguccuccucgucucccucggcgccaucuccuucuggaugugcuccaacggcucccuccagugccgcaucugcaucuga

SEQ ID NO: 105675 - RNA, 1701 nt, Artificial Sequence
  derived and/or modified CDS sequence (opt2) from hemagglutinin__InfluenzaA__AFO64868
augaaggucaagcuccucguccuccucugcgccuucaccgccaccuacgccgacaccaucugcaucggcuaccacgccaacaacuccaccgacaccgucgacaccguccucgagaagaacgucaccgucacccacuccgucaaccuccucgaggacucccacaacggcaagcucugccgccucaagggcaccgccccccuccagcucggcaacugcuccgucgccggcuggauccucggcaaccccgagugcgagucccucuucuccaaggaguccugguccuacaucgccgagacccccaaccccgagaacggcaccugcuaccccggcugcuucgccgacuacgaggagcuccgcgagcagcucuccuccgucuccuccuucgagcgcuucgagaucuuccccaaggaguccuccuggcccaaccacaccgucaccaagggcgucaccgccuccugcucccacaacggcaaguccuccuucuacaagaaccuccucuggcucaccgagaagaacggccucuaccccaaccucuccaaguccuacgucaacaacaaggagaaggagguccucguccucuggggcguccaccaccccuccaacauccgcgaccagcgcgccaucuaccacaccgagaacgccuacgucuccgucgucuccucccacuacucccgccgcuucacccccgagaucgccaagcgccccaagguccgcggccaggagggccgcaucaacuacuacuggacccuccucgagcccggcgacaccaucaucuucgaggccaacggcaaccucaucgcccccugguacgccuucgcccucucccgcggcuucggcuccggcaucaucaccuccaacgccuccaugggcgagugcgacgccaagugccagaccccccagggcgccaucaacuccucccuccccuuccagaacguccaccccgucaccaucggcgagugccccaaguacguccgcuccaccaagcuccgcauggucaccggccuccgcaacauccccuccauccagucccgcggccucuucggcgccaucgccggcuucaucgagggcggcuggaccggcaugaucgacggcugguacggcuaccaccaccagaacgagcagggcuccggcuacgccgccgaccagaaguccacccagaacgccaucgacggcaucaccaacaaggucaacuccgucaucgagaagaugaacacccaguucaccgccgucggcaaggaguucaacaagcucgagcgccgcauggagaaccucaacaagaaggucgacgacggcuuccucgacaucuggaccuacaacgccgagcuccucguccuccucgagaacgagcgcacccucgacuuccacgacuccaacgucaagaaccucuacgagaaggucaagaaccagcucaagaacaacgccaaggagaucggcaacggcugcuucgaguucuaccacaagugcaacaacgagugcauggaguccgucaagaacggcaccuacgacuaccccaaguacuccgaggaguccaagcucaaccgcgagaagaucgacggcgucaagcucgaguccaugggcgucuaccagauccucgccaucuacuccaccgucgccuccucccucguccuccucgucucccucggcgccaucuccuucuggaugugcuccaacggcucccuccagugccgcaucugcaucuga

SEQ ID NO: 105676 - RNA, 1698 nt, Artificial Sequence
  derived and/or modified CDS sequence (opt2) from hemagglutinin__InfluenzaA__AFO64879
augaaggccaagcuccucguccuccucugcaccuucaccgccaccuacgccgacaccaucugcaucggcuaccacgccaacaacuccaccgacaccgucgacaccguccucgagaagaacgucaccgucacccacuccgucaaccuccucgaggacucccacaacggcaagcucugccuccucaagggcaucgccccccuccagcucggcaacugcuccgucgccggcuggauccucggcaaccccgagugcgagucccucaucuucaaggaguccugguccuacaucgucgagacccccaaccccgagaacggcaccugcuaccccggcuacuucgccgacuacgaggagcuccgcgagcagcucuccuccgucuccuccuucgagcgcuucgagaucuuccccaaggaguccuccuggcccaaccacaccgucaccggcgucuccgccuccugcucccacaacggcaaguccuccuucuaccgcaaccuccucuggcucaccgagaagaacggccucuaccccaaccucuccaaguccuacgucaacaacaaggagaaggagguccucguccucuggggcguccaccaccccuccaacauccgcgaccagcgcgccaucuaccacaccgagaacgccuacgucuccgucgucuccucccacuacucccgccgcuucacccccgagaucgccaagcgccccaagguccgcggccaggagggccgcaucaacuacuacuggacccuccucgagcccggcgacaccaucaucuucgaggccaacggcaaccucaucgcccccugguacgccuucgcccucucccgcggcuucggcuccggcaucaucaccuccaacgcccccauggacgagugcgacgccaagugccagaccccccagggcgccaucaacuccucccuccccuuccagaacguccaccccgucaccaucggcgagugccccaaguacguccgcuccgccaagcuccgcauggucaccggccuccgcaacauccccuccauccagucccgcggccucuucggcgccaucgccggcuucaucgagggcggcuggaccggcaugaucgacggcugguacggcuaccaccaccagaacgagcagggcuccggcuacgccgccgaccagaaguccacccagaacgccaucaacggcaucaccaacaaggucaacuccgucaucgagaagaugaacacccaguucaccgccgucggcaaggaguucaacaagcucgagcgccgcauggagaaccucaacaagaaggucgacgacggcuuccucgacaucuggaccuacaacgccgagcuccucguccuccucgagaacgagcgcacccucgacuuccacgacuccaacgucaagaaccucuacgagaaggucaagucccagcucaagaacaacgccaaggagaucggcaacggcugcuucgaguucuaccacaagugcaacaacgagugcauggaguccgucaagaacggcaccuacgacuaccccaaguacuccgaggaguccaagcucaaccgcgagaagaucgacggcgucaagcucgaguccaugggcgucuaccagauccucgccaucuacuccaccgucgccuccucccucguccuccucgucucccucggcgccaucuccuucuggaugugcuccaacggcucccuccagugccgcaucugcaucuga

SEQ ID NO: 105677 - RNA, 1698 nt, Artificial Sequence
  derived and/or modified CDS sequence (opt2) from hemagglutinin__InfluenzaA__AFO64890
augaaggccaagcuccucguccuccucugcaccuucaccgccaccuacgccgacaccaucugcaucggcuaccacgccaacaacuccaccgacaccgucgacaccguccucgagaagaacgucaccgucacccacuccgucaaccuccucgaggacucccacaacggcaagcucugccuccucaagggcaucgccccccuccagcucggcaacugcuccgucgccggcuggauccucggcaaccccgagugcgagucccucaucuccaaggaguccugguccuacaucgucgagacccccaaccccgagaacggcaccugcuaccccggcuacuucgccgacuacgaggagcuccgcgagcagcucuccuccgucuccuccuucgagcgcuucgagaucuuccccaaggaguccuccuggcccaaccacaccgucaccggcgucuccgccuccugcucccacaacggcaaguccuccuucuaccgcaaccuccucuggcucaccgagaagaacggccucuaccccaaccucuccaaguccuacgucaacaacaaggagaaggagguccucguccucuggggcguccaccaccccuccaacauccgcgaccagcgcgccaucuaccacaccgagaacgccuacgucuccgucgucuccucccacuacucccgccgcuucacccccgagaucgccaagcgccccaagguccgcggccaggagggccgcaucaacuacuacuggacccuccucgagcccggcgacaccaucaucuucgaggccaacggcaaccucaucgcccccugguacgccuucgcccucucccgcggcuucggcuccggcaucaucaccuccaacgcccccauggacgagugcgacgucaagugccagaccccccagggcgccaucaacuccucccuccccuuccagaacguccaccccgucaccaucggcgagugccccaaguacguccgcuccgccaagcuccgcauggucaccggccuccgcaacauccccuccauccagucccgcggccucuucggcgccaucgccggcuucaucgagggcggcuggaccggcaugaucgacggcugguacggcuaccaccaccagaacgagcagggcuccggcuacgccgccgaccagaaguccacccagaacgccaucaacggcaucaccaacaaggucaacuccgucaucgagaagaugaacacccaguucaccgccgucggcaaggaguucaacaagcucgagcgccgcauggagaaccucaacaagaaggucgacgacggcuuccucgacaucuggaccuacaacgccgagcuccucguccuccucgagaacgagcgcacccucgacuuccacgacuccaacgucaagaaccucuacgagaaggucaagucccagcucaagaacaacgccaaggagaucggcaacggcugcuucgaguucuaccacaagugcaacaacgagugcauggaguccgucaagaacggcaccuacgacuaccccaaguacuccgaggaguccaagcucaaccgcgagaagaucgacggcgucaagcucgaguccaugggcgucuaccagauccucgccaucuacuccaccgucgccuccucccucguccuccucgucucccucggcgccaucuccuucuggaugugcuccaacggcucccuccagugccgcaucugcaucuga

SEQ ID NO: 105678 - RNA, 1701 nt, Artificial Sequence
  derived and/or modified CDS sequence (opt2) from hemagglutinin__InfluenzaA__AFO64901
augaaggccaagcuccucguccuccucugcgccuucaccgccaccuacgccgacaccaucugcaucggcuaccacgccaacaacuccaccgacaccgucgacaccguccucgagaagaacgucaccgucacccacuccgucaaccuccucgaggacucccacaacggcaagcucugccgccucaagggcaccgccccccuccagcucggcaacugcuccaucgccggcuggauccucggcaaccccgagugcgagucccucuucuccaaggaguccugguccuacaucgccgagacccccaaccccgagaacggcaccugcuaccccggcuacuucgccgacuacgaggagcuccgcgagcagcucuccuccgucuccuccuucgagcgcuucgagaucuuccccaaggaguccuccuggcccaaccacaccgucaccaagggcgucaccgccuccugcucccacaacggcaaguccuccuucuacaagaaccuccucuggcucaccgagaagaacggccucuaccccaaccucuccaaguccuacgucaacaacaagaagaaggagguccucguccucuggggcguccaccaccccuccaacaucggcgaccagcgcgccaucuaccacaccgagaacgccuacgucuccgucgucuccucccacuacucccgccgcuucacccccgagaucgccaagcgccccaagguccgcaaccaggagggccgcaucaacuacuacuggacccuccucgagcccggcgacaccaucaucuucgaggccaacggcaaccucaucgcccccugguacgccuucgcccucucccgcggcuucgaguccggcaucaucaccuccaacgccuccaugggcgagugcgacgccaagugccagaccccccagggcgccaucaacuccucccuccccuuccagaacguccaccccgucaccaucggcgagugccccaaguacguccgcuccaccaagcuccgcauggucaccggccuccgcaacauccccuccauccagucccgcggccucuucggcgccaucgccggcuucaucgagggcggcuggaccggcaugaucgacggcugguacggcuaccaccaccagaacgagcagggcuccggcuacgccgccgaccagaaguccacccagaacgccaucaacggcaucaccaacaaggucaacuccaucaucgagaagaugaacacccaguucaccgccgucggcaaggaguucaacaagcucgagcgccgcauggagaaccucaacaagaaggucgacgacggcuuccucgacaucuggaccuacaacgccgagcuccucguccuccucgagaacgagcgcacccucgacuuccacgacuccaacgucaagaaccucuacgagaaggucaagaaccagcucaagaacaacgccaaggagaucggcaacggcugcuucgaguucuaccacaagugcaacaacgagugcauggaguccgucaagaacggcaccuacgacuaccccaaguacuccaaggaguccaagcucaaccgcgagaagaucgacggcgucaagcucgaguccaugggcgucuaccagauccucgccaucuacuccaccgucgccuccucccucguccuccucgucucccucggcgccaucuccuucuggaugugcuccaacggcucccuccagugccgcaucugcaucuga

SEQ ID NO: 105679 - RNA, 1698 nt, Artificial Sequence
  derived and/or modified CDS sequence (opt2) from hemagglutinin__InfluenzaA__AFO65016
augaaggccaagcuccucguccuccucugcaccuucaccgccaccuacgccgacaccaucugcaucggcuaccacgccaacaacuccaccgacaccgucgacaccguccucgagaagaacgucaccgucacccacuccgucaaccuccucgaggacucccacaacggcaagcucugccuccucaagggcaucgccccccuccagcucggcaacugcuccgucgccggcuggauccucggcaaccccgagugcgagucccucaucuccaaggaguccugguccuacaucgucgagacccccaaccccgagaacggcaccugcuaccccggcuacuucgccgacuacgaggagcuccgcgagcagcucuccuccgucuccuccuucgagcgcuucgagaucuuccccaaggaguccuccuggcccaaccacaccgucaccggcgucuccgccuccugcucccacaacggcaaguccuccuucuaccgcaaccuccucuggcucaccaagaagaacggccucuaccccaaccucuccaaguccuacgucaacaacaaggagaaggagguccucguccucuggggcguccaccaccccuccaacaucggcgaccagcgcaccaucuaccacaccgagaacgccuacgucuccgucgucuccucccacuacucccgccgcuucacccccgagaucgccaagcgccccaagguccgcgaccaggagggccgcaucaacuacuacuggacccuccucgagcccggcgacaccaucaucuucgaggccaacggcaaccucaucgcccccugguacgccuucgcccucucccgcggcuucggcuccggcaucaucaccuccaacgcccccauggacgagugcgacgccaagugccagaccccccagggcgccaucaacuccucccuccccuuccagaacguccaccccaucaccaucggcgagugccccaaguacguccgcuccgccaagcuccgcauggucaccggccuccgcaacauccccuccauccagucccgcggccucuucggcgccaucgccggcuucaucgagggcggcuggaccggcaugaucgacggcugguacggcuaccaccaccagaacgagcagggcuccggcuacgccgccgaccagaaguccacccagaacgccaucaacggcaucaccaacaaggucaacuccgucaucgagaagaugaacacccaguucaccgccgucggcaaggaguucaacaaccucgagcgccgcauggagaaccucaacaagaaggucgacgacggcuuccucgacaucuggaccuacaacgccgagcuccucguccuccucgagaacgagcgcacccucgacuuccacgacuccaacgucaagaaccucuacgagaaggucaagucccagcucaagaacaacgccaaggagaucggcaacggcugcuucgaguucuaccacaagugcaacaacgagugcauggaguccgucaagaacggcaccuacgacuaccccaaguacuccgaggaguccaagcucaaccgcgagaagaucgacggcgucaagcucgaguccaugggcgucuaccagauccucgccaucuacuccaccgucgccuccucccucguccuccucgucucccucggcgccaucuccuucuggaugugcuccaacggcucccuccagugccgcaucugcaucuga

SEQ ID NO: 105680 - RNA, 1698 nt, Artificial Sequence; identical to SEQ ID NO: 98151
  derived and/or modified CDS sequence (opt2) from hemagglutinin__InfluenzaA__AFO65027

SEQ ID NO: 105681 - RNA, 1698 nt, Artificial Sequence
  derived and/or modified CDS sequence (opt2) from hemagglutinin__InfluenzaA__AFO65038
augaaggccaagcuccucguccuccucugcaccuucaccgccaccuacgccgacaccaucugcaucggcuaccacgccaacaacuccaccgacaccgucgacaccguccucgagaagaacgucaccgucacccacuccgucaaccuccucgaggacucccacaacggcaagcucugccuccucaagggcaucgccccccuccagcucggcaacugcuccgucgccggcuggauccucggcaaccccgagugcgagcuccucaucuccaaggaguccugguccuacaucgucgagacccccaaccccgagaacggcaccugcuaccccggcuacuucgccgacuacgaggagcuccgcgagcagcucuccuccgucuccuccuucgagcgcuucgagaucuuccccaaggaguccuccuggcccaaccacaccgucaccggcgucuccgccuccugcucccacaacggcaaguccuccuucuaccgcaaccuccucuggcucaccggcaagaacggccucuaccccaaccucuccauguccuacgucaacaacaaggagaaggagguccucguccucuggggcguccaccacccccccaacaucggcaaccagcgcgcccucuaccacaccgagaacgccuacgucuccgucgucuccucccacuacucccgccgcuucacccccgagaucgccaagcgccccaagguccgcgaccaggagggccgcaucaacuacuacuggacccuccucgagcccggcgacaccaucaucuucgaggccaacggcaaccucaucgcccccugguacgccuucgcccucucccgcggcuucggcuccggcaucaucaccuccaacgcccccauggacgagugcgacgccaagugccagaccccccagggcgccaucaacuccucccuccccuuccagaacguccaccccgucaccaucggcgagugccccaaguacguccgcuccgccaagcuccgcauggucaccggccuccgcaacauccccuccauccagucccgcggccucuucggcgccaucgccggcuucaucgagggcggcuggaccggcauggucgacggcugguacggcuaccaccaccagaacgagcagggcuccggcuacgccgccgaccagaaguccacccagaacgccaucaacggcaucaccaacaaggucaacuccgucaucgagaagaugaacacccaguucaccgccgucggcaaggaguucaacaagcucgagcgccgcauggagaaccucaacaagaaggucgacgacggcuuccucgacaucuggaccuacaacgccgagcuccucguccuccucgagaacgagcgcacccucgacuuccacgacuccaacgucaagaaccucuacgagaaggucaagucccagcucaagaacaacgccaaggagaucggcaacggcugcuucgaguucuaccacaagugcaacaacgagugcauggaguccgucaagaacggcaccuacgacuaccccaaguacuccgaggaguccaagcucaaccgcgagaagaucgacggcgucaagcucgaguccaugggcgucuaccagauccucgccaucuacuccaccgucgccuccucccucguccuccucgucucccucggcgccaucuccuucuggaugugcuccaacggcucccuccagugccgcaucugcaucuga

SEQ ID NO: 105682 - RNA, 1698 nt, Artificial Sequence
  derived and/or modified CDS sequence (opt2) from hemagglutinin__InfluenzaA__AFO66136
augaaggucaagcuccucguccuccucugcaccuucaccgccaccuacgccgacaccaucugcaucggcuaccacgccaacaacuccaccgacaccgucgacaccguccucgagaagaacgucaccgucacccacuccgucaaccuccucgaggacucccacaacggcaagcucugccuccucaagggcaucgccccccuccagcucggcaacugcuccgucgccggcuggauccucggcaaccccgagugcgagcuccucaucuccaaggaguccugguccuacaucgucgagacccccaaccccgagaacggcaccugcuaccccggcuacuucgccgacuacgaggagcuccgcgagcagcucuccuccgucuccuccuucgagcgcuucgagaucuuccccaaggaguccuccuggcccaaccacaccgucaccggcgucuccgccuccugcucccacaacggcaaguccuccuucuaccgcaaccuccucuggcucaccggcaagaacggccucuaccccaaccucuccaaguccuacgccaacaacaaggagaaggagguccucguccucuggggcguccaccacccccccaacaucggcaaccagcgcgcccucuaccacaccgagaacgccuacgucuccgucgucuccucccacuacucccgccgcuucacccccgagaucgccaagcgccccaagguccgcgaccaggagggccgcaucaacuacuacuggacccuccucgagcccggcgacaccaucaucuucgaggccaacggcaaccucaucgccccccgcuacgccuucgcccucucccgcggcuucggcuccggcaucaucaccuccaacgcccccauggacgagugcgacgccaagugccagaccccccagggcgccaucaacuccucccuccccuuccagaacguccaccccgucaccaucggcgagugccccaaguacguccgcuccgccaagcuccgcauggucaccggccuccgcaacauccccuccauccagucccgcggccucuucggcgccaucgccggcuucaucgagggcggcuggaccggcauggucgacggcugguacggcuaccaccaccagaacgagcagggcuccggcuacgccgccgaccagaaguccacccagaacgccaucaacggcaucaccaacaaggucaacuccgucaucgagaagaugaacacccaguucaccgccgucggcaaggaguucaacaagcucgagcgccgcauggagaaccucaacaagaaggucgacgacggcuuccucgacaucuggaccuacaacgccgagcuccucguccuccucgagaacgagcgcacccucgacuuccacgacuccaacgucaagaaccucuacgagaaggucaagucccagcucaagaacaacgccaaggagaucggcaacggcugcuucgaguucuaccacaagugcaacaacgagugcauggaguccgucaagaacggcaccuacgacuaccccaaguacuccgaggaguccaagcucaaccgcgagaagaucgacggcgucaagcucgaguccaugggcgucuaccagauccucgccaucuacuccaccgucgccuccucccucguccuccucgucucccucggcgccaucuccuucuggaugugcuccaacggcucccuccagugccgcaucugcaucuga

SEQ ID NO: 105683 - RNA, 1701 nt, Artificial Sequence
  derived and/or modified CDS sequence (opt2) from hemagglutinin__InfluenzaA__AFO66147
augaaggccaagcuccucguccuccucugcgccuucaccaccaccuacgccgacaccaucugcaucggcuaccacgccaacaacuccaccgacaccgucgacaccguccucgagaagaacgucaccgucacccacuccgucaaccuccucgaggacucccacaacggcaagcucugccgccucaagggcaccgccccccuccagcucggcaacugcuccaucgccggcuggauccucggcaaccccgagugcgagucccucuucuccaaggaguccugguccuacaucgccgagacccccaaccccaagaacggcaccugcuaccccggcuacuucgccgacuacgaggagcuccgcgagcagcucuccuccgucuccuccuucgagcgcuucgagaucuuccccaaggacuccuccuggcccaaccacaccgucaccaagggcgucaccgccuccugcucccacaacggcaaguccuccuucuacaagaaccuccucuggcucaccggcaagaacggccucuaccccaaccucuccaaguccuacgucaacaagaagggcaaggagguccucguccucuggggcguccaccaccccuccaacaugggcgaccagcgcgccaucuaccacaaggagaacgccuacgucuccguccucuccucccacuacucccgccgcuucacccccgagaucgccaagcgccccaagguccgcgaccaggagggccgcaucaacuacuacuggacccuccucgagcccggcgacaccaucaucuucgaggccaacggcaaccucaucgcccccugguacgccuucgcccucucccgcggcuucggcuccggcaucaucaucuccaacgccuccaugggcgagugcgacgccaagugccagaccccccagggcgccaucaacuccucccuccccuuccagaacguccaccccgucaccaucggcgagugccccaaguacguccgcuccaccaagcuccgcauggucaccggccuccgcaacguccccuccauccagucccgcggccucuucggcgccaucgccggcuucaucgagggcggcuggaccggcaugaucgacggcugguacggcuaccaccaccagaacgagcagggcuccggcuacgccgccgaccagaaguccacccagaacgccaucaacggcaucaccaacaaggucaacuccaucaucgagaagaugaacacccaguucaccgccgucggcaaggaguucaacaagcucgagcgccgcauggagaaccucaacaagaaggucgacgacggcuuccucgacaucuggaccuacaacgccgagcuccucguccuccucgagaacgagcgcacccucgacuuccacgacuccaacgucaagaaccucuacgagaaggucaagaaccagcucaagaacaacgccaaggagaucggcaacggcugcuucgaguucuaccacaagugcaacaacgagugcauggaguccgucaagaacggcaccuacgacuaccccaaguacuccaaggaguccaagcucaaccgcgagaagaucgacggcgucaagcucgaguccaugggcgucuaccagauccucgccaucuacuccaccgucgccuccucccucguccuccucgucucccucggcgccaucuccuucuggaugugcuccaacggcucccuccagugccgcaucugcaucuga

SEQ ID NO: 105684 - RNA, 1698 nt, Artificial Sequence
  derived and/or modified CDS sequence (opt2) from hemagglutinin__InfluenzaA__AFO66158
augaaggccaagcuccucguccuccucugcaccuucaccgccaccuacgccgacaccaucugcaucggcuaccacgccaacaacuccaccgacaccgucgacaccguccucgagaagaacgucaccgucacccacuccgucaaccuccucgaggacucccacaacggcaagcucugccuccucaagggcaucgccccccuccagcucggcaacugcuccgucgccggcuggauccucggcaaccccgagugcgagcuccucaucuccaagggcuccugguccuacaucgucgagacccccaaccccgagaacggcaccugcuaccccggcuacuucgccgacuacgaggagcuccgcgagcagcucuccuccgucuccuccuucgagcgcuucgagaucuuccccaagggcuccuccuggcccaaccacaccgucaccggcgucuccgccuccugcucccacaacggcaaguccuccuucuaccgcaaccuccucuggcucaccggcaagaacggccucuaccccaaccucuccauguccuacgucaacaacaaggagaaggagguccucguccucuggggcguccaccacccccccaacaucggcaaccagcgcgcccucuaccacaccgagaacgccuacgucuccgucgucuccucccacuacucccgccgcuucacccccgagaucgccaagcgccccaagguccgcgaccaggagggccgcaucaacuacuacuggacccuccucgagcccggcgacaccaucaucuucgaggccaacggcaaccucaucgcccccugguacgccuucgcccucucccgcggcuucggcuccggcaucaucaccuccaacgcccccaugggcgagugcgacgccaagugccagaccccccagggcgccaucaacuccucccuccccuuccagaacguccaccccgucaccaucggcgagugccccaaguacguccgcuccgccaagcuccgcauggucaccggccuccgcaacauccccuccauccagucccgcggccucuucggcgccaucgccggcuucaucgagggcggcuggaccggcauggucgacggcugguacggcuaccaccaccagaacgagcagggcuccggcuacgccgccgaccagaaguccacccagaacgccaucaacggcaucaccaacaaggucaacuccgucaucgagaagaugaacacccaguucaccgccgucggcaaggaguucaacaagcucgagcgccgcauggagaaccucaacaagaaggucgacgacggcuuccucgacaucuggaccuacaacgccgagcuccucguccuccucgagaacgagcgcacccucgacuuccacgacuccaacgucaagaaccucuacgagaaggucaagucccagcucaagaacaacgccaaggagaucggcaacggcugcuucgaguucuaccacaagugcaacaacgagugcauggaguccgucaagaacggcaccuacgacuaccccaaguacuccgaggaguccaagcucaaccgcgagaagaucgacggcgucaagcucgaguccaugggcgucuaccagauccucgccaucuacuccaccgucgccuccucccucguccuccucgucucccucggcgccaucuccuucuggaugugcuccaacggcucccuccagugccgcaucugcaucuga

SEQ ID NO: 105685 - RNA, 1698 nt, Artificial Sequence
  derived and/or modified CDS sequence (opt2) from hemagglutinin__InfluenzaA__AFO66169
augaaggucaagcuccucguccuccucugcaccuucaccgccaccuacgccgacaccaucugcaucggcuaccacgccaacaacuccaccgacaccgucgacaccguccucgagaagaacgucaccgucacccacuccgucaaccuccucgaggacucccacaacggcaagcucugccuccucaagggcaucgccccccuccagcucggcaacugcuccgucgccggcuggauccucggcaaccccgagugcgagcuccucaucuccaaggaguccugguccuacaucgucgagaccuccaaccccgagaacggcaccugcuaccccggcuacuucaccgacuacgaggagcuccgcgagcagcucuccuccgucuccuccuucgagcgcuucgagaucuuccccaaggaguccuccuggcccaaccacaccgucaccggcgucuccgccuccugcucccacaacggcaaguccuccuucuacaagaaccuccucuggcucaccggcaagaacggccucuaccccaaccucuccaaguccuacgccaacaacaaggagaaggagguccucguccucuggggcguccaccacccccccaacaucggcgaccagcgcgcccucuaccacaccgagaacgccuacgucuccgucgucuccucccacuacucccgccgcuucacccccgagaucgccaagcgccccaagguccgcgaccaggagggccgcaucaacuacuacuggacccuccucgagcccggcgacaccaucaucuucgaggccaacggcaaccucaucgccccccgcuacgccuucgcccucucccgcggcuucggcuccggcaucaucaccuccaacgcccccauggacgagugcgacgccaagugccagaccccccacggcgccaucaacuccucccuccccuuccagaacguccaccccgucaccaucggcgagugccccaaguacguccgcuccgccaagcuccgcauggucaccggccuccgcaacauccccuccauccagucccgcggccucuucggcgccaucgccggcuucaucgagggcggcuggaccggcauggucgacggcugguacggcuaccaccaccagaacgagcagggcuccggcuacgccgccgaccagaaguccacccagaacgccaucaacggcaucaccaacaaggucaacuccgucaucgagaagaugaacacccaguucaccgccgucggcaaggaguucaacaagcucgagcgccgcauggagaaccucaacaagaaggucgacgacggcuucaucgacaucuggaccuacaacgccgagcuccucguccuccucgagaacgagcgcacccucgacuuccacgacuccaacgucaagaaccucuacgagaaggucaagucccagcucaagaacaacgccaaggagaucggcaacggcugcuucgaguucuaccacaagugcaacgacgagugcauggaguccgucaagaacggcaccuacgacuaccccaaguacuccgaggaguccaagcucaaccgcgagaagaucgacggcgucaagcucgaguccaugggcgucuaccagauccucgccaucuacuccaccgucgccuccucccucguccuccucgucucccucggcgccaucuccuucuggaugugcuccaacggcucccuccagugccgcaucugcaucuga

SEQ ID NO: 105686 - RNA, 1698 nt, Artificial Sequence
  derived and/or modified CDS sequence (opt2) from hemagglutinin__InfluenzaA__AFO66180
augaaggccaagcuccucguccuccucugcaccuucaccgccaccuacgccgacaccaucugcaucggcuaccacgccaacaacuccaccgacaccgucgacaccguccucgagaagaacgucaccgucacccacuccgucaaccuccucgaggacucccacaacggcaagcucugccuccucaagggcaucgccccccuccagcucggcaacugcuccgucgccggcuggauccucggcaaccccgagugcgagcuccucaucuccaaggaguccugguccuacaucgucgagacccccaaccccgagaacggcaccugcuaccccggcuacuucgccgacuacgaggagcuccgcgagcagcucuccuccgucuccuccuucgagcgcuucgagaucuuccccaagggcuccuccuggcccaaccacaccgucaccggcgucuccgccuccugcucccacaacggcaaguccuccuucuaccgcaaccuccucuggcucaccggcaagaacggccucuaccccaaccucuccauguccuacgucaacaacaaggagaaggagguccucguccucuggggcguccaccacccccccaacaucggcgaccagcgcgcccucuaccacaccgagaacgccuacgucuccgucgucuccucccacuacucccgccgcuucacccccgagaucgccaagcgccccaagguccgcaaccaggagggccgcaucaacuacuacuggacccuccucgagcccggcgacaccaucaucuucgaggccaacggcaaccucaucgcccccugguacgccuucgcccucucccgcggcuucggcuccggcaucaucaccuccaacgcccccaugggcgagugcgacgccaagugccagaccccccagggcgccaucaacuccucccuccccuuccagaacguccaccccgucaccaucggcgagugccccaaguacguccgcuccgccaagcuccgcauggucaccggccuccgcaacauccccuccauccagucccgcggccucuucggcgccaucgccggcuucaucgagggcggcuggaccggcauggucgacggcugguacggcuaccaccaccagaacgagcagggcuccggcuacgccgccgaccagaaguccacccagaacgccaucaacggcaucaccaacaaggucaacuccgucaucgagaagaugaacacccaguucaccgccgucggcaaggaguucaacaagcucgagcgccgcauggagaaccucaacaagaaggucgacgacggcuuccucgacaucuggaccuacaacgccgagcuccucguccuccucgagaacgagcgcacccucgacuuccacgacuccaacgucaagaaccucuacgagaaggucaagucccagcucaagaacaacgccaaggagaucggcaacggcugcuucgaguucuaccacaagugcaacaacgagugcauggaguccgucaagaacggcaccuacgacuaccccaaguacuccgaggaguccaagcucaaccgcgagaagaucgacggcgucaagcucgaguccaugggcgucuaccagauccucgccaucuacuccaccgucgccuccucccucguccuccucgucucccucggcgccaucuccuucuggaugugcuccaacggcucccuccagugccgcaucugcaucuga

SEQ ID NO: 105687 - RNA, 1698 nt, Artificial Sequence
  derived and/or modified CDS sequence (opt2) from hemagglutinin__InfluenzaA__AFO66191
augaaggccaagcuccucguccuccucugcaccuucaccgccaccuacgccgacaccaucugcaucggcuaccacgccaacaacuccaccgacaccgucgacaccguccucgagaagaacgucaccgucacccacuccgucaaccuccucgaggacucccacaacggcaagcucugccuccucaagggcaucgccccccuccagcucggcaacugcuccgucgccggcuggauccucggcaaccccgagugcgagcuccucaucuccaaggaguccugguccuacaucgucgagacccccaaccccgagaacggcaccugcuaccccggcuacuucgccgacuacgaggagcuccgcgagcagcucuccuccgucuccuccuucgagcgcuucgagaucuuccccaagggcuccuccuggcccaaccacaccgucaccggcgucuccgccuccugcucccacaacggcaaguccuccuucuaccgcaaccuccucuggcucaccggcaagaacggccucuaccccaaccucuccauguccuacgucaacaacaaggagaaggagguccucguccucuggggcguccaccacccccccaacaucggcaaccagcgcgcccucuaccacaccgagaacgccuacgucuccgucgucuccucccacuacucccgccgcuucacccccgagaucgccaagcgccccaagguccgcgaccaggagggccgcaucaacuacuacuggacccuccucgagcccggcgacaccaucaucuucgaggccaacggcaaccucaucgcccccugguacgccuucgcccucucccgcggcuucggcuccggcaucaucaccuccaacgcccccauggacgagugcgacgccaagugccagaccccccagggcgccaucaacuccucccuccccuuccagaacguccaccccgucaccaucggcgagugccccaaguacguccgcuccgccaagcuccgcauggucaccggccuccgcaacauccccuccauccagucccgcggccucuucggcgccaucgccggcuucaucgagggcggcuggaccggcauggucgacggcugguacggcuaccaccaccagaacgagcagggcuccggcuacgccgccgaccagaaguccacccagaacgccaucaacggcaucaccaacaaggucaacuccgucaucgagaagaugaacacccaguucaccgccgucggcaaggaguucaacaagcucgagcgccgcauggagaaccucaacaagaaggucgacgacggcuuccucgacaucuggaccuacaacgccgagcuccucguccuccucgagaacgagcgcacccucgacuuccacgacuccaacgucaagaaccucuacgagaaggucaagucccagcucaagaacaacgccaaggagaucggcaacggcugcuucgaguucuaccacaagugcaacaacgagugcauggaguccgucaagaacggcaccuacgacuaccccaaguacuccgaggaguccaagcucaaccgcgagaagaucgacggcgucaagcucgaguccaugggcgucuaccagauccucgccaucuacuccaccgucgccuccucccucguccuccucgucucccucggcgccaucuccuucuggaugugcuccaacggcucccuccagugccgcaucugcaucuga

SEQ ID NO: 105688 - RNA, 1698 nt, Artificial Sequence; identical to SEQ ID NO: 96548
  derived and/or modified CDS sequence (opt2) from hemagglutinin__InfluenzaA__AFO66202

SEQ ID NO: 105689 - RNA, 1698 nt, Artificial Sequence
  derived and/or modified CDS sequence (opt2) from hemagglutinin__InfluenzaA__AFO66213
augaaggucaagcuccucguccuccucugcaccuucaccgccaccuacgccgacaccaucugcaucggcuaccacgccaacaacuccaccgacaccgucgacaccguccucgagaagaacgucaccgucacccacuccgucaaccuccucgaggacucccacaacggcaagcucugccuccucaagggcaucgccccccuccagcucggcaacugcuccgucgccggcuggauccucggcaaccccgagugcgagcuccucaucuccaaggaguccugguccuacaucgucgagacccccaaccccgagaacggcaccugcuaccccggcuacuucgccgacuacgaggagcuccgcgagcagcucuccuccgucuccuccuucgagcgcuucgagaucuuccccaaggaguccuccuggcccaaccacaccgucaccggcgucuccgccuccugcucccacaacggcaaguccuccuucuaccgcaaccuccucuggcucaccggcaagaacggccucuaccccaaccucuccaaguccuacgccaacaacaagaagaaggagguccucguccucuggggcguccaccacccccccaacaucggcaaccagcgcgcccucuaccacaccgagaacgccuacgucuccgucgucuccucccacuacucccgccgcuucacccccgagaucgccaagcgccccaagguccgcgaccaggagggccgcaucaacuacuacuggacccuccucgagcccggcgacaccaucaucuucgaggccaacggcaaccucaucgccccccgcuacgccuucgcccucucccgcggcuucggcuccggcaucaucaccuccaacgcccccauggacgagugcgacgccaagugccagaccccccagggcgccaucaacuccucccuccccuuccagaacguccaccccgucaccaucggcgagugccccaaguacguccgcuccgccaagcuccgcauggucaccggccuccgcaacauccccuccauccagucccgcggccucuucggcgccaucgccggcuucaucgagggcggcuggaccggcauggucgacggcugguacggcuaccaccaccagaacgagcagggcuccggcuacgccgccgaccagaaguccacccagaacgccaucaacggcaucaccaacaaggucaacuccgucaucgagaagaugaacacccaguucaccgccgucggcaaggaguucaacaagcucgagcgccgcauggagaaccucaacaagaaggucgacgacggcuuccucgacaucuggaccuacaacgccgagcuccucguccuccucgagaacgagcgcacccucgacuuccacgacuccaacgucaagaaccucuacgagaaggucaagucccagcucaagaacaacgccaaggagaucggcaacggcugcuucgaguucuaccacaagugcaacgacgagugcauggaguccgucaagaacggcaccuacgacuaccccaaguacuccgaggaguccaagcucaaccgcgagaagaucgacggcgucaagcucgaguccaugggcgucuaccagauccucgccaucuacuccaccgucgccuccucccucguccuccucgucucccucggcgccaucuccuucuggaugugcuccaacggcucccuccagugccgcaucugcaucuga

SEQ ID NO: 105690 - RNA, 1698 nt, Artificial Sequence
  derived and/or modified CDS sequence (opt2) from hemagglutinin__InfluenzaA__AFO66224
augaaggucaagcuccucguccuccucugcaccuucaccgccaccuacgccgacaccaucugcaucggcuaccacgccaacaacuccaccgacaccgucgacaccguccucgagaagaacgucaccgucacccacuccgucaaccuccucgaggacucccacaacggcaagcucugccuccucaagggcaucgccccccuccagcucggcaacugcuccgucgccggcuggauccucggcaaccccgagugcgagcuccucaucuccaaggaguccugguccuacaucgucgagacccccaaccccgagaacggcaccugcuaccccggcuacuucgccgacuacgaggagcuccgcgagcagcucuccuccgucuccuccuucgagcgcuucgagaucuuccccaaggaguccuccuggcccaaccacaccgucaccggcgucuccgccuccugcucccacaacggcaaguccuccuucuaccgcaaccuccucuggcucaccggcaagaacggccucuaccccaaccucuccaaguccuacgccaacaacaaggagaaggagguccucguccucuggggcguccaccacccccccaacaucggcaaccagcgcgcccucuaccacaccgagaacgccuacgucuccgucgucuccucccacuacucccgccgcuucacccccgagaucgccaagcgccccaagguccgcgaccaggagggccgcaucaacuacuacuggacccuccucgagcccggcgacaccaucaucuucgaggccaacggcaaccucaucgccccccgcuacgccuucgcccucucccgcggcuucggcuccggcaucaucaccuccaacgcccccauggacgagugcgacgccaagugccagaccccccagggcgccaucaacuccucccuccccuuccagaacguccaccccgucaccaucggcgagugccccaaguacguccgcuccgccaagcuccgcauggucaccggccuccgcaacauccccuccauccagucccgcggccucuucggcgccaucgccggcuucaucgagggcggcuggaccggcauggucgacggcugguacggcuaccaccaccagaacgagcagggcuccggcuacgccgccgaccagaaguccacccagaacgccaucaacggcaucaccaacaaggucaacuccgucaucgagaagaugaacacccaguucaccgccgucggcaaggaguucaacaagcucgagcgccgcauggagaaccucaacaagaaggucgacgacggcuuccucgacaucuggaccuacaacgccgagcuccucguccuccucgagaacgagcgcacccucgacuuccacgacuccaacgucaagaaccucuacgagaaggucaagucccagcucaagaacaacgccaaggagaucggcaacggcugcuucgaguucuaccacaagugcaacgacgagugcauggaguccgucaagaacggcaccuacgacuaccccaaguacuccgaggaguccaagcucaaccgcgagaagaucgacggcgucaagcucgaguccaugggcgucuaccagauccucgccaucuacuccaccgucgccuccucccucguccuccucgucucccucggcgccaucuccuucuggaugugcuccaacggcucccuccagugccgcaucugcaucuga

SEQ ID NO: 105691 - RNA, 1698 nt, Artificial Sequence
  derived and/or modified CDS sequence (opt2) from hemagglutinin__InfluenzaA__AFO66235
augaaggucaagcuccucguccuccucugcaccuucaccgccaccuacgccgacaccaucugcaucggcuaccacgccaacaacuccaccgacaccgucgacaccguccucgagaagaacgucaccgucacccacuccgucaaccuccucgaggacucccacaacggcaagcucugccuccucaagggcaucgccccccuccagcucggcaacugcuccgucgccggcuggauccucggcaaccccgagugcgagcuccucaucuccaaggaguccugguccuacaucgucgagaagcccaaccccgagaacggcaccugcuaccccggccacuucgccgacuacgaggagcuccgcgagcagcucuccuccgucuccuccuucgagcgcuucgagaucuuccccaaggaguccuccuggcccaaccacaccgucaccggcgucuccgccuccugcucccacaacggcaaguccuccuucuacaagaaccuccucuggcucaccggcaagaacggccucuaccccaaccucuccaaguccuacgccaacaacaaggagaaggagguccucguccucuggggcguccaccacccccccaacaucggcguccagcgcgcccucuaccacaccgagaacgccuacgucuccgucgucuccucccacuacucccgcaaguucacccccgagaucgccaagcgccccaagguccgcgaccaggagggccgcaucaacuacuacuggacccuccucgagcccggcgacaccaucaucuucgaggccaacggcaaccucaucgccccccgcuacgccuucgcccucucccgcggcuucggcuccggcaucaucaacuccaacgcccccauggacgagugcgacgccaagugccagaccccccagggcgccaucaacuccucccuccccuuccagaacguccaccccgucaccaucggcgagugccccaaguacguccgcuccgccaagcuccgcauggucaccggccuccgcaacauccccuccauccagucccgcggccucuucggcgccaucgccggcuucaucgagggcggcuggaccggcauggucgacggcugguacggcuaccaccaccagaacgagcagggcuccggcuacgccgccgaccagaaguccacccagaacgccaucaacggcaucaccaacaaggucaacuccgucaucgagaagaugaacacccaguucaccgccgucggcaaggaguucaacaagcucgagcgccgcauggagaaccucaacaagaaggucgacgacggcuucaucgacaucuggaccuacaacgccgagcuccucguccuccucgagaacgagcgcacccucgacuuccacgacuccaacgucaagaaccucuacgagaaggucaagucccagcucaagaacaacgccaaggagaucggcaacggcugcuucgaguucuaccacaagugcaacgacgagugcauggaguccgucaagaacggcaccuacgacuaccccaaguacuccgaggaguccaagcucaaccgcgagaagaucgacggcgucaagcucgaguccaugggcgucuaccagauccucgccaucuacuccaccgucgccuccucccucguccuccucgucucccucggcgccaucuccuucuggaugugcuccaacggcucccuccagugccgcaucugcaucuga

SEQ ID NO: 105692 - RNA, 1698 nt, Artificial Sequence
  derived and/or modified CDS sequence (opt2) from hemagglutinin__InfluenzaA__AFO66246
augaaggucaagcuccucguccuccucugcaccuucaccgccaccuacgccgacaccaucugcaucggcuaccacgccaacaacuccaccgacaccgucgacaccguccucgagaagaacgucaccgucacccacuccgucaaccuccucgaggacucccacaacggcaagcucugccuccucaagggcaucgccccccuccagcucggcaacugcuccgucgccggcuggauccucggcaaccccgagugcgagcuccucaucuccaaggaguccugguccuacaucgucgagaagcccaaccccgagaacggcaccugcuaccccggccacuucgccgacuacgaggagcuccgcgagcagcucuccuccgucuccuccuucgagcgcuucgagaucuuccccaaggaguccuccuggcccaaccacaccgucaccggcgucuccgccuccugcucccacaacggcaaguccuccuucuacaagaaccuccucuggcucaccggcaagaacggccucuaccccaaccucuccaaguccuacgccaacaacaaggagaaggagguccucguccucuggggcguccaccacccccccaacaucggcaaccagcgcgcccucuaccacaccgagaacgccuacgucuccgucgucuccucccacuacucccgcaaguucacccccgagaucgccaagcgccccaagguccgcgaccaggagggccgcaucaacuacuacuggacccuccucgagcccggcgacaccaucaucuucgaggccaacggcaaccucaucgccccccgcuacgccuucgcccucucccgcggcuucggcuccggcaucaucaacuccaacgcccccauggacgagugcgacgccgagugccagaccccccagggcgccaucaacuccucccuccccuuccagaacguccaccccgucaccaucggcgagugccccaaguacguccgcuccgccaagcuccgcauggucaccggccuccgcaacauccccuccauccagucccgcggccucuucggcgccaucgccggcuucaucgagggcggcuggaccggcauggucgacggcugguacggcuaccaccaccagaacgagcagggcuccggcuacgccgccgaccagaaguccacccagaacgccaucaacggcaucaccaacaaggucaacuccgucaucgagaagaugaacacccaguucaccgccgucggcaaggaguucaacaagcucgagcgccgcauggagaaccucaacaagaaggucgacgacggcuucaucgacaucuggaccuacaacgccgagcuccucguccuccucgagaacgagcgcacccucgacuuccacgacuccaacgucaagaaccucuacgagaaggucaagucccagcucaagaacaacgccaaggagaucggcaacggcugcuucgaguucuaccacaagugcaacgacgagugcauggaguccgucaagaacggcaccuacgacuaccccaaguacuccgaggaguccaagcucaaccgcgagaagaucgacggcgucaagcucgaguccaugggcgucuaccagauccucgccaucuacuccaccgucgccuccucccucguccuccucgucucccucggcgccaucuccuucuggaugugcuccaacggcucccuccagugccgcaucugcaucuga

SEQ ID NO: 105693 - RNA, 1701 nt, Artificial Sequence
  derived and/or modified CDS sequence (opt2) from hemagglutinin__InfluenzaA__AFP33324
augaaggccaagcuccucguccuccucugcaccuucaccgccaccuacgccgacaccaucugcaucggcuaccacgccaacaacuccaccgacaccgucgacaccguccucgagaagaacgucaccgucacccacuccgucaaccuccucgaggacucccacaacggcaagcucugccgccucaagggcaccgccccccuccagcucggcaacugcuccaucgccggcuggauccucggcaaccccgagugcgagucccucuucuccaaggaguccugguccuacaucgccgagacccccaaccccaagaacggcaccugcuaccccggcuacuucgccgacuacgaggagcuccgcgagcagcucuccuccgucuccuccuucgagcgcuucgagaucuuccccaaggacuccuccuggcccaaccacaccgucaccaagggcgucaccgccuccugcucccacaacggcaaguccuccuucuacaagaaccuccucuggcucaccggcaagaacggccucuaccccaaccucuccaaguccuacgucaacaagaagggcaaggagguccucguccucuggggcguccaccaccccuccaacaugggcgaccagcgcgccaucuaccacaaggagaacgccuacgucuccguccucuccucccacuacucccgccgcuucacccccgagaucgccaagcgccccaagguccgcgaccaggagggccgcaucaacuacuacuggacccuccucgagcccggcgacaccaucaucuucgaggccaacggcaaccucaucgcccccugguacgccuucgcccucucccgcggcuucggcuccggcaucaucaucuccaacgccuccaugggcgagugcgacgccaagugccagaccccccagggcgccaucaacuccucccuccccuuccagaacguccaccccgucaccaucggcgagugccccaaguacguccgcuccaccaagcuccgcauggucaccggccuccgcaacguccccuccauccagucccgcggccucuucggcgccaucgccggcuucaucgagggcggcuggaccggcaugaucgacggcugguacggcuaccaccaccagaacgagcagggcuccggcuacgccgccgaccagaaguccacccagaacgccaucaacggcaucaccaacaaggucaacuccaucaucgagaagaugaacacccaguucaccgccgucggcaaggaguucaacaagcucgagcgccgcauggagaaccucaacaagaaggucgacgacggcuuccucgacaucuggaccuacaacgccgagcuccucguccuccucgagaacgagcgcacccucgacuuccacgacuccaacgucaagaaccucuacgagaaggucaagacccagcucaagaacaacgccaaggagaucggcaacggcugcuucgaguucuaccacaagugcaacaacgagugcauggaguccgucaagaacggcaccuacgacuaccccaaguacuccaaggaguccaagcucaaccgcgagaagaucgacggcgucaagcucgaguccaugggcgucuaccagauccucgccaucuacuccaccgucgccuccucccucguccuccucgucucccucggcgccaucuccuucuggaugugcuccaacggcucccuccagugccgcaucugcaucuga

SEQ ID NO: 105694 - RNA, 1698 nt, Artificial Sequence
  derived and/or modified CDS sequence (opt2) from hemagglutinin__InfluenzaA__AFP33325
augaaggucaagcuccucguccuccucugcaccuucaccgccaccuacgccgacaccaucugcaucggcuaccacgccaacaacuccaccgacaccgucgacaccguccucgagaagaacgucaccgucacccacuccgucaaccuccucgaggacucccacaacggcaagcucugccuccucaagggcaucgccccccuccagcucggcaacugcuccgucgccggcuggauccucggcaaccccgagugcgagcuccucauccccaaggaguccugguccuacaucgucgagacccccaaccccgagaacggcaccugcuaccccggcuacuucgccgacuacgaggagcuccgcgagcagcucuccuccgucuccuccuucgagcgcuucgagaucuuccccaaggaguccuccuggcccucccacaccgucaccggcgucuccgccuccugcucccacaacggcaaguccuccuucuaccgcaaccuccucuggcucaccggcaagaacggccucuaccccaaccucuccaaguccuacuccaacaacaaggagaaggagguccucguccucuggggcguccaccacccccccaacaucggcgaccagcgcgcccucuaccacaccgagaacgccuacgucuccgucgucuccucccacuacucccgccgcuucacccccgagaucgccaagcgccccaagguccgcggccaggagggccgcaucaacuacuacuggacccuccucgagcccggcgacaccaucaucuucgaggccaacggcaaccucaucgcccccugguacgccuucgcccucucccgcggcuucggcuccggcaucaucaccuccaacgcccccauggacgagugcgacgccaagugccagaccccccagggcgccaucaacuccucccuccccuuccagaacguccaccccgucaccaucggcgagugccccaaguacguccgcuccgccaagcuccgcauggucaccggccuccgcaacauccccuccauccagucccgcggccucuucggcgccaucgccggcuucaucgagggcggcuggaccggcauggucgacggcugguacggcuaccaccaccagaacgagcagggcuccggcuacgccgccgaccagaaguccacccagaacgccaucaacggcaucaccaacaaggucaacuccgucaucgagaagaugaacacccaguucaccgccgucggcaaggaguucaacaagcucgagcgccgcauggagaaccucaacaagaaggucgacgacggcuuccucgacaucuggaccuacaacgccgagcuccucguccuccucgagaacgagcgcacccucgacuuccacgacuccaacgucaagaaccucuacgagaaggucaagucccagcucaagaacaacgccaaggagaucggcaacggcugcuucgaguucuaccacaagugcaacgacgagugcauggaguccgucaagaacggcaccuacgacuaccccaaguacuccgaggaguccaagcucaaccgcgagaagaucgacggcgucaagcucgaguccaugggcgucuaccagauccucgccaucuacuccaccgucgccuccucccucguccuccucgucucccucggcgccaucuccuucuggaugugcuccaacggcucccuccagugccgcaucugcaucuga

SEQ ID NO: 105695 - RNA, 1701 nt, Artificial Sequence
  derived and/or modified CDS sequence (opt2) from hemagglutinin__InfluenzaA__AFQ32573
augaagaccaucaucgcccucuccuacauccucugccucgucuucgcccagaagcuccccggcaacgacaacuccaccgccacccucugccucggccaccacgccguccccaacggcaccaucgucaagaccaucaccaacgaccagaucgaggucaccaacgccaccgagcucguccaguccuccuccaccggcgagaucugcaacuccccccaccagauccucgacggcgagaacugcacccucaucgacgcccuccucggcgacccccagugcgacggcuuccagaacaagaagugggaccucuucgucgagcgcuccaaggcccacuccaacugcuaccccuacgacguccccgacuacgccucccuccgcucccucgucgccuccuccggcacccucgaguucaacaacgaguccuucaacuggaccggcgucacccagaacggcaccuccuccgccugcauccgccgcuccaacaacuccuucuucucccgccucaacuggcucacccaccucaacuucaaguaccccgcccucaacgucaccaugcccaacaacgagcaguucgacaagcucuacaucuggggcguccaccaccccggcaccgacaaggaccagaucuuccucuacgcccaggccuccggccgcaucaccgucuccaccaagcgcucccagcaggccgucauccccaacaucggcucccgcccccgcguccgcaacauccccucccgcgucuccaucuacuggaccaucgucaagcccggcgacauccuccucaucaacuccaccggcaaccucaucgccccccgcggcuacuucaagauccgcuccggcaaguccuccaucaugcgcuccgacgcccccaucggcaagugcaacuccgccugcaucacccccaacggcuccauccccaacgacaagcccuuccagaacgucaaccgcaucaccuacggcgccugcccccgcuacgucaagcagaacacccucaagcucgccaccggcaugcgcaacguccccgagaagcagacccgcggcaucuucggcgccaucgccggcuucaucgagaacggcugggagggcauggucgacggcugguacggcuuccgccaccagaacuccgagggccgcggccaggccgccgaccucaaguccacccaggccgccaucgaccagaucaacggcaagcucaaccgccucaucggcaagaccaacgagaaguuccaccagaucgagaaggaguucuccgaggucgagggccgcauccaggaccucgagaaguacgucggcgacaccaagaucgaccucugguccuacaacgccgagcuccucgucgcccucgagaaccagcacaccaucgaccucaccgacuccgagaugaacaagcucuucgagaagaccaagaagcagcuccgcgagaacgccgaggacaugggcaacggcugcuucaagaucuaccacaagugcgacaacgccugcaucggcuccauccgcaacggcaccuacgaccacgacgucuaccgcgacgaggcccucaacaaccgcuuccagaucaagggcgucgagcucaaguccggcuacaaggacuggauccucuggaucuccuucgccaucuccugcuuccuccucugcgucgcccuccucggcuucaucaugugggccugccagaagggcaacauccgcugcaacaucugcaucuga

SEQ ID NO: 105696 - RNA, 1701 nt, Artificial Sequence
  derived and/or modified CDS sequence (opt2) from hemagglutinin__InfluenzaA__AFQ37281
augaaggccauccucgucguccuccucuacaccuucgccaccaccaacgccgacacccucugcaucggcuaccacgccaacaacuccaccgacaccgucgacaccguccucgagaagaacgucaccgucacccacuccgucaaccuccucgaggacaagcacaacggcaagcucugcaagcuccgcggcgucgccccccuccaccucggcaagugcaacaucgccggcuggauccucggcaaccccgagugcgagucccucuccaccgccuccuccugguccuacaucgucgagaccuccuccuccgacaacggcaccugcuaccccggcgacuucaucgacuacgaggagcuccgcgagcagcucuccuccgucuccuccuucgagcgcuucgagaucuuccccaagaccuccuccuggcccaaccacgacuccaacaagggcgucaccgccgccugcccccacgccggcgccaaguccuucuacaagaaccucaucuggcucgucaagaagggcaacuccuaccccaagcucuccaaguccuacaucaacgacaagggcaaggagguccucguccucuggggcauccaccaccccuccaccuccaccgaccagcagucccucuaccagaacgccgacgccuacgucuucgucggcaccucccgcuacuccaagaaguucaagcccgagaucgccauccgccccaagguccgcgaccgcgagggccgcaugaacuacuacuggacccucgucgagcccggcgacaagaucaccuucgaggccaccggcaaccucgucgucccccgcuacgccuucgccauggagcgcaacgccggcuccggcaucaucaucuccgacacccccgcccacgacugcaacaccaccugccagacccccaagggcgccaucaacaccucccuccccuuccagaacguccaccccaucaccaucggcaagugccccaaguacgucaaguccaccaagcuccgccucgccaccggccuccgcaacguccccuccauccagucccgcggccucuucggcgccaucgccggcuucaucgagggcggcuggaccggcauggucgacggcugguacggcuaccaccaccagaacgagcagggcuccggcuacgccgccgaccucaaguccacccagaacgccaucgacaagaucaccaacaaggucaacuccgucaucgagaagaugaacacccaguucaccgccgucggcaaggaguucaaccaccucgagaagcgcaucgagaaccucaacaagaaggucgacgacggcuuccucgacaucuggaccuacaacgccgagcuccucguccuccucgagaacgagcgcacccucgacuaccacgacuccaacgucaagaaccucuacgagaagguccgcucccagcucaagaacaacgccaaggagaucggcaacggcugcuucgaguucuaccacaagugcgacgacaagugcauggaguccgucaagaacggcaccuacgacuaccccaaguacuccgaggaggccaagcucaaccgcgaggagaucgacggcgucaagcucgaguccacccgcaucuaccagauccucgccaucuacuccaccgccgccuccucccucguccucgucgucucccucggcgccaucuccuucuggaugugcuccaacggcucccuccagugccgcaucugcaucuga

SEQ ID NO: 105697 - RNA, 1707 nt, Artificial Sequence
  derived and/or modified CDS sequence (opt2) from hemagglutinin__InfluenzaA__AFQ55689
augaacacccagauccucgcccucaucgccugcaugcucaucggcgccaagggcgacaagaucugccucggccaccacgccgucgccaacggcaccaaggucaacacccucaccgagcgcggcaucgaggucgucaacgccaccgagaccgucgagaccgccaacaccaagaagaucugcacccagggcaagcgccccaccgaccucggccagugcggccuccucggcacccucaucggccccccccagugcgaccaguuccucgaguucgacgccgaccucaucaucgagcgccgcgagggcaccgacgucugcuaccccggcaaguucaccaacgaggagucccuccgccagauccuccgcggcuccggcggcaucgacaaggaguccaugggcuucaccuacuccggcauccgcaccaacggcgccaccuccgccugccgccgcuccggcuccuccuucuacgccgagaugaaguggcuccucuccaacuccgacaacgccgccuucccccagaugaccaaguccuaccgcaacccccgcaacaagcccgcccucaucaucuggggcguccaccacuccggcuccgccaccgagcagaccaagcucuacggcuccggcaacaagcucaucaccgucggcuccuccaaguaccagcaguccuucacccccucccccggcgcccgcccccaggucaacggccaguccggccgcaucgacuuccacuggcuccuccucgaccccaacgacaccgucaccuucaccuucaacggcgccuucaucgcccccgaccgcgccuccuucuuccgcggcgaguccaucggcguccaguccgacgucccccucgacuccggcugcgagggcgacugcuuccacaacggcggcaccaucgucuccucccuccccuuccagaacaucaacccccgcaccgucggcaagugcccccgcuacgucaagcagaccucccuccuccucgccaccggcaugcgcaacguccccgagaaccccaaggaccgcaagucccgccaccgccgcacccgcggccucuucggcgccaucgccggcuucaucgagaacggcugggagggccucaucgacggcugguacggcuuccgccaccagaacgcccagggcgagggcaccgccgccgacuacaaguccacccaguccgccaucgaccagaucaccggcaagcucaaccgccucaucgacaagaccaaccagcaguucgagcucaucgacaacgaguucuccgagaucgagcagcagaucggcaacgucaucaacuggacccgcgacuccaugaccgaggucugguccuacaacgccgagcuccucgucgccauggagaaccagcacaccaucgaccucgccgacuccgagaugaacaagcucuacgagcgcguccgcaagcagcuccgcgagaacgccgaggaggacggcaccggcugcuucgagaucuuccacaagugcgacgaccagugcauggaguccauccgcaacaacaccuacgaccacacccaguaccgcgccgagucccuccagaaccgcauccagaucgaccccgucaagcucuccuccggcuacaaggacaucauccucugguucuccuucggcgccuccugcuuccuccuccucgccaucgccaugggccucgucuucaucugcaucaagaacggcaacaugcgcugcaccaucugcaucuga

SEQ ID NO: 105698 - RNA, 1701 nt, Artificial Sequence; identical to SEQ ID NO: 104222
  derived and/or modified CDS sequence (opt2) from hemagglutinin__InfluenzaA__AFR68153

SEQ ID NO: 105699 - RNA, 1701 nt, Artificial Sequence
  derived and/or modified CDS sequence (opt2) from hemagglutinin__InfluenzaA__AFR68163
augaaggccacccucgucguccuccucuacaccuucgccaccgccaacgccgacacccucugcaucggcuaccacgccaacaacuccaccgacaccgucgacaccguccucgagaagaacgucaccgucacccacuccgccaaccuccucgaggacaagcacaacggcaagcucugcaagcuccgcggcgucgccccccuccaccucggcaagugcaacaucgccggcuggauccucggcaaccccgagugcgagacccucuccaccgccuccuccugguccuacaucgucgagaccuccuccuccgacaacggcaccugcuaccccggcgacuucaucgacuacgaggagcuccgcgagcagcucuccuccgucuccuccuucgagcgcuucgagaucuuccccaagaccuccuccuggcccaaccacgacuccaacaagggcgucaccgccgccugcccccacgccggcgccaagggcuucuacaagaaccucaucuggcucgucaagaagggcaacuccuaccccaagcucuccaaguccuacaucaacgacaagggcaaggagguccucguccucuggggcauccaccaccccuccaccaccgccgaccagcagucccucuaccagaacgccgacaccuacgucuucgucggcaccucccgcuacuccaagaaguucaagcccgagaucgccauccgccccaagguccgcgaccaggagggccgcaugaacuacuacuggacccucgucgagcccggcgacaagaucaccuucgaggccaccggcaaccucgucgucccccgcuacgccuucgccauggagcgcgacgccggcuccggcaucaucaucuccgacacccccguccacgacugcaacaccaccugccagacccccaagggcgccaucaacaccucccuccccuuccagaacauccaccccaucaccaucggcaagugccccaaguacgucaaguccaccaagcuccgccucgccaccggccuccgcaacguccccuccauccagucccgcggccucuucggcgccaucgccggcuucaucgagggcggcuggaccggcauggucgacggcugguacggcuaccaccaccagaacgagcagggcuccggcuacgccgccgaccucaaguccacccagaacgccaucgacaagaucaccaacaaggucaacuccgucaucgagaagaugaacacccaguucaccgccgucggcaaggaguucaaccaccucgagaagcgcaucgagaaccucaacaagaaggucgacgacggcuuccucgacaucuggaccuacaacgccgagcuccucguccuccucgagaacgagcgcacccucgacuaccacgacuccaacgucaagaaccucuacgagaagguccgcaaccagcucaagaacaacgccaaggagaucggcaacggcugcuucgaguucuaccacaagugcgacaacaccugcauggaguccgucaagaacggcaccuacgacuaccccaaguacuccgaggaggccaagcucaaccgcgaggagaucgacggcgucaagcucgaguccacccgcaucuaccagauccucgccaucuacuccaccgccgccuccucccucguccucgucgucucccucggcgccaucuccuucuggaugugcuccaacggcucccuccagugccgcaucugcaucuga

SEQ ID NO: 105700 - RNA, 1701 nt, Artificial Sequence
  derived and/or modified CDS sequence (opt2) from hemagglutinin__InfluenzaA__AFR68173
augaagaccaucaucgcccucuccuacauccucugccucgucuucgcccagaagcuccccggcaacgacaacuccaccgccacccucugccucggccaccacgccguccccaacggcaccaucgucaagaccaucaccaacgaccagaucgaggucaccaacgccaccgagcucguccaguccuccuccaccggcgagaucugcgacuccccccaccagauccucgacggcgagaacugcacccucaucgacgcccuccucggcgacccccagugcgacggcuuccagaacaagaagugggaccucuucgucgagcgcuccaaggccuacuccaacugcuaccccuacgacguccccgacuacgccucccuccgcucccucgucgccuccuccggcacccucgaguucaacaacgaguccuucaacuggaccggcgucacccagaacggcaccuccuccgccugcauccgccgcuccaacuccuccuucuucucccgccucaacuggcucacccaccucaacuucaaguaccccgcccucaacgucaccaugcccaacaacgagcaguucgacaagcucuacaucuggggcguccaccaccccggcaccgacaaggaccagaucuuccucuacgcccaggccuccggccgcaucaccgucuccaccaagcgcucccagcaguccgucauccccaacaucggcucccgcccccgcauccgcaacauccccucccgcaucuccaucuacuggaccaucgucaagcccggcgacauccuccucaucaacuccaccggcaaccucaucgccccccgcggcuacuucaagauccgcuccggcaaguccuccaucaugcgcuccgacgcccccaucggcaagugcaacuccgagugcaucacccccaacggcuccauccccaacgacaagcccuuccagaacgucaaccgcaucaccuacggcgccugcccccgcuacgucaagcagaacacccucaagcucgccaccggcaugcgcaacguccccgagaagcagacccgcggcaucuucggcgccaucgccggcuucaucgagaacggcugggagggcauggucgacggcugguacggcuuccgccaccagaacuccgagggccgcggccaggccgccgaccucaaguccacccaggccgccaucgaccagaucaacggcaagcucaaccgccucaucggcaagaccaacgagaaguuccaccagaucgagaaggaguucuccgaggucgagggccgcauccaggaccucgagaaguacgucgaggacaccaagaucgaccucugguccuacaacgccgagcuccucgucgcccucgagaaccagcacaccaucgaccucaccgacuccgagaugaacaagcucuucgagaagaccaagaagcagcuccgcgagaacgccgaggacaugggcaacggcugcuucaagaucuaccacaagugcgacaacgccugcaucggcuccauccgcaacggcaccuacaaccacgacgucuaccgcgacgaggcccucaacaaccgcuuccagaucaagggcgucgagcucaaguccggcuacaaggacuggauccucuggaucuccuucgccaucuccugcuuccuccucugcgucgcccuccucggcuucaucaugugggccugccagaagggcaacauccgcugcaacaucugcaucuga

SEQ ID NO: 105701 - RNA, 1701 nt, Artificial Sequence; identical to SEQ ID NO: 98705
  derived and/or modified CDS sequence (opt2) from hemagglutinin__InfluenzaA__AFR84675

SEQ ID NO: 105702 - RNA, 1701 nt, Artificial Sequence; identical to SEQ ID NO: 99058
  derived and/or modified CDS sequence (opt2) from hemagglutinin__InfluenzaA__AFR84685

SEQ ID NO: 105703 - RNA, 1701 nt, Artificial Sequence; identical to SEQ ID NO: 98885
  derived and/or modified CDS sequence (opt2) from hemagglutinin__InfluenzaA__AFR84694

SEQ ID NO: 105704 - RNA, 1701 nt, Artificial Sequence; identical to SEQ ID NO: 98692
  derived and/or modified CDS sequence (opt2) from hemagglutinin__InfluenzaA__AFR84704

SEQ ID NO: 105705 - RNA, 1701 nt, Artificial Sequence
  derived and/or modified CDS sequence (opt2) from hemagglutinin__InfluenzaA__AFR84714
augaaggccauccucgucguccuccucuacaccuucgccaccgccaacgccgacacccucugcaucggcuaccgcgccaacaacuccaccgacaccgucgacaccguccucgagaagaacgucaccgucacccacuccgucaacauccucgaggacaagcacaacggcaagcucugcaagcuccgcggcgucgccccccuccaccucggcaagugcaacaucgccggcuggauccucggcaaccccgagugcgagucccucuccaccgccuccuccugguccuacaucgucgagaccuccuccuccgacaacggcaccugcuaccccggcgacuucaucgacuacgaggagcuccgcgagcagcucuccuccgucuccuccuucgagcgcuucgagaucuuccccaagaccuccuccuggcccaaccacgacuccaacaagggcgucaccgccgccugcccccacgccggcgccaaguccuucuacaagaaccucaucuggcucgucaagaagggcaacuccuaccccaagcucuccaaguccuacaucaacgacaagggcaaggagguccucguccucuggggcauccaccaccccuccaccuccgccgaccagcagucccucuaccagaacgccgacgccuacgucuucgucggcuccucccgcuacuccaagaaguucaagcccgagaucgccauccgccccaagguccgcgaccaggagggccgcaugaacuacuacuggacccucgucgagcccggcgacaagaucaccuucgaggccaccggcaaccucgucgucccccgcuacgccuucgccauggagcgcaacgccggcuccggcaucaucaucuccgacacccccguccacgacugcaacaccaccugccagacccccaagggcgccaucaacaccucccuccccuuccagaacauccaccccaucaccaucggcaagugccccaaguacgucaaguccaccaagcuccgccucgccaccggccuccgcaacguccccuccauccagucccgcggccucuucggcgccaucgccggcuucaucgagggcggcuggaccggcauggucgacggcugguacggcuaccaccaccagaacgagcagggcuccggcuacgccgccgaccucaaguccacccagaacgccaucgacgagaucaccaacaaggucaacuccgucaucgagaagaugaacacccaguucaccgccgucggcaaggaguucaaccaccucgagaagcgcaucgagaaccucaacaagaaggucgacgacggcuuccucgacaucuggaccuacaacgccgagcuccucguccuccucgagaacgagcgcacccucgacuaccacgacuccaacgucaagaaccucuacgagaagguccgcucccagcucaagaacaacgccaaggagaucggcaacggcugcuucgaguucuaccacaagugcgacaacaccugcauggaguccgucaagaacggcaccuacgacuaccccaaguacuccgaggaggccaagcucaaccgcgaggagaucgacggcgucaagcucgaguccacccgcaucuaccagauccucgccaucuacuccaccgucgccuccucccucguccucgucgucucccucggcgccaucuccuucuggaugugcuccaacggcucccuccagugccgcaucugcaucuga

SEQ ID NO: 105706 - RNA, 1701 nt, Artificial Sequence; identical to SEQ ID NO: 98885
  derived and/or modified CDS sequence (opt2) from hemagglutinin__InfluenzaA__AFR84724

SEQ ID NO: 105707 - RNA, 1701 nt, Artificial Sequence; identical to SEQ ID NO: 98885
  derived and/or modified CDS sequence (opt2) from hemagglutinin__InfluenzaA__AFR84734

SEQ ID NO: 105708 - RNA, 1701 nt, Artificial Sequence; identical to SEQ ID NO: 98885
  derived and/or modified CDS sequence (opt2) from hemagglutinin__InfluenzaA__AFR84754

SEQ ID NO: 105709 - RNA, 1701 nt, Artificial Sequence; identical to SEQ ID NO: 98885
  derived and/or modified CDS sequence (opt2) from hemagglutinin__InfluenzaA__AFR84764

SEQ ID NO: 105710 - RNA, 1701 nt, Artificial Sequence; identical to SEQ ID NO: 98885
  derived and/or modified CDS sequence (opt2) from hemagglutinin__InfluenzaA__AFR84774

SEQ ID NO: 105711 - RNA, 1701 nt, Artificial Sequence
  derived and/or modified CDS sequence (opt2) from hemagglutinin__InfluenzaA__AFR84784
augaaggccauccucgucggccuccucuacaccuucgccaccgccaacgccgacacccucugcaucggcuaccacgccaacaacuccaccgacaccgucgacaccguccucgagaagaacgucaccgucacccacuccgucaacauccucgaggacaagcacaacggcaagcucugcaagcuccgcggcgucgccccccuccaccucggcaagugcaacaucgccggcuggauccucggcaaccccgagugcgagucccucuccaccgccuccuccugguccuacaucgucgagaccuccuccuccgacaacggcaccugcuaccccggcgacuucaucgacuacgaggagcuccgcgagcagcucuccuccgucuccuccuucgagcgcuucgagaucuuccccaagaccuccuccuggcccaaccacgacuccaacaagggcgucaccgccgccugcccccacgccggcgccaaguccuucuacaagaaccucaucuggcucgucaagaagggcaacuccuaccccaagcucuccaaguccuacaucaacgacaagggcaaggagguccucguccucuggggcauccaccaccccuccaccuccgccgaccagcagucccucuaccagaacgccgacgccuacgucuucgucggcuccucccgcuacuccaagaaguucaagcccgagaucgccauccgccccaagguccgcgaccaggagggccgcaugaacuacuacuggacccucgucgagcccggcgacaagaucaccuucgaggccaccggcaaccucgucgucccccgcuacgccuucgccauggagcgcaacgccggcuccggcaucaucaucuccgacacccccguccacgacugcaacaccaccugccagacccccaagggcgccaucaacaccucccuccccuuccagaacauccaccccaucaccaucggcaagugccccaaguacgucaaguccaccaagcuccgccucgccaccggccuccgcaacguccccuccauccagucccgcggccucuucggcgccaucgccggcuucaucgagggcggcuggaccggcauggucgacggcugguacggcuaccaccaccagaacgagcagggcuccggcuacgccgccgaccucaaguccacccagaacgccaucgacgagaucaccaacaaggucaacuccgucaucgagaagaugaacacccaguucaccgccgucggcaaggaguucaaccaccucgagaagcgcaucgagaaccucaacaagaaggucgacgacggcuuccucgacaucuggaccuacaacgccgagcuccucguccuccucgagaacgagcgcacccucgacuaccacgacuccaacgucaagaaccucuacgagaagguccgcucccagcucaagaacaacgccaaggagaucggcaacggcugcuucgaguucuaccacaagugcgacaacaccugcauggaguccgucaagaacggcaccuacgacuaccccaaguacuccgaggaggccaagcucaaccgcgaggagaucgacggcgucaagcucgaguccacccgcaucuaccagauccucgccaucuacuccaccgucgccuccucccucgcccucgucgucucccucggcgccaucuccuucuggaugugcuccaacggcucccuccagugccgcaucugcaucuga

SEQ ID NO: 105712 - RNA, 1701 nt, Artificial Sequence; identical to SEQ ID NO: 98885
  derived and/or modified CDS sequence (opt2) from hemagglutinin__InfluenzaA__AFR84794

SEQ ID NO: 105713 - RNA, 1701 nt, Artificial Sequence; identical to SEQ ID NO: 98705
  derived and/or modified CDS sequence (opt2) from hemagglutinin__InfluenzaA__AFR84804

SEQ ID NO: 105714 - RNA, 1701 nt, Artificial Sequence; identical to SEQ ID NO: 98885
  derived and/or modified CDS sequence (opt2) from hemagglutinin__InfluenzaA__AFR84814

SEQ ID NO: 105715 - RNA, 1701 nt, Artificial Sequence; identical to SEQ ID NO: 98705
  derived and/or modified CDS sequence (opt2) from hemagglutinin__InfluenzaA__AFR84824

SEQ ID NO: 105716 - RNA, 1701 nt, Artificial Sequence; identical to SEQ ID NO: 98731
  derived and/or modified CDS sequence (opt2) from hemagglutinin__InfluenzaA__AFR84834

SEQ ID NO: 105717 - RNA, 1701 nt, Artificial Sequence; identical to SEQ ID NO: 103905
  derived and/or modified CDS sequence (opt2) from hemagglutinin__InfluenzaA__AFR84844

SEQ ID NO: 105718 - RNA, 1701 nt, Artificial Sequence; identical to SEQ ID NO: 98947
  derived and/or modified CDS sequence (opt2) from hemagglutinin__InfluenzaA__AFR84854

SEQ ID NO: 105719 - RNA, 1701 nt, Artificial Sequence; identical to SEQ ID NO: 98705
  derived and/or modified CDS sequence (opt2) from hemagglutinin__InfluenzaA__AFR84864

SEQ ID NO: 105720 - RNA, 1701 nt, Artificial Sequence; identical to SEQ ID NO: 98885
  derived and/or modified CDS sequence (opt2) from hemagglutinin__InfluenzaA__AFR84874

SEQ ID NO: 105721 - RNA, 1701 nt, Artificial Sequence; identical to SEQ ID NO: 98692
  derived and/or modified CDS sequence (opt2) from hemagglutinin__InfluenzaA__AFR84893

SEQ ID NO: 105722 - RNA, 1701 nt, Artificial Sequence; identical to SEQ ID NO: 98692
  derived and/or modified CDS sequence (opt2) from hemagglutinin__InfluenzaA__AFR84903

SEQ ID NO: 105723 - RNA, 1701 nt, Artificial Sequence; identical to SEQ ID NO: 98692
  derived and/or modified CDS sequence (opt2) from hemagglutinin__InfluenzaA__AFR84913

SEQ ID NO: 105724 - RNA, 1701 nt, Artificial Sequence; identical to SEQ ID NO: 98692
  derived and/or modified CDS sequence (opt2) from hemagglutinin__InfluenzaA__AFR84923

SEQ ID NO: 105725 - RNA, 1689 nt, Artificial Sequence
  derived and/or modified CDS sequence (opt2) from hemagglutinin__InfluenzaA__AFV53205
auggccaucaucuaccucauccuccucuucgccaccguccgcggcgaccagaucugcaucggcuaccacgccaacaacuccaccgagaaggucgacaccauccucgagcgcaacgucaccgucacccacgccaaggacauccucgagaagacccacaacggcaagcucugcaagcucaacggcauccccccccucgagcucggcgacugcuccaucgccggcuggcuccucggcaaccccgagugcgaccgccuccuccgcguccccgagugguccuacaucauggagaaggagaacccccgcuacucccucugcuaccccggcucccucaacgacuacgaggagcucaagcaccuccucuccuccguccgccacuucgagaagguccgcauccuccccaaggaccgcuggacccagcacaccaccaccggcgacuccaaggccugcgccgucuccggcaagcccuccuucuuccgcaacauggucuggcucaccaagaagggccccgacuaccccgucgccaagggcuccuacaacaacaccuccggcgagcagaugcucaucaucuggggcguccaccaccccaucgacgaggccgagcagcgcgagcucuaccagaaggucggcaccuacgucuccgccuccaccuccacccucaacaagcgcuccauccccgagaucgccgcccgccccgaggucaacggccuccgcucccgcauggaguucuccuggacccuccucgacgucugggacaccaucaacuucgaguccaccggcaaccucaucgcccccgaguacggcuucaagaucuccaagcgcggcuccuccggcaucaugaagaccgagggcacccucggcaacugcgagaccaagugccagaccccccucggcgccaucaacaccacccuccccuuccacaacguccacccccucaccaucggcgagugccccaaguacgucaaguccgagaagcucguccucgccaccggccuccgcaacgucccccagaucgagucccgcggccucuucggcgccaucgccggcuucaucgagggcggcuggcagggcauggucgacggcugguacggcuaccaccacuccaacgaccagggcuccggcuacgccgccgacaaggaguccacccagaaggccuucgacgagaucaccaacaaggucaacuccgucaucgagaagaugaacacccaguucgaggccgucggcaaggaguucaacaaccucgagaagcgccucgagaaccucaacaagaagauggaggacggcuuccucgacgucuggaccuacaacgccgagcuccucguccucauggagaacgagcgcacccucgacuuccacgacuccaacgucaagaaccucuacgagaagguccgcaugcagcuccgcgacaacgucaaggagcucggcaacggcugcuucgaguucuaccacaagugcgacgacgagugcaucaacuccgucaagaacggcaccuacgacuaccccaaguacgaggaggaguccaagcucaagcgcaacgagaucaagggcgucaagcucuccuccaugggcgucuaccagauccucgccaucuacgccaccgucgccggcucccucucccucgccaucaugauggccggcaucuccuucuggaugugcuccaacggcucccuccagugccgcaucugcaucuga

SEQ ID NO: 105726 - RNA, 1689 nt, Artificial Sequence
  derived and/or modified CDS sequence (opt2) from hemagglutinin__InfluenzaA__AFV53216
auggccaucaucuaccucauccuccucuucaccgccguccgcggcgaccagaucugcaucggcuaccacgccaacaacuccaccgagaaggucgacaccauccucgagcgcaacgucaccgucacccacgccaaggacauccucgagaagacccacaacggcaagcucugcaagcucaacggcauccccccccucgagcucggcgacugcuccaucgccggcuggcuccucggcaaccccgagugcgaccgccuccucuccguccccgagugguccuacaucauggagaaggagaacccccgcgacggccucugcuaccccggcuccuucaacgacuacgaggagcucaagcaccuccucuccuccgucaagcacuucgagaaggucaagauccuccccaaggaccgcuggacccagcacaccaccaccggcggcucccgcgccugcgccgucuccggcaaccccuccuucuuccgcaacauggucuggcucaccgagaagggcuccaacuaccccgucgccaagggcuccuacaacaacaccuccggcgagcagaugcucaucaucuggggcguccaccaccccaacgacgagaccgagcagcgcacccucuaccagaacgucggcaccuacgucuccgucggcaccuccacccucaacaagcgcuccacccccgacaucgccacccgccccaaggucaacggccagggcggccgcauggaguucuccuggacccuccucgacaugugggacaccaucaacuucgaguccaccggcaaccucaucgcccccgaguacggcuucaagaucuccaagcgcggcuccuccggcaucaugaagaccgagggcacccucggcaacugcgagaccaagugccagaccccccucggcgccaucaacaccacccuccccuuccacaacguccacccccucaccaucggcgagugccccaaguacgucaaguccgagaagcucguccucgccaccggccuccgcaacgucccccagaucgagucccgcggccucuucggcgccaucgccggcuucaucgagggcggcuggcagggcauggucgacggcugguacggcuaccaccacuccaacgaccagggcuccggcuacgccgccgacaaggaguccacccagaaggccuucgacggcaucaccaacaaggucaacuccgucaucgagaagaugaacacccaguucgaggccgucgagaaggaguucuccaaccucgagcgccgccucgagaaccucaacaagaagauggaggacggcuuccucgacgucuggaccuacaacgccgagcuccucguccucauggagaacgagcgcacccucgacuuccacgacuccaacgucaagaaccucuacgacaagguccgcaugcagcuccgcgacaacgucaaggagcucggcaacggcugcuucgaguucuaccacaagugcgacgacgagugcaugaacuccgucaagaacggcaccuacgacuaccccaaguacgaggaggaguccaagcucaaccgcaacgagaucaagggcgucaagcucuccuccaugggcaucuaccagauccucgccaucuacgccaccgucgccggcucccucucccucgccaucaugauggccggcaucuccuucuggaugugcuccaacggcucccuccagugccgcaucugcaucuga

SEQ ID NO: 105727 - RNA, 1689 nt, Artificial Sequence
  derived and/or modified CDS sequence (opt2) from hemagglutinin__InfluenzaA__AFV53227
augaucaucaucuaccucauccuccucuucaccgccguccgcggcgaccagaucugcaucggcuaccacgccaacaacuccaccgagaaggucgacaccauccucgagcgcaacgucaccgucacccacgccaaggacauccucgagaagacccacaacggcaagcucugcaagcucaacggcauccccccccucgagcucggcgacugcuccaucgccggcuggcuccucggcaaccccgagugcgaccgccuccuccgcguccccgagugguccuacaucauggagaaggagaacccccgcuacucccucugcuaccccggcuccuucaacgacuacgaggagcucaagcaccuccucuccuccgucaagcacuucgagaaggucaagauccuccccaaggacggcuggacccagcacaagaccgacggcggcuccaaggccugcgccgucuccggcaaggccuccuucuuccgcaacauggucuggcucaccaaggagggccccaacuaccaggucgccaagcgcuccuacaacaacaccuccggcgagcagaugcucaucaucuggggcguccaccaccccaaggacgaggccgagcagaucgcccucuaccagaaggucggcaccuacgucuccgccuccaccuccacccucaacaagcgcuccacccccgagaucgccgcccgccccgaggucaacggccucggcucccgcauggaguucuccuggacccuccucgacgucugggacaccaucaacuucgaguccaccggcaaccucgucgcccccgaguacggcuucaagaucuccaagcgcggcuccuccggcaucaugaagaccgagggcacccucggcaacugcgagaccaagugccagaccccccucggcgccaucaacaccacccuccccuuccacaacguccacccccucaccaucggcgagugccccaaguacgucaaguccgagaagcucguccucgccaccggccuccgcaacgucccccagaucgagucccgcggccucuucggcgccaucgccggcuucaucgagggcggcuggcagggcauggucgacggcugguacggcuaccaccacuccaacgaccagggcuccggcuacgccgccgacaaggaguccacccagaaggccuucgaccgcaucaccaacaaggucaacuccgucaucgagaagaugaacauccaguucgaggccgucggcaaggaguucuccaaccucgagaagcgccucgagaaccucaacaagaagauggaggacggcuuccucgacgucuggaccuacaacgccgagcuccucguccucauggagaacgagcgcacccucgacuuccacgacuccaacgucaagaaccucuacgacaagguccgcaugcagcuccgcgacaacgucaaggagcucggcaacggcugcuucgaguucuaccacaagugcgacgacgagugcaugaacuccgucaagaacggcaccuacgacuaccccaaguacgaggaggaguccaagcucaagcgcaacgagaucaagggcgucaagcucuccuccaugggcgucuaccagauccucgccaucuacgccaccgucgccggcucccucucccucgccaucaugaucgccggcaucuccuucuggaugugcuccaacggcucccuccagugccgcgucugcaucuga

SEQ ID NO: 105728 - RNA, 1689 nt, Artificial Sequence
  derived and/or modified CDS sequence (opt2) from hemagglutinin__InfluenzaA__AFV53238
auggccaucaucuaccucauccuccucuucaccgccguccgcggcgaccagaucugcaucggcuaccacgccaacaacuccaccgagaaggucgacaccauccucgagcgcaacgucaccgucacccacgccaaggacauccucgagaagacccacaacggcaagcucugcaagcucaacggcauccccccccucgagcucggcgacugcuccaucgccggcuggcuccucggcaaccccgagugcgaccgccuccuccgcguccccgagugguccuacaucauggagaaggagaacccccgcuacucccucugcuaccccggcuccuucaacgacuacgaggagcucaagcaccuccucuccuccgucaagcacuucgagaaggucaagauccuccccaaggaccgcuggacccagcacaccaccaccggcggcuccauggccugcgccgucuccggcaagcccuccuucuuccgcaacauggucuggcucaccaccaagggccccaacuaccccgucgcccagggcuccuacaacaacaccuccggcgagcagaugcucaucaucuggggcguccaccaccccaacgacgaggccgagcagcgcgcccucuaccagaaggucggcaccuacgucuccgccuccaccuccacccucuacaagcgcuccauccccgagaucgccgcccgccccaaggucaacggccucggcucccgcauggaguucuccuggacccuccucgacaugugggacaccaucaacuucgaguccaccggcaaccucgucgcccccgaguacggcuucaagaucuccaagcgcggcuccuccggcaucaugaagaccgagggcacccucgagaacugcgagaccaagugccagaccccccucggcgccaucaacaccacccuccccuuccacaacguccacccccucaccaucggcgagugccccaaguacgucaaguccgagaagcucguccucgccaccggccuccgcaacgucccccagaucgagucccgcggccucuucggcgccaucgccggcuucaucgagggcggcuggcagggcauggucgacggcugguacggcuaccaccacuccaacgaccagggcuccggcuacgccgccgacaaggaguccacccagaaggccuucgacggcaucaccaacaaggucaacuccgucaucgagaagaugaacacccaguucgaggccgucggcaaggaguucuccaaccucgagaagcgccucgagaaccucaacaagaagauggaggacggcuuccucgacgucuggaccuacaacgccgagcuccucguccucauggagaacgagcgcacccucgacuuccacgacuccaacgucaagaaccucuacgacaagguccgcaugcagcuccgcgacaacgucaaggagcucggcaacggcugcuucgaguucuaccacaagugcgacaacgagugcauggacuccgucaagaacggcaccuacgacuaccccaaguacgaggaggaguccaagcucaaccgcaacgagaucaagggcgucaagcucuccuccaugggcgucuaccagauccucgccaucuacgccaccgucgccggcucccucucccucgccaucaugauggccggcaucuccuucuggaugugcuccaacggcucccuccagugccgcaucugcaucuga

SEQ ID NO: 105729 - RNA, 1689 nt, Artificial Sequence
  derived and/or modified CDS sequence (opt2) from hemagglutinin__InfluenzaA__AFV53249
auggccaucaucuaccucauccuccucuucgccaccguccgcggcgaccagaucugcaucggcuaccacgccaacaacuccaccgagaccgucgacaccauccucgagcgcaacgucaccgucacccacgccaaggacauccucgagaagacccacaacggcaagcucugcaagcucaacggcauccccccccucgagcucggcgacugcuccaucgccggcuggcuccucggcaaccccgagugcgaccgccuccuccgcguccccgagugguccuacaucauggagaaggagaacccccgcuacucccucugcuaccccggcucccucaacgacuacgaggagcucaagcaccuccucuccuccgucaagcacuucgagaagguccgcauccuccccaaggaccgcuggaccaaccacaccaccaccggcggcuccaaggccugcgccgucuccggcgagcccuccuucuuccgcaacauggucuggcucaccaagaagggccccaacuaccccgucgccaagggcuccuacaacaacaccuccggcgagcagaugcucaucaucuggggcguccaccaccccaacgacgaggccgagcagcgcgcccucuaccagaaggucggcaccuacgucuccgccuccaccuccacccucuacaagcgcuccauccccgagaucgccgcccgccccaaggucaacggccucggcucccgcauggaguucuccuggacccuccucaacgucugggacaccaucaacuucgaguccaccggcaaccucgucgcccccgaguacggcuucaagaucuccaagcgcggccgcuccggcaucaugaagaccgagggcacccucggcaacugcgagaccaagugccagaccccccucggcgccaucaacaccacccuccccuuccacaacguccacccccucaccaucggcgagugccccaaguacgucaaguccgagaagcucguccucgccaccggccuccgcaacgucccccagaucgagucccgcggccucuucggcgccaucgccggcuucaucgagggcggcuggcagggcauggucgacggcugguacggcuaccaccacuccaacgaccagggcuccggcuacgccgccgacaaggaguccacccagaaggccuucgacggcaucaccaacaaggucaacuccgucaucgagaagaugaacacccaguucgaggccgucggcaaggaguucaacaaccucgagaagcgccucgagaaccucaacaagaagauggaggacggcuuccucgacgucuggaccuacaacgccgagcuccucguccucauggagaacgagcgcacccucgacuuccacgacuccaacgucaagaaccucuacgagaagguccgcaugcagcuccgcgacaacgucaaggagcucggcaacggcugcuucgaguucuaccacaagugcgacgacgagugcaugaacuccgucaagaacggcaccuacgacuaccccaaguacgaggaggaguccaagcucaagcgcaacgagaucaagggcgucaagcucuccuccaugggcgucuaccagauccucgccaucuacgccaccgucgccggcucccucucccucgccaucauggucgccggcaucuccuucuggaugugcuccaacggcucccuccagugccgcaucugcaucuga

SEQ ID NO: 105730 - RNA, 1698 nt, Artificial Sequence
  derived and/or modified CDS sequence (opt2) from hemagglutinin__InfluenzaA__AFV53260
augaaggccaagcuccucauccuccucugcgcccucuccgccaccgacgccgacaccaucugcaucggcuaccacgccaacaacuccaccgacaccgucgacaccguccucgagaagaacgucaccgucacccacuccgucaaccuccucgaggacucccacaacggcaagcucugccgccucaagggcaaggccccccuccagcucggcaacugcaacaucgccggcuggguccucggcaaccccgagugcgagucccuccucuccaaccgcuccugguccuacaucgccgagacccccaacuccgagaacggcaccugcuaccccggcgacuucgccgacuacgaggagcuccgcgagcagcucuccuccgucuccuccuucgagcgcuucgagaucuuccccaaggagcgcuccuggcccaaccacaccacccgcggcgucaccgccgccugcccccacgccaugaaguccuccuucuacaagaaccucgucuggcucaccgaggccaacggcuccuaccccaaccucucccgcuccuacgucaacaaccaggagaaggagguccucguccucuggggcguccaccaccccuccaacaucgaggaccagcgcacccucuaccgcaaggacaacgccuacgucuccgucgucuccuccaacuacaaccgccgcuucacccccgagaucgccaagcgccccaagguccgcggccaguccggccgcaucaacuacuacuggacccuccucgagcccggcgacaccaucaucuucgaggccaccggcaaccucaucgcccccugguacgccuucgcccucucccgcggccccggcuccggcaucaucaccuccaacgccccccucgacgagugcgacaccaagugccagaccccccagggcgccaucaacuccucccuccccuuccagaacauccaccccgucaccaucggcgagugccccaaguacguccgcuccaccaagcuccgcauggucaccggccuccgcaacauccccuccuuccagucccgcggccucuucggcgccaucgccggcuucaucgagggcggcuggaccggcaugauggacggcugguacggcuaccaccaccagaacgagcagggcuccggcuacgccgccgaccagaaguccacccagaacgccaucaacggcaucaccaacaaggucaacuccgucaucgagaagaugaacacccaguucaccgccgucggcaaggaguucaacaagcucgagaagcgcauggagaaccucaacaagaaggucgacgacggcuuccucgacaucuggaccuacaacgccgagcuccucguccuccucgagaacgagcgcacccucgacuuccacgacuccaacgucaagaaccucuacgagaaggucaagaaccagcuccgcaacaacgccaaggagcucggcaacggcugcuucgaguucuaccacaagugcgacaacgagugcauggaguccgucaagaacggcaccuacgacuaccccaaguacuccgaggaguccaagcucaaccgcgagaagaucgacggcgucaagcucgaguccaugggcgucuaccgcauccucgccaucuacuccaccgucgccuccucccucguccuccucgucucccucggcgccaucuccuucuggaugugcuccaacggcucccuccagugccgcaucugcaucuga

SEQ ID NO: 105731 - RNA, 1689 nt, Artificial Sequence
  derived and/or modified CDS sequence (opt2) from hemagglutinin__InfluenzaA__AFV53271
auggccaucaccuaccucauccuccucuucaccgccguccgcggcgaccagaucugcaucggcuaccacgccaacaacuccaccgagaaggucgacaccauccucgagcgcaacgucaccgucacccacgccaaggacauccucgagaagacccacaacggcaagcucugcaagcucaacggcauccccccccucgagcucggcgacugcuccaucgccggcuggcuccucggcaaccccgagugcgaccgcuuccuccgcguccccgagugguccuacaucauggagaaggagaacccccgcuacucccucugcuaccccggcuccuucaacgacuacgaggagcucaagcaccuccucuccuccgucaagcacuucgagaaggucaagauccuccccaaggacggcuggacccagcacaccaccaccggcggcuccauggccugcgccgucuccggcaagcccuccuucuuccgcaacauggucuggcucaccgagaagggccagaacuaccccgucgccaagggcuccuacaacaacaccuccggcgagcagaugcucaucaucuggggcguccaccaccccaacgacgaggccgagcagcgcgcccucuaccagaaggucggcaccuacgucuccgccuccaccuccacccucaacaagcgcuccacccccgagaucgccgcccgccccaaggucaacggccucggcucccgcauggaguucuccuggacccuccucgacaugugggacaccaucaacuucgaguccaccggcaaccucgucgcccccgaguacggcuucaagaucuccaagcgcggcuccuccggcaucaugaagaccgagggcacccucgagaacugcgagaccaagugccagaccccccucggcgccaucaacaccacccuccccuuccacaacguccacccccucaccaucggcgagugccccaaguacgucaaguccgagaagcucguccucgccaccggccuccgcaacaucccccagaucgagucccgcggccucuucggcgccaucgccggcuucaucgagggcggcuggcagggcauggucgacggcugguacggcuaccaccacuccaacgaccagggcuccggcuacgccgccgacaaggaguccacccagaaggccuucgacggcaucaccaacaaggucaacuccgucaucgagaagaugaacacccaguucgaggccgucggcaaggaguucuccaaccucgagaagcgccucgagaaccucaacaagaagauggaggacggcuuccucgacgucuggaccuacaacgccgagcuccucguccucauggagaacgagcgcacccucgacuuccacgacuccaacgucaagaaccucuacgacaagguccgcaugcagcuccgcgacaacgucaaggagcucggcaacggcugcuucgaguucuaccacaagugcgacaacgagugcauggacuccgucaagaacggcaccuacgacuaccccaaguacgaggaggaguccaagcucaaccgcaacgagaucaagggcgucaagcucuccuccaugggcgucuaccagauccucgccaucuacgccaccgucgccggcucccucucccucgccaucaugauggccggcaucuccuucuggaugugcuccaacggcucccuccagugccgcaucugcaucuga

SEQ ID NO: 105732 - RNA, 1689 nt, Artificial Sequence
  derived and/or modified CDS sequence (opt2) from hemagglutinin__InfluenzaA__AFV53282
auggccaucaucuaccucauccuccucuucaccgccguccgcggcgaccagaucugcaucggcuaccacgccaacaacuccaccgagaaggucgacaccauccucgagcgcaacgucaccgucacccacgccaaggacauccucgagaagacccacaacggcaagcucugcaagcucaacggcauccccccccucgagcucggcgacugcuccaucgccggcuggcuccucggcaaccccgagugcgaccgccuccucuccguccccgagugguccuacaucauggagaaggagaacccccgcgacggccucugcuaccccggcuccuucaacgacuacgaggagcucaagcaccuccucuccuccgucaagcacuucgagaaggucaagauccuccccaaggaccgcuggacccagcacaccaccaccggcggcucccgcgccugcgccgucuccggcaaccccuccuucuuccgcaacauggucuggcucaccaagaagggcaccaacuaccccgucgccaagggcuccuacaacaacaccuccggcgagcagaugcucaucaucuggggcguccaccaccccaacgacgagaccgagcagcgcacccucuaccagaacgucggcaccuacgucuccgucggcaccuccacccucaacaagcgcuccacccccgagaucgccacccgccccaaggucaacggccucggcucccgcauggaguucuccuggacccuccucgacaugugggacaccaucaacuucgaguccaccggcaaccucaucgcccccgaguacggcuucaagaucuccaagcgcggcuccuccggcaucaugaagaccgagggcacccucgagaacugcgagaccaagugccagaccccccucggcgccaucaacaccacccuccccuuccacaacguccacccccucaccaucggcgagugccccaaguacgucaagcucgagaagcucguccucgccaccggccuccgcaacgucccccagaucgagucccgcggccucuucggcgccaucgccggcuucaucgagggcggcuggcagggcauggucgacggcugguacggcuaccaccacuccaacgaccagggcuccggcuacgccgccgacaaggaguccacccagaaggccuucgacgucaucaccaacaaggucaacuccgucaucgagaagaugaacacccaguucgaggccgucggcaaggaguucuccaaccucgagcgccgccucgagaaccucaacaagaagauggaggacggcuuccucgacgucuggaccuacaacgccgagcuccucguccucauggagaacgagcgcacccucgacuuccacgacuccaacgucaagaaccucuacgacaagguccgcaugcagcuccgcgacaacgucaaggagcucggcaacggcugcuucgaguucuaccacaagugcgacgacgagugcaugaacuccgucaagaacggcaccuacgacuaccccaaguacgaggaggaguccaagcucaaccgcaacgagaucaagggcgucaagcucuccuccaugggcgucuaccagauccucgccaucuacgccaccgucgccggcucccucucccucgccaucaugauggccggcaucuccuucuggaugugcuccaacggcucccuccagugccgcaucugcaucuga

SEQ ID NO: 105733 - RNA, 1689 nt, Artificial Sequence
  derived and/or modified CDS sequence (opt2) from hemagglutinin__InfluenzaA__AFV53293
auggccaucaucuaccucauccuccucuucaccuccguccgcggcgaccagaucugcaucggcuaccacgccaacaacuccaccgagaaggucgacaccauccucgagcgcaacgucaccgucacccacgccaagaacauccucgagaagacccacaacggcaagcucugcaagcucaacggcauccccccccucgagcucggcgacugcuccaucgccggcuggcuccucggcaaccccgagugcgaccgccuccuccgcguccccgagugguccuacaucauggagaaggagaaccccaaguacucccucugcuaccccggcuccuucaacgacuacgaggagcucaagcaccuccucuccuccgucaagcacuucgagaaggucaagauccuccccaaggacggcuggacccagcacaccaccaacggcggcucccgcgccugcgccgucuccggcaaccccuccuucuuccgcaacauggucuggcucaccaagaagggccccaacuaccccgucgccaagggcuccuacaacaacaccuccggcgagcagaugcucaucaucuggggcguccaccaccccaacgacgaggccgagcagcgcgcccucuaccaggaggucggcaccuacgucuccgccuccaccuccacccucaacaagcgcuccacccccgagaucgccgcccgccccaaggucaacggccucggcucccgcauggaguucuccuggacccuccucgacaugugggacaccaucaacuucgaguccaccggcaaccucgucgcccccgaguacggcuucaagaucuccaagcgcggcuccuccggcgucaugaagaccgagggcacccucgagaacugcgagaccaagugccagaccccccucggcgccaucaacaccacccuccccuuccacaacguccacccccucaccaucggcgagugccccaaguacgucaaguccgagaagcucguccucgccaccggccuccgcaacgucccccagaucgagucccgcggccucuucggcgccaucgccggcuucaucgagggcggcuggcagggcauggucgacggcugguacggcuaccaccacuccaacgaccagggcuccggcuacgccgccgacaaggaguccacccagaaggccuucgacggcaucaccaacaaggucaacuccgucaucgagaagaugaacacccaguucgaggccgucggcaaggaguucuccaaccucgagaagcgccucgagaaccucaacaagaagauggaggacggcuuccucgacgucuggaccuacaacgccgagcuccucguccucauggagaacgagcgcacccucgacuuccacgacuccaacgucaagaaccucuacgacaagguccgcaugcagcuccgcgacaacgucaaggagcucggcaacggcugcuucgaguucuaccacaagugcgacgacgagugcauggacuccgucaagaacggcaccuacgacuaccccaaguacgaggaggaguccaagcucaaccgcaacgagaucaagggcgucaagcucuccuccaugggcgucuaccagauccucgccaucuacgccaccgucgccggcucccucucccucgccaucaugauggccggcaucuccuucuggaugugcuccaacggcucccuccagugccgcaucugcaucuga

SEQ ID NO: 105734 - RNA, 1689 nt, Artificial Sequence
  derived and/or modified CDS sequence (opt2) from hemagglutinin__InfluenzaA__AFV53304
auggccaucaucuaccucauccuccucuucaccgccguccgcggcgaccagaucugcaucggcuaccacgccaacaacuccaccgagaaggucgacaccauccucgagcagaacgucaccgucacccacgccaaggacauccucgagaagacccacaacggcaagcucugcaagcucaacggcauccccccccucgagcucggcgacugcuccaucgccggcuggcuccucggcaaccccgagugcgaccgccuccucuccguccccgagugguccuacaucauggagaaggagaacccccgcgacggccucugcuaccccggcuccuucaacgacuacgaggagcucaagcaccuccucuccuccgucaagcacuucgagaaggucaagauccuccccaaggaccgcuggacccagcacaccaccaccggcggcucccgcgccugcgccgucuccggcaaccccuccuucuuccgcaacauggucuggcucaccaagaaggaguccaacuaccccgucgccaagggcuccuacaacaacaccuccggcgagcagaugcucaucaucuggggcguccaccaccccaacgacgagaccgagcagcgcacccucuaccagaacgucggcaccuacgucuccgucggcaccuccacccucaacaagcgcuccacccccaacaucgccacccgccccaaggucaacggccucggcucccgcauggaguucuccuggacccuccucgacaugugggacaccaucaacuucgaguccaccggcaaccucaucgcccccgaguacggcuucaagaucuccaagcgcggcuccuccggcaucaugaagaccgagggcacccucgagaacugcgagaccaagugccagaccccccucggcgccaucaacaccacccuccccuuccacaacguccacccccucaccaucggcgagugccccaaguacgucaaguccgagaagcucguccucgccaccggccuccgcaacgucccccagaucgagucccgcggccucuucggcgccaucgccggcuucaucgagggcggcuggcagggcauggucgacggcugguacggcuaccaccacuccaacgaccagggcuccggcuacgccgccgacaaggaguccacccagaaggccuucgacggcaucaccaacaaggucaacuccgucaucgagaagaugaacacccaguucgaggccgucggcaaggaguucuccaaccucgagcgccgccucgagaaccucaacaagaagauggaggacggcuuccucgacgucuggaccuacaacgccgagcuccucguccucauggagaacgagcgcacccucgacuuccacgacuccaacgucaagaaccucuacgacaagguccgcaugcagcuccgcgacaacgucaaggagcucggcaacggcugcuucgaguucuaccacaagugcgacgacgagugcaugaacuccgucaagaacggcaccuacgacuaccccaaguacgaggaggaguccaagcucaaccgcaacgagaucaagggcgucaagcucuccuccaugggcgucuaccagauccucgccaucuacgccaccgucgccggcucccucucccucgccaucaugauggccggcaucuccuucuggaugugcuccaacggcucccuccagugccgcaucugcaucuga

SEQ ID NO: 105735 - RNA, 1689 nt, Artificial Sequence
  derived and/or modified CDS sequence (opt2) from hemagglutinin__InfluenzaA__AFV53314
auggccaucaucuaccucauccuccucuucaccgccguccgcggcgacaagaucugcaucggcuaccacgccaacaacuccaccgagaccgucgacaccauccucgagcgcaacgucaccgucacccacgccaaggacauccucgagaagacccacaacggcaagcucugcaagcucaacggcauccccccccucgagcucggcgacugcuccaucgccggcuggcuccucggcaaccccgagugcgaccgccuccucuccguccccgagugguccuacaucauggagaaggagaacccccgcaacggccucugcuaccccggcaacuucaacgacuacgaggagcucaagcaccuccucuccuccgucaagcacuucgagaaggucaagauccuccccaaggaccgcuggacccagcacaccaccaccggcggcucccaggccugcgccgucuccggcaaccccuccuucuuccgcaacauggucuggcucaccgagaaggaguccaacuaccccgucgccaagggcuccuacaacaacaccuccggcgagcagaugcucaucaucuggggcguccaccaccccaucgacgagaccgagcagcgcacccucuaccagaacgucggcaccuacgucuccgucggcaccuccacccucaacaagcgcuccacccccgagaucgccaagcgccccaaggucaacggccucggcucccgcauggaguucuccuggacccuccucgacaugugggacaccaucaccuucgaguccaccggcaaccucaucgcccccgaguacggcuucaagaucuccaagcgcggcuccuccggcaucaugaagaccgagggcacccucgagaacugcgagaccaagugccagaccccccucggcgccaucaacaccacccuccccuuccacaacguccacccccucaccaucggcgagugccccaaguacgucaaguccgagaagcucguccucgccaccggccuccgcaacgucccccagaucgagucccgcggccucuucggcgccaucgccggcuucaucgagggcggcuggcagggcauggucgacggcugguacggcuaccaccacuccaacgaccagggcuccggcuacgccgccgacaaggaguccacccagaaggccuucgacggcaucaccaacaaggucaacgccgucaucgagaagaucaacacccaguucgaggccgucggcaaggaguucuccaaccucgagcgccgccucgagaaccucaacaagaagauggaggacggcuuccucgacgucuggaccuacaacgccgagcuccucguccucauggagaacgagcgcacccucgacuuccacgacuccaacgucaagaaccucuacgacaagguccgcaugcagcuccgcgacaacgucaaggagcucggcaacggcugcuucgaguucuaccacaagugcgacgacgagugcaugaacuccgucaagaacggcaccuacgacuaccccaaguacgaggaggaguccaagcucaaccgcaacgagaucaagggcgucaagcucuccuccaugggcgucuaccagauccucgccaucuacgccaccgucgccggcucccucucccucgccaucaugauggccggcaucuccuucuggaugugcuccaacggcucccuccagugccgcaucugcaucuga

SEQ ID NO: 105736 - RNA, 1689 nt, Artificial Sequence
  derived and/or modified CDS sequence (opt2) from hemagglutinin__InfluenzaA__AFV53325
auggccaucaucuaccucauccuccucuucaccgccguccgcggcgaccagaucugcaucggcuaccacgccaacaacuccaccgagaaggucgacaccauccucgagcgcaacgucaccgucacccacgccaaggacauccucgagaagacccacaacggcaagcucugcaagcucaacggcauccccccccucgagcucggcgacugcuccaucgccggcuggcuccucggcaaccccgagugcgaccgccuccucuccguccccgagugguccuacaucauggagaaggagaacccccgcgacggccucugcuaccccggcuccuucaacgacuacgaggagcucaagcaccuccucuccuccgucaagcacuucgagaaggucaagauccuccccaaggaccgcuggacccagcacaccaccaccggcggcucccgcgccugcgccgucuccggcaaccccuccuucuuccgcaacauggucuggcucaccaagaagggcuccaacuacaccgucgccaagggcuccuacaacaacaccuccggcgagcagaugcucaucaucuggggcguccaccaccccaacgacgagaccgagcagcgcacccucuaccagaacgucggcaccuacgucuccgucuccaccuccacccucaacaagcgcuccacccccgagaucgccacccgccccaaggucaacggccucggcucccgcauggaguucuccuggacccuccucgacaugugggacaccaucaacuucgaguccaccggcaaccucaucgcccccgaguacggcuucaagaucuccaagcgcggcuccuccggcaucaugaagaccgagggcacccucgagaacugcgagaccaagugccagaccccccucggcgccaucaacaccacccuccccuuccacaacguccacccccucaccaucggcgagugccccaaguacgucaaguccgagaagcucguccucgccaccggccuccgcaacgucccccagaucgagucccgcggccucuucggcgccaucgccggcuucaucgagggcggcuggcagggcauggucgacggcugguacggcuaccaccacuccaacgaccagggcuccggcuacgccgccgacaaggaguccacccagaaggccuucgacggcaucaccaacaaggucaacuccgucaucgagaagaugaacacccaguucgaggccgucggcaaggaguucuccaaccucgagcgccgccucgagaaccucaacaagaagauggaggacggcuuccucgacgucuggaccuacaacgccgagcuccucguccucauggagaacgagcgcacccucgacuuccacgacuccaacgucaagaaccucuacgacaagguccgcaugcagcuccgcgacaacgucaaggagcucggcaacggcugcuucgaguucuaccacaagugcgacgacgagugcaugaacuccgucaagaacggcaccuacgacuaccccaaguacgaggaggaguccaagcucaaccgcaacgagaucaagggcgucaagcucuccuccaugggcgucuaccagauccucgccaucuacgccaccgucgccggcucccucucccucgccaucaugauggccggcaucuccuucuggaugugcuccaacggcucccuccagugccgcaucugcaucuga

SEQ ID NO: 105737 - RNA, 1689 nt, Artificial Sequence
  derived and/or modified CDS sequence (opt2) from hemagglutinin__InfluenzaA__AFV53336
auggccaucaucuaccucauccuccucuucaccgccguccgcggcgaccagaucugcaucggcuaccacgccaacaacuccaccgagaaggucgacaccauccucgagcgcaacgucaccgucacccacgccaaggacauccucgagaagacccacaacggcaagcucugcaagcucaacggcauccccccccucgagcucggcgacugcuccaucgccggcuggcuccucggcaaccccgagugcgaccgccuccuccgcguccccgagugguccuacaucauggagaaggagaacccccgcuacucccucugcuaccccggcuccuucaacgacuacgaggagcucaagcaccuccucuccuccgucaagcaccucgagaaggucaagauccuccccaaggacggcuggacccagcacgagaccgacggcggcuccaaggccugcgccgucuccggcaagcccuccuucuuccgcaacauggucuggcucaccaagaagggccccaacuaccccgucgccaagcgcuccuacaacaacaccuccggcgagcagaugcucaucaucuggggcguccaccaccccaacgacgaggccgagcagcgcgcccucuaccagaaggucggcaccuacgucuccgccuccaccuccacccucaacaagcgcuccacccccgagaucgccgcccgccccgaggucuccggccucggcucccgcauggaguucuccuggacccuccucgacgucugggacaccaucuccuucgaguccaccggcaaccucgucgcccccgaguacggcuucaagaucuccaagcgcggcuccuccggcaucaugaagaccgagggcacccucggcaacugcgagaccaagugccagaccccccucggcgccaucaacaccacccuccccuuccacaacguccacccccucaccaucggcgagugccccaaguacgucaaguccgagaagcucguccucgccaccggccuccgcaacgucccccagaucgagucccgcggccucuucggcgccaucgccggcuucaucgagggcggcuggcagggcauggucgacggcugguacggcuaccaccacuccaacgaccagggcuccggcuacgccgccgacaaggaguccacccagaaggccuucgaccgcaucaccaacaaggucaacuccgucaucgagaagaugaacacccaguucgaggccgucggcaaggaguucuccaaccucgagaagcgccucgagaaccucaacaagaagauggaggacggcuuccucgacgucuggaccuacaacgccgagcuccucguccucauggagaacgagcgcauccucgacuuccacgacuccaacgucaagaaccucuacgacaagguccgcaugcagcuccgcgacaacgucaaggagcucggcaacggcugcuucgaguucuaccacaagugcgacgacgagugcaugaacuccgucaagaacggcaccuacgacuaccccaaguacgaggaggaguccaagcucaagcgcaacgagaucaagggcgucaagcucuccuccaugggcgucuaccagauccucgccaucuacgccaccgucgccggcucccucucccucgccaucaugaucgccggcaucuccuucuggaugugcuccaacggcucccuccagugccgcaucugcaucuga

SEQ ID NO: 105738 - RNA, 1701 nt, Artificial Sequence
  derived and/or modified CDS sequence (opt2) from hemagglutinin__InfluenzaA__AFV68720
augaagaccaucaucgcccucuccuacauccucugccucgucuucgcccagaagcuccccggcaacgacaacuccaccgccacccucugccucggccaccacgccguccccaacggcaccaucgucaagaccaucaccaacgaccagaucgaggucaccaacgccaccgagcucguccaguccuccuccaccggcgagaucugcgacuccccccaccagauccucgacggcgagaacugcacccucaucgacgcccuccucggcgacccccagugcgacggcuuccagaacaagaagugggaccucuucgucgagcgcuccaaggccuacuccaacugcuaccccuacgacguccccgacuacgccucccuccgcucccucgucgccuccuccggcacccucgaguucaacaacgaguccuucaacuggaccggcgucacccagaacggcaccuccuccgccugcauccgccgcuccgacuccuccuucuucucccgccucaacuggcucacccaccucaacuucaaguaccccgcccucaacgucaccaugcccaacaacgagcaguucgacaagcucuacaucuggggcguccaccaccccggcaccgacaaggaccagaucuuccucuacgcccaggccuccggccgcaucaccgucuccaccaagcgcucccagcaggccgucauccccaacaucggcucccgcccccgcauccgcaacauccccucccgcaucuccaucuacuggaccaucgucaagcccggcgacauccuccucaucaacuccaccggcaaccucaucgccccccgcggcuacuucaagauccgcuccggcaaguccuccaucaugcgcuccgacgcccccaucggcaagugcaacuccgagugcaucacccccaacggcuccauccccaacgacaagcccuuccagaacgucaaccgcaucaccuacggcgccugcccccgcuacgucaagcagaacacccucaagcucgccaccggcaugcgcaacguccccgagaagcagacccgcggcaucuucggcgccaucgccggcuucaucgagaacggcugggagggcauggucgacggcugguacggcuuccgccaccagaacuccgagggccgcggccaggccgccgaccucaaguccacccaggccgccaucgaccagaucaacggcaagcucaaccgccucaucggcaagaccaacgagaaguuccaccagaucgagaaggaguucuccgaggucgagggccgcauccaggaccucgagaaguacgucgaggacaccaagaucgaccucugguccuacaacgccgagcuccucgucgcccucgagaaccagcacaccaucgaccucaccgacuccgagaugaacaagcucuucgagaagaccaagaagcagcuccgcgagaacgccgaggacaugggcaacggcugcuucaagaucuaccacaagugcgacaacgccugcaucggcuccauccgcaacggcaccuacaaccacgacgucuaccgcgacgaggcccucaacaaccgcuuccagaucaagggcgucgagcucaaguccggcuacaaggacuggauccucuggaucuccuucgccaucuccugcuuccuccucugcgucgcccuccucggcuucaucaugugggccugccagaagggcaacauccgcugcaacaucugcaucuga

SEQ ID NO: 105739 - RNA, 1701 nt, Artificial Sequence; identical to SEQ ID NO: 98705
  derived and/or modified CDS sequence (opt2) from hemagglutinin__InfluenzaA__AFX96347

SEQ ID NO: 105740 - RNA, 1701 nt, Artificial Sequence
  derived and/or modified CDS sequence (opt2) from hemagglutinin__InfluenzaA__AFX96359
augaaggccauccucgucguccuccucuacaccuucgccaccgccaacgccgacacccucugcaucggcuaccacgccaacaacuccaccgacaccgucgacaccguccucgagaagaacgucaccgucacccacuccgucaaccuccucgaggacaagcacaacggcaagcucugcaagcuccgcggcgucgccccccuccaccucggcaagugcaacaucgccggcuggauccucggcaaccccgagugcgagucccucuccaccgccuccuccugguccuacaucgucgagaccuccuccuccgacaacggcaccugcuaccccggcgacuucaucgacuacgaggagcuccgcgagcagcucuccuccgucuccuccuucgagcgcuucgagaucuuccccaagaccuccuccuggcccaaccacgacuccaacaagggcgucaccgccgccugcccccacgccggcgccaaguccuucuacaagaaccucaucuggcucgucaagaagggcaacuccuaccccaagcucuccaaguccuacaucaacgacaagggcaaggagguccucguccucuggggcauccaccaccccuccaccuccgccgaccagcagucccucuaccagaacgccgacaccuacgucuucgucggcaccucccgcuacuccaagaaguucaagcccgagaucgccauccgccccaagguccgcgaccaggagggccgcaugaacuacuacuggacccucgucgagcccggcgacaagaucaccuucgaggccaccggcaaccucgucgucccccgcuacgccuucgccauggagcgcaacgccggcuccggcaucaucaucuccgacacccccguccacgacugcaacaccaccugccagacccccaagggcgccaucaacaccucccuccccuuccagaacauccaccccaucaccaucggcaagugccccaaguacgucaaguccaccaagcuccgccucgccaccggccuccgcaacguccccuccauccagucccgcggccucuucggcgccaucgccggcuucaucgagggcggcuggaccggcauggucgacggcugguacggcuaccaccaccagaacgagcagggcuccggcuacgccgccgaccucaaguccacccagaacgccaucgacgagaucaccaacaaggucaacuccgucaucgagaagaugaacacccaguucaccgccgucggcaaggaguucaaccaccucgagaagcgcaucgagaaccucaacaagaagaucgacgacggcuuccucgacaucuggaccuacaacgccgagcuccucguccuccucgagaacgagcgcacccucgacuaccacgacuccaacgucaagaaccucuacgagaagguccgcucccagcucaagaacaacgccaaggagaucggcaacggcugcuucgaguucuaccacaagugcgacaacaccugcauggaguccgucaagaacggcaccuacgacuaccccaaguacuccgaggaggccaagcucaaccgcgaggagaucaacggcgucaagcucgaguccacccgcaucuaccagauccucgccaucuacuccaccgucgccuccucccucguccucgucgucucccucggcgccaucuccuucuggaugugcuccaacggcucccuccagugccgcaucugcaucuga

SEQ ID NO: 105741 - RNA, 1701 nt, Artificial Sequence
  derived and/or modified CDS sequence (opt2) from hemagglutinin__InfluenzaA__AFX96366
augaaggccauccucgucguccuccucuacaccuucgccaccgccaacgccgacacccucugcaucggcuaccacgccaacaacuccaccgacaccgucgacaccguccucgagaagaacgucaccgucacccacuccgucaaccuccucgaggacaagcacaacggcaagcucugcaagcuccgcggcgucgccccccuccaccucggcaagugcaacaucgccggcuggauccucggcaaccccgagugcgagucccucuccaccgccuccuccugguccuacaucgucgagaccuccuccuccgacaacggcaccugcuaccccggcgacuucaucgacuacgaggagcuccgcgagcagcucuccuccgucuccuccuucgagcgcuucgagaucuuccccaagaccuccuccuggcccaaccacgacuccaacaagggcgucaccgccgccugcccccacgccggcgccaaguccuucuacaagaaccucaucuggcucgucaagaagggcaacuccuaccccaagcucuccaaguccuacaucaacgaccgcggcaaggagguccucguccucuggggcauccaccaccccuccaccuccgccgaccagcagucccucuaccagaacgccgacgccuacgucuucgucggcaccucccgcuacuccaagaaguucaagcccgagaucgccauccgccccaagguccgcgaccaggagggccgcaugaacuacuacuggacccucgucgagcccggcgacaagaucaccuucgaggccaccggcaaccucgucgucccccgcuacgccuucgccauggagcgcaacgccggcuccggcaucaucaucuccgacacccccguccacgacugcaacaccaccugccagacccccaagggcgccaucaacaccucccuccccuuccagaacauccaccccaucaccaucggcaagugccccaaguacgucaaguccaccaagcuccgccucgccaccggccuccgcaacguccccuccauccagucccgcggccucuucggcgccaucgccggcuucaucgagggcggcuggaccggcauggucgacggcugguacggcuaccaccaccagaacgagcagggcuccggcuacgccgccgaccucaaguccacccagaacgccaucgacaagaucaccaacaaggucaacuccgucaucgagaagaugaacacccaguucaccgccgucggcaaggaguucaaccagcucgagaagcgcaucgagaaccucaacaagaaggucgacgacggcuuccucgacaucuggaccuacaacgccgagcuccucguccuccucgagaacgagcgcacccucgacuaccacgacuccaacgucaagaaccucuacgagaagguccgcucccagcucaagaacaacgccaaggagaucggcaacggcugcuucgaguucuaccacaagugcgacaacaccugcauggaguccgucaagaacggcaccuacgacuaccccaaguacuccgaggaggccaagcucaaccgcgaggagaucgacggcgucaagcucgaguccacccgcaucuaccagauccucgccaucuacuccaccgucgccuccucccucguccucgucgucucccucggcgccaucuccuucuggaugugcuccaacggcucccuccagugccgcaucugcaucuga

SEQ ID NO: 105742 - RNA, 1701 nt, Artificial Sequence; identical to SEQ ID NO: 100205
  derived and/or modified CDS sequence (opt2) from hemagglutinin__InfluenzaA__AFX96383

SEQ ID NO: 105743 - RNA, 1701 nt, Artificial Sequence; identical to SEQ ID NO: 98705
  derived and/or modified CDS sequence (opt2) from hemagglutinin__InfluenzaA__AFX96398

SEQ ID NO: 105744 - RNA, 1701 nt, Artificial Sequence; identical to SEQ ID NO: 98705
  derived and/or modified CDS sequence (opt2) from hemagglutinin__InfluenzaA__AFX96408

SEQ ID NO: 105745 - RNA, 1701 nt, Artificial Sequence; identical to SEQ ID NO: 98705
  derived and/or modified CDS sequence (opt2) from hemagglutinin__InfluenzaA__AFX96418

SEQ ID NO: 105746 - RNA, 1701 nt, Artificial Sequence; identical to SEQ ID NO: 98705
  derived and/or modified CDS sequence (opt2) from hemagglutinin__InfluenzaA__AFX96428

SEQ ID NO: 105747 - RNA, 1701 nt, Artificial Sequence; identical to SEQ ID NO: 98705
  derived and/or modified CDS sequence (opt2) from hemagglutinin__InfluenzaA__AFX96438

SEQ ID NO: 105748 - RNA, 1701 nt, Artificial Sequence; identical to SEQ ID NO: 98705
  derived and/or modified CDS sequence (opt2) from hemagglutinin__InfluenzaA__AFX96448

SEQ ID NO: 105749 - RNA, 1701 nt, Artificial Sequence; identical to SEQ ID NO: 98705
  derived and/or modified CDS sequence (opt2) from hemagglutinin__InfluenzaA__AFX96458

SEQ ID NO: 105750 - RNA, 1701 nt, Artificial Sequence; identical to SEQ ID NO: 98705
  derived and/or modified CDS sequence (opt2) from hemagglutinin__InfluenzaA__AFX96468

SEQ ID NO: 105751 - RNA, 1701 nt, Artificial Sequence; identical to SEQ ID NO: 98705
  derived and/or modified CDS sequence (opt2) from hemagglutinin__InfluenzaA__AFX96478

SEQ ID NO: 105752 - RNA, 1701 nt, Artificial Sequence; identical to SEQ ID NO: 98705
  derived and/or modified CDS sequence (opt2) from hemagglutinin__InfluenzaA__AFX96488

SEQ ID NO: 105753 - RNA, 1701 nt, Artificial Sequence
  derived and/or modified CDS sequence (opt2) from hemagglutinin__InfluenzaA__AFX96498
augaaggccauccucgucguccuccucuacaccuucgccaccgccaacgccgacacccucugcaucggcuaccacgccaacaacuccaccgacaccgucgacaccguccucgagaagaacgucaccgucacccacuccgucaaccuccucgaggacaagcacaacggcaagcucugcaagcuccgcggcgucgccccccuccaccucggcaagugcaacaucgccggcuggauccucggcaaccccgagugcgagucccucuccaccgccuccuccugguccuacaucgucgagaccuccuccuccgacaacggcaccugcuaccccggcgacuucaucgacuacgaggagcuccgcgagcagcucuccuccgucuccuccuucgagcgcuucgagaucuuccccaagaccuccuccuggcccaaccacgacuccaacaagggcgucaccgccgccugcccccacgccggcgccaaguccuucuacaagaaccucaucuggcucgucaagaagggcaacuccuaccccaagaucuccaaguccuacaucaacgacaagggcaaggagguccucguccucuggggcauccaccaccccuccaccuccgccgaccagcagucccucuaccagaacgccgacgccuacgucuucgucggcaccucccgcuacuccaagaaguucaagcccgagaucgccauccgccccaagguccgcgaccaggagggccgcaugaacuacuacuggacccucgucgagcccggcgacaagaucaccuucgaggccaccggcaaccucgucgucccccgcuacgccuucgccauggagcgcaacgccggcuccggcaucaucaucuccgacacccccguccacgacugcaacaccaccugccagacccccaagggcgccaucaacaccucccuccccuuccagaacauccaccccaucaccaucggcaagugccccaaguacgucaaguccaccaagcuccgccucgccaccggccuccgcaacguccccuccauccagucccgcggccucuucggcgccaucgccggcuucaucgagggcggcuggaccggcauggucgacggcugguacggcuaccaccaccagaacgagcagggcuccggcuacgccgccgaccucaaguccacccagaacgccaucgacgagaucaccaacaaggucaacuccgucaucgagaagaugaacacccaguucaccgccgucggcaaggaguucaaccaccucgagaagcgcaucgagaaccucaacaagaaggucgacgacggcuuccucgacaucuggaccuacaacgccgagcuccucguccuccucgagaacgagcgcacccucgacuaccacgacuccaacgucaagaaccucuacgagaagguccgcucccagcucaagaacaacgccaaggagaucggcaacggcugcuucgaguucuaccacaagugcgacaacaccugcauggaguccgucaagaacggcaccuacgacuaccccaaguacuccgaggaggccaagcucaaccgcgaggagaucgacggcgucaagcucgaguccacccgcaucuaccagauccucgccaucuacuccaccgucgccuccucccucguccucgucgucucccucggcgccaucuccuucuggaugugcuccaacggcucccuccagugccgcaucugcaucuga

SEQ ID NO: 105754 - RNA, 1701 nt, Artificial Sequence; identical to SEQ ID NO: 98705
  derived and/or modified CDS sequence (opt2) from hemagglutinin__InfluenzaA__AFX96508

SEQ ID NO: 105755 - RNA, 1701 nt, Artificial Sequence; identical to SEQ ID NO: 100205
  derived and/or modified CDS sequence (opt2) from hemagglutinin__InfluenzaA__AFX96518

SEQ ID NO: 105756 - RNA, 1701 nt, Artificial Sequence; identical to SEQ ID NO: 98705
  derived and/or modified CDS sequence (opt2) from hemagglutinin__InfluenzaA__AFX96528

SEQ ID NO: 105757 - RNA, 1701 nt, Artificial Sequence; identical to SEQ ID NO: 100205
  derived and/or modified CDS sequence (opt2) from hemagglutinin__InfluenzaA__AFX96538

SEQ ID NO: 105758 - RNA, 1701 nt, Artificial Sequence
  derived and/or modified CDS sequence (opt2) from hemagglutinin__InfluenzaA__AFX96548
augaaggccauccucgucguccuccucuacaccuucgccaccgccaacgccgacacccucugcaucggcuaccacgccaacaacuccaccgacaccgucgacaccguccucgagaagaacgucaccgucacccacuccgucaaccuccucgaggacaagcacaacggcaagcucugcaagcuccgcggcgucgccccccuccaccucggcaagugcaacaucgccggcuggauccucggcaaccccgagugcgagucccucuccaccgccuccuccugguccuacaucgucgagaccuccuccuccgacaacggcaccugcuaccccggcgacuucaucgacuacgaggagcuccgcgagcagcucuccuccgucuccuccuucgagcgcuucgagaucuuccccaagaccuccuccuggcccaaccacgacuccaacaagggcgucaccgccgccugcccccacgccggcgccaaguccuucuacaagaaccucaucuggcucgucaagaagggcaacuccuaccccaagcucuccaaguccuacaucaacgacaagggcaaggagguccucguccucuggggcauccaccaccccuccaccuccgccgaccagcagucccucuaccagaacgccgacaccuacgucuucgucggcaccucccgcuacuccaagaaguucaagcccgagaucgccauccgccccaagguccgcgaccaggagggccgcaugaacuacuacuggacccucgucgagcccggcgacaagaucaccuucgaggccaccggcaaccucgucgucccccgcuacgccuucgccauggagcgcaacgccggcuccggcaucaucaucuccgacacccccguccacgacugcaacaccaccugccagacccccaagggcgccaucaacaccucccuccccuuccagaacauccaccccaucaccaucggcaagugccccaaguacgucaaguccaccaagcuccgccucgccaccggccuccgcaacguccccuccauccagucccgcggccucuucggcgccaucgccggcuucaucgagggcggcuggaccggcauggucgacggcugguacggcuaccaccaccagaacgagcagggcuccggcuacgccgccgaccucaaguccacccagaacgccaucgacaagaucaccaacaaggucaacuccgucaucgagaagaugaacacccaguucaccgccgucggcaaggaguucaaccaccucgagaagcgcaucgagaaccucaacaagaagaucgacgacggcuuccucgacaucuggaccuacaacgccgagcuccucguccuccucgagaacgagcgcacccucgacuaccacgacuccaacgucaagaaccucuacgagaagguccgcucccagcucaagaacaacgccaaggagaucggcaacggcugcuucgaguucuaccacaagugcgacaacaccugcauggaguccgucaagaacggcaccuacgacuaccccaaguacuccgaggaggccaagcucaaccgcgaggagaucgacggcgucaagcucgaguccacccgcaucuaccagauccucgccaucuacuccaccgucgccuccucccucguccucgucgucucccucggcgccaucuccuucuggaugugcuccaacggcucccuccagugccgcaucugcaucuga

SEQ ID NO: 105759 - RNA, 1701 nt, Artificial Sequence; identical to SEQ ID NO: 98705
  derived and/or modified CDS sequence (opt2) from hemagglutinin__InfluenzaA__AFX96558

SEQ ID NO: 105760 - RNA, 1701 nt, Artificial Sequence; identical to SEQ ID NO: 99865
  derived and/or modified CDS sequence (opt2) from hemagglutinin__InfluenzaA__AFX96568

SEQ ID NO: 105761 - RNA, 1701 nt, Artificial Sequence; identical to SEQ ID NO: 99865
  derived and/or modified CDS sequence (opt2) from hemagglutinin__InfluenzaA__AFX96578

SEQ ID NO: 105762 - RNA, 1701 nt, Artificial Sequence; identical to SEQ ID NO: 98705
  derived and/or modified CDS sequence (opt2) from hemagglutinin__InfluenzaA__AFX96588

SEQ ID NO: 105763 - RNA, 1701 nt, Artificial Sequence; identical to SEQ ID NO: 98705
  derived and/or modified CDS sequence (opt2) from hemagglutinin__InfluenzaA__AFX96598

SEQ ID NO: 105764 - RNA, 1701 nt, Artificial Sequence
  derived and/or modified CDS sequence (opt2) from hemagglutinin__InfluenzaA__AFX96608
augaaggccauccucgucguccuccucuacaccuucgccaccgccaacgccgacacccucugcaucggcuaccacgccaacaacuccaccgacaccgucgacaccguccucgagaagaacgucaccgucacccacuccgucaaccuccucgaggacaagcacaacggcaagcucugcaagcuccgcggcgucgccccccuccaccucggcaagugcaacaucgccggcuggauccucggcaaccccgagugcgagucccucuccaccgccuccuccugguccuacaucgucgagaccuccuccuccgacaacggcaccugcuaccccggcgacuucaucgacuacgaggagcuccgcgagcagcucuccuccgucuccuccuucgagcgcuucgagaucuuccccaagaccuccuccuggcccaaccacgacuccaacaagggcgucaccgccgccugcccccacgccggcgccaaguccuucuacaagaaccucaucuggcucgucaagaagggcaacuccuaccccaagcucuccaaguccuacaucaacgacaagggcaaggagguccucguccucuggggcauccaccaccccuccaccuccgccgaccagcagucccucuaccagaacgccgacgccuacgucuucgucggcaccucccgcuacuccaagaaguucaagcccgagaucgccauccgccccaagguccgcgaccaggagggccgcaugaacuacuacuggacccucgucgagcccggcgacaagaucaccuucgaggccaccggcaaccucgucgucccccgcuacgccuucgccauggagcgcaacgccggcuccggcaucaucaucuccgacacccccguccacgacugcaacaccaccugccagacccccaagggcgccaucaacaccucccuccccuuccagaacauccaccccaucaccaucggcaagugccccaaguacgucaaguccaccaagcuccgccucgccaccggccuccgcaacguccccuccauccagucccgcggccucuucggcgccaucgccggcuucaucgagggcggcuggaccggcauggucgacggcugguacggcuaccaccaccagaacgagcagggcuccggcuacgccgccgaccucaaguccacccagaacgccaucgacgagaucaccaacaaggucaacuccgucaucgagaagaugaacacccaguucaccgccgucggcaaggaguucaaccaccucgagaagcgcaucgagaaccucaacaagaaggucgacgacggcuuccucgacaucuggaccuacaacgccgagcuccucguccuccucgagaacgagcgcacccucgacuaccacgacuccaacgucaagaaccucuacgagaagguccgcucccagcucaagaacaacgccaaggagaucggcaacggcugcuucgaguucuaccacaagugcgacaacaccugcauggaguccgucaagaacggcaccuacgacuaccccaaguacuccgaggaggccaagcucaaccgcgagaagaucgacggcgucaagcucgaguccacccgcaucuaccagauccucgccaucuacuccacccucgccuccucccucguccucgucgucucccucggcgccaucuccuucuggaugugcuccaacggcucccuccagugccgcaucugcaucuga

SEQ ID NO: 105765 - RNA, 1701 nt, Artificial Sequence; identical to SEQ ID NO: 98705
  derived and/or modified CDS sequence (opt2) from hemagglutinin__InfluenzaA__AFX96618

SEQ ID NO: 105766 - RNA, 1701 nt, Artificial Sequence; identical to SEQ ID NO: 99865
  derived and/or modified CDS sequence (opt2) from hemagglutinin__InfluenzaA__AFX96628

SEQ ID NO: 105767 - RNA, 1701 nt, Artificial Sequence
  derived and/or modified CDS sequence (opt2) from hemagglutinin__InfluenzaA__AFX96638
augaaggccauccucgucguccuccucuacaccuucgccaccgccaacgccgacacccucugcaucggcuaccacgccaacaacuccaccgacaccgucgacaccguccucgagaagaacgucaccgucacccacuccgucaaccuccucgaggacaagcacaacggcaagcucugcaagcuccgcggcgucgccccccuccaccucggcaagugcaacaucgccggcuggauccucggcaaccccgagugcgagucccucuccaccgccuccuccugguccuacaucgucgagaccuccuccuccgacaacggcaccugcuaccccggcgacuucaucaacuacgaggagcuccgcgagcagcucuccuccgucuccuccuucgagcgcuucgagaucuuccccaagaccuccuccuggcccaaccacgacuccaacaagggcgucaccgccgccugcccccacgccggcgccaaguccuucuacaagaaccucgucuggcucgucaagaagggcaacuccuaccccaagcucuccaaguccuacaucaacgacaagggcaaggagguccucguccucuggggcauccaccaccccuccaccuccgccgaccagcagucccucuaccagaacgccgacgccuacgucuucgucggcaccucccgcuacuccaagaaguucaagcccgagaucgccauccgccccaagguccgcgaccaggagggccgcaugaacuacuacuggacccucgucgagcccggcgacaagaucaccuucgaggccaccggcaaccucauggucccccgcuacgccuucgccauggagcgcaacgccggcuccggcaucaucaucuccgacacccccguccacgacugcaacaccaccugccagacccccaagggcgccaucaacaccucccuccccuuccagaacauccaccccaucaccaucggcaagugccccaaguacgucaaguccaccaagcuccgccucgccaccggccuccgcaacguccccuccauccagucccgcggccucuucggcgccaucgccggcuucaucgagggcggcuggaccggcauggucgacggcugguacggcuaccaccaccagaacgagcagggcuccggcuacgccgccgaccucaaguccacccagaacgccaucgacgagaucaccaacaaggucaacuccgucaucgagaagaugaacacccaguucaccgccgucggcaaggaguucaaccaccucgagaagcgcaucgagaaccucaacaagaaggucgacgacggcuuccucgacaucuggaccuacaacgccgagcuccucguccuccucgagaacgagcgcacccucgacuaccacgacuccaacgucaagaaccucuacgagaagguccgcucccagcucaagaacaacgccaaggagaucggcaacggcugcuucgaguucuaccacaagugcgacaacaccugcauggaguccgucaagaacggcaccuacgacuaccccaaguacuccgaggaggccaagcucaaccgcgaggagaucgacggcgucaagcucgaguccacccgcaucuaccagauccucgccaucuacuccaccgucgccuccucccucguccucgucgucucccucggcgccaucuccuucuggaugugcuccaacggcucccuccagugccgcaucugcaucuga

SEQ ID NO: 105768 - RNA, 1701 nt, Artificial Sequence; identical to SEQ ID NO: 98705
  derived and/or modified CDS sequence (opt2) from hemagglutinin__InfluenzaA__AFX96648

SEQ ID NO: 105769 - RNA, 1701 nt, Artificial Sequence; identical to SEQ ID NO: 99865
  derived and/or modified CDS sequence (opt2) from hemagglutinin__InfluenzaA__AFX96658

SEQ ID NO: 105770 - RNA, 1701 nt, Artificial Sequence
  derived and/or modified CDS sequence (opt2) from hemagglutinin__InfluenzaA__AFX96668
augaaggccauccucgucguccuccucuacaccuucgccaccgccaacgccgacacccucugcaucggcuaccacgccaacaacuccaccgacaccgucgacaccguccucgagaagaacgucaccgucacccacuccgucaaccuccucgaggacaagcacaacggcaagcucugcaagcuccgcggcgucgccccccuccaccucggcaagugcaacaucgccggcuggauccucggcaaccccgagugcgagucccucuccaccgccuccuccugguccuacaucgucgagaccuccuccuccgacaacggcaccugcuaccccggcgacuucaucgacuacgaggagcuccgcgagcagcucuccuccgucuccuccuucgagcgcuucgagaucuuccccaagaccuccuccuggcccaaccacgacuccaacaagggcgucaccgccgccugcccccacgccggcgccaaguccuucuacaagaaccucaucuggcucgucaagaagggcaacuccuaccccaagcucuccaaguccuacaucaacgacaagggcaaggagguccucguccucuggggcauccaccaccccuccaccuccgccgaccagcagucccucuaccagaacgccgacgccuacgucuucgucggcaccucccgcuacuccaagaaguucaagcccgagaucgccauccgccccaagguccgcgaccaggagggccgcaugaacuacuacuggacccucgucgagcccggcgacaagaucaccuucgaggccaccggcaaccucgucgucccccgcuacgccuucgccauggagcgcaacgccggcuccggcaucaucaucuccgacacccccguccacgacugcaacaccaccugccagacccccaagggcgccaucaacaccucccuccccuuccagaacauccaccccaucaccaucggcaagugcuccaaguacgucaaguccaccaagcuccgccucgccaccggccuccgcaacguccccuccauccagucccgcggccucuucggcgccaucgccggcuucaucgagggcggcuggaccggcauggucgacggcugguacggcuaccaccaccagaacgagcagggcuccggcuacgccgccgaccucaaguccacccagaacgccaucgacgagaucaccaacaaggucaacuccgucaucgagaagaugaacacccaguucaccgccgucggcaaggaguucaaccaccucgagaagcgcaucgagaaccucaacaagaaggucgacgacggcuuccucgacaucuggaccuacaacgccgagcuccucguccuccucgagaacgagcgcacccucgacuaccacgacuccaacgucaagaaccucuacgagaagguccgcucccagcucaagaacaacgccaaggagaucggcaacggcugcuucgaguucuaccacaagugcgacaacaccugcauggaguccgucaagaacggcaccuacgacuaccccaaguacuccgaggaggccaagcucaaccgcgaggagaucgacggcgucaagcucgaguccacccgcaucuaccagauccucgccaucuacuccaccgucgccuccucccucguccucgucgucucccucggcgccaucuccuucuggaugugcuccaacggcucccuccagugccgcaucugcaucuga

SEQ ID NO: 105771 - RNA, 1701 nt, Artificial Sequence
  derived and/or modified CDS sequence (opt2) from hemagglutinin__InfluenzaA__AFX96678
augaaggccauccucgucguccuccucuacaccuucgccaccgccaacgccgacacccucugcaucggcuaccacgccaacaacuccaccgacaccgucgacaccguccucgagaagaacgucaccgucacccacuccgucaaccuccucgaggacaagcacaacggcaagcucugcaagcuccgcggcgucgccccccuccaccucggcaagugcaacaucgccggcuggauccucggcaaccccgagugcgagucccucuccaccgccuccuccugguccuacaucgucgagaccuccuccuccgacaacggcaccugcuaccccggcgacuucaucgacuacgaggagcuccgcgagcagcucuccuccgucuccuccuucgagcgcuucgagaucuuccccaagaccuccuccuggcccaaccacgacuccaacaagggcgucaccgccgccugcucccacgccggcgccaaguccuucuacaagaaccucaucuggcucgucaagaagggcaacuccuaccccaagcucuccaaguccuacaucaacgacaagggcaaggagguccucguccucuggggcauccaccaccccuccaccuccgccgaccagcagucccucuaccagaacgccgacgccuacgucuucgucggcaccucccgcuacuccaagaaguucaagcccgagaucgccauccgccccaagguccgcgaccaggagggccgcaugaacuacuacuggacccucgucgagcccggcgacaagaucaccuucgaggccaccggcaaccucgucgucccccgcuacgccuucgccauggagcgcaacgccggcuccggcaucaucaucuccgacacccccguccacgacugcaacaccaccugccagacccccaagggcgccaucaacaccucccuccccuuccagaacauccaccccaucaccaucggcaagugccccaaguacgucaaguccaccaagcuccgccucgccaccggccuccgcaacguccccuccauccagucccgcggccucuucggcgccaucgccggcuucaucgagggcggcuggaccggcauggucgacggcugguacggcuaccaccaccagaacgagcagggcuccggcuacgccgccgaccucaaguccacccagaacgccaucgacgagaucaccaacaaggucaacuccgucaucgagaagaugaacacccaguucaccgccgucggcaaggaguucaaccaccucgagaagcgcaucgagaaccucaacaagaaggucgacgacggcuuccucgacaucuggaccuacaacgccgagcuccucguccuccucgagaacgagcgcacccucgacuaccacgacuccaacgucaagaaccucuacgagaagguccgcucccagcucaagaacaacgccaaggagaucggcaacggcugcuucgaguucuaccacaagugcgacaacaccugcauggaguccgucaagaacggcaccuacgacuaccccaaguacuccgaggaggccaagcucaaccgcgaggagaucgacggcgucaagcucgaguccacccgcaucuaccagauccucgccaucuacuccaccgucgccuccucccucguccucgucgucucccucggcgccaucuccuucuggaugugcuccaacggcucccuccagugccgcaucugcaucuga

SEQ ID NO: 105772 - RNA, 1701 nt, Artificial Sequence
  derived and/or modified CDS sequence (opt2) from hemagglutinin__InfluenzaA__AFX96688
augaaggccauccucgucguccuccucuacaccuucgccaccgccaacgccgacacccucugcaucggcuaccacgccaacaacuccaccgacaccgucgacaccguccucgagaagaacgucaccgucacccacuccgucaaccuccucgaggacaagcacaacggcaagcucugcaagcuccgcggcgucgccccccuccaccucggcaagugcaacaucgccggcuggauccucggcaaccccgacugcgagucccucuccaccgccuccuccugguccuacaucgucgagaccuccuccuccgacaacggcaccugcuaccccggcgacuucaucgacuacgaggagcuccgcgagcagcucuccuccgucuccuccuucgagcgcuucgagauguuccccaagaccuccuccuggcccaaccacgacuccaacaagggcgucaccgccgccugcccccacgccggcgccaaguccuucuacaagaaccucaucuggcucgucaagaagggcaacuccuaccccaagcucuccaaguccuacaucaacgacaagggcaaggagguccucguccucuggggcauccaccaccccuccaccuccgccgaccagcagucccucuaccagaacgccgacgccuacgucuucgucggcaccucccgcuacuccaagaaguucaagcccgagaucgccauccgccccaagguccgcgaccaggagggccgcaugaacuacuacuggacccucgucgagcccggcgacaagaucaccuucgaggccaccggcaaccucgucgucccccgcuacgccuucgccauggagcgcaacgacggcuccggcaucaucaucuccgacacccccguccacgacugcaacaccaccugccagacccccaagggcgccaucaacaccucccuccccuuccagaacauccaccccaucaccaucggcaagugccccaaguacgucaaguccaccaagcuccgccucgccaccggccuccgcaacguccccuccauccagucccgcggccucuucggcgccaucgccggcuucaucgagggcggcuggaccggcauggucgacggcugguacggcuaccaccaccagaacgagcagggcuccggcuacgccgccgaccucaaguccacccagaacgccaucgacgagaucaccaacaaggucaacuccgucaucgagaagaugaacacccaguucaccgccgucggcaaggaguucaaccaccucgagaagcgcaucgagaaccucaacaagaaggucgacgacggcuuccucgacaucuggaccuacaacgccgagcuccucguccuccucgagaacgagcgcacccucgacuaccacgacuccaacgucaagaaccucuacgagaagguccgcucccagcucaagaacaacgccaaggagaucggcaacggcugcuucgaguucuaccacaagugcgacaacaccugcauggaguccgucaagaacggcaccuacgacuaccccaaguacuccgaggaggccaagcucaaccgcgaggagaucgacggcgucaagcucgaguccacccgcaucuaccagauccucgccaucuacuccaccgucgccuccucccucguccucgucgucucccucggcgccaucuccuucuggaugugcuccaacggcucccuccagugccgcaucugcaucuga

SEQ ID NO: 105773 - RNA, 1701 nt, Artificial Sequence; identical to SEQ ID NO: 98705
  derived and/or modified CDS sequence (opt2) from hemagglutinin__InfluenzaA__AFX96698

SEQ ID NO: 105774 - RNA, 1701 nt, Artificial Sequence
  derived and/or modified CDS sequence (opt2) from hemagglutinin__InfluenzaA__AFX96718
augaaggccauccucgucguccuccucuacaccuucgccaccgccaacgccgacacccucugcaucggcuaccacgccaacaacuccaccgacaccgucgacaccguccucgagaagaacgucaccgucacccacuccgucaaccuccucgaggacaagcacaacggcaagcucugcaagcuccgcggcgucgccccccuccaccucggcaagugcaacaucgccggcuggauccucggcaaccccgagugcgagucccucuccaccgccuccuccugguccuacaucgucgagaccuccuccuccgacaacggcaccugcuaccccggcgacuucaucgacuacgaggagcuccgcgagcagcucuccuccgucuccuccuucgagcgcuucgagaucuuccccaagaccuccuccuggcccaaccacgacuccaacaagggcgucaccgccgccugcccccacgccggcgccaaguccuucuacaagaaccucaucuggcucgucaagaagggcaacuccuaccccaagaucuccaaguccuacaucaacgacaagggcaaggagguccucguccucuggggcauccaccaccccuccaccuccgccgaccagcagucccucuaccagaacgccgacaccuacgucuucgucggcaccucccgcuacuccaagaaguucaagcccgagaucgccauccgccccaagguccgcgaccaggagggccgcaugaacuacuacuggacccucgucgagcccggcgacaagaucaccuucgaggccaccggcaaccucgucgucccccgcuacgccuucgccauggagcgcaacgccggcuccggcaucaucaucuccgacacccccguccacgacugcaacaccaccugccagacccccaagggcgccaucaacaccucccuccccuuccagaacauccaccccaucaccaucggcaagugccccaaguacgucaaguccaccaagcuccgccucgccaccggccuccgcaacguccccuccauccagucccgcggccucuucggcgccaucgccggcuucaucgagggcggcuggaccggcauggucgacggcugguacggcuaccaccaccagaacgagcagggcuccggcuacgccgccgaccucaaguccacccagaaggccaucgacgagaucaccaacaaggucaacuccgucaucgagaagaugaacacccaguucaccgccgucggcaaggaguucaaccaccucgagaagcgcaucgagaaccucaacaagaagaucgacgacggcuuccucgacaucuggaccuacaacgccgagcuccucguccuccucgagaacgagcgcacccucgacuaccacgacuccaacgucaagaaccucuacgagaagguccgcucccagcucaagaacaacgccaaggagaucggcaacggcugcuucgaguucuaccacaagugcgacaacaccugcauggaguccgucaagaacggcaccuacgacuaccccaaguacuccgaggaggccaagcucaaccgcgaggagaucgacggcgucaagcucgaguccacccgcaucuaccagauccucgccaucuacuccaccgucgccuccucccucguccucgucgucucccucggcgccaucuccuucuggaugugcuccaacggcucccuccagugccgcaucugcaucuga

SEQ ID NO: 105775 - RNA, 1701 nt, Artificial Sequence; identical to SEQ ID NO: 105774
  derived and/or modified CDS sequence (opt2) from hemagglutinin__InfluenzaA__AFX96728

SEQ ID NO: 105776 - RNA, 1701 nt, Artificial Sequence; identical to SEQ ID NO: 99175
  derived and/or modified CDS sequence (opt2) from hemagglutinin__InfluenzaA__AFX96738

SEQ ID NO: 105777 - RNA, 1701 nt, Artificial Sequence
  derived and/or modified CDS sequence (opt2) from hemagglutinin__InfluenzaA__AFX96748
augaaggccauccucgucguccuccucuacaccaucgccaccgccaacgccgacacccucugcaucggcuaccacgccaacaacuccaccgacaccgucgacaccgucaucgagaagaacgucaccgucacccacuccgucaaccuccucgaggacaagcacaacggcaagcucugcaagcuccgcggcgucgccccccuccaccucggcaagugcaacaucgccggcuggauccucggcaaccccgagugcgagucccucuccaccgccuccuccugguccuacaucgucgagaccuccuccuccgacaacggcaccugcuaccccggcgacuucaucgacuacgaggagcuccgcgagcagcucuccuccgucuccuccuucgagcgcuucgagauguuccccaagaccuccuccuggcccaaccacgacuccaacaagggcgucaccgccgccugcccccacgccggcgccaaguccuucuacaagaaccucaucuggcucgucaagaagggcaacuccuaccccaagcucuccaaguccuacaucaacgacaagggcaaggagguccucguccucuggggcauccaccaccccuccaccuccgccgaccagcagucccucuaccagaacgccgacgccuacgucuucgucggcaccucccgcuacuccaagaaguucaagcccgagaucgccauccgccccaagguccgcgaccaggagggccgcaugaacuacuacuggacccucgucgagcccggcgacaagaucaccuucgaggccaccggcaaccucgucgucccccgcuacgccuucgccauggagcgcaacgccggcuccggcaucaucaucuccgacacccccguccacgacugcaacaccaccugccagacccccaagggcgccaucaacaccucccuccccuuccagaacauccaccccaucaccaucggcaagugccccaaguacgucaaguccaccaagcuccgccucgccaccggccuccgcaacguccccuccauccagucccgcggccucuucggcgccaucgccggcuucaucgagggcggcuggaccggcauggucgacggcugguacggcuaccaccaccagaacgagcagggcuccggcuacgccgccgaccucaaguccacccagaacgccaucgacgagaucaccaacaaggucaacuccgucaucgagaagaugaacacccaguucaccgccgucggcaaggaguucaaccaccucgagaagcgcaucgagaaccucaacaagaaggucgacgacggcuuccucgacaucuggaccuacaacgccgagcuccucguccuccucgagaacgagcgcacccucgacuaccacgacuccaacgucaagaaccucuacgagaagguccgcucccagcucaagaacaacgccaaggagaucggcaacggcugcuucgaguucuaccacaagugcgacaacaccugcauggaguccgucaagaacggcaccuacgacuaccccaaguacuccgaggaggccaagcucaaccgcgaggagaucgacggcgucaagcucgaguccacccgcaucuaccagauccucgccaucuacuccaccgucgccuccucccucguccucgucgucucccucggcgccaucuccuucuggaugugcuccaacggcucccuccagugccgcaucugcaucuga

SEQ ID NO: 105778 - RNA, 1701 nt, Artificial Sequence
  derived and/or modified CDS sequence (opt2) from hemagglutinin__InfluenzaA__AFX96758
augaaggccauccucgucguccuccucuacaccuucgccaccgccaacgccgacacccucugcaucggcuaccacgccaacaacuccaccgacaccgucgacaccguccucgagaagaacgucaccgucacccacuccgucaaccuccucgaggacaagcacaacggcaagcucugcaagcuccgcggcgucgccccccuccaccucggcaagugcaacaucgccggcuggauccucggcaaccccgagugcgagucccucuccaccgccuccuccugguccuacaucgucgagaccuccuccuccgacaacggcaccugcuaccccggcgacuucaucgacuacgaggagcuccgcgagcagcucuccuccgucuccuccuucgagcgcuucgagauguuccccaagaccuccuccuggcccaaccacgacuccaacaagggcgucaccgccgccugcccccacgccggcgccaaguccuucuacaagaaccucaucuggcucgucaagaagggcaacuccuaccccaagcucuccaaguccuacaucaacgacaagggcaaggagguccucguccucuggggcauccaccaccccuccaccuccgccgaccagcagucccucuaccagaacgccgacaccuacgucuucgucggcaccucccgcuacuccaagaaguucaagcccgagaucgccauccgccccaagguccgcgaccaggagggccgcaugaacuacuacuggacccucgucgagcccggcgacaagaucaccuucgaggccaccggcaaccucgucgucccccgcuacgccuucgccauggagcgcaacgccggcuccggcaucaucaucuccgacacccccguccacgacugcaacaccaccugccagacccccaagggcgccaucaacaccucccuccccuuccagaacauccaccccaucaccaucggcaagugccccaaguacgucaaguccaccaagcuccgccucgccaccggccuccgcaacguccccuccauccagucccgcggccucuucggcgccaucgccggcuucaucgagggcggcuggaccggcauggucgacggcugguacggcuaccaccaccagaacgagcagggcuccggcuacgccgccgaccucaaguccacccagaacgccaucgacgagaucaccaacaaggucaacuccgucaucgagaagaugaacacccaguucaccgccgucggcaaggaguucaaccaccucgagaagcgcaucgagaaccucaacaagaagaucgacgacggcuuccucgacaucuggaccuacaacgccgagcuccucguccuccucgagaacgagcgcacccucgacuaccacgacuccaacgucaagaaccucuacgagaagguccgcucccagcucaagaacaacgccaaggagaucggcaacggcugcuucgaguucuaccacaagugcgacaacaccugcauggaguccgucaagaacggcaccuacgacuaccccaaguacuccgaggaggccaagcucaaccgcgaggagaucgacggcgucaagcucgaguccacccgcaucuaccagauccucgccaucuacuccaccgucgccuccucccucguccucgucgucucccucggcgccaucuccuucuggaugugcuccaacggcucccuccagugccgcaucugcaucuga

SEQ ID NO: 105779 - RNA, 1701 nt, Artificial Sequence
  derived and/or modified CDS sequence (opt2) from hemagglutinin__InfluenzaA__AFX96768
augaaggccauccucgucguccuccucuacaccuucgccaccgccaacgccgacacccucugcaucggcuaccacgccaacaacuccaccgacaccgucgacaccguccucgagaagaacgucaccgucacccacuccgucaaccuccucgaggacaagcacaacggcaagcucugcaagcuccgcggcgucgccccccuccaccucggcaagugcaacaucgccggcuggauccucggcaaccccgagugcgagucccucuccaccgccaucuccugguccuacaucgucgagaccuccuccuccgacaacggcaccugcuaccccggcgacuucaucgacuacgaggagcuccgcgagcagcucuccuccgucuccuccuucgagcgcuucgagaucuuccccaagaccuccuccuggcccaaccacgacuccaacaagggcgucaccgccgccugcccccacgccggcgccaaguccuucuacaagaaccucaucuggcucgucaagaagggcaacuccuaccccaagcucuccaaguccuacaucaacgacaagggcaaggagguccucguccucuggggcauccaccaccccuccaccuccgccgaccagcagucccucuaccagaacgccgacgccuacgucuucgucggcaccucccgcuacuccaagaaguucaagcccgagaucgccauccgccccaagguccgcgaccaggagggccgcaugaacuacuacuggacccucgucgagcccggcgacaagaucaccuucgaggccaccggcaaccucgucgucccccgcuacgccuucgccauggagcgcaacgccggcuccggcaucaucaucuccgacacccccguccacgacugcaacaccaccugccagacccccaagggcgccaucaacaccucccuccccuuccagaacauccaccccaucaccaucggcaagugccccaaguacgucaaguccaccaagcuccgccucgccaccggccuccgcaacguccccuccauccagucccgcggccucuucggcgccaucgccggcuucaucgagggcggcuggaccggcauggucgacggcugguacggcuaccaccaccagaacgagcagggcuccggcuacgccgccgaccucaaguccacccagaacgccaucgacgagaucaccaacaaggucaacuccgucaucgagaagaugaacacccaguucaccgccgucggcaaggaguucaaccaccucgagaagcgcaucgagaaccucaacaagaaggucgacgacggcuuccucgacaucuggaccuacaacgccgagcuccucguccuccucgagaacgagcgcacccucgacuaccacgacuccaacgucaagaaccucuacgagaagguccgcucccagcucaagaacaacgccaaggagaucggcaacggcugcuucgaguucuaccacaagugcgacaacaccugcauggaguccgucaagaacggcaccuacgacuaccccaaguacuccgaggaggccaagcucaaccgcgaggagaucgacggcgucaagcucgaguccaccaagaucuaccagauccucgccaucuacuccaccgucgccuccucccucguccucgucgucucccucggcgccaucuccuucuggaugugcuccaacggcucccuccagugccgcaucugcaucuga

SEQ ID NO: 105780 - RNA, 1701 nt, Artificial Sequence
  derived and/or modified CDS sequence (opt2) from hemagglutinin__InfluenzaA__AFX96778
augaaggccauccucgucauccuccucuacaccuucgccaccgccaacgccgacacccucugcaucggcuaccacgccaacaacuccaccgacaccgucgacaccauccucgagaagaacgucaccgucacccacuccgucaaccuccucgaggacaagcacaacggcaagcucugcaagcuccgcggcgucgccccccuccaccucggcaagugcaacaucgccggcuggauccucggcaaccccgagugcgagucccucuccaccgccuccuccugguccuacaucgucgagaccuccuccuccgacaacggcaccugcuaccccggcgacuucaucgacuacgaggagcuccgcgagcagcucuccuccgucuccuccuucgagcgcuucgagaucuuccccaagaccuccuccuggcccaaccacgacuccaacaagggcgucaccgccgccugcccccacgccggcgccaaguccuucuacaagaaccucaucuggcucgucaagaagggcaacuccuaccccaagcucuccaaguccuacaucaacgacaagggcaaggagguccucguccucuggggcauccaccaccccuccaccuccgccgaccagcagucccucuaccagaacgccgacgccuacgucuucgucggcaccucccgcuacuccaagaaguucaagcccgagaucgccauccgccccaagguccgcgaccaggagggccgcaugaacuacuacuggacccucgucgagcccggcgacaagaucaccuucgaggccaccggcaaccucgucgucccccgcuacgccuucgccauggagcgcaacgccggcuccggcaucaucaucuccgacacccccguccacgacugcaacaccaccugccagacccccaagggcgccaucaacaccucccuccccuuccagaacauccaccccaucaccaucggcaagugccccaaguacgucaaguccaccaagcuccgccucgccaccggccuccgcaacguccccuccauccagucccgcggccucuucggcgccaucgccggcuucaucgagggcggcuggaccggcauggucgacggcugguacggcuaccaccaccagaacgagcagggcuccggcuacgccgccgaccucaaguccacccagaacgccaucgacgagaucaccaacaaggucaacuccgucaucgagaagaugaacacccaguucaccgccgucggcaaggaguucaaccaccucgagaagcgcaucgagaaccucaacaagaaggucgacgacggcuuccucgacaucuggaccuacaacgccgagcuccucguccuccucgagaacgagcgcacccucgacuaccacgacuccaacgucaagaaccucuacgagaagguccgcucccagcucaagaacaacgccaaggagaucggcaacggcugcuucgaguucuaccacaagugcgacaacaccugcauggaguccgucaagaacggcaccuacgacuaccccaaguacuccgaggaggccaagcucaaccgcgaggagaucgacggcgucaagcucgaguccacccgcaucuaccagauccucgccaucuacuccaccgucgccuccucccucguccucgucgucucccucggcgccaucuccuucuggaugugcuccaacggcucccuccagugccgcaucugcaucuga

SEQ ID NO: 105781 - RNA, 1701 nt, Artificial Sequence
  derived and/or modified CDS sequence (opt2) from hemagglutinin__InfluenzaA__AFX96788
augaaggccauccucgucguccuccucuacaccuucgccaccgccaacgccgacacccucugcaucggcuaccacgccaacaacuccaccgacaccgucgacaccguccucgagaagaacgucaccgucacccacuccgucaaccuccucgaggacaagcacaacggcaagcucugcaagcuccgcggcgucgccccccuccaccucggcaagugcaacaucgccggcuggauccucggcaaccccgagugcgagucccucuccaccgccuccuccugguccuacaucgucgagaccuccuccuccgacaacggcaccugcuaccccggcgacuucaucgacuacgaggagcuccgcgagcagcucuccuccgucuccuccuucgagcgcuucgagaucuuccccaagaccuccuccuggcccaaccacgacuccaacaagggcgucaccgccgccugcccccacgccggcgccaaguccuucuacaagaaccucaucuggcucgucaagaagggcaacuccuaccccaagcucuccaaguccuacaucaacgacaagggcaaggagguccucguccucuggggcauccaccaccccuccaccuccgccgaccagcagucccucuaccagaacgccgacgccuacgucuucgucggcaccucccgcuacuccaagaaguucaagcccgagaucgccauccgccccaagguccgcgaccaggagggccgcaugaacuacuacuggacccucgucgagcccggcgacaagaucaccuucgaggccaccggcaaccucgucgucccccgcuacgccuucgccauggagaagaacgccggcuccggcaucaucaucuccgacacccccguccacgacugcaacaccaccugccagacccccaagggcgccaucaacaccucccuccccuuccagaacauccaccccaucaccaucggcaagugccccaaguacgucaaguccaccaagcuccgccucgccaccggccuccgcaacguccccuccauccagucccgcggccucuucggcgccaucgccggcuucaucgagggcggcuggaccggcauggucgacggcugguacggcuaccaccaccagaacgagcagggcuccggcuacgccgccgaccucaaguccacccagaacgccaucgacaagaucaccaacaaggucaacuccgucaucgagaagaugaacacccaguucaccgccgucggcaaggaguucaaccaccucgagaagcgcaucgagaaccucaacaagaaggucgacgacggcuuccucgacaucuggaccuacaacgccgagcuccucguccuccucgagaacgagcgcacccucgacuaccacgacuccaacgucaagaaccucuacgagaagguccgcucccagcucaagaacaacgccaaggagaucggcaacggcugcuucgaguucuaccacaagugcgacaacaccugcauggaguccgucaagaacggcaccuacgacuaccccaaguacuccgaggaggccaagcucaaccgcgaggagaucgacggcgucaagcucgaguccacccgcaucuaccagauccucgccaucuacuccaccgucgccuccucccucguccucgucgucucccucggcgccaucuccuucuggaugugcuccaacggcucccuccagugccgcaucugcaucuga

SEQ ID NO: 105782 - RNA, 1701 nt, Artificial Sequence; identical to SEQ ID NO: 105781
  derived and/or modified CDS sequence (opt2) from hemagglutinin__InfluenzaA__AFX96798

SEQ ID NO: 105783 - RNA, 1701 nt, Artificial Sequence; identical to SEQ ID NO: 99865
  derived and/or modified CDS sequence (opt2) from hemagglutinin__InfluenzaA__AFX96808

SEQ ID NO: 105784 - RNA, 1701 nt, Artificial Sequence; identical to SEQ ID NO: 102945
  derived and/or modified CDS sequence (opt2) from hemagglutinin__InfluenzaA__AFX96818

SEQ ID NO: 105785 - RNA, 1701 nt, Artificial Sequence; identical to SEQ ID NO: 105781
  derived and/or modified CDS sequence (opt2) from hemagglutinin__InfluenzaA__AFX96828

SEQ ID NO: 105786 - RNA, 1701 nt, Artificial Sequence; identical to SEQ ID NO: 101302
  derived and/or modified CDS sequence (opt2) from hemagglutinin__InfluenzaA__AFX96838

SEQ ID NO: 105787 - RNA, 1701 nt, Artificial Sequence
  derived and/or modified CDS sequence (opt2) from hemagglutinin__InfluenzaA__AFX96856
augaaggccauccucgucguccuccucuacaccuucgccaccgccaacgccgacacccucugcaucggcuaccacgccaacaacuccaccgacaccgucgacaccguccucgagaagaacgucaccgucacccacuccgucaaccuccucgaggacaagcacaacggcaagcucugcaagcuccgcggcgucgccccccuccaccucggcaagugcaacaucgccggcuggauccucggcaaccccgagugcgagucccucuccaccgccuccuccugguccuacaucgucgagaccuccuccuccgacaacggcaccugcuaccccggcgacuucaucgacuacgaggagcuccgcgagcagcucuccuccgucuccuccuucgagcgcuucgagaucuuccccaagaccuccuccuggcccaaccacgacuccaacaagggcgucaccgccgccugcacccacgccggcgccaaguccuucuacaagaaccucaucuggcucgucaagaagggcaacuccuaccccaagcucuccaaguccuacaucaacgacaagggcaaggagguccucguccucuggggcauccaccaccccuccaccuccgccgaccagcagucccucuaccagaacgccgacgccuacgucuucgucggcaccucccgcuacuccaagaaguucaagcccgagaucgccauccgccccaagguccgcgaccaggagggccgcaugaacuacuacuggacccucgucgagcccggcgacaagaucaccuucgaggccaccggcaaccucgucgucccccgcuacgccuucgccauggagcgcaacgccggcuccggcaucaucaucuccgacacccccguccacgacugcaacaccaccugccagacccccaagggcgccaucaacaccucccuccccuuccagaacauccaccccaucaccaucggcaagugccccaaguacgucaaguccaccaagcuccgccucgccaccggccuccgcaacguccccuccauccagucccgcggccucuucggcgccaucgccggcuucaucgagggcggcuggaccggcauggucgacggcugguacggcuaccaccaccagaacgagcagggcuccggcuacgccgccgaccucaaguccacccagaacgccaucgacgagaucaccaacaaggucaacuccgucaucgagaagaugaacacccaguucaccgccgucggcaaggaguucaaccaccucgagaagcgcaucgagaaccucaacaagaaggucgacgacggcuuccucgacaucuggaccuacaacgccgagcuccucguccuccucgagaacgagcgcacccucgacuaccacgacuccaacgucaagaaccucuacgagaagguccgcucccagcucaagaacaacgccaaggagaucggcaacggcugcuucgaguucuaccacaagugcgacaacaccugcauggaguccgucaagaacggcaccuacgacuaccccaaguacuccgaggaggccaagcucaaccgcgaggagaucgacggcgucaagcucgaguccacccgcaucuaccagauccucgccaucuacuccaccgucgccuccucccucguccucgucgucucccucggcgccaucuccuucuggaugugcuccaacggcucccuccagugccgcaucugcaucuga

SEQ ID NO: 105788 - RNA, 1701 nt, Artificial Sequence; identical to SEQ ID NO: 105770
  derived and/or modified CDS sequence (opt2) from hemagglutinin__InfluenzaA__AFX96904

SEQ ID NO: 105789 - RNA, 1701 nt, Artificial Sequence; identical to SEQ ID NO: 100205
  derived and/or modified CDS sequence (opt2) from hemagglutinin__InfluenzaA__AFX96914

SEQ ID NO: 105790 - RNA, 1701 nt, Artificial Sequence
  derived and/or modified CDS sequence (opt2) from hemagglutinin__InfluenzaA__AFX96924
augaaggccauccucgucguccuccucuacaccuucgccaccgccaacgccgacacccucugcaucggcuaccacgccaacaacuccaccgacaccgucgacaccguccucgagaagaacgucaccgucacccacuccgucaaccuccucgaggacaagcacaacggcaagcucugcaagcuccgcggcgucgccccccuccaccucggcaagugcaacaucgccggcuggauccucggcaaccccgagugcgagucccucuccaccgccuccuccugguccuacaucgucgagaccuccuccuccgacaacggcaccugcuaccccggcgacuucaucgacuacgaggagcuccgcgagcagcucuccuccgucuccuccuucgagcgcuucgagaucuuccccaagaccuccuccuggcccaaccacgacuccaacaagggcgucaccgccgccugcccccacgccggcgccaaguccuucuacaagaaccucaucuggcucgucaagaagggcaacuccuaccccaagcucuccaaguccuacaucaacgacaagggcaaggagguccucguccucuggggcauccaccaccccuccaccuccgccgaccagcagucccucuaccagaacgccgacgccuacgucuucgucggcaccucccgcuacuccaagcgcuucaagcccgagaucgccauccgccccaagguccgcgaccaggagggccgcaugaacuacuacuggacccucgucgagcccggcgacaagaucaccuucgaggccaccggcaaccucgucgucccccgcuacgccuucgccauggagcgcaacgccggcuccggcaucaucaucuccgacacccccguccacgacugcaacaccaccugccagacccccaagggcgccaucaacaccucccuccccuuccagaacauccaccccaucaccaucggcaagugccccaaguacgucaaguccaccaagcuccgccucgccaccggccuccgcaacguccccuccauccagucccgcggccucuucggcgccaucgccggcuucaucgagggcggcuggaccggcauggucgacggcugguacggcuaccaccaccagaacgagcagggcuccggcuacgccgccgaccucaaguccacccagaacgccaucgacgagaucaccaacaaggucaacuccgucaucgagaagaugaacacccaguucaccgccgucggcaaggaguucaaccaccucgagaagcgcaucgagaaccucaacaagaaggucgacgacggcuuccucgacaucuggaccuacaacgccgagcuccucguccuccucgagaacgagcgcacccucgacuaccacgacuccaacgucaagaaccucuacgagaagguccgcucccagcucaagaacaacgccaaggagaucggcaacggcugcuucgaguucuaccacaagugcgacaacaccugcauggaguccgucaagaacggcaccuacgacuaccccaaguacuccgaggaggccaagcucaaccgcgaggagaucgacggcgucaagcucgaguccacccgcaucuaccagauccucgccaucuacuccaccgucgccuccucccucguccucgucgucucccucggcgccaucuccuucuggaugugcuccaacggcucccuccagugccgcaucugcaucuga

SEQ ID NO: 105791 - RNA, 1701 nt, Artificial Sequence; identical to SEQ ID NO: 98705
  derived and/or modified CDS sequence (opt2) from hemagglutinin__InfluenzaA__AFX96934

SEQ ID NO: 105792 - RNA, 1701 nt, Artificial Sequence
  derived and/or modified CDS sequence (opt2) from hemagglutinin__InfluenzaA__AFY24097
augaaggccauccucgucguccuccucuacaccuucgccaccgccaacgccgacacccucugcaucggcuaccacgccgacaacuccaccgacaccgucgacaccguccucgagaagaacgucaccgucacccacuccgucgaccuccucgaggacaagcacaacggcaagcucugcaagcuccgcggcgucgccccccuccaccucggcaagugcaacaucgccggcuggauccucggcaaccccgagugcgagucccucuccaccgccuccuccugguccuacaucgucgagaccuccuccuccgacaacggcaccugcuaccccggcgacuucaucgacuacgaggagcuccgcgagcagcucuccuccgucuccuccuucgagcgcuucgagaucuuccccaagaccuccuccuggcccaaccacgacuccaacaagggcgucaccgccgccugcccccacgccggcgccaaguccuucuacaagaaccucaucuggcucgucaagaagggcaacuccuaccccaagcucaacaaguccuacaucaacgacaagggcaaggagguccucguccucuggggcauccaccaccccuccaccuccaccgaccagcagucccucuaccagaacgccgacgccuacgucuucgucggcaccucccgcuacuccaagaaguucaagcccgagaucgccauccgccccaagguccgcgaccaggagggccgcaugaacuacuacuggacccucgucgagcccggcgacaagaucaccuucgaggccaccggcaaccucgucgucccccgcuacgccuucgccauggagcgcaacgccggcuccggcaucaucaucuccgacacccccguccacgacugcaacaccaccugccagacccccaagggcgccaucaacaccucccuccccuuccagaacauccaccccaucaccaucggcaagugccccaaguacgucaaguccaccaagcuccgccucgccaccggccuccgcaacguccccuccauccagucccgcggccucuucggcgccaucgccggcuucaucgagggcggcuggaccggcauggucgacggcugguacggcuaccaccaccagaacgagcagggcuccggcuacgccgccgaccucaaguccacccagaacgccaucgacgagaucaccaacaaggucaacuccgucaucgagaagaugaacacccaguucaccgccgucggcaaggaguucaaccaccucgagaagcgcaucgagaaccucaacaagaaggucgacgacggcuuccucgacaucuggaccuacaacgccgagcuccucguccuccucgagaacgagcgcacccucgacuaccacgacuccaacgucaagaaccucuacgagaagguccgcucccagcucaagaacaacgccaaggagaucggcaacggcugcuucgaguucuaccacaagugcgacaacaccugcauggaguccgucaagaacggcaccuacgacuaccccaaguacuccgaggaggccaagcucaaccgcgaggagaucgacggcgucaagcucgaguccacccgcaucuaccagauccucgccaucuacuccaccgucgccuccucccucguccucgucgucucccucggcgccaucuccuucuggaugugcuccaacggcucccuccagugccgcaucugcaucuga

SEQ ID NO: 105793 - RNA, 1701 nt, Artificial Sequence; identical to SEQ ID NO: 96666
  derived and/or modified CDS sequence (opt2) from hemagglutinin__InfluenzaA__AFY24162

SEQ ID NO: 105794 - RNA, 1701 nt, Artificial Sequence
  derived and/or modified CDS sequence (opt2) from hemagglutinin__InfluenzaA__AFY24195
augaagaccaucaucgcccucuccuacauccucugccucgucuucgcccagaagcuccccggcaacgacaacuccaccgccacccucugccucggccaccacgccguccccaacggcaccaucgucaagaccaucaccaacgaccagaucgaggucaccaacgccaccgagcucguccaguccuccuccaccggcggcaucugcgacuccccccaccagauccucgacggcgagaacugcacccucaucgacgcccuccucggcgacccccagugcgacggcuuccagaacaagaagugggaccucuucgucgagcgcuccaaggccuacuccaacugcuaccccuacgacguccccgacuacgccucccuccgcucccucgucgccuccuccggcacccucgaguucaacaacgaguccuucaacuggaccggcgucacccagaacggcaccuccuccgccugcaagcgccgcuccaacaacuccuucuucucccgccucaacuggcucacccaccucaaguucaaguaccccgcccucaacgucaccaugcccaacaacgagaaguucgacaagcucuacaucuggggcguccaccaccccggcaccgacaacgaccagaucuuccucuacgcccaggccuccggccgcaucaccgucuccaccaagcgcucccagcagaccgucauccccaacaucggcucccgcccccgcauccgcaacauccccucccgcaucuccaucuacuggaccaucgucaagcccggcgacauccuccucaucaacuccaccggcaaccucaucgccccccgcggcuacuucaagauccgcuccggcaaguccuccaucaugcgcuccgacgcccccaucggcaagugcaacuccgagugcaucacccccaacggcuccauccccaacgacaagcccuuccagaacgucaaccgcaucaccuacggcgccugcccccgcuacgucaagcagaacacccucaagcucgccaccggcaugcgcaacguccccgagaagcagacccgcggcaucuucggcgccaucgccggcuucaucgagaacggcugggagggcauggucgacggcugguacggcuuccgccaccagaacuccgagggcaucggccaggccgccgaccucaaguccacccaggccgccaucaaccagaucaacggcaagcucaaccgccucaucggcaagaccaacgagaaguuccaccagaucgagaaggaguucuccgaggucgagggccgcauccaggaccucgagaaguacgucgaggacaccaagaucgaccucugguccuacaacgccgagcuccucgucgcccucgagaaccagcacaccaucgaccucaccgacuccgagaugaacaagcucuucgagcgcaccaagaagcagcuccgcgagaacgccgaggacaugggcaacggcugcuucaagaucuaccacaagugcgacaacgccugcaucggcuccauccgcaacggcaccuacgaccacgacgucuaccgcgacgaggcccucaacaaccgcuuccagaucaagggcgucgagcucaaguccggcuacaaggacuggauccucuggaucuccuucgccaucuccugcuuccuccucugcgucgcccuccucggcuucaucaugugggccugccagaagggcaacauccgcugcaacaucugcaucuga

SEQ ID NO: 105795 - RNA, 1701 nt, Artificial Sequence; identical to SEQ ID NO: 96221
  derived and/or modified CDS sequence (opt2) from hemagglutinin__InfluenzaA__AFY24217

SEQ ID NO: 105796 - RNA, 1701 nt, Artificial Sequence
  derived and/or modified CDS sequence (opt2) from hemagglutinin__InfluenzaA__AGB08294
augaaggccauccucgucguccuccucuacaccuucgccaccgccaacgccgacacccucugcaucggcuaccacgccaacaacuccaccgacaccgucgacaccguccucgagaagaacgucaccgucacccacuccgucaaccuccucgaggacaagcacaacggcaagcucugcaagcuccgcggcgucgccccccuccaccucggcaagugcaacaucgccggcuggauccucggcaaccccgagugcgagucccucuccaccgccuccuccugguccuacaucgucgagaccuccuccuccgacaacggcaccugcuaccccggcgacuucaucaacuacgaggagcuccgcgagcagcucuccuccgucuccuccuucgagcgcuucgagaucuuccccaagaccuccuccuggcccaaccacgacuccaacaagggcgucaccgccgccugcccccaggccggcgccaaguccuucuacaagaaccucaucuggcucgucaagaagggcaacuccuaccccaagcucaucaaguccuacaucaacgacaagggcaaggagguccucguccucuggggcauccaccaccccuccaccuccgccgaccagcagucccucuaccagaacgccgacgccuacgucuucgucggcaccuccaaguacuccaagaaguucaagcccgagaucgccguccgccccaagguccgcgaccaggagggccgcaugaacuacuacuggacccucgucgagcccggcgacaagaucaccuucgaggccaccggcaaccuccucgucccccgcuacgccuucgucauggagcgcaacgccggcuccggcaucaucaucuccgacacccccguccacgacugcaacaccaccugccagacccccaagggcgccaucaacaccucccuccccuuccagaacauccaccccaucaccaucggcaagugccccaaguacgucaaguccaccaagcuccgccucgccaccggccuccgcaacauccccuccauccagucccgcggccucuucggcgccaucgccggcuucaucgagggcggcuggaccggcauggucgacggcugguacggcuaccaccaccagaacgcccagggcuccggcuacgccgccgaccucaaguccacccagaacgccaucgacaagaucaccaacaaggucaacuccgucaucgagaagaugaacacccaguucaccgccgucggcaaggaguucaaccaccucgagaagcgcaucgagaaccucaacaagaaggucgacgacggcuuccucgacaucuggaccuacaacgccgagcuccucguccuccucgagaacgagcgcacccucgacuaccacgacuccaacgucaagaaccucuacgagaagguccgcucccagcucaagaacaacgccaaggagaucggcaacggcugcuucgaguucuaccacaagugcgacaacaccugcauggaguccgucaagaacggcaccuacgacuacccccgcuacuccgaggaggccaagcucaaccgcgaggagaucgacggcgucaagcucgaguccacccgcaucuaccagauccucgccaucuacuccaccgucgccuccucccucguccucgucgucucccucggcgccaucuccuucuggaugugcuccaacggcucccuccagugccgcaucugcaucuga

SEQ ID NO: 105797 - RNA, 1701 nt, Artificial Sequence
  derived and/or modified CDS sequence (opt2) from hemagglutinin__InfluenzaA__AGB08295
augaaggccauccucgucguccuccucuacaccuucgccaccgccaacgccgacacccucugcaucggcuaccacgccaacaacuccaccgacaccgucgacaccgucaucgagaagaacgucaccgucacccacuccgucaaccuccucgaggacaagcacaacggcaagcucugcaagcuccgcggcgucgccccccuccaccucggcaagugcaacaucgccggcuggauccucggcaaccccgagugcgagucccucuccaccgccuccuccugguccuacaucgucgagaccuccuccuccgacaacggcaccugcuaccccggcgacuucaucaacuacgaggagcuccgcgagcagcucuccuccgucuccuccuucgagcgcuucgagaucuuccccaagaccuccuccuggcccaaccacgacuccaacaagggcgucaccgccgccugcccccacgccggcgccaaguccuucuacaagaaccucaucuggcucgucaagaagggcaacuccuaccccaagcucuccaaguccuacaucaacgacaagcgcaaggagguccucguccucuggggcauccaccaccccuccaccaccgccgaccagcagucccucuaccagaacgccgacgccuacgucuucgucggcaccucccgcuacuccaagaaguucaagcccgagaucgccauccgccccaagguccgcgaccaggagggccgcaugaacuacuacuggacccucgucgagcccggcgacaagaucaccuucgaggccaccggcaaccucgucgucccccgcuacgccuucgccauggagcgcaccgccggcuccggcaucaucaucuccgacacccccguccacgacugcaacaccaccugccagacccccaagggcgccaucaacaccucccuccccuuccagaacauccaccccaucaccaucggcaagugccccaaguacgucaaguccaccaagcuccgccucgccaccggccuccgcaacauccccuccauccagucccgcggccucuucggcgccaucgccggcuucaucgagggcggcuggaccggcauggucgacggcugguacggcuaccaccaccagaacgagcagggcuccggcuacgccgccgaccucaaguccacccagaacgccaucgacaagaucaccaacaaggucaacuccgucaucgagaagaugaacacccaguucaccgccgucggcaaggaguucaaccaccucgagaagcgcaucgagaaccucaacaagaaggucgacgacggcuuccucgacaucuggaccuacaacgccgagcuccucguccuccucgagaacgagcgcacccucgacuaccacgacuccaacgucaagaaccucuacgagaagguccgcaaccagcucaagaacaacgccaaggagaucggcaacggcugcuucgaguucuaccacaagugcgacaacaccugcauggaguccgucaagaacggcaccuacgacuaccccaaguacuccgaggaggccaagcucaaccgcgaggagaucgacggcgucaagcucgaguccacccgcaucuaccagauccucgccaucuacuccaccgucgccuccucccucguccucgucgucucccucggcgccaucuccuucuggaugugcuccaacggcucccuccagugccgcaucugcaucuga

SEQ ID NO: 105798 - RNA, 1701 nt, Artificial Sequence
  derived and/or modified CDS sequence (opt2) from hemagglutinin__InfluenzaA__AGB08296
augaaggccauccucgucguccuccucuacaccuucgccaccgccaacgccgacacccucugcaucggcuaccacgccaacaacuccaccgacaccgucgacaccguccucgagaagaacgucaccgucacccacuccgucaaccuccucgaggacaagcacaacggcaagcucugcaagcuccgcggcgucgccccccuccaccucggcaagugcaacaucgccggcuggauccucggcaaccccgagugcgagucccucuccaccgccuccuccugguccuacaucgucgagaccuccuccuccgacaacggcaccugcuaccccggcgacuucaucaacuacgaggagcuccgcgagcagcucuccuccgucuccuccuucgagcgcuucgagaucuuccccaagaccuccuccuggcccaaccacgacuccaacaagggcgucaccgccgccugcccccacgccggcgccaaguccuucuacaagaaccucaucuggcucgucaagaagggcaacuccuaccccaagcucuccaaguccuacaucaacgacaagggcaaggagguccucguccucuggggcauccaccaccccuccaccaccgccgaccagcagucccucuaccagaacgccgacgccuacgucuucgucggcaccucccgcuacuccaagaaguucaagcccgagaucgccauccgccccaagguccgcggccaggagggccgcaugaacuacuacuggacccucgucgagcccggcgacaagaucaccuucgaggccaccggcaaccucgucgucccccgcuacgccuucgccauggagcgcaccgccggcuccggcaucaucaucuccgacacccccguccacgacugcaacaccaccugccagacccccaagggcgccaucaacaccucccuccccuuccagaacauccaccccaucaccaucggcaagugccccaaguacgucaaguccaccaagcuccgccucgccaccggccuccgcaacguccccuccauccagucccgcggccucuucggcgccaucgccggcuucaucgagggcggcuggaccggcauggucgacggcugguacggcuaccaccaccagaacgagcagggcuccggcuacgccgccgaccucaaguccacccagaacgccaucgacaagaucaccaacaaggucaacuccgucaucgagaagaugaacacccaguucaccgccgucggcaaggaguucaaccaccucgagaagcgcaucgagaaccucaacaagaaggucgacgacggcuuccucgacaucuggaccuacaacgccgagcuccucguccuccucgagaacgagcgcacccucgacuaccacgacuccaacgucaagaaccucuacgagaagguccgcaaccagcucaagaacaacgccaaggagaucggcaacggcugcuucgaguucuaccacaagugcgacaacaccugcauggaguccgucaagaacggcaccuacgacuaccccaaguacuccgaggaggccaagcucaaccgcgaggagaucgacggcgucaagcucgaguccacccgcaucuaccagauccucgccaucuacuccaccgucgccuccucccucguccucgucgucucccucggcgccaucuccuucuggaugugcuccaacggcucccuccagugccgcaucugcaucuga

SEQ ID NO: 105799 - RNA, 1701 nt, Artificial Sequence
  derived and/or modified CDS sequence (opt2) from hemagglutinin__InfluenzaA__AGB08297
augaaggccauccucgucguccuccucuacaccuucgccaccgccaacgccgacacccucugcaucggcuaccacgccaacaacuccaccgacaccgucgacaccguccucgagaagaacgucaccgucacccacuccgucaaccuccucgaggacaagcacaacggcaagcucugcaagcuccgcggcgucgccccccuccaccucggcaagugcaacaucgccggcuggauccucggcaaccccgagugcgagucccucuccaccgccuccuccugguccuacaucgucgagaccuccuccuccgacaacggcaccugcuaccccggcgacuucaucaacuacgaggagcuccgcgagcagcucuccuccgucuccuccuucgagcgcuucgagaucuuccccaagaccuccuccuggcccaaccacgacuccaacaagggcgucaccgccgccugcccccacgccggcgccaaguccuucuacaagaaccucaucuggcucgucaagaagggcaacuccuaccccaagcucuccgaguccuacaucaacgacaagggcaaggagguccucguccucuggggcauccaccaccccuccaccaccgccgaccagcagucccucuaccagaacgccgacgccuacgucuucgucggcaccucccgcuacuccaagaaguucaagcccgagaucgccauccgccccaagguccgcgaccaggagggccgcaugaacuacuacuggacccucgucgagcccggcgacaagaucaccuucgaggccaccggcaaccucgucgucccccgcuacgccuucgccauggagcgcaccgccggcuccggcaucaucaucuccgacacccccguccacgacugcaacaccaccugccagacccccaagggcgccaucaacaccucccuccccuuccagaacauccaccccaucaccaucggcaagugccccaaguacgucaaguccaccaagcuccgccucgccaccggccuccgcaacguccccuccauccagucccgcggccucuucggcgccaucgccggcuucaucgagggcggcuggaccggcauggucgacggcugguacggcuaccaccaccagaacgagcagggcuccggcuacgccgccgaccucaaguccacccagaacgccaucgacaagaucaccaacaaggucaacuccgucaucgagaagaugaacacccaguucaccgccgucggcaaggaguucaaccaccucgagaagcgcaucgagaaccucaacaagaaggucgacgacggcuuccucgacaucuggaccuacaacgccgagcuccucguccuccucgagaacgagcgcacccucgacuaccacgacuccaacgucaagaaccucuacgagaagguccgcaaccagcucaagaacaacgccaaggagaucggcaacggcugcuucgaguucuaccacaagugcgacaacaccugcauggaguccgucaagaacggcaccuacgacuaccccaaguacuccgaggaggccaagcucaaccgcgaggagaucgacggcgucaagcucgaguccacccgcaucuaccagauccucgccaucuacuccaccgucgccuccucccucguccucgucgucucccucggcgccaucuccuucuggaugugcuccaacggcucccuccagugccgcaucugcaucuga

SEQ ID NO: 105800 - RNA, 1701 nt, Artificial Sequence
  derived and/or modified CDS sequence (opt2) from hemagglutinin__InfluenzaA__AGB08298
augaaggccauccucgucguccuccucuacaccuucgccaccgccaacgccgacacccucugcaucggcuaccacgccaacaacuccaccgacaccgucgacaccguccucgagaagaacgucaccgucacccacuccgucaaccuccucgaggacaagcacaacggcaagcucugcaagcuccgcggcaucgccccccuccaccucggcaagugcaacaucgccggcuggauccucggcaaccccgagugcgagucccucuccaccgccuccuccugguccuacaucgucgagaccuccuccuccgacaacggcaccugcuaccccggcgacuucaucaacuacgaggagcuccgcgagcagcucuccuccgucuccuccuucgagcgcuucgagaucuuccccaagaccuccuccuggcccaaccacgacuccaacaagggcgucaccgccgccugcccccacgccggcgccaaguccuucuacaagaaccucaucuggcucgucaagaagggcaacuccuacccccgccucuccaaguccuacaucaacgacaagggcaaggagguccucguccucuggggcauccaccaccccuccaccaccgccgaccagcagucccucuaccagaacgccgacgccuacgucuucgucggcaccucccgcuacuccaagaaguucaagcccgagaucgccauccgccccaagguccgcgaccaggagggccgcaugaacuacuacuggacccucgucgagcccggcgacaagaucaccuucgaggccaccggcaaccucgucgucccccgcuacgccuucgccauggagcgcaccgccggcuccggcaucaucaucuccgacacccccguccacgacugcaacaccaccugccagacccccaagggcgccaucaacaccucccuccccuuccagaacauccaccccaucaccaucggcaagugccccaaguacgucaaguccaccaagcuccgccucgccaccggccuccgcaacguccccuccauccagucccgcggccucuucggcgccaucgccggcuucaucgagggcggcuggaccggcauggucgacggcugguacggcuaccaccaccagaacgagcagggcuccggcuacgccgccgaccucaaguccacccagaacgccaucgacaagaucaccaacaaggucaacuccgucaucgagaagaugaacacccaguucaccgccgucggcaaggaguucaaccagcucgagaagcgcaucgagaaccucaacaagaaggucgacgacggcuuccucgacaucuggaccuacaacgccgagcuccucguccuccucgagaacgagcgcacccucgacuaccacgacuccaacgucaagaaccucuacgagaagguccgcaaccagcucaagaacaacgccaaggagaucggcaacggcugcuucgaguucuaccacaagugcgacaacaccugcauggaguccgucaagaacggcaccuacgacuaccccaaguacuccgaggaggccaagcucaaccgcgaggagaucgacggcgucaagcucgaguccacccgcaucuaccagauccucgccaucuacuccaccgucgccuccucccucguccucgucgucucccucggcgccaucuccuucuggaugugcuccaacggcucccuccagugccgcaucugcaucuga

SEQ ID NO: 105801 - RNA, 1701 nt, Artificial Sequence
  derived and/or modified CDS sequence (opt2) from hemagglutinin__InfluenzaA__AGB08301
augaagaccaucaucgcccucuccuacauccucugccucgucuucgcccaggagcuccccggcaacgacgacuccaccgccacccucugccucggccaccacgccguccccaacggcaccaucgucaagaccaucaccaacgaccagaucgaggucaccaacgccaccgagcucguccaguccuccuccaccggcgagaucugcaacuccccccaccagauccucgacggcgagaacugcacccucaucgacgcccuccucggcgacccccagugcgacggcuuccagaacaagaagugggaccucuucgucgagcgcuccaaggcccacuccaacugcuaccccuacgacguccccgacuacgccucccuccgcucccucgucgccuccuccggcacccucgaguucaacaacgaguccuucaacuggaccggcgucacccagaacggcaccuccuccgccugcauccgccgcuccaacaacuccuucuucucccgccucaacuggcucacccaccucaacuucaaguaccccgcccucaacgucaccaugcccaacaacgagcaguucgacaagcucuacaucuggggcguccaccaccccggcaccgacaaggaccagaucuuccucuacgcccaggccuccggccgcaucaccgucuccaccaagcgcucccagcaggccgucauccccaacaucggcucccgcccccgcguccgcaacauccccucccgcgucuccaucuacuggaccgucgucaagcccggcgacauccuccucaucaacuccaccggcaaccucaucgccccccgcggcuacuucaagauccgcuccggcaaguccuccaucaugcgcuccgacgcccccaucggcaagugcaacuccgccugcaucacccccaacggcuccauccccaacgacaagcccuuccagaacgucaaccgcaucaccuacggcgccugcccccgcuacgucaagcagaacacccucaagcucgccaccggcaugcgcaacguccccgagaagcagacccgcggcaucuucggcgccaucgccggcuucaucgagaacggcugggagggcauggucgacggcugguacggcuuccgccaccagaacuccgagggccgcggccaggccgccgaccucaaguccacccaggccgccaucgaccagaucaacggcaagcucaaccgccucaucggcaagaccaacgagaaguuccaccagaucgagaaggaguucuccgaggucgagggccgcauccaggaccucgagaaguacgucgaggacaccaagaucgaccucugguccuacaacgccgagcuccucgucgcccucgagaaccagcacaccaucgaccucaccgacuccgagaugaacaagcucuucgagaagaccaagaagcagcuccgcgagaacgccgaggacaugggcaacggcugcuucaagaucuaccacaagugcgacaacgccugcaucggcuccauccgcaacggcaccuacgaccacaacgucuaccgcgacgaggcccucaacaaccgcuuccagaucaagggcgucgagcucaaguccggcuacaaggacuggauccucuggaucuccuucgccaucuccugcuuccuccucugcgucgcccuccucggcuucaucaugugggccugccagaagggcaacauccgcugcaacaucugcaucuga

SEQ ID NO: 105802 - RNA, 1701 nt, Artificial Sequence
  derived and/or modified CDS sequence (opt2) from hemagglutinin__InfluenzaA__AGB08343
augaagaccaucaucgcccucuccuacaucuucugccucguccucgcccaggaccuccccggcaacgacaacuccaccgccacccucugccucggccaccacgccguccccaacggcacccucgucaagaccaucaccaacgaccagaucgaggucaccaacgccaccgagcucguccaguccuccuccaccggccgcaucugcaacaacccccaccgcauccucgacggcaucaacugcacccucaucgacgcccuccucggcgacccccacugcgacggcuuccagaacaagaagugggaccucuucgucgagcgcuccaaggccuucuccaacugcuaccccuacgacguccccgacuacgccucccuccgcucccucgucgccuccuccggcacccucgaguucaucaacgagggcuucaacuggaccggcgucacccagaacggcggcuccuacgccugcaagcgcggccccgacaacggcuucuucucccgccucaacuggcucuacaaguccgaguccaccuaccccguccucaacgucaccaugcccaacaacgacaacuucgacaagcucuacaucuggggcguccaccaccccuccaccgacaaggagcagaccaaccucuacguccaggccuccggccgcgucaccgucuccaccaagcgcucccagcagaccaucauccccaacgucggcucccgccccuggguccgcggccucuccucccgcaucuccaucuacuggaccaucgucaagcccggcgacauccucgucaucaacuccaacggcaaccucaucgccccccgcggcuacuucaagauccgcaacggcaaguccuccaucaugcgcuccgacgcccccaucggcaccugcuccuccgagugcaucacccccaacggcuccauccccaacgacaagcccuuccagaacgucaacaagaucaccuacggcgccugccccaaguacgucaagcagaacacccucaagcucgccaccggcaugcgcaacguccccgagaagcagacccgcggcaucuucggcgccaucgccggcuucaucgagaacggcugggagggcaugaucgacggcugguacggcuuccgccaccagaacuccgagggcaccggccaggccgccgaccucaaguccacccaggccgccaucgaccagaucaacggcaagcucaaccgcgucaucgagaagaccaacgagaaguuccaccagaucgagaaggaguucuccgaggucgagggccgcauccaggaccucgagaaguacgucgaggacaccaagaucgaccucugguccuacaacgccgagcuccucgucgcccucgagaaccagcacaccaucgaccucaccgacuccgagaugaacaagcucuucgagaagacccgccgccagcuccgcgagaacgccgaggacaugggcaacggcugcuucaagaucuaccacaagugcgacaacgccugcaucggcuccauccgcaacggcaccuacgaccacgacgucuaccgcgacgaggcccucaacaaccgcuuccagaucaagggcgucgagcucaaguccggcuacaaggacuggauccucuggaucuccuucgccaucuccugcuuccuccucugcgucguccuccucggcuucaucaugugggccugccagaagggcaacauccgcugcaacaucugcaucuga

SEQ ID NO: 105803 - RNA, 1701 nt, Artificial Sequence
  derived and/or modified CDS sequence (opt2) from hemagglutinin__InfluenzaA__AGB08362
augaagaccaucaucgcccucuccuacaucuucugccucgcccucggccaggaccuccccggcaacgacaacuccaccgccacccucugccucggccaccacgccguccccaacggcacccucgucaagaccaucaccgacgaccagaucgaggucaccaacgccaccgagcucguccaguccuccuccaccggcaagaucugcaacaacccccaccgcauccucgacggcaucaacugcacccucaucgacgcccuccucggcgacccccacugcgacgucuuccaggacgagaccugggaccucuucgucgagcgcuccaaggccuucuccaacugcuaccccuacgacguccccgacuacgccucccuccgcucccucgucgccuccuccggcacccucgaguucaucaccgagggcuucaccuggaccggcgucacccagaacggcggcuccaacgccugcaagcgcggccccggcuccggcuucuucucccgccucaacuggcucaccaaguccggcuccaccuaccccguccucaacgucaccaugcccaacaacgacaacuucgacaagcucuacaucuggggcguccaccaccccuccaccaaccaggagcagaccucccucuacguccaggccuccggccgcgucaccgucuccacccgccgcucccagcagaccaucauccccaacaucggcucccgccccuggguccgcggccucuccucccgcaucuccaucuacuggaccaucgucaagcccggcgacguccucgucaucaacuccaacggcaaccucaucgccccccgcggcuacuucaagaugcgcaccggcaaguccuccaucaugcgcuccgacgcccccaucgacaccugcaucuccgagugcaucacccccaacggcuccauccccaacgacaagcccuuccagaacgucaacaagaucaccuacggcgccugccccaaguacgucaagcagaacacccucaagcucgccaccggcaugcgcaacguccccgagaagcagacccgcggccucuucggcgccaucgccggcuucaucgagaacggcugggagggcaugaucgacggcugguacggcuuccgccaccagaacuccgagggcaccggccaggccgccgaccucaaguccacccaggccgccaucgaccagaucaacggcaagcucaaccgcgucaucgagaagaccaacgagaaguuccaccagaucgagaaggaguucuccgaggucgagggccgcauccaggaccucgagaaguacgucgaggacaccaagaucgaccucugguccuacaacgccgagcuccucgucgcccucgagaaccagcacaccaucgaccucaccgacuccgagaugaacaagcucuucgacaagacccgccgccagcuccgcgagaacgccgaggacaugggcaacggcugcuucaagaucuaccacaagugcgacaacgccugcaucgaguccauccgcaacggcaccuacgaccacgacgucuaccgcgacgaggcccucaacaaccgcuuccagaucaagggcgucgagcucaaguccggcuacaaggacuggauccucuggaucuccuucgccaucuccugcuuccuccucugcgucguccuccucggcuucaucaugugggccugccagcgcggcaacauccgcugcaacaucugcaucuga

SEQ ID NO: 105804 - RNA, 1701 nt, Artificial Sequence; identical to SEQ ID NO: 102858
  derived and/or modified CDS sequence (opt2) from hemagglutinin__InfluenzaA__AGB12986

SEQ ID NO: 105805 - RNA, 1701 nt, Artificial Sequence; identical to SEQ ID NO: 103122
  derived and/or modified CDS sequence (opt2) from hemagglutinin__InfluenzaA__AGB13006

SEQ ID NO: 105806 - RNA, 1701 nt, Artificial Sequence
  derived and/or modified CDS sequence (opt2) from hemagglutinin__InfluenzaA__AGB13016
augaaggccauccucgucguccuccucuacaccaucgccaccgccaacgccgacacccucugcaucggcuaccacgccaacaacuccaccgacaccgucgacaccguccucgagaagaacgucaccgucacccacuccgucaaccuccucgaggacaagcacaacggcaagcucugcaagcuccgcggcgucgccccccuccaccucggcaagugcaacaucgccggcuggauccucggcaaccccgagugcgagucccucuccaccgccuccuccugguccuacaucgucgagaccuccuccuccgacaacggcaccugcuaccccggcgacuucaucaacuacgaggagcuccgcgagcagcucuccuccgucuccuccuucgagcgcuucgagaucuuccccaagaccuccuccuggcccaaccacgacuccaacaagggcgucaccgccgccugcccccacgccggcgccaaguccuucuacaagaaccucaucuggcucgucaagaagggcaacuccuaccccaagcucuccaaguccuacaucaacgacaagggcaaggagguccucguccucuggggcauccaccaccccuccaccaccgccgaccagcagucccucuaccagaacgccgacgccuacgucuucgucggcaccucccgcuacuccaagaaguucaagcccgagaucgccauccgccccaagguccgcgaccaggagggccgcaugaacuacuacuggacccucgucgagcccggcgacaagaucaccuucgaggccaucggcaaccucgucgucccccgcuacgccuucgccauggagaagaacgccggcuccggcaucaucaucuccgacacccccguccacgacugcaacaccaccugccagacccccaagggcgccaucaacaccucccuccccuuccagaacauccaccccaucaccaucggcaagugccccaaguacgucaaguccaccaagcuccgccucgccaccggccuccgcaacguccccuccauccagucccgcggccucuucggcgccaucgccggcuucaucgagggcggcuggaccggcauggucgacggcugguacggcuaccaccaccagaacgagcagggcuccggcuacgccgccgaccucaaguccacccagaacgccaucgacaagaucaccaacaaggucaacuccgucaucgagaagaugaacacccaguucaccgccgucggcaaggaguucaaccaccucgagaagcgcaucgagaaccucaacaagaaggucgacgacggcuuccucgacaucuggaccuacaacgccgagcuccucguccuccucgagaacgagcgcacccucgacuaccacgacuccaacgucaagaaccucuacgagaagguccgcaaccagcucaagaacaacgccaaggagaucggcaacggcugcuucgaguucuaccacaagugcgacaacaccugcauggaguccgucaagaacggcaccuacgacuaccccaaguacuccgaggaggccaagcucaaccgcgaggagaucgacggcgucaagcucgaguccgcccgcgucuaccagauccucgccaucuacuccaccgucgccuccucccucguccucgucgucucccucggcgccaucuccuucuggaugugcuccaacggcucccuccagugccgcaucugcaucuga

SEQ ID NO: 105807 - RNA, 1701 nt, Artificial Sequence; identical to SEQ ID NO: 102903
  derived and/or modified CDS sequence (opt2) from hemagglutinin__InfluenzaA__AGB13026

SEQ ID NO: 105808 - RNA, 1701 nt, Artificial Sequence; identical to SEQ ID NO: 102845
  derived and/or modified CDS sequence (opt2) from hemagglutinin__InfluenzaA__AGB13036

SEQ ID NO: 105809 - RNA, 1701 nt, Artificial Sequence
  derived and/or modified CDS sequence (opt2) from hemagglutinin__InfluenzaA__AGB13048
augaaggccauccucgucguccuccucuacaccuucgccaccgccaacgccgacacccucugcaucggcuaccacgccaacaacuccaccgacaccgucgacaccguccucgagaagaacgucaccgucacccacuccgucaaccuccucgaggacaagcacaacggcaagcucugcaagcuccgcggcgucgccccccuccaccucggcaagugcaacaucgccggcuggauccucggcaaccccgagugcgagucccucuccaccgccuccuccugguccuacaucgucgagaccuccuccuccgacaacggcaccugcuaccccggcgacuucaucaacuacgaggagcuccgcgagcagcucuccuccgucuccuccuucgagcgcuucgagaucuuccccaagaccuccuccuggcccaaccacgacuccaacaagggcgucaccgccgccugcccccacgccggcgccaaguccuucuacaagaaccucaucuggcucgucaagaagggcaacuccuaccccaagcucuccaaguccuacaucaacgacaagggcaaggagguccucguccucuggggcauccaccaccccuccaccaccgccgaccagcagucccucuaccagaacgccgacgccuacgucuucgucggcaccucccgcuacuccaagaaguucaagcccgagaucgccauccgccccaagguccgcgaccaggagggccgcaugaacuacuacuggacccucgucgagcccggcgacaagaucaccuucgaggccaccggcaaccucgucgucccccgcuacgccuucgccauggagcgcaacgccggcuccggcaucaucaucuccgacacccccguccacgacugcaacaccaccugccagacccccaagggcgccaucaacaccucccuccccuuccagaacauccaccccaucaccaucggcaagugccccaaguacgucaaguccaccaagcuccgccucgccaccggccuccgcaacguccccuccauccagucccgcggccucuucggcgccaucgccggcuucaucgagggcggcuggaccggcauggucgacggcugguacggcuaccaccaccagaacgagcagggcuccggcuacgccgccgaccucaaguccacccagaacgccaucgacaagaucaccaacaaggucaacuccgucaucgagaagaugaacacccaguucaccgccgucggcaaggaguucaaccaccucgagaagcgcaucgagaaccucaacaagaaggucgacgacggcuuccucgacaucuggaccuacaacgccgagcuccucguccuccucgagaacgagcgcacccucgacuaccacgacuccaacgucaagaaccucuacgagaagguccgcaaccagcucaagaacaacgccaaggagaucggcaacggcugcuucgaguucuaccacaagugcgacaacaccugcaucgaguccgucaagaacggcaccuacgacuaccccaaguacuccgaggaggccaagcucaaccgcgaggagaucgacggcgucaagcucgaguccacccgcaucuaccagauccucgccaucuacuccaccgucgccuccucccucguccucgucgucucccucggcgccaucuccuucuggaugugcuccaacggcucccuccagugccgcaucugcaucuga

SEQ ID NO: 105810 - RNA, 1701 nt, Artificial Sequence
  derived and/or modified CDS sequence (opt2) from hemagglutinin__InfluenzaA__AGB13066
augaaggccauccucgucguccuccucuacaccuucgccaccgccaacgccgacacccucugcaucggcuaccacgccaacaacuccaccgacaccgucgacaccguccucgagaagaacgucaccgucacccacuccgucaaccuccucgaggacaagcacaacggcaagcucugcaagcuccgcggcgucgccccccuccaccucggcaagugcaacaucgccggcuggauccucggcaaccccgagugcgagucccucuccaccgccuccuccugguccuacaucgucgagaccuccuccuccgacaacggcaccugcuaccccggcgacuucaucgacuacgaggagcuccgcgagcagcucuccuccgucuccuccuucgagcgcuucgagaucuuccccaagaccuccuccuggcccaaccacgacuccaacaagggcgucaccgccgccugcccccacgccggcgccaaguccuucuacaagaaccucaucuggcucgucaagaagggcaacuccuaccccaagcucuccaaguccuacaucaacgacaagggcaaggagguccucguccucuggggcauccaccaccccuccaccuccgccgaccagcagucccucuaccagaacgccgacgccuacgucuucgucggcaccucccgcuacuccaagaaguucaagcccgagaucgccauccgccccaagguccgcgaccaggagggccgcaugaacuacuacuggacccucgucgagcccggcgacaagaucaccuucgaggccaccggcaaccucgucgucccccgcuacgccuucgccauggagcgcaacgccggcuccggcaucaucaucuccgacacccccguccacgacugcaacaccaccugccagacccccaagggcgccaucaacaccucccuccccuuccagaacauccaccccaucaccaucggcaagugccccaaguacgucaagggcaccaagcuccgccucgccaccggccuccgcaacguccccuccauccagucccgcggccucuucggcgccaucgccggcuucaucgagggcggcuggaccggcauggucgacggcugguacggcuaccaccaccagaacgagcagggcuccggcuacgccgccgaccucaaguccacccagcacgccaucgacgagaucaccaacaaggucaacuccgucaucgagaagaugaacacccaguucaccgccgucggcaaggaguucaaccaccucgagaagcgcaucgagaaccucaacaagaaggucgacgacggcuuccucgacaucuggaccuacaacgccgagcuccucguccuccucgagaacgagcgcacccucgacuaccacgacuccaacgucaagaaccucuacgagaagguccgcucccagcucaagaacaacgccaaggagaucggcaacggcugcuucgaguucuaccacaagugcgacaacaccugcauggaguccgucaagaacggcaccuacgacuaccccaaguacuccgaggaggccaagcucaaccgcgaggagaucgacggcgucaagcucgaguccacccgcaucuaccagauccucgccaucuacuccaccgucgccuccucccucguccucgucgucucccucggcgccaucuccuucuggaugugcuccaacggcucccuccagugccgcaucugcaucuga

SEQ ID NO: 105811 - RNA, 1701 nt, Artificial Sequence; identical to SEQ ID NO: 102945
  derived and/or modified CDS sequence (opt2) from hemagglutinin__InfluenzaA__AGB13082

SEQ ID NO: 105812 - RNA, 1701 nt, Artificial Sequence; identical to SEQ ID NO: 102845
  derived and/or modified CDS sequence (opt2) from hemagglutinin__InfluenzaA__AGB13105

SEQ ID NO: 105813 - RNA, 1701 nt, Artificial Sequence; identical to SEQ ID NO: 102903
  derived and/or modified CDS sequence (opt2) from hemagglutinin__InfluenzaA__AGB13125

SEQ ID NO: 105814 - RNA, 1701 nt, Artificial Sequence; identical to SEQ ID NO: 102903
  derived and/or modified CDS sequence (opt2) from hemagglutinin__InfluenzaA__AGB13130

SEQ ID NO: 105815 - RNA, 1701 nt, Artificial Sequence
  derived and/or modified CDS sequence (opt2) from hemagglutinin__InfluenzaA__AGB13140
augaaggccauccucgucguccuccucuacaccuucgccaccgccaacgccgacacccucugcaucggcuaccacgccaacaacuccaccgacaccgucgacaccguccucgagaagaacgucaccgucacccacuccgucaaccuccucgaggacaagcacaacggcaagcucugcaagcuccgcggcgucgccccccuccaccucggcaagugcaacaucgccggcuggauccucggcaaccccgagugcgagucccucuccaccgccucccucugguccuacaucgucgagaccuccuccuccgacaacggcaccugcuaccccggcgacuucaucgacuacgaggagcuccgcgagcagcucuccuccgucuccuccuucgagcgcuucgagaucuuccccaagaccuccuccuggcccaaccacgacuccaacaagggcgucaccgccgccugcccccacgccggcgccaaguccuucuacaagaaccucaucuggcucgucaagaagggcaacuccuaccccaagcucuccaaguccuacaucaacgacaagggcaaggagguccucguccucuggggcauccaccaccccuccaccaccgccgaccagcagucccucuaccagaacgccgacaccuacgucuucgucggcaccucccgcuacuccaagaaguucaagcccgagaucgccauccgccccaagguccgcgaccaggagggccgcaugaacuacuacuggacccucgucgagcccggcgacaagaucaccuucgaggccaccggcaaccucgucgucccccgcuacgccuucgccauggagcgcaacgccggcuccggcaucaucaucuccgacacccccguccacgacugcaacaccaccugccagacccccaagggcgccaucaacaccucccuccccuuccagaacauccaccccaucaccaucggcaagugccccaaguacgucaaguccaccaagcuccgccucgccaccggccuccgcaacguccccuccauccagucccgcggccucuucggcgccaucgccggcuucaucgagggcggcuggaccggcauggucgacggcugguacggcuaccaccaccagaacgagcagggcuccggcuacgccgccgaccucaaguccacccagaacgccaucgacaagaucaccaacaaggucaacuccgucaucgagaagaugaacacccaguucaccgccgucggcaaggaguucaaccaccucgagaagcgcaucgagaaccucaacaagaaggucgacgacggcuuccucgacaucuggaccuacaacgccgagcuccucguccuccucgagaacgagcgcacccucgacuaccacgacuccaacgucaagaaccucuacgagaagguccgcaaccagcucaagaacaacgccaaggagaucggcaacggcugcuucgaguucuaccacaagugcgacaacaccugcauggaguccgucaagaacggcaccuacgacuaccccaaguacuccgaggaggccaagcucaaccgcgaggagaucgacggcgucaagcucgaguccacccgcaucuaccagauccucgccaucuacuccaccgucgccuccucccucguccucgucgucucccucggcgccaucuccuucuggaugugcuccaacggcucccuccagugccgcaucugcaucuga

SEQ ID NO: 105816 - RNA, 1701 nt, Artificial Sequence
  derived and/or modified CDS sequence (opt2) from hemagglutinin__InfluenzaA__AGB13159
augaaggccauccucgucgucaugcucuacaccuucgccaccgccaacgccgacacccucugcaucggcuaccacgccaacaacuccaccgacaccgucgacaccguccucgagaagaacgucaccgucacccacuccgucaaccuccucgaggacaagcacaacggcaagcucugcaagcuccgcggcgucgccucccuccaccucggcaagugcaacaucgccggcuggauccucggcaaccccgagugcgagucccucuccaccgccuccuccugguccuacaucgucgagaccuccuccuccgacaacggcaccugcuaccccggcgacuucaucgacuacgaggagcuccgcgagcagcucuccuccgucuccuccuucgagcgcuucgagaucuuccccaagaccuccuccuggcccaaccacgacuccaacaagggcgucaccgccgccugcccccacgccggcgccaagggcuucuacaagaaccucaucuggcucgucaagaagggcaacuccuaccccaagcucuccaaguccuacaucaacgacaagggcaaggagguccucguccucuggggcauccaccaccccuccaccaccgccgaccagcagucccucuaccagaacgccgacaccuacgucuucgucggcaccucccgcuacuccaagaaguucaagcccgagaucgccauccgccccaagguccgcgaccaggagggccgcaugaacuacuacuggacccucgucgagcccggcgacaagaucaccuucgaggccaccggcaaccucgucgucccccgcuacgccuucgccauggagcgcaacgccggcuccggcaucaucaucuccgacacccccguccacgacugcaacaccaccugccagacccccaagggcgccaucaacaccucccuccccuuccagaacauccaccccaucaccaucggcaagugccccaaguacgucaaguccaccaagcuccgccucgccaccggccuccgcaacguccccuccauccagucccgcggccucuucggcgccaucgccggcuucaucgagggcggcuggaccggcauggucgacggcugguacggcuaccaccaccagaacgagcagggcuccggcuacgccgccgaccucaaguccacccagaacgccaucgacaagaucaccaacaaggucaacuccgucaucgagaagaugaacacccaguucaccgccgucggcaaggaguucaaccaccucgagaagcgcaucgagaaccucaacaagaaggucgacgacggcuuccucgacaucuggaccuacaacgccgagcuccucguccuccucgagaacgagcgcacccucgacuaccacgacuccaacgucaagaaccucuacgagaagguccgcaaccagcucaagaacaacgccaaggagaucggcaacggcugcuucgaguucuaccacaagugcgacaacaccugcauggaguccgucaagaacggcaccuacgacuaccccaaguacuccgaggaggccaagcucaaccgcgaggagaucgacggcgucaagcucgaguccacccgcaucuaccagauccucgccaucuacuccaccgucgccuccucccucguccucgucgucucccucggcgccaucuccuucuggaugugcuccaacggcucccuccagugccgcaucugcaucuga

SEQ ID NO: 105817 - RNA, 1701 nt, Artificial Sequence; identical to SEQ ID NO: 102860
  derived and/or modified CDS sequence (opt2) from hemagglutinin__InfluenzaA__AGB13170

SEQ ID NO: 105818 - RNA, 1701 nt, Artificial Sequence
  derived and/or modified CDS sequence (opt2) from hemagglutinin__InfluenzaA__AGB13180
augaaggccauccucgucguccuccucuacaccuucgccaccgccaacgccgacacccucugcaucggcuaccacgccaacaacuccaccgacaccgucgacaccguccucgagaagaacgucaccgucacccacuccgucaaccuccucgaggacaagcacaacggcaagcucugcaagcuccgcggcgucgccccccuccaccucggcaagugcaacaucgccggcuggauccucggcaaccccgagugcgagucccucuccaccgccuccuccugguccuacaucgucgagaccuccuccuccgacaacggcaccugcuaccccggcgacuucaucaacuacgaggagcuccgcgagcagcucuccuccgucuccuccuucgagcgcuucgagaucuuccccaagaccuccuccuggcccaaccacgacuccaacaagggcgucaccgccgccugcccccacgccggcgccaaguccuucuacaagaaccucaucuggcucgucaagaagggcaacuccuaccccaagcucuccaaguccuacaucaacgacaagggcaaggagguccucguccucuggggcauccaccaccccuccaccaccgccgaccagcagucccucuaccagaacgccgacgccuacgucuucgucggcaccucccgcuacuccaagaaguucaagcccgagaucgccauccgccccaagguccgcgaccaggagggccgcaugaacuacuacuggacccucgucgagcccggcgacaagaucaccuucgaggccaccggcaaccucgucgucccccgcuacgccuucgccauggagcgcaacgccggcuccggcaucaucaucuccgacaccuccguccacgacugcaacaccaccugccagacccccaagggcgccaucaacaccucccuccccuuccagaacauccaccccaucaccaucggcaagugccccaaguacgucaaguccaccaagcuccgccucgccaccggccuccgcaacguccccuccauccagucccgcggccucuucggcgccaucgccggcuucaucgagggcggcuggaccggcauggucgacggcugguacggcuaccaccaccagaacgagcagggcuccggcuacgccgccgaccucaaguccacccagaacgccaucgacaagaucaccaacaaggucaacuccgucaucgagaagaugaacacccaguucaccgccgucggcaaggaguucaaccaccucgagaagcgcaucgagaaccucaacaagaaggucgacgacggcuuccucgacaucuggaccuacaacgccgagcuccucguccuccucgagaacgagcgcacccucgacuaccacgacuccaacgucaagaaccucuacgagaagguccgcaaccagcucaagaacaacgccaaggagaucggcaacggcugcuucgaguucuaccacaagugcgacaacaccugcauggaguccgucaagaacggcaccuacgacuaccccaaguacuccgaggaggccaagcucaaccgcgaggagaucgacggcgucaagcucgaguccacccgcaucuaccagauccucgccaucuacuccaccgucgccuccucccucguccucgucgucucccucggcgccaucuccuucuggaugugcuccaacggcucccuccagugccgcaucugcaucuga

SEQ ID NO: 105819 - RNA, 1701 nt, Artificial Sequence; identical to SEQ ID NO: 102903
  derived and/or modified CDS sequence (opt2) from hemagglutinin__InfluenzaA__AGB13190

SEQ ID NO: 105820 - RNA, 1701 nt, Artificial Sequence
  derived and/or modified CDS sequence (opt2) from hemagglutinin__InfluenzaA__AGB13200
augaaggccauccucgucguccuccucuacaccuucgccaccgccaacgccgacacccucugcaucggcuaccacgccaacaacuccaccgacaccgucgacaccguccucgagaagaacgucaccgucacccacuccgucaaccuccucgaggacaagcacaacggcaagcucugcaagcuccgcggcgucgccccccuccaccucggcaagugcaacaucgccggcuggauccucggcaaccccgagugcgagucccucuccaccgccuccuccugguccuacaucgucgagaccuccuccuccgacaacggcaccugcuaccccggcgacuucaucaacuacgaggagcuccgcgagcagcucuccuccgucuccuccuucgagcgcuucgagaucuuccccaagaccuccuccuggcccaaccacgacuccaacaagggcgucaccgccgccugcccccacgccggcgucaaguccuucuacaagaaccucaucuggcucgucaagaagggcaacuccuaccccaagcucuccaaguccuacaucaacgacaagggcaaggagguccucguccucuggggcauccaccaccccuccaccaccaccgaccagcagucccucuaccagaacgccgacgccuacgucuucgucggcaccuccaaguacuccaagaaguucaagcccgagaucgccauccgccccaagguccgcgaccaggagggccgcaugaacuacuacuggacccucgucgagcccggcgacaagaucaccuucgaggccaccggcaaccucgucgucccccgcuacgccuucgccauggagcgcaacgccggcuccggcaucaucaucuccgacacccccguccacgacugcaacaccaccugccagacccccaagggcgccaucaacaccucccuccccuuccagaacauccaccccaucaccaucggcaagugccccaaguacgucaaguccaccaagcuccgccucgccaccggccuccgcaacguccccuccauccagucccgcggccucuucggcgccaucgccggcuucaucgagggcggcuggaccggcauggucgacggcugguacggcuaccaccaccagaacgagcagggcuccggcuacgccgccgaccucaaguccacccagaacgccaucgacaagaucaccaacaaggucaacuccgucaucgagaagaugaacacccaguucaccgccgucggcaaggaguucaaccaccucgagaagcgcaucgagaaccucaacaagaaggucgacgacggcuuccucgacaucuggaccuacaacgccgagcuccucguccuccucgagaacgagcgcacccucgacuaccacgacuccaacgucaagaaccucuacgagaagguccgcaaccagcucaagaacaacgccaaggagaucggcaacggcugcuucgaguucuaccacaagugcgacaacaccugcauggaguccgucaagaacggcaccuacgacuaccccaaguacuccgaggaggccaagcucaaccgcgaggagaucgacggcgucaagcucgaguccacccgcaucuaccagauccucgccaucuacuccaccgucgccuccucccucguccucgucgucucccucggcgccaucuccuucuggaugugcuccaacggcucccuccagugccgcaucugcaucuga

SEQ ID NO: 105821 - RNA, 1701 nt, Artificial Sequence
  derived and/or modified CDS sequence (opt2) from hemagglutinin__InfluenzaA__AGB13210
augaaggccacccucgucguccuccucuacaccuucgccaccgccaacgccgacacccucugcaucggcuaccacgccaacaacuccaccgacaccgucgacaccguccucgagaagaacgucaccgucacccacuccgucaaccuccucgaggacaagcacaacggcaagcucugcaagcuccgcggcgucgccccccuccaccucggcaagugcaacaucgccggcuggauccucggcaaccccgagugcgagucccucuccaccgccuccuccugguccuacaucgucgagaccuccuccuccgacaacggcaccugcuaccccggcgacuucaucaacuacgaggagcuccgcgagcagcucuccuccgucuccuccuucgagcgcuucgagaucuuccccaagaccuccuccuggcccaaccacgacuccaacaagggcgucaccgccgccugcccccacgccggcgccaaguccuucuacaagaaccucaucuggcucgucaagaagggcaacuccuaccccaagcucuccaaguccuacaucaacgacaagggcaaggagguccucguccucuggggcauccaccaccccuccaccuccgccgaccagcagucccucuaccagaacgccgacgccuacgucuucgucggcaccuccaaguacuccaagaaguucaagcccgagaucgccguccgccccaagguccgcgaccaggagggccgcaugaacuacuacuggacccucgucgagcccggcgacaagaucaccuucgaggccaccggcaaccuccucgucccccgcuacgccuucgccauggagcgcaacgccggcuccggcaucaucaucuccgacacccccguccacgacugcaacaccaccugccagacccccaagggcgccaucaacaccucccuccccuuccagaacauccaccccaucaccaucggcaagugccccaaguacgucaaguccaccaagcuccgccucgccaccggccuccgcaacguccccuccauccagucccgcggccucuucggcgccaucgccggcuucaucgagggcggcuggaccggcauggucgacggcugguacggcuaccaccaccagaacgagcagggcuccggcuacgccgccgaccucaaguccacccagaacgccaucgacaagaucaccaacaaggucaacuccgucaucgagaagaugaacacccaguucaccgccgucggcaaggaguucaaccaccucgagaagcgcaucgagaaccucaacaagaaggucgacgacggcuuccucgacaucuggaccuacaacgccgagcuccucguccuccucgagaacgagcgcacccucgacuaccacgacuccaacgucaagaaccucuacgagaagguccgcucccagcucaagaacaacgccaaggagaucggcaacggcugcuucgaguucuaccacaagugcgacaacaccugcauggaguccgucaagaacggcaccuacgacuaccccaaguacuccgaggaggccaagcucaaccgcgaggagaucgacggcgucaagcucgaguccacccgcaucuaccagauccucgccaucuacuccaccgucgccuccucccucguccucgucgucucccucggcgccaucuccuucuggaugugcuccaacggcucccuccagugccgcaucugcaucuga

SEQ ID NO: 105822 - RNA, 1701 nt, Artificial Sequence
  derived and/or modified CDS sequence (opt2) from hemagglutinin__InfluenzaA__AGB13220
augaaggccauccucgucguccuccucuacaccuucgccaccgccaacgccgacacccucugcaucggcuaccacgccaacaacuccaccgacaccgucgacaccguccucgagaagaacgucaccgucacccacuccgucaaccuccucgaggacaagcacaacggcaagcucugcaagcuccgcggcgucgccccccuccaccucggcaagugcaacaucgccggcuggauccucggcaaccccgagugcgagucccucuccaccgccuccuccugguccuacaucgucgagaccuccaucuccgacaacggcaccugcuaccccggcgacuucaucaacuacgaggagcuccgcgagcagcucuccuccgucuccuccuucgagcgcuucgagaucuuccccaagaccuccuccuggcccaaccacgacuccaacaagggcgucaccgccgccugcccccacgccggcgccaaguccuucuacaagaaccucaucuggcucgucaagaagggcaacuccuaccccaagcucuccaaguccuacaucaacgacaagggcaaggagguccucguccucuggggcauccaccaccccuccaccaccgccgaccagcagucccucuaccagaacgccgacgccuacgucuucgucggcaccuccaaguacuccaagaaguucaagcccgagaucgccauccgccccaagguccgcgaccaggagggccgcaugaacuacuacuggacccucgucgagcccggcgacaagaucaccuucgaggccaccggcaaccucgucgucccccgcuacgccuucgccauggagcgcaacgccggcuccggcaucaucaucuccgacacccccguccacgacugcaacaccaccugccagacccccaagggcgccaucaacaccucccuccccuuccagaacauccaccccaucaccaucggcaagugccccaaguacgucaaguccaccaagcuccgccucgccaccggccuccgcaacguccccuccauccagucccgcggccucuucggcgccaucgccggcuucaucgagggcggcuggaccggcauggucgacggcugguacggcuaccaccaccagaacgagcagggcuccggcuacgccgccgaccucaaguccacccagaacgccaucgacaagaucaccaacaaggucaacuccgucaucgagaagaugaacacccaguucaccgccgucggcaaggaguucaaccaccucgagaagcgcaucgagaaccucaacaagaaggucgacgacggcuuccucgacaucuggaccuacaacgccgagcuccucguccuccucgagaacgagcgcacccucgacuaccacgacuccaacgucaagaaccucuacgagaagguccgcaaccagcucaagaacaacgccaaggagaucggcaacggcugcuucgaguucuaccacaagugcgacaacaccugcauggaguccgucaagaacggcaccuacgacuaccccaaguacuccgaggaggccaagcucaaccgcgaggagaucgacggcgucaagcucgaguccacccgcaucuaccagauccucgccaucuacuccaccgucgccuccucccucguccucgucgucucccucggcgccaucuccuucuggaugugcuccaacggcucccuccagugccgcaucugcaucuga

SEQ ID NO: 105823 - RNA, 1701 nt, Artificial Sequence
  derived and/or modified CDS sequence (opt2) from hemagglutinin__InfluenzaA__AGB13230
augaaggccauccucgucguccuccucuacaccuucgccaccgccaacgccgacacccucugcaucggcuaccacgccaacaacuccaccgacaccgucgacaccguccucgagaagaacgucaccgucacccacuccgucaaccuccucgaggacaaccacaacggcaagcucugcaagcuccgcggcgucgccccccuccaccucggcaagugcaacaucgccggcuggauccucggcaaccccgagugcgagucccucuccaccgccuccuccugguccuacaucgucgagaccuccuccuccgacaacggcaccugcuaccccggcgacuucaucaacuacgaggagcuccgcgagcagcucuccuccgucuccuccuucgagcgcuucgagaucuuccccaagaccuccuccuggcccaaccacgacuccaacaagggcgucaccgccgccugcccccacgccggcgccaaguccuucuacaagaaccucaucuggcucgucaagaagggcaacuccuaccccaagcucuccaaguccuacaucaacgacaagggcaaggagguccucguccucuggggcauccaccaccccuccaccaccgccgaccagcagucccucuaccagaacgccgacgccuacgucuucgucggcaccucccgcuacuccaagaaguucaagcccgagaucgccauccgccccaagguccgcgaccaggagggccgcaugaacuacuacuggacccucgucgagcccggcgacaagaucaccuucgaggccaccggcaaccucgucgucccccgcuacgccuucgccauggagcgcaacgccggcuccggcaucaucaucuccgacacccccguccacgacugcaacaccaccugccagacccccaagggcgccaucaacaccucccuccccuuccagaacauccaccccaucaccaucggcaagugccccaaguacgucaaguccaccaagcuccgccucgccaccggccuccgcaacguccccuccauccagucccgcggccucuucggcgccaucgccggcuucaucgagggcggcuggaccggcauggucgacggcugguacggcuaccaccaccagaacgagcagggcuccggcuacgccgccgaccucaaguccacccagaacgccaucgacaagaucaccaacaaggucaacuccgucaucgagaagaugaacacccaguucaccgccgucggcaaggaguucaaccgccucgagaagcgcaucgagaaccucaacaagaaggucgacgacggcuuccucgacaucuggaccuacaacgccgagcuccucguccuccucgagaacgagcgcacccucgacuaccacgacuccaacgucaagaaccucuacgagaagguccgcaaccagcucaagaacaacgccaaggagaucggcaacggcugcuucgaguucuaccacaagugcgacaacaccugcauggaguccgucaagaacggcaccuacgacuaccccaaguacuccgaggaggccaagcucaaccgcgaggagaucgacggcgucaagcucgaguccacccgcaucuaccagauccucgccaucuacuccaccgucgccuccucccucguccucgucgucucccucggcgccaucuccuucuggaugugcuccaacggcucccuccagugccgcaucugcaucuga

SEQ ID NO: 105824 - RNA, 1701 nt, Artificial Sequence; identical to SEQ ID NO: 102903
  derived and/or modified CDS sequence (opt2) from hemagglutinin__InfluenzaA__AGB13240

SEQ ID NO: 105825 - RNA, 1701 nt, Artificial Sequence; identical to SEQ ID NO: 102903
  derived and/or modified CDS sequence (opt2) from hemagglutinin__InfluenzaA__AGB13250

SEQ ID NO: 105826 - RNA, 1701 nt, Artificial Sequence
  derived and/or modified CDS sequence (opt2) from hemagglutinin__InfluenzaA__AGB13260
augaaggccauccucgucguccuccucuacaccuucgccaccgccaacgccgacacccucugcaucggcuaccacgccaacaacuccaccgacaccgucgacaccguccucgagaagaacgucaccgucacccacuccgucaaccuccucgaggacaagcacaacggcaagcucugcaagcuccgcggcgucgccccccuccaccucggcaagugcaacaucgccggcuggauccucggcaaccccgagugcgagucccucuccaccgccuccuccugguccuacaucgucgagaccuccuccuccgacaacggcaccugcuaccccggcgacuucaucgacuacgaggagcuccgcgagcagcucuccuccgucuccuccuucgagcgcuucgagaucuuccccaagaccuccuccuggcccaaccacgacuccaacaagggcgucaccaccgccugcccccacgccggcuccaaguccuucuacaagaaccucaucuggcucgucaagaagggcaacuccuaccccaagcucuccaaguccuacaucaacgacaagggcaaggagguccucguccucuggggcauccaccacccccccaccuccgccgaccagcagucccucuaccagaacgccgacgccuacgucuucgucggcaccucccgcuacuccaagaaguucaagcccgagaucgccauccgccccaagguccgcgaccaggagggccgcaugaacuacuacuggacccucgucgagcccggcgacaagaucaccuucgaggccaccggcaaccucgucgucccccgcuacgccuucgccauggagcgcaacgccggcuccggcaucaucaucuccgacacccccguccacgacugcaacaccaccugccagacccccaagggcgccaucaacaccucccuccccuuccagaacguccaccccaucaccaucggcaagugccccaaguacgucaaguccaccaagcuccgccucgccaccggccuccgcaacguccccuccauccagucccgcggccucuucggcgccaucgccggcuucaucgagggcggcuggaccggcauggucgacggcugguacggcuaccaccaccagaacgagcagggcuccggcuacgccgccgaccucaaguccacccagaacgccaucgacgagaucaccaacaaggucaacuccgucaucgagaagaugaacacccaguucaccgccgucggcaaggaguucaaccaccucgagaagcgcaucgagaaccucaacaagaaggucgacgacggcuuccucgacaucuggaccuacaacgccgagcuccucguccuccucgagaacgagcgcacccucgacuaccacgacuccaacgucaagaaccucuacgagaagguccgcucccagcucaagaacaacgccaaggagaucggcaacggcugcuucgaguucuaccacaagugcgacaacaccugcauggaguccaucaagaacggcaccuacgacuaccccaaguacuccgaggaggccaagcucaaccgcgaggagaucgacggcgucaagcucgaguccacccgcaucuaccagauccucgccaucuacuccaccgucgccuccucccucguccucgucgucucccucggcgccaucuccuucuggaugugcuccaacggcucccuccagugccgcaucugcaucuga

SEQ ID NO: 105827 - RNA, 1701 nt, Artificial Sequence
  derived and/or modified CDS sequence (opt2) from hemagglutinin__InfluenzaA__AGB13270
augaaggccauccucgucguccuccucuacaccuucgccaccgccaacgccgacacccucugcaucggcuaccacgccaacaacuccaccgacaccgucgacaccguccucgagaagaacgucaccgucacccacuccgucaaccuccucgaggacaagcacaacggcaagcucugcaagcuccgcggcgucgccccccuccaccucggcaagugcaacaucgccggcuggauccucggcaaccccgagugcgagucccucuccaccgccuccuccugguccuacaucgucgagaccuccuccuccgacaacggcaccugcuaccccggcgacuucaucaacuacgaggagcuccgcgagcagcucuccuccgucuccuccuucgagcgcuucgagaucuuccccaagaccuccuccuggcccaaccacgacuccaacaagggcgucaccgccgccugcccccacgccggcgccaaguccuucuacaagaaccucaucuggcucgucaagaagggcaacuccuaccccaagcucuccaaguccuacaucaacgacaagggcaaggagguccucguccucuggggcauccaccaccccuccaccuccgccgaccagcagucccucuaccagaacgccgacgccuacgucuucgucggcaccuccaaguacuccaagaaguucaagcccgagaucgccguccgccccaagguccgcgaccaggagggccgcaugaacuacuacuggacccucgucgagcccggcgacaagaucaccuucgaggccaccggcaaccuccucgucccccgcuacgccuucgccauggagcgcaacgccggcuccggcaucaucaucuccgacacccccguccacgacugcaacaccaccugccagacccccaagggcgccaucaacaccucccuccccuuccagaacauccaccccaucaccaucggcaagugccccaaguacgucaaguccaccaagcuccgccucgccaccggccuccgcaacguccccuccauccagucccgcggccucuucggcgccaucgccggcuucaucgagggcggcuggaccggcauggucgacggcugguacggcuaccaccaccagaacgagcagggcuccggcuacgccgccgaccucaaguccacccagaacgccaucgacaagaucaccaacaaggucaacuccgucaucgagaagaugaacacccaguucaccgccgucggcaaggaguucaaccaccucgagaagcgcaucgagaaccucaacaagaaggucgacgacggcuuccucgacaucuggaccuacaacgccgagcuccucguccuccucgagaacgagcgcacccucgacuaccacgacuccaacgucaagaaccucuacgagaagguccgcucccagcucaagaacaacgccaaggagaucggcaacggcugcuucgaguucuaccacaagugcgacaacaccugcauggaguccgucaagaacggcaccuacgacuaccccaaguacuccgaggaggccaagcucaaccgcgagaagaucgacggcgucaagcucgaguccacccgcaucuaccagauccucgccaucuacuccaccgucgccuccucccucguccucgucgucucccucggcgccaucuccuucuggaugugcuccaacggcucccuccagugccgcaucugcaucuga

SEQ ID NO: 105828 - RNA, 1701 nt, Artificial Sequence
  derived and/or modified CDS sequence (opt2) from hemagglutinin__InfluenzaA__AGB13280
augaaggccauccucgucguccuccucuacaccuucgccaccgccaacgccgacacccucugcaucggcuaccacgccaacaacuccaccgacaccgucgacaccguccucgagaagaacgucaccgucacccacuccgucaaccuccucgaggacaagcacaacggcaagcucugcaagcuccgcggcgucgccccccuccaccucggcaagugcaacaucgccggcuggauccucggcaaccccgagugcgagucccucuccaccgccuccuccugguccuacaucgucgagaccuccuccuccgacaacggcaccugcuaccccggcgacuucaucaacuacgaggagcuccgcgagcagcucuccuccgucuccuccuucgagcgcuucgagaucuuccccaagaccuccuccuggcccaaccacgacuccaacaagggcgucaccgccgccugcccccacgccggcgccaaguccuucuacaagaaccucaucuggcucgucaagaagggcaacuccuaccccaagcucuccaaguccuacaucaacgacaagggcaaggagguccucguccucuggggcauccaccaccccuccaccaacgccgaccagcagucccucuaccagaacgccgacgccuacgucuucgucggcaccuccaaguacuccaagaaguucaagcccgagaucgccguccgccccaagguccgcgaccaggagggccgcaugaacuacuacuggacccucgucgagcccggcgacaagaucaccuucgaggccaccggcaaccuccucgucccccgcuacgccuucgccauggagcgcaacgccggcuccggcaucaucaucuccgacacccccguccacgacugcaacaccaccugccagacccccaagggcgccaucaacaccucccuccccuuccagaacauccaccccaucaccaucggcaagugccccaaguacgucaaguccaccaagcuccgccucgccaccggccuccgcaacguccccuccauccagucccgcggccucuucggcgccaucgccggcuucaucgagggcggcuggaccggcauggucgacggcugguacggcuaccaccaccagaacggccagggcuccggcuacgccgccgaccucaaguccacccagaacgccaucgacaagaucaccaacaaggucaacuccgucaucgagaagaugaacacccaguucaccgccgucggcaaggaguucaaccaccucgagaagcgcaucgagaaccucaacaagaaggucgacgacggcuuccucgacaucuggaccuacaacgccgagcuccucguccuccucgagaacgagcgcacccucgacuaccacgacuccaacgucaagaaccucuacgagaagguccgcucccagcucaagaacaacgccaaggagaucggcaacggcugcuucgaguucuaccacaagugcgacaacaccugcauggaguccgucaagaacggcaccuacgacuaccccaaguacuccgaggaggccaagcucaaccgcgaggagaucgacggcgucaagcucgaguccacccgcaucuaccagauccucgccaucuacuccaccgucgccuccucccucguccucgucgucucccucggcgccaucuccuucuggaugugcuccaacggcucccuccagugccgcaucugcaucuga

SEQ ID NO: 105829 - RNA, 1701 nt, Artificial Sequence
  derived and/or modified CDS sequence (opt2) from hemagglutinin__InfluenzaA__AGB13290
augaaggccauccucgucguccuccucuacaccuucgccaccgccaacgccgacacccucugcaucggcuaccacgccaacaacuccaccgacaccgucgacaccguccucgagaagaacgucaccgucacccacuccgucaaccuccucgaggucaagcacaacggcaagcucugcaagcuccgcggcgucgccccccuccaccucggcaagugcaacaucgccggcuggauccucggcaaccccgagugcgagucccucuccaccgccuccuccugguccuacaucgucgagaccuccuccuccgacaacggcaccugcuaccccggcgacuucaucaacuacgaggagcuccgcgagcagcucuccuccgucuccuccuucgagcgcuucgagaucuuccccaagaccuccuccuggcccaaccacgacuccaacaagggcgucaccgccgccugcccccacgccggcgccaaguccuucuacaagaaccucaucuggcucgucaagaagggcaacuccuaccccaagcucuccaaguccuacaucaacgacaagggcaaggagguccucguccucuggggcauccaccaccccuccaccaccgccgaccagcagucccucuaccagaacgccgacgccuacgucuucgucggcaccucccgcuacuccaagaaguucaagcccgagaucgccauccgccccaagguccgcgaccaggagggccgcaugaacuacuacuggacccucgucgagcccggcgacaagaucaccuucgaggccaccggcaaccucgucgucccccgcuacgccuucgccauggagcgcaacgccggcuccggcaucaucaucuccgacacccccguccacgacugcaacaccaccugccagacccccaagggcgccaucaacaccucccuccccuuccagaacauccaccccaucaccaucggcaagugccccaaguacgucaaguccaccaagcuccgccucgccaccggccuccgcaacguccccuccauccagucccgcggccucuucggcgccaucgccggcuucaucgagggcggcuggaccggcauggucgacggcugguacggcuaccaccaccagaacgagcagggcuccggcuacgccgccgaccucaaguccacccagaacgccaucgacaagaucaccaacaaggucaacuccgucaucgagaagaugaacacccaguucaccgccgucggcaaggaguucaaccaccucgagaagcgcaucgagaaccucaacaagaaggucgacgacggcuuccucgacaucuggaccuacaacgccgagcuccucguccuccucgagaacgagcgcacccucgacuaccacgacuccaacgucaagaaccucuacgagaagguccgcaaccagcucaagaacaacgccaaggagaucggcaacggcugcuucgaguucuaccacaagugcgacaacaccugcauggaguccgucaagaacggcaccuacgacuaccccaaguacuccgaggaggccaagcucaaccgcgaggagaucgacggcgucaagcucgaguccacccgcaucuaccagauccucgccaucuacuccaccgucgccuccucccucguccucgucgucucccucggcgccaucuccuucuggaugugcuccaacggcucccuccagugccgcaucugcaucuga

SEQ ID NO: 105830 - RNA, 1701 nt, Artificial Sequence; identical to SEQ ID NO: 102903
  derived and/or modified CDS sequence (opt2) from hemagglutinin__InfluenzaA__AGB13300

SEQ ID NO: 105831 - RNA, 1701 nt, Artificial Sequence
  derived and/or modified CDS sequence (opt2) from hemagglutinin__InfluenzaA__AGB13310
augaaggccauccucgucguccuccucuacaccuucgccaccgccaacgccgacacccucugcaucggcuaccacgccaacaacuccaccgacaccgucgacaccguccucgagaagaacgucaccgucacccacuccgucaaccuccucgaggacaagcacaacggcaagcucugcaagcuccgcggcgucgccccccuccaccucggcaagugcaacaucgccggcuggauccucggcaaccccgagugcgagucccucuccaccgccuccuccugguccuacaucgucgagaccuccuccuccgacaacggcaccugcuaccccggcgacuucaucgacuacgaggagcuccgcgagcagcucuccuccgucuccuccuucgagcgcuucgagaucuuccccaagaccuccuccuggcccaaccacgacuccaacaagggcgucaccgccgccugcccccacgccggcgccaaguccuucuacaagaaccucaucuggcucgucaagaagggcaacuccuaccccaagcucuccaaguccuacaucaacgacaagggcaaggagguccucguccucuggggcguccaccaccccuccaccuccgccgaccagcagucccucuaccagaacgccgacgccuacgucuucgucggcaccucccgcuacuccaagaaguucaagcccgagaucgccauccgccccaagguccgcgaccaggagggccgcaugaacuacuacuggacccucgucgagcccggcgacaagaucaccuucgaggccaccggcaaccucgucgucccccgcuacgccuucgccauggagcgcaacgccggcuccggcaucaucaucuccgacacccccguccacgacugcaacaccaccugccagacccccaagggcgccaucaacaccucccuccccuuccagaacauccaccccaucaccaucggcaagugccccaaguacgucaaguccaccaagcuccgccucgccaccggccuccgcaacguccccuccauccagucccgcggccucuucggcgccaucgccggcuucaucgagggcggcuggaccggcauggucgacggcugguacggcuaccaccaccagaacgagcagggcuccggcuacgccgccgaccucaaguccacccagcacgccaucgacgagaucaccaacaaggucaacuccgucaucgagaagaugaacacccaguucaccgccgucggcaaggaguucaaccaccucgagaagcgcaucgagaaccucaacaagaaggucgacgacggcuuccucgacaucuggaccuacaacgccgagcuccucguccuccucgagaacgagcgcacccucgacuaccacgacuccaacgucaagaaccucuacgagaagguccgcucccagcucaagaacaacgccaaggagaucggcaacggcugcuucgaguucuaccacaagugcgacaacaccugcauggaguccgucaagaacggcaccuacgacuaccccaaguacuccgaggaggccaagcucaaccgcgaggagaucgacggcgucaagcucgaguccacccgcaucuaccagauccucgccaucuacuccaccgucgccuccucccucguccucgucgucucccucggcgccaucuccuucuggaugugcuccaacggcucccuccagugccgcaucugcaucuga

SEQ ID NO: 105832 - RNA, 1701 nt, Artificial Sequence
  derived and/or modified CDS sequence (opt2) from hemagglutinin__InfluenzaA__AGB13320
augaaggccauccucgucguccuccucuacaccaucgccaccgccaacgccgacacccucugcaucggcuaccacgccaacaacuccaccgacaccgucgacaccguccucgagaagaacgucaccgucacccacuccgucaaccuccucgaggacaagcacaacggcaagcucugcaagcuccgcggcgucgccccccuccaccucggcaagugcaacaucgccggcuggauccucggcaaccccgagugcgagucccucuccaccgccuccuccugguccuacaucgucgagaccuccuccuccgacaacggcaccugcuaccccggcgacuucaucaacuacgaggagcuccgcgagcagcucuccuccgucuccuccuucgagcgcuucgagaucuuccccaagaccuccuccuggcccaaccacgacuccaacaagggcgucaccgccgccugcccccacgccggcgccaaguccuucuacaagaaccucaucuggcucgucaagaagggcaacuccuaccccaagcucuccaaguccuacaucaacgacaagggcaaggagguccucguccucuggggcauccaccaccccuccaccaccgccgaccagcagucccucuaccagaacgccgacgccuacgucuucgucggcaccucccgcuacuccaagaaguucaagcccgagaucgccauccgccccaagguccgcgaccaggagggccgcaugaacuacuacuggacccucgucgagcccggcgacaagaucaccuucgaggccaccggcaaccucgucgucccccgcuacgccuucgccauggagaagaacgccggcuccggcaucaucaucuccgacacccccguccacgacugcaacaccaccugccagacccccaagggcgccaucaacaccucccuccccuuccagaacauccaccccaucaccaucggcaagugccccaaguacgucaaguccaccaagcuccgccucgccaccggccuccgcaacguccccuccauccagucccgcggccucuucggcgccaucgccggcuucaucgagggcggcuggaccggcauggucgacggcugguacggcuaccaccaccagaacgagcagggcuccggcuacgccgccgaccucaaguccacccagaacgccaucgacaagaucaccaacaaggucaacuccgucaucgagaagaugaacacccaguucaccgccgucggcaaggaguucaaccaccucgagaagcgcaucgagaaccucaacaagaaggucgacgacggcuuccucgacaucuggaccuacaacgccgagcuccucguccuccucgagaacgagcgcacccucgacuaccacgacuccaacgucaagaaccucuacgagaagguccgcaaccagcucaagaacaacgccaaggagaucggcaacggcugcuucgaguucuaccacaagugcgacaacaccugcauggaguccgucaagaacggcaccuacgacuaccccaaguacuccgaggaggccaagcucaaccgcgaggagaucgacggcgucaagcucgaguccgcccgcgucuaccagauccucgccaucuacuccaccgucgccuccucccucguccucgucgucucccucggcgccaucuccuucuggaugugcuccaacggcucccuccagugccgcaucugcaucuga

SEQ ID NO: 105833 - RNA, 1701 nt, Artificial Sequence
  derived and/or modified CDS sequence (opt2) from hemagglutinin__InfluenzaA__AGB13330
augaaggccauccucgucgucaugcucuacaccuucgccaccgccaacgccgacacccucugcaucggcuaccacgccaacaacuccaccgacaccgucgacaccguccucgagaagaacgucaccgucacccacuccgucaaccuccucgaggacaagcacaacggcaagcucugcaagcuccgcggcgucgccccccuccaccucggcaagugcaacaucgccggcuggauccucggcaaccccgagugcgagucccucuccaccgccuccuccugguccuacaucgucgagaccuccuccuccgacaacggcaccugcuaccccggcgacuucaucgacuacgaggagcuccgcgagcagcucuccuccgucuccuccuucgagcgcuucgagaucuuccccaagaccuccuccuggcccaaccacgacuccaacaagggcgucaccgccgccugcccccacgccggcgccaagggcuucuacaagaaccucaucuggcucgucaagaagggcaacuccuaccccaagcucuccaaguccuacuccaacgacaagggcaaggagguccucguccucuggggcauccaccaccccuccaccaccgccgaccagcagucccucuaccagaacgccgacaccuacgucuucgucggcaccucccgcuacuccaagaaguucaagcccgagaucgccauccgccccaagguccgcgaccaggagggccgcaugaacuacuacuggacccucgucgagcccggcgacaagaucaccuucgaggccaccggcaaccucgucgucccccgcuacgccuucgccauggagcgcaacgccggcuccggcaucaucaucuccgacacccccguccacgacugcaacaccaccugccagacccccaagggcgccaucaacaccucccuccccuuccagaacauccaccccaucaccaucggcaagugccccaaguacgucaaguccaccaagcuccgccucgccaccggccuccgcaacguccccuccauccagucccgcggccucuucggcgccaucgccggcuucaucgagggcggcuggaccggcauggucgacggcugguacggcuaccaccaccagaacgagcagggcuccggcuacgccgccgaccucaaguccacccagaacgccaucgacaagaucaccaacaaggucaacuccgucaucgagaagaugaacacccaguucaccgccgucggcaaggaguucaaccaccucgagaagcgcaucgagaaccucaacaagaaggucgacgacggcuuccucgacaucuggaccuacaacgccgagcuccucguccuccucgagaacgagcgcacccucgacuaccacgacuccaacgucaagaaccucuacgagaagguccgcaaccagcucaagaacaacgccaaggagaucggcaacggcugcuucgaguucuaccacaagugcgacaacaccugcauggaguccgucaagaacggcaccuacgacuaccccaaguacuccgaggaggccaagcucaaccgcgaggagaucgacggcgucaagcucgaguccacccgcaucuaccagauccucgccaucuacuccaccgucgccuccucccucguccucgucgucucccucggcgccaucuccuucuggaugugcuccaacggcucccuccagugccgcaucugcaucuga

SEQ ID NO: 105834 - RNA, 1701 nt, Artificial Sequence; identical to SEQ ID NO: 102903
  derived and/or modified CDS sequence (opt2) from hemagglutinin__InfluenzaA__AGB13340

SEQ ID NO: 105835 - RNA, 1701 nt, Artificial Sequence
  derived and/or modified CDS sequence (opt2) from hemagglutinin__InfluenzaA__AGB13350
augaaggccauccucgucguccuccucuacaccuucgccaccgccaacgccgacacccucugcaucggcuaccacgccaacaacuccaccgagaccgucgacaccguccucgagaagaacgucaccgucacccacuccgucaaccuccucgaggacaagcacaacggcaagcucugcaagcuccgcggcgucgccccccuccaccucggcaagugcaacaucgccggcuggauccucggcaaccccgagugcgagucccucuccaccgccuccuccugguccuacaucgucgagaccuccuccuccgacaacggcaccugcuaccccggcgacuucaucaacuacgaggagcuccgcgagcagcucuccuccgucuccuccuucgagcgcuucgagaucuuccccaagaccuccuccuggcccaaccacgacuccaacaagggcgucaccgccgccugcccccaggccggcgccaaguccuucuacaagaaccucaucuggcucgucaagaagggcaacuccuaccccaagcucuccaaguccuacaucaacgacaagggcaaggagguccucguccucuggggcauccaccaccccuccaccuccgccgaccagcagucccucuaccagaacgccgacgccuacgucuucgucggcaccuccaaguacuccaagaaguucaagcccgagaucgccguccgccccaagguccgcgaccaggagggccgcaugaacuacuacuggacccucgucgagcccggcgacaagaucaccuucgaggccaccggcaaccuccucgucccccgcuacgccuucgccauggagcgcaacgccggcuccggcaucaucaucuccgacacccccguccacgacugcaacaccaccugccagacccccaagggcgccaucaacaccucccuccccuuccagaacauccaccccaucaccaucggcaagugccccaaguacgucaaguccaccaagcuccgccucgccaccggccuccgcaacguccccuccauccagucccgcggccucuucggcgccaucgccggcuucaucgagggcggcuggaccggcauggucgacggcugguacggcuaccaccaccagaacgcccagggcuccggcuacgccgccgaccucaaguccacccagaacgccaucgacaagaucaccaacaaggucaacuccgucaucgagaagaugaacacccaguucaccgccgucggcaaggaguucaaccaccucgagaagcgcaucgagaaccucaacaagaaggucgacgacggcuuccucgacaucuggaccuacaacgccgagcuccucguccuccucgagaacgagcgcacccucgacuaccacgacuccaacgucaagaaccucuacgagaagguccgcucccagcucaagaacaacgccaaggagaucggcaacggcugcuucgaguucuaccacaagugcgacaacaccugcauggaguccgucaagaacggcaccuacgacuaccccaaguacuccgaggaggccaagcucaaccgcgaggagaucgacggcgucaagcucgaguccacccgcaucuaccagauccucgccaucuacuccaccgucgccuccucccucguccucgucgucucccucggcgccaucuccuucuggaugugcuccaacggcucccuccagugccgcaucugcaucuga

SEQ ID NO: 105836 - RNA, 1701 nt, Artificial Sequence
  derived and/or modified CDS sequence (opt2) from hemagglutinin__InfluenzaA__AGB13360
augaaggccauccucgucguccuccucuacaccuucgccaccgccaacgccgacacccucugcaucggcuaccacgccaacaacuccaccgacaccgucgacaccguccucgagaagaacgucaccgucacccacuccgucaaccuccucgaggacaagcacaacggcaagcucugcaagcuccgcggcgucgccccccuccaccucggcaagugcaacaucgccggcuggauccucggcaaccccgagugcgagucccucuccaccgccuccuccugguccuacaucgucgagaccuccuccuccgacaacggcaccugcuaccccggcgacuucaucaacuacgaggagcuccgcgagcagcucuccuccgucuccuccuucgagcgcuucgagaucuuccccaagaccuccuccuggcccaaccacgacuccaacaagggcgucaccgccgccugcccccacgccggcgccaaguccuucuacaagaaccucaucuggcucgucaagaagggcaacuccuaccccaagcucuccaaguccuacaucaacgacaagggcaaggagguccucguccucuggggcauccaccaccccuccaccuccgccgaccagcagucccucuaccagaacgccgacgccuacgucuucgucggcaccuccaaguacuccaagaaguucaagcccgagaucgccguccgccccaagguccgcgaccaggagggccgcaugaacuacuacuggacccucgucgagcccggcgacaagaucaccuucgaggccaccggcaaccuccucgucccccgcuacgccuucgccauggagcgcaacgccggcuccggcaucaucaucuccgacacccccguccacgacugcaacaccaccugccagacccccaagggcgccaucaacaccucccuccccuuccagaacauccaccccaucaccaucggcaagugccccaaguacgucaaguccaccaagcuccgccucgccaccggccuccgcaacguccccuccauccagucccgcggccucuucggcgccaucgccggcuucaucgagggcggcuggaccggcauggucgacggcugguacggcuaccaccaccagaacgagcagggcuccggcuacgccgccgaccucaaguccacccagaacgccaucgacaagaucaccaacaaggucaacuccgucaucgagaagaugaacacccaguucaccgccgucggcaaggaguucaaccaccucgagaagcgcaucgagaaccucaacaagaaggucgacgacggcuuccucgacaucuggaccuacaacgccgagaugcucguccuccucgagaacgagaagacccucgacuaccacgacuccaacgucaagaaccucuacgagaagguccgcucccagcucaagaacaacgccaaggagaucggcaacggcugcuucgaguucuaccacaagugcgacaacaccugcauggaguccgucaagaacggcaccuacgacuaccccaaguacuccgaggaggccaagcucaaccgcgaggagaucgacggcgucaagcucgaguccacccgcaucuaccagauccucgccaucuacuccaccgucgccuccucccucguccucgucgucucccucggcgccaucuccuucuggaugugcuccaacggcucccuccagugccgcaucugcaucuga

SEQ ID NO: 105837 - RNA, 1701 nt, Artificial Sequence
  derived and/or modified CDS sequence (opt2) from hemagglutinin__InfluenzaA__AGB13380
augaaggccauccucgucguccuccucuacaccuucgccaccgccaaggccgacacccucugcaucggcuaccacgccaacaacuccaccgacaccgucgacaccguccucgagaagaacgucaccgucacccacuccgucaaccuccucgaggacaagcacaacggcaagcucugcaagcuccgcggcgucgccccccuccaccucggcaagugcaacaucgccggcuggauccucggcaaccccgagugcgagucccucuccaccgccuccuccugguccuacaucgucgagaccuccuccuccgacaacggcaccugcuaccccggcgacuucaucaacuacgaggagcuccgcgagcagcucuccuccgucuccuccuucgagcgcuucgagaucuuccccaagaccuccuccuggcccaaccacgacuccaacaagggcgucaccgccgccugcccccacgccggcgccaaguccuucuacaagaaccucaucuggcucgucaagaagggcaacuccuaccccaagcucuccaaguccuacaucaacgacaagggcaaggagguccucguccucuggggcauccaccaccccuccaccaccgccgaccagcagucccucuaccagaacgccgacgccuacgucuucgucggcaccucccgcuacuccaagaaguucaagcccgagaucgccauccgccccaagguccgcgaccaggagggccgcaugaacuacuacuggacccucgucgagcccggcgacaagaucaccuucgaggccaccggcaaccucgucgucccccgcuacgccuucgccauggagcgcaaccccggcuccggcaucaucaucuccgacacccccguccacgacugcaacaccaccugccagacccccaagggcgccaucaacaccucccuccccuuccagaacauccaccccaucaccaucggcaagugccccaaguacgucaaguccaccaagcuccgccucgccaccggccuccgcaacguccccuccauccagucccgcggccucuucggcgccaucgccggcuucaucgagggcggcuggaccggcauggucgacggcugguacggcuaccaccaccagaacgagcagggcuccggcuacgccgccgaccucaaguccacccagaacgccaucgacaagaucaccaacaaggucaacuccgucaucgagaagaugaacacccaguucaccgccgucggcaaggaguucaaccaccucgagaagcgcaucgagaaccucaacaagaaggucgacgacggcuuccucgacaucuggaccuacaacgccgagcuccucguccuccucgagaacgagcgcacccucgacuaccacgacuccaacgucaagaaccucuacgagaagguccgcaaccagcucaagaacaacgccaaggagaucggcaacggcugcuucgaguucuaccacaagugcgacaacaccugcauggaguccgucaagaacggcaccuacgacuaccccaaguacuccgaggaggccaagcucaaccgcgaggagaucgacggcgucaagcucgaguccacccgcaucuaccagauccucgccaucuacuccaccgucgccuccucccucguccucgucgucucccucggcgccaucuccuucuggaugugcuccaacggcucccuccagugccgcaucugcaucuga

SEQ ID NO: 105838 - RNA, 1701 nt, Artificial Sequence; identical to SEQ ID NO: 102471
  derived and/or modified CDS sequence (opt2) from hemagglutinin__InfluenzaA__AGB13390

SEQ ID NO: 105839 - RNA, 1701 nt, Artificial Sequence; identical to SEQ ID NO: 103078
  derived and/or modified CDS sequence (opt2) from hemagglutinin__InfluenzaA__AGB13400

SEQ ID NO: 105840 - RNA, 1701 nt, Artificial Sequence; identical to SEQ ID NO: 102471
  derived and/or modified CDS sequence (opt2) from hemagglutinin__InfluenzaA__AGB13410

SEQ ID NO: 105841 - RNA, 1701 nt, Artificial Sequence; identical to SEQ ID NO: 102490
  derived and/or modified CDS sequence (opt2) from hemagglutinin__InfluenzaA__AGB13420

SEQ ID NO: 105842 - RNA, 1701 nt, Artificial Sequence
  derived and/or modified CDS sequence (opt2) from hemagglutinin__InfluenzaA__AGB13430
augaaggccauccucgucguccuccucuacaccuucgccaccgccaacgccgacacccucugcaucggcuaccacgccaacaacuccaccgacaccgucgacaccguccucgagaagaacgucaccgucacccacuccgucaaccuccucgaggacaagcacaacggcaagcucugcaagcuccgcggcgucgccccccuccaccucggcaagugcaacaucgccggcuggauccucggcaaccccgagugcgagucccucuccaccgccuccuccugguccuacaucgucgagaccuccuccuccgacaacggcaccugcuaccccggcgacuucaucgacuacgaggagcuccgcgagcagcucuccuccgucuccuccuucgagcgcuucgagauguuccccaagaccuccuccuggcccaaccacgacuccaacaagggcgucaccaccgccugcccccacgccggcgccaaguccuucuacaagaaccucaucuggcucgucaagaagggcaacuccuaccccaagcucuccaaguccuacaucaacgacaagggcaaggagguccucguccucuggggcauccaccacccccccaccuccgccgaccagcagucccucuaccagaacgccgacgccuacgucuucgucggcaccucccgcuacuccaagaaguucaagcccgagaucgccauccgccccaagguccgcgaccaggagggccgcaugaacuacuacuggacccucgucgagcccggcgacaagaucaccuucgaggccaccggcaaccucgucgucccccgcuacgccuucgccauggagcgcaacgccggcuccggcaucaucaucuccgacacccccguccacgacugcaacaccaccugccagacccccaagggcgccaucaacaccucccuccccuuccagaacauccaccccaucaccaucggcaagugccccaaguacgucaaguccaccaagcuccgccucgccaccggccuccgcaacguccccuccauccagucccgcggccucuucggcgccaucgccggcuucaucgagggcggcuggaccggcauggucgacggcugguacggcuaccaccaccagaacgagcagggcuccggcuacgccgccgaccucaaguccacccagaacgccaucgacggcaucaccaacaaggucaacuccgucaucgagaagaugaacacccaguucaccgccgucggcaaggaguucaaccaccucgagaagcgcaucgagaaccucaacaagaaggucgacgacggcuuccucgacaucuggaccuacaacgccgagcuccucguccuccucgagaacgagcgcacccucgacuaccacgacuccaacgucaagaaccucuacgagaagguccgcucccagcucaagaacaacgccaaggagaucggcaacggcugcuucgaguucuaccacaagugcgacaacaccugcauggaguccgucaagaacggcaccuacgacuaccccaaguacuccgaggaggccaagcucaaccgcgaggagaucgacggcgucaagcucgaguccaccaugaucuaccagauccucgccaucuacuccaccgucgccuccucccucguccucgucgucucccucggcgccaucuccuucuggaugugcuccaacggcucccuccagugccgcaucugcaucuga

SEQ ID NO: 105843 - RNA, 1701 nt, Artificial Sequence; identical to SEQ ID NO: 103078
  derived and/or modified CDS sequence (opt2) from hemagglutinin__InfluenzaA__AGB13440

SEQ ID NO: 105844 - RNA, 1701 nt, Artificial Sequence; identical to SEQ ID NO: 102490
  derived and/or modified CDS sequence (opt2) from hemagglutinin__InfluenzaA__AGB13450

SEQ ID NO: 105845 - RNA, 1701 nt, Artificial Sequence; identical to SEQ ID NO: 102471
  derived and/or modified CDS sequence (opt2) from hemagglutinin__InfluenzaA__AGB13460

SEQ ID NO: 105846 - RNA, 1701 nt, Artificial Sequence; identical to SEQ ID NO: 102903
  derived and/or modified CDS sequence (opt2) from hemagglutinin__InfluenzaA__AGB13470

SEQ ID NO: 105847 - RNA, 1701 nt, Artificial Sequence; identical to SEQ ID NO: 102490
  derived and/or modified CDS sequence (opt2) from hemagglutinin__InfluenzaA__AGB13480

SEQ ID NO: 105848 - RNA, 1701 nt, Artificial Sequence; identical to SEQ ID NO: 102903
  derived and/or modified CDS sequence (opt2) from hemagglutinin__InfluenzaA__AGB13490

SEQ ID NO: 105849 - RNA, 1701 nt, Artificial Sequence
  derived and/or modified CDS sequence (opt2) from hemagglutinin__InfluenzaA__AGB13500
augaaggccauccucgucguccuccucuacaccuucgccaccgccaacgccgacacccucugcaucggcuaccacgccaacaacuccaccgacaccgucgacaccguccucgagaagaacgucaccgucacccacuccgucaaccuccucgaggacaagcacaacggcaagcucugcaagcuccgcggcgucgccccccuccaccucggcaagugcaacaucgccggcuggauccucggcaaccccgagugcgagucccucuccaccgccuccuccugguccuacaucgucgagaccuccuccuccgacaacggcaccugcuaccccggcaacuucaucgacuacgaggagcuccgcgagcagcucuccuccgucuccuccuucgagcgcuucgagaucuuccccaagaccuccuccuggcccgaccacgacuccaacaagggcgucaccgccgccugcccccacgccggcgccaagggcuucuacaagaaccucaucuggcucgucaagaagggcaacuccuaccccaagcucuccaaguccuacaucaacgacaagggcaaggagguccucguccucuggggcauccaccaccccuccaccuccgccgaccagcagucccucuaccagaacgccgacgccuacgucuucgucggcaccucccgcuacuccaagaaguucaagcccgagaucgccauccgccccaagguccgcgaccaggagggccgcaugaacuacuacuggacccucgucgagcccggcgacaagaucaccuucgaggccaccggcaaccucgucgccccccgcuacgccuucgccauggagcgcaacgccggcuccggcaucaucaucuccgacacccccguccacgacugcaacaccaccugccagacccccaagggcgccaucaacaccucccuccccuuccagaacauccaccccaucaccaucggcaagugccccaaguacgucaaguccaccaagcuccgccucgccaccggccuccgcaacguccccuccauccagucccgcggccucuucggcgccaucgccggcuucaucgagggcggcuggaccggcauggucgacggcugguacggcuaccaccaccagaacgagcagggcuccggcuacgccgccgaccucaaguccacccagaacgccaucgacaagaucaccaacaaggucaacuccgucaucgagaagaugaacacccaguucaccgccgucggcaaggaguucaaccaccucgagaagcgcaucgagaaccucaacaagaaggucgacgacggcuuccucgacaucuggaccuacaacgccgagcuccucguccuccucgagaacgagcgcacccucgacuaccacgacuccaacgucaagaaccucuacgagaagguccgcucccagcucaagaacaacgccaaggagaucggcaacggcugcuucgaguucuaccacaagugcgacaacaccugcauggaguccgucaagaacggcaccuacgacuaccccaaguacuccgaggaggccaagcucaaccgcgaggagaucgacggcgucaagcucgaguccacccgcaucuaccagauccucgccaucuacuccaccgucgccuccucccucguccucgucgucucccucggcgccaucuccuucuggaugugcuccaacggcucccuccagugccgcaucugcaucuga

SEQ ID NO: 105850 - RNA, 1701 nt, Artificial Sequence; identical to SEQ ID NO: 103108
  derived and/or modified CDS sequence (opt2) from hemagglutinin__InfluenzaA__AGB13520

SEQ ID NO: 105851 - RNA, 1701 nt, Artificial Sequence
  derived and/or modified CDS sequence (opt2) from hemagglutinin__InfluenzaA__AGB13530
augaaggccauccucgucguccuccucuacaccuucgccaccgccaacgccgacacccucugcaucggcuaccacgccaacaacuccaccgacaccgucgacaccguccucgagaagaacgucaccgucacccacuccgucaaccuccucgaggacaagcacaacggcaagcucugcaagcuccgcggcgucgccccccuccaccucggcaagugcaacaucgccggcuggauccucggcaaccccgagugcgagucccucuccaccgccuccuccugguccuacaucgucgagaccuccuccuccgacaacggcaccugcuaccccggcgacuucaucgacuacgaggagcuccgcgagcagcucuccuccgucuccuccuucgagcgcuucgagaucuuccccaagaccuccuccuggcccaaccacgacuccaacaagggcgucaccgccgccugcccccacgccggcgccaaguccuucuacaagaaccucaucuggcucgucaagaagggcaacuccuaccccaagcucaacaaguccuacaucaacgacaagggcaaggagguccucguccucuggggcauccaccaccccuccaccaccgccgaccagcagucccucuaccagaacgccgacgccuacgucuucgucggcaccucccgcuacuccaagaaguucaagcccgagaucgccauccgccccaagguccgcgaccaggagggccgcaugaacuacuacuggacccucgucgagcccggcgacaagaucaccuucgaggccaccggcaaccucgucgucccccgcuacgccuucgccauggagcgcaacgccggcuccggcaucaucaucuccgacacccccguccacgacugcaacaccaccugccagacccccaagggcgccaucaacaccucccuccccuuccagaacauccaccccaucaccaucggcaagugccccaaguacgucaaguccaccaagcuccgccucgccaccggccuccgcaacguccccuccauccagucccgcggccucuucggcgccaucgccggcuucaucgagggcggcuggaccggcauggucgacggcugguacggcuaccaccaccagaacgagcagggcuccggcuacgccgccgaccucaaguccacccagaacgccaucgacaagaucaccaacaaggucaacuccgucaucgagaagaugaacacccaguucaccgccgucggcaaggaguucaaccaccucgagaagcgcaucgagaaccucaacaagaaggucgacgacggcuuccucgacaucuggaccuacaacgccgagcuccucguccuccucgagaacgagcgcacccucgacuaccacgacuccaacgucaagaaccucuacgagaagguccgcaaccagcucaagaacaacgccaaggagaucggcaacggcugcuucgaguucuaccacaagugcgacaacaccugcauggaguccgucaagaacggcaccuacgacuaccccaaguacuccgaggaggccaagcucaaccgcgaggagaucaacggcgucaagcucgaguccacccgcaucuaccagauccucgccaucuacuccaccgucgccuccucccucguccucgucgucucccucggcgccaucuccuucuggaugugcuccaacggcucccuccagugccgcaucugcaucuga

SEQ ID NO: 105852 - RNA, 1701 nt, Artificial Sequence; identical to SEQ ID NO: 103122
  derived and/or modified CDS sequence (opt2) from hemagglutinin__InfluenzaA__AGB13540

SEQ ID NO: 105853 - RNA, 1701 nt, Artificial Sequence; identical to SEQ ID NO: 103086
  derived and/or modified CDS sequence (opt2) from hemagglutinin__InfluenzaA__AGB13550

SEQ ID NO: 105854 - RNA, 1701 nt, Artificial Sequence; identical to SEQ ID NO: 103086
  derived and/or modified CDS sequence (opt2) from hemagglutinin__InfluenzaA__AGB13560

SEQ ID NO: 105855 - RNA, 1701 nt, Artificial Sequence; identical to SEQ ID NO: 102903
  derived and/or modified CDS sequence (opt2) from hemagglutinin__InfluenzaA__AGB13570

SEQ ID NO: 105856 - RNA, 1701 nt, Artificial Sequence
  derived and/or modified CDS sequence (opt2) from hemagglutinin__InfluenzaA__AGB13580
augaaggccauccucgucguccuccucuacaccuucgccaccgccaacgccgacacccucugcaucggcuaccacgccaacaacuccaccgacaccgucgacaccguccucgagaagaacgucaccgucacccacuccgucaaccuccucgaggacaagcacaacggcaagcucugcaagcuccgcggcgucgccccccuccaccucggcaagugcaacaucgccggcuggauccucggcaaccccgagugcgagucccucuccaccgccuccuccugguccuacaucgucgagaccuccuccuccgacaacggcaccugcuaccccggcgacuucaucaacuacgaggagcuccgcgagcagcucuccuccgucuccuccuucgagcgcuucgagaucuuccccaagaccuccuccuggcccaaccacgacuccaacaagggcgucaccgccgccugcccccacgccggcgccaaguccuucuacaagaaccucaucuggcucgucaagaagggcaacuccuaccccaagcucuccaaguccuacaucaacgacaagggcaaggagguccucguccucuggggcauccaccaccccuccaccaccgccgaccagcagucccucuaccagaacgccgacgccuacgucuucgucggcaccucccgcuacuccaagaaguucaagcccgagaucgccauccgccccaagguccgcgaccaggagggccgcaugaacuacuacuggacccucgucgagcccggcgacaagaucaccuucgaggccaccggcaaccucgucgucccccgcuacgccuucgccauggagcgcaacgccggcuccggcaucaucaucuccgacacccccguccacgacugcaacaccaccugccagacccccaagggcgccaucaacaccucccuccccuuccagaacauccaccccaucaccaucggcaagugccccaaguacgucaaguccaccaagcuccgccucgccaccggccuccgcaacguccccuccauccagucccgcggccucuucggcgccaucgccggcuucaucgagggcggcuggaccggcauggucgacggcugguacggcuaccaccaccagaacgagcagggcuccggcuacgccgccgaccucaaguccacccagaacgccaucgacaagaucaccaacaaggucaacuccgucaucgagaagaugaacacccaguucaccgccgucggcaaggaguucaaccaccucgagaagcgcaucgagaaccucaacaagaaggucgacgacggcuuccucgacaucuggaccuacaacgccgagcuccucguccuccucgagaacgagcgcacccucgacuaccacgacuccaacgucaagaaccucuacgagaagguccgcaaccagcucaagaacaacgccaaggagaucggcaacggcugcuucgaguucuaccacaagugcaacaacaccugcauggaguccgucaagaacggcaccuacgacuaccccaaguacuccgaggaggccaagcucaaccgcgaggagaucgacggcgucaagcucgaguccacccgcaucuaccagauccucgccaucuacuccaccgucgccuccucccucguccucgucgucucccucggcgccaucuccuucuggaugugcuccaacggcucccuccagugccgcaucugcaucuga

SEQ ID NO: 105857 - RNA, 1701 nt, Artificial Sequence
  derived and/or modified CDS sequence (opt2) from hemagglutinin__InfluenzaA__AGB13590
augaaggccauccucgucguccuccucuacaccuucgccaccgccaacgccgacacccucugcaucggcuaccacgccaacaacuccaccgacaccgucgacaccguccucgagaagaacgucaccgucacccacuccgucaaccuccucgaggacaagcacaacggcaagcucugcaagcuccgcggcgucgccccccuccaccucggcaagugcaacaucgccggcuggauccucggcaaccccgagugcgagucccucuccaccgccuccuccugguccuacaucgucgagaccuccuccuccgacaacggcaccugcuaccccggcgacuucaucaacuacgaggagcuccgcgagcagcucuccuccgucuccuccuucgagcgcuucgagaucuuccccaagaccuccuccuggcccaaccacgacuccaacaagggcgucaccgccgccugcccccacgccggcgccaaguccuucuacaagaaccucaucuggcucgucaagaagggcaacuccuaccccaagcucucccaguccuacaucaacgacaagggcaaggagguccucguccucuggggcauccaccaccccuccaccaccgccgaccagcagucccucuaccagaacgccgacgccuacgucuucgucggcaccucccgcuacuccaagaaguucaagcccgagaucgccauccgccccaagguccgcgaccaggagggccgcaugaacuacuacuggacccucgucgagcccggcgacaagaucaccuucgaggccaccggcaaccucgucgucccccgcuacgccuucgccauggagcgcaacgccggcuccggcaucaucaucuccgacacccccguccacgacugcaacaccaccugccagacccccaagggcgccaucaacaccucccuccccuuccagaacauccaccccaucaccaucggcaagugccccaaguacgucaaguccaccaagcuccgccucgccaccggccuccgcaacguccccuccauccagucccgcggccucuucggcgccaucgccggcuucaucgagggcggcuggaccggcauggucgacggcugguacggcuaccaccaccagaacgagcagggcuccggcuacgccgccgaccucaaguccacccagaacgccaucgacaagaucaccaacaaggucaacuccgucaucgagaagaugaacacccaguucaccgccgucggcaaggaguucaaccaccucgagaagcgcaucgagaaccucaacaagaaggucgacgacggcuuccucgacaucuggaccuacaacgccgagcuccucguccuccucgagaacgagcgcacccucgacuaccacgacuccaacgucaagaaccucuacgagaagguccgcaaccagcucaagaacaacgccaaggagaucggcaacggcugcuucgaguucuaccacaagugcgacaacaccugcauggaguccgucaagaacggcaccuacgacuaccccaaguacuccgaggaggccaagcucaaccgcgaggagaucgacggcgucaagcucgaguccacccgcaucuaccagauccucgccaucuacuccaccgucgccuccucccucguccucgucgucucccucggcgccaucuccuucuggaugugcuccaacggcucccuccagugccgcaucugcaucuga

SEQ ID NO: 105858 - RNA, 1701 nt, Artificial Sequence
  derived and/or modified CDS sequence (opt2) from hemagglutinin__InfluenzaA__AGB13600
augaaggccauccucgucguccuccucuacaccuucgccaccgccaacgccgacacccucugcaucggcuaccacgccaacaacuccaccgacaccgucgacaccguccucgagaagaacgucaccgucacccacuccgucaaccuccucgaggacaagcacaacggcaagcucugcaagcuccgcggcgucgccccccuccaccucggcaagugcaacaucgccggcuggauccucggcaaccccgagugcgagucccucuccaccgccuccuccugguccuacaucgucgagaccuccuccuccgacaacggcaccugcuaccccggcgacuucaucaacuacgaggagcuccgcgagcagcucuccuccgucuccuccuucgagcgcuucgagaucuuccccaagaccuccuccuggcccaaccacgacuccaacaagggcgucaccgccgccugcccccacgccggcgccaaguccuucuacaagaaccucaucuggcucgucaagaagggcaacuccuaccccaagcucaacaaguccuacaucaacgacaagggcaaggagguccucguccucuggggcauccaccaccccuccaccaccgccgaccagcagucccucuaccagaacgccgacgccuacgucuucgucggcaccucccgcuacuccaagaaguucaagcccgagaucgccauccgccccaagguccgcgaccaggagggccgcaugaacuacuacuggacccucgucgagcccggcgacaagaucaccuucgaggccaccggcaaccucgucgucccccgcuacgccuucgccauggagcgcaacgccggcuccggcaucaucaucuccgacacccccguccacgacugcaacaccaccugccagacccccaagggcgccaucaacaccucccuccccuuccagaacauccaccccaucaccaucggcaagugccccaaguacgucaaguccaccaagcuccgccucgccaccggccuccgcaacguccccuccauccagucccgcggccucuucggcgccaucgccggcuucaucgagggcggcuggaccggcauggucgacggcugguacggcuaccaccaccagaacgagcagggcuccggcuacgccgccgaccucaaguccacccagaacgccaucgacaagaucaccaacaaggucaacuccgucaucgagaagaugaacacccaguucaccgccgucggcaaggaguucaaccaccucgagaagcgcaucgagaaccucaacaagaaggucgacgacggcuuccucgacaucuggaccuacaacgccgagcuccucguccuccucgagaacgagcgcacccucgacuaccacgacuccaacgucaagaaccucuacgagaagguccgcaaccagcucaagaacaacgccaaggagaucggcaacggcugcuucgaguucuaccacaagugcgacaacaccugcauggaguccgucaagaacggcaccuacgacuaccccaaguacuccgaggaggccaagcucaaccgcgaggagaucgacggcgucaagcucgaguccacccgcaucuaccagauccucgccaucuacuccaccgucgccuccucccucguccucgucgucucccucggcgccaucuccuucuggaugugcuccaacggcucccuccagugccgcaucugcaucuga

SEQ ID NO: 105859 - RNA, 1701 nt, Artificial Sequence; identical to SEQ ID NO: 102903
  derived and/or modified CDS sequence (opt2) from hemagglutinin__InfluenzaA__AGB13610

SEQ ID NO: 105860 - RNA, 1701 nt, Artificial Sequence; identical to SEQ ID NO: 103122
  derived and/or modified CDS sequence (opt2) from hemagglutinin__InfluenzaA__AGB13620

SEQ ID NO: 105861 - RNA, 1701 nt, Artificial Sequence; identical to SEQ ID NO: 102490
  derived and/or modified CDS sequence (opt2) from hemagglutinin__InfluenzaA__AGB13630

SEQ ID NO: 105862 - RNA, 1701 nt, Artificial Sequence
  derived and/or modified CDS sequence (opt2) from hemagglutinin__InfluenzaA__AGB13640
augaaggccauccucgucguccuccucuacaccuucgccaccgccaacgccgacacccucugcaucggcuaccacgccaacaacuccaccgacaccgucgacaccguccucgagaagaacgucaccgucacccacuccgucaaccuccucgaggacaagcacaacggcaagcucugcaagcuccgcggcgucgccccccuccaccucggcaagugcaacaucgccggcuggauccucggcaaccccgagugcgagucccucuccaccgccuccuccugguccuacaucgucgagaccuccuccuccgacaacggcaccugcuaccccggcgacuucaucgacuacgaggagcuccgcgagcagcucuccuccgucuccuccuucgagcgcuucgagaucuuccccaagaccuccuccuggcccaaccacgacuccaacaagggcgucaccaccgccugcccccacgccggcgccaaguccuucuacaagaaccucaucuggcucgucaagaagggcaacuccuaccccaagcucuccaaguccuacaucaacgacaagggcaaggagguccucguccucuggggcauccaccacccccccaccuccgccgaccagcagucccucuaccagaacgccgacgccuacgucuucgucggcaccucccgcuacuccaagaaguucaagcccgagaucgccauccgccccaagguccgcgaccaggagggccgcaugaacuacuacuggacccucgucgagcccggcgacaagaucaccuucgaggccaccggcaaccucgucgucccccgcuacgccuucgccauggagcgcaacgccggcuccggcaucaucaucuccgacacccccguccacgacugcaacaccaccugccagacccccaagggcgccaucaacaccucccuccccuuccagaacauccaccccaucaccaucggcaagugccccaaguacgucaaguccaccaagcuccgccucgccaccggccuccgcaacguccccuccauccagucccgcggccucuucggcgccaucgccggcuucaucgagggcggcuggaccggcauggucgacggcugguacggcuaccaccaccagaacgagcagggcuccggcuacgccgccgaccucaaguccacccagaacgccaucgacggcaucaccaacaaggucaacuccgucaucgagaagaugaacacccaguucaccgccgucggcaaggaguucaaccaccucgagaagcgcaucgagaaccucaacaagaaggucgacgacggcuuccucgacaucuggaccuacaacgccgagcuccucguccuccucgagaacgagcgcacccucgacuaccacgacuccaacgucaagaaccucuacgagaagguccgcucccagcucaagaacaacgccaaggagaucggcaacggcugcuucgaguucuaccacaagugcgacaacaccugcauggaguccgucaagaacggcaccuacgacuaccccaaguacuccgaggaggccaagcucaaccgcgaggagaucgacggcgucaagcucgaguccaccaugaucuaccagauccucgccaucuacuccaccgucgccuccucccucguccucaucgucucccucggcgccaucuccuucuggaugugcuccaacggcucccuccagugccgcaucugcaucuga

SEQ ID NO: 105863 - RNA, 1701 nt, Artificial Sequence
  derived and/or modified CDS sequence (opt2) from hemagglutinin__InfluenzaA__AGB13650
augaaggccauccucgucguccuccucuacaccuucgccaccgccaacgccgacacccucugcaucggcuaccacgccaacaacuccaccgacaccgucgacaccguccucgagaagaacgucaccgucacccacuccgucaaccuccucgaggacaagcacaacggcaagcucugcaagcuccgcggcgucgccccccuccaccucggcaagugcaacaucgccggcuggauccucggcaaccccgagugcgagucccucuccaccgccuccuccugguccuacaucgucgagaccuccuccuccgacaacggcaccugcuaccccggcgacuucaucgacuacgaggagcuccgcgagcagcucuccuccgucuccuccuucgagcgcuucgagaucuuccccaagaccuccuccuggcccaaccacgacuccaacaagggcgucaccaccgccugcccccacgccggcgccaaguccuucuacaagaaccucaucuggcucgucaagaagggcaacuccuaccccaagcucuccaaguccuacaucaacgacaagggcaaggagguccucguccucuggggcauccaccacccccccaccuccgccgaccagcagucccucuaccagaacgccgacgccuacgucuucgucggcaccucccgcuacuccaagaaguucaagcccgagaucgccauccgccccaagguccgcgaccaggagggccgcaugaacuacuacuggacccucgucgagcccggcgacaagaucaccuucgaggccaccggcaaccucgucgucccccgcuacgccuucgccauggagcgcaacgccggcuccggcaucaucaucuccgacacccccguccacgacugcaacaccaccugccagacccccaagggcgccaucaacaccucccuccccuuccagaacauccaccccaucaccaucggcaagugccccaaguacgucaaguccaccaagcuccgccucgccaccggccuccgcaacguccccuccauccagucccgcggccucuucggcgccaucgccggcuucaucgagggcggcuggaccggcauggucgacggcugguacggcuaccaccaccagaacgagcagggcuccggcuacgccgccgaccucaaguccacccagaacgccaucgacggcaucaccaacaaggucaacuccgucaucgagaagaugaacacccaguucaccgccgucggcaaggaguucaaccaccucgagaagcgcaucgagaaccucaacaagaaggucgacgacggcuuccucgacaucuggaccuacaacgccgagcuccucauccuccucgagaacgagcgcacccucgacuaccacgacuccaacgucaagaaccucuacgagaagguccgcucccagcucaagaacaacgccaaggagaucggcaacggcugcuucgaguucuaccacaagugcgacaacaccugcauggaguccgucaagaacggcaccuacgacuaccccaaguacuccgaggaggccaagcucaaccgcgaggagaucgacggcgucaagcucgaguccaccaugaucuaccagauccucgccaucuacuccaccgucgccuccucccucguccucaucgucucccucggcgccaucuccuucuggaugugcuccaacggcucccuccagugccgcaucugcaucuga

SEQ ID NO: 105864 - RNA, 1701 nt, Artificial Sequence; identical to SEQ ID NO: 102860
  derived and/or modified CDS sequence (opt2) from hemagglutinin__InfluenzaA__AGB13660

SEQ ID NO: 105865 - RNA, 1701 nt, Artificial Sequence; identical to SEQ ID NO: 102471
  derived and/or modified CDS sequence (opt2) from hemagglutinin__InfluenzaA__AGB13721

SEQ ID NO: 105866 - RNA, 1701 nt, Artificial Sequence; identical to SEQ ID NO: 102903
  derived and/or modified CDS sequence (opt2) from hemagglutinin__InfluenzaA__AGB13731

SEQ ID NO: 105867 - RNA, 1701 nt, Artificial Sequence
  derived and/or modified CDS sequence (opt2) from hemagglutinin__InfluenzaA__AGB51356
augaaggccauccuccucguccuccucugcaccuucgccgccaccaacgccgacacccucugcaucggcuaccacgccaacaacuccaccgacaccgucgacaccguccucgagaagaacgucaccgucacccacuccgucaaccuccucgaggaccgccacaacggcaagcucugcaagcucggcggcaucgccccccuccaccucggcaagugcaacaucgccggcuggcuccucggcaaccccgagugcgagcuccuccucaccgucuccuccugguccuacaucgucgagaccuccaacuccgacaacggcaccugcuaccccggcgacuucaucaacuacgaggagcuccgcgagcagcucuccuccgucuccuccuucgagcgcuucgagaucuuccccaagaccuccuccuggcccaaccacgagaccaaccgcggcgucaccgccgccugccccuacgccggcgccaacuccuucuaccgcaaccucaucuggcucgucgagaagggcaacuccuaccccaagcucuccaaguccuacgucaacaacaagggcaaggagguccucguccucuggggcauccaccacccccccaccuccaccgaccagcagucccucuaccagaacgccgacgccuacgucuucgucggcuccuccaaguacaaccgcaaguucaagcccgagaucgccgcccgccccaagguccgcggccaggccggccgcaugaacuacuacuggacccucaucgagcccggcgacaccaucaccuucgaggccaccggcaaccucgucgucccccgcuacgccuucgccaugaaccgcggcuccggcuccggcaucaucaucuccgacgcccccguccacgacugcaacaccaagugccagacccccaagggcgccaucaacaccucccuccccuuccagaacauccaccccgucaccaucggcgagugccccaaguacgucaaguccaccaagcuccgcauggccaccggccuccgcaacauccccuccauccagucccgcggccucuucggcgccaucgccggcuucaucgagggcggcuggaccggcaugaucgacggcugguacggcuaccaccaccagaacgagcagggcuccggcuacgccgccgaccagcgcuccacccagaacgccaucgacggcaucaccaacaaggucaacuccgucaucgagaagaugaacacccaguucaccgccgucggcaaggaguucaaccaccucgagaagcgcaucgagaaccucaacaagaaggucgacgacggcuuccucgacaucuggaccuacaacgccgagcuccucguccuccucgagaacgagcgcacccucgacuuccacgacuccaacgucaagaaccucuacgagaagguccgcucccagcuccgcaacaacgccaaggagaucggcaacggcugcuucgaguucuaccacaagugcgacgacaccugcauggaguccgucaagaacggcaccuacgacuaccccaaguacuccgaggaguccaagcucaaccgcgaggagaucgacggcgucaagcucgaguccacccgcaucuaccagauccucgccaucuacuccaccgucgccuccucccucguccuccucgucucccucggcgccaucuccuucuggaugugcuccaacggcucccuccagugccgcaucugcaucuga

SEQ ID NO: 105868 - RNA, 1701 nt, Artificial Sequence
  derived and/or modified CDS sequence (opt2) from hemagglutinin__InfluenzaA__AGB97269
augaaggccauccucgucguccuccucuacaccuucgccaccgccaacgccgacacccucugcaucggcuaccacgccaacaacuccaccgacaccgucgacaccguccucgagaagaacaucaccgucacccacuccgucaaccuccucgaggacaagcacaacggcaagcucugcaagcuccgcggcgucgccccccuccaccucggcaagugcaacaucgccggcuggauccucggcaaccccgagugcgagacccucuccaccgccuccuccugguccuacaucgucgagaccuccuccuccgacaacggcaccugcuaccccggcgacuucaucgacuacgaggagcuccgcgagcagcucuccuccgucuccuccuucgagcgcuucgagaucuuccccaagaccuccuccuggcccaaccacgacuccaacaagggcgucaccgccgccugcccccacgccggcgccaagggcuucuacaagaaccucaucuggcucgucaagaagggcaacuccuaccccaagcucuccaaguccuacaucaacgacaagggcaaggagguccucguccucuggggcauccaccaccccuccaccaccgccgaccagcagucccucuaccagaacgccgacaccuacgucuucgucggcaccucccgcuacuccaagaaguucaagcccgagaucgccauccgccccaagguccgcgaccaggagggccgcaugaacuacuacuggacccucgucgagcccggcgacaagaucaccuucgaggccaccggcaaccucgucgucccccgcuacgccuucgccauggagcgcgacgccggcuccggcaucaucaucuccgacacccccguccacgacugcaacaccaccugccagacccccaagggcgccaucaacaccucccuccccuuccagaacauccaccccaucaccaucggcaagugccccaaguacgucaaguccaccaagcuccgccucgccaccggccuccgcaacguccccuccauccagucccgcggccucuucggcgccaucgccggcuucaucgagggcggcuggaccggcauggucgacggcugguacggcuaccaccaccagaacgagcagggcuccggcuacgccgccgaccucaaguccacccagaacgccaucgacaagaucaccaacaaggucaacuccgucaucgagaagaugaacacccaguucaccgccgucggcaaggaguucaaccaccucgagaagcgcaucgagaaccucaacaagaaggucgacgacggcuuccucgacaucuggaccuacaacgccgagcuccucguccuccucgagaacgagcgcacccucgacuaccacgacuccaacgucaagaaccucuacgagaagguccgcaaccagcucaagaacaacgccaaggagaucggcaacggcugcuucgaguucuaccacaagugcgacaacaccugcauggaguccgucaagaacggcaccuacgacuaccccaaguacuccgaggaggccaagcucaaccgcgaggagaucgacggcgucaagcucgaguccacccgcaucuaccagauccucgccaucuacuccaccgccgccuccucccucguccucgucgucucccucggcgccaucuccuucuggaugugcuccaacggcucccuccagugccgcaucugcaucuga

SEQ ID NO: 105869 - RNA, 1701 nt, Artificial Sequence; identical to SEQ ID NO: 104222
  derived and/or modified CDS sequence (opt2) from hemagglutinin__InfluenzaA__AGB97273

SEQ ID NO: 105870 - RNA, 1701 nt, Artificial Sequence
  derived and/or modified CDS sequence (opt2) from hemagglutinin__InfluenzaA__AGB97288
augaagaccaucaucgcccucggcuacauccucugccucgucuucgcccagaagcuccccggcaacgacaacuccaccgccacccucugccucggccaccacgccguccccaacggcaccaucgucaagaccaucaccaacgaccgcaucgaggucaccaacgccaccgagcucguccagaacuccuccaucggcgagaucugcgacuccccccaccagauccucgacggcaagaacugcacccucaucgacgcccuccucggcgacccccagugcgacggcuuccagaacaagaagugggaccucuucaucgagcgcuccaaggccuacuccaacugcuaccccuacgacguccccgacuacgccucccuccgcucccucgucgccuccuccggcacccucgaguucaacaacgaguccuucaacuggaccggcgucacccagaacggcaccuccuccgccugcauccgccgcuccaacuccuccuucuucucccgccucaacuggcucacccaccucaacuucaaguaccccgcccucaacgucaccaugcccaacaacgagcaguucgacaagcucuacaucuggggcguccaccaccccggcaccgacaaggaccagaucuuccucuacgccaaguccuccggccgcaucaccgucuccaccaagcgcucccagcaggccgucauccccaacaucggcucccgcccccgcauccgcaacauccccucccgcaucuccaucuacuggaccaucgucaagcccggcgacauccuccucaucaacuccaccggcaaccucaucgccccccgcggcuacuucaagauccgcuccggcaaguccuccaucaugcgcuccgacgcccccaucggcaagugcaaguccgagugcaucacccccaacggcuccauccccaacgacaagcccuuccagaacgucaaccgcaucaccuacggcgccugcccccgcuacgucaagcaguccacccucaagcucgccaccggcaugcgcaacguccccgagaagcagacccgcggcaucuucggcgccaucgccggcuucaucgagaacggcugggagggcauggucgacggcugguacggcuuccgccaccagaacuccgagggccgcggccaggccgccgaccucaaguccacccaggccgccaucgaccagaucaacggcaagcucaaccgccucaucggcaagaccaacgagaaguuccaccagaucgagaaggaguucuccgaggucgagggccgcauccaggaccucgagaaguacgucgaggacaccaagaucgaccucugguccuacaacgccgagcuccucgucgcccucgagaaccagcacaccaucgaccucaccgacuccgagaugaacaagcucuucgagaagaccaagaagcagcuccgcgagaacgccgaggacaugggcaacggcugcuucaagaucuaccacaagugcgacaacgccugcaucggcuccauccgcaacggcaccuacgaccacaacgucuaccgcgacgaggcccucaacaaccgcuuccagaucaagggcgucgagcucaaguccggcuacaaggacuggauccucuggaucuccuucgccaucuccugcuuccuccucugcgucgcccuccucggcuucaucaugugggccugccagaagggcaacauccgcugcaacaucugcaucuga

SEQ ID NO: 105871 - RNA, 1701 nt, Artificial Sequence
  derived and/or modified CDS sequence (opt2) from hemagglutinin__InfluenzaA__AGB97292
augaagaccaucaucgcccucuccuacauccucugccucgucuucgcccaggagcuccccggcaacgacgacuccaccgccacccucugccucggccaccacgccguccccaacggcaccaucgucaagaccaucaccaacgaccagaucgaggucaccaacgccaccgagcucguccaguccuccuccaccggcgagaucugcaacuccccccaccagauccucgacggcgagaacugcacccucaucgacgcccuccucggcgacccccagugcgacggcuuccagaacaagaagugggaccucuucgucgagcgcuccaaggcccacuccaacugcuaccccuacgacguccccgacuacgccucccuccgcucccucgucgccuccuccggcacccucgaguucaacaacgaguccuucaacuggaccggcgucacccagaacggcaccuccuccgccugcauccgccgcuccaacaacuccuucuucucccgccucaacuggcucacccaccucaacuucaaguaccccgcccucaacgucaccaugcccaacaacgagcaguucgacaagcucuacaucuggggcguccaccaccccggcaccgacaaggaccagaucuuccucuacgcccaggccuccggccgcaucaccgucuccaccaagcgcucccagcaggccgucauccccaacaucggcucccgcccccgcguccgcaacauccccucccgcgucuccaucuacuggaccaucgucaagcccggcgacauccuccucaucaacuccaccggcaaccucaucgccccccgcggcuacuucaagauccgcuccggcaaguccuccaucaugcgcuccgacgcccccaucggcaagugcaacuccgccugcaucacccccaacggcuccauccccaacgacaagcccuuccagaacgucaaccgcaucaccuacggcgccugcccccgcuacgucaagcagaacacccucaagcucgccaccggcaugcgcaacguccccgagaagcagacccgcggcaucuucggcgccaucgccggcuucaucgagaacggcugggagggcauggucgacggcugguacggcuuccgccaccagaacuccgagggccgcggccaggccgccgaccucaaguccacccaggccgccaucgaccagaucaacggcaagcucaaccgccucaucggcaagaccaacgagaaguuccaccagaucgagaaggaguucuccgaggucgagggccgcauccaggaccucgagaaguacgucgaggacaccaagaucgaccucugguccuacaacgccgagcuccucgucgcccucgagaaccagcacaccaucgaccucaccgacuccgagaugaacaagcucuucgagaagaccaagaagcagcuccgcgagaacgccgaggacaugggcaacggcugcuucaagaucuaccacaagugcgacaacgccugcaucggcuccauccgcaacggcaccuacgaccacgacgucuaccgcgacgaggcccucaacaaccgcuuccagaucaagggcgucgagcucaaguccggcuacaaggacuggauccucuggaucuccuucgccaucuccugcuuccuccucugcgucgcccuccucggcuucaucaugugggccugccagaagggcaacauccgcugcaacaucugcaucuga

SEQ ID NO: 105872 - RNA, 1701 nt, Artificial Sequence
  derived and/or modified CDS sequence (opt2) from hemagglutinin__InfluenzaA__AGB97300
augaagaccaucaucgcccucuccuacauccucugccucgucuucgcccagaagcuccccggcaacgacaacuccaccgccacccucugccucggccaccacgccguccccaacggcaccaucgucaagaccaucaccaacgaccgcaucgaggucaccaacgccaccgagcucguccagaacuccuccaucggcgagaucugcgacuccccccaccagauccucgacggcgagaacugcacccucaucgacgcccuccucggcgacccccagugcgacggcuuccagaacaagaagugggaccucuucgucgagcgcuccaaggccuacuccaacugcuaccccuacgacguccccgacuacgccucccuccgcucccucgucgccuccuccggcacccucgaguucaacaacgaguccuucaacuggaccggcgucacccagaacggcaccuccuccgccugcauccgccgcuccaacuccuccuucuucucccgccucaacuggcucacccaccucaacuucaaguaccccgcccucaacgucaccaugcccaacaacgagcaguucgacaagcucuacaucuggggcguccaccaccccggcaccgacaaggaccagaucuuccucuacgcccaguccuccggccgcaucaccgucuccaccaagcgcucccagcaggccgucauccccaacaucggcucccgcccccgcauccgcaacauccccucccgcaucuccaucuacuggaccaucgucaagcccggcgacauccuccucaucaacuccaccggcaaccucaucgccccccgcggcuacuucaagauccgcuccggcaaguccuccaucaugcgcuccgacgcccccaucggcaagugcaaguccgagugcaucacccccaacggcuccauccccaacgacaagcccuuccagaacgucaaccgcaucaccuacggcgccugcccccgcuacgucaagcaguccacccucaagcucgccaccggcaugcgcaacguccccgagaagcagacccgcggcaucuucggcgccaucgccggcuucaucgagaacggcugggagggcauggucgacggcugguacggcuuccgccaccagaacuccgagggccgcggccaggccgccgaccucaaguccacccaggccgccaucgaccagaucaacggcaagcucaaccgccucaucggcaagaccaacgagaaguuccaccagaucgagaaggaguucuccgaggucgagggccgcauccaggaccucgagaaguacgucgaggacaccaagaucgaccucugguccuacaacgccgagcuccucgucgcccucgagaaccagcacaccaucgaccucaccgacuccgagaugaacaagcucuucgagaagacccgcaagcagcuccgcgagaacgccgaggacaugggcaacggcugcuucaagaucuaccacaagugcgacaacgccugcaucggcuccauccgcaacggcaccuacgaccacgacgucuaccgcgacgaggcccucaacaaccgcuuccagaucaagggcgucgagcucaaguccggcuacaaggacuggauccucuggaucuccuucgccaucuccugcuuccuccucugcgucgcccuccucggcuucaucaugugggccugccagaagggcaacauccgcugcaacaucugcaucuga

SEQ ID NO: 105873 - RNA, 1701 nt, Artificial Sequence
  derived and/or modified CDS sequence (opt2) from hemagglutinin__InfluenzaA__AGE89267
augaaggccauccucaucguccuccucuacaccuucgccaccgccaacgccgacacccucugcaucggcuaccacgccaacaacuccaccgacaccgucgacaccguccucgagaagaacgucaccgucacccacuccgucgaccuccucgaggacaagcacaacggcaagcucugcaagcuccgcggcgucgccccccuccaccucggcaagugcaacaucgccggcuggauccucggcaaccccgagugcgagucccucuccaccgccuccuccugguccuacaucgucgagaccuccuccuccgacaacggcaccugcuaccccggcgacuucaucgacuacgaggagcuccgcgagcagcucuccuccgucuccuccuucgagcgcuucgagaucuuccccaagaccuccuccuggcccaaccacgacuccaacaagggcgucaccgccgccugcccccacgccggcgagaaguccuucuacaagaaccucaucuggcucgucaagaagggcaacuccuaccccaagcucaacaaguccuacaucaacgacaagggcaaggagguccucguccucuggggcauccaccaccccuccaccuccaccgaccagcagucccucuaccagaacgccgacgccuacgucuucgucggcaccucccgcuacuccaagaaguucaagcccgagaucgccauccgccccaagguccgcgaccaggagggccgcaugaacuacuacuggacccucgucgagcccggcgacaagaucaccuucgaggccaccggcaaccucgucgucccccgcuacgccuucgccauggagcgcaacgccggcuccggcaucaucaucuccgacacccccauccacgacugcaacaccaccugccagacccccaagggcgccaucaacaccucccuccccuuccagaacauccaccccaucaccaucggcaagugccccaaguacgucaaguccaccaagcuccgccucgccaccggccuccgcaacguccccuccauccagucccgcggccucuucggcgccaucgccggcuucaucgagggcggcuggaccggcauggucgacggcugguacggcuaccaccaccagaacgagcagggcuccggcuacgccgccgaccucaaguccacccagaacgccaucgacgagaucaccaacaaggucaacuccgucaucgagaagaugaacacccaguucaccgccgucggcaaggaguucaaccaccucgagaagcgcaucgagaaccucaacaagaaggucgacgacggcuuccucgacaucuggaccuacaacgccgagcuccucguccuccucgagaacgagcgcacccucgacuaccacgacuccaacgucaagaaccucuacgagaaggucaagucccagcucaagaacaacgccaaggagaucggcaacggcugcuucgaguucuaccacaagugcgacaacaccugcauggaguccgucaagaacggcaccuacgacuaccccaaguacuccgaggaggccaagcucaaccgcgagaagaucgacggcgucaagcucgaguccacccgcaucuaccagauccucgccaucuacuccaccgucgccuccucccucguccucgucgucucccucggcgccaucuccuucuggaugugcuccaacggcucccuccagugccgcaucugcaucuga

SEQ ID NO: 105874 - RNA, 1701 nt, Artificial Sequence
  derived and/or modified CDS sequence (opt2) from hemagglutinin__InfluenzaA__AGE89277
augaaggccauccucaucguccuccucuacaccuucgccaccgccaacgccgacacccucugcaucggcuaccacgccaacaacuccaccgacaccgucgacaccguccucgagaagaacgucaccgucacccacuccgucgaccuccucgaggacaagcacaacggcaagcucugcaagcuccgcggcgucgccccccuccaccucggcaagugcaacaucgccggcuggauccucggcaaccccgagugcgagucccucuccaccgccuccuccugguccuacaucgucgagaccuccuccuccgacaacggcaccugcuaccccggcgacuucaucgacuacgaggagcuccgcgagcagcucaacuccgucuccuccuucgagcgcuucgagaucuuccccaagaccuccuccuggcccaaccacgacuccaacaagggcgucaccgccgccugcccccacgccggcgagaaguccuucuacaagaaccucaucuggcucgucaagaagggcaacuccuaccccaagcucaacaaguccuacaucaacgacaagggcaaggagguccucguccucuggggcauccaccaccccuccaccuccaccgaccagcagucccucuaccagaacgccgacgccuacgucuucgucggcaccucccgcuacuccaagaaguucaagcccgagaucgccauccgccccaagguccgcgaccaggagggccgcaugaacuacuacuggacccucgucgagcccggcgacaagaucaccuucgaggccaccggcaaccucgucgucccccgcuacgccuucgccauggagcgcaacgccggcuccggcaucaucaucuccgacacccccauccacgacugcaacaccaccugccagacccccaagggcgccaucaacaccucccuccccuuccagaacauccaccccaucaccaucggcaagugccccaaguacgucaaguccaccaagcuccgccucgccaccggccuccgcaacguccccuccauccagucccgcggccucuucggcgccaucgccggcuucaucgagggcggcuggaccggcauggucgacggcugguacggcuaccaccaccagaacgagcagggcuccggcuacgccgccgaccucaaguccacccagaacgccaucgacgagaucaccaacaaggucaacuccgucaucgagaagaugaacacccaguucaccgccgucggcaaggaguucaaccaccucgagaagcgcaucgagaaccucaacaagaaggucgacgacggcuuccucgacaucuggaccuacaacgccgagcuccucguccuccucgagaacgagcgcacccucgacuaccacgacuccaacgucaagaaccucuacgagaaggucaagucccagcucaagaacaacgccaaggagaucggcaacggcugcuucgaguucuaccacaagugcgacaacaccugcauggaguccgucaagaacggcaccuacgacuaccccaaguacuccgaggaggccaagcucaaccgcgagaagaucgacggcgucaagcucgaguccacccgcaucuaccagauccucgccaucuacuccaccgucgccuccucccucguccucgucgucucccucggcgccaucuccuucuggaugugcuccaacggcucccuccagugccgcaucugcaucuga

SEQ ID NO: 105875 - RNA, 1701 nt, Artificial Sequence; identical to SEQ ID NO: 104392
  derived and/or modified CDS sequence (opt2) from hemagglutinin__InfluenzaA__AGE89287

SEQ ID NO: 105876 - RNA, 1701 nt, Artificial Sequence
  derived and/or modified CDS sequence (opt2) from hemagglutinin__InfluenzaA__AGE89298
augaaggccauccucgucguccuccucuacaccuucgccaccgccaacgccgacacccucugcaucggcuaccacgccaacaacuccaccgacaccgucgacaccguccucgagaagaacgucaccgucacccacuccgucaaccuccucgaggacaagcacaacggcaagcucugcaagcuccgcggcgucgccccccuccaccucggcaagugcaacaucgccggcuggauccucggcaaccccgagugcgagucccucuccaccgccuccuccugguccuacaucgucgagaccuccuccuccgacaacggcaccugcuaccccggcgacuucaucgacuacgaggagcuccgcgagcagcucuccuccgucuccuccuucgagcgcuucgagaucuuccccaagaccuccuccuggcccaaccacgacuccaacaagggcgucaccgccgccugcccccacgccggcgccaagggcuucuacaagaaccucaucuggcucgucaagaagggcaacuccuaccccaagcucuccaaguccuacaucaacgacaagggcaaggagguccucguccucuggggcauccaccaccccuccaccaccgccgaccagcagucccucuaccagaacgccgacaccuacgucuucgucggcaccucccgcuacuccaagaaguucaagcccgagaucgccauccgccccaagguccgcgaccaggagggccgcaugaacuacuacuggacccucgucgagcccggcgacaagaucaccuucgaggccaccggcaaccucgucgucccccgcuacgccuucgccauggagcgcaacgccggcuccggcaucaucaucuccgacacccccguccacgacugcaacaccaccugccagacccccaagggcgccaucaacaccucccuccccuuccagaacauccaccccaucaccaucggcaagugccccaaguacgucaaguccaccaagcuccgccucgccaccggccuccgcaacguccccuccauccagucccgcggccucuucggcgccaucgccggcuucaucgagggcggcuggaccggcauggucgacggcugguacggcuaccaccaccagaacgagcagggcuccggcuacgccgccgaccucaaguccacccagaacgccaucgacaagaucaccaacaaggucaacuccgucaucgagaagaugaacacccaguucaccgccgucggcaaggaguucaaccaccucgagaagcgcaucgagaaccucaacaagaaggucgacgacggcuuccucgacaucuggaccuacaacgccgagcuccucguccuccucgagaacgagcgcacccucgacuaccacgacuccaacgucaagaaccucuacgagaagguccgcaaccagcucaagaacaacgccaaggagaucggcaacggcugcuucgaguucuaccacaagugcgacaacaccugcauggaguccgucaagaacggcaccuacgacuaccccaaguacuccgaggaggccaagcucaaccgcgaggagaucgacggcgucaagcucgaguccacccgcaucuaccagauccucgccaucuacuccaccgucgccuccucccucauccucgucgucucccucggcgccaucuccuucuggaugugcuccaacggcucccuccagugccgcaucugcaucuga

SEQ ID NO: 105877 - RNA, 1701 nt, Artificial Sequence; identical to SEQ ID NO: 102945
  derived and/or modified CDS sequence (opt2) from hemagglutinin__InfluenzaA__AGE89308

SEQ ID NO: 105878 - RNA, 1701 nt, Artificial Sequence; identical to SEQ ID NO: 104387
  derived and/or modified CDS sequence (opt2) from hemagglutinin__InfluenzaA__AGE89318

SEQ ID NO: 105879 - RNA, 1701 nt, Artificial Sequence
  derived and/or modified CDS sequence (opt2) from hemagglutinin__InfluenzaA__AGE89329
augaagaccaucaucgcccucuccuacauccucugccucgucuucgcccagaagcuccccggcaacgacgacuccaccgccacccucugccucggccaccacgccguccccaacggcaccaucgucaagaccaucaccaacgaccagaucgaggucaccaacgccaccgagcucguccaguccuccuccaccggcgagaucugcaacuccccccaccagauccucgacggcgagaacugcacccucaucgacgcccuccucggcgacccccagugcgacggcuuccagaacaagaagugggaccucuucgucgagcgcuccaaggcccacuccaacugcuaccccuacgacguccccgacuacgccucccuccgcucccucgucgccuccuccggcacccucgaguucaacaacgaguccuucaacuggaccggcgucacccagaacggcaccuccuccgccugcauccgccgcuccaacaacuccuucuucucccgccucaacuggcucacccaccucaacuucaaguaccccgcccucaacgucaccaugcccaacaacgagcaguucgacaagcucuacaucuggggcguccaccaccccggcaccgacaaggaccagaucuuccucuacgcccaggccuccggccgcaucaccgucuccaccaagcgcucccagcaggccgucauccccaacaucggcucccgcccccgcguccgcaacauccccucccgcgucuccaucuacuggaccaucgucaagcccggcgacauccuccucaucaacuccaccggcaaccucaucgccccccgcggcuacuucaagauccgcuccggcaaguccuccaucaugcgcuccgacgcccccaucggcaagugcaacuccgccugcaucacccccaacggcuccauccccaacgacaagcccuuccagaacgucaaccgcaucaccuacggcgccugcccccgcuacgucaagcagaacacccucaagcucgccaccggcaugcgcaacguccccgagaagcagacccgcggcaucuucggcgccaucgccggcuucaucgagaacggcugggagggcauggucgacggcugguacggcuuccgccaccagaacuccgagggccgcggccaggccgccgaccucaaguccacccaggccgccaucgaccagaucaacggcaagcucaaccgccucaucggcaagaccaacgagaaguuccaccagaucgagaaggaguucuccgaggucgagggccgcauccaggaccucgagaaguacgucgaggacaccaagaucgaccucugguccuacaacgccgagcuccucgucgcccucgagaaccagcacaccaucgaccucaccgacuccgagaugaacaagcucuucgagaagaccaagaagcagcuccgcgagaacgccgaggacaugggcaacggcugcuucaagaucuaccacaagugcgacaacgccugcaucggcuccauccgcaacggcaccuacgaccacgacgucuaccgcgacgaggcccucaacaaccgcuuccagaucaagggcgucgagcucaaguccggcuacaaggacuggauccucuggaucuccuucgccaucuccugcuuccuccucugcgucgcccuccucggcuucaucaugugggccugccagaagggcaacauccgcugcaacaucugcaucuga

SEQ ID NO: 105880 - RNA, 1701 nt, Artificial Sequence; identical to SEQ ID NO: 102490
  derived and/or modified CDS sequence (opt2) from hemagglutinin__InfluenzaA__AGE89340

SEQ ID NO: 105881 - RNA, 1701 nt, Artificial Sequence; identical to SEQ ID NO: 104390
  derived and/or modified CDS sequence (opt2) from hemagglutinin__InfluenzaA__AGE89350

SEQ ID NO: 105882 - RNA, 1701 nt, Artificial Sequence
  derived and/or modified CDS sequence (opt2) from hemagglutinin__InfluenzaA__AGE89361
augaaggccauccucgucguccuccucuacaccuucgccaccgccaacgccgacacccucugcaucggcuaccacgccaacaacuccaccgacaccgucgacaccguccucgagaagaacgucaccgucacccacuccgucaaccuccucgaggacaagcacaacggcaagcucugcaagcuccgcggcgucgccccccuccaccucggcaagugcaacaucgccggcuggauccucggcaaccccgagugcgagucccucuccaccgccuccuccugguccuacaucgucgagaccuccuccuccgacaacggcaccugcuaccccggcgacuucaucaacuacgaggagcuccgcgagcagcucuccuccgucuccuccuucgagcgcuucgagaucuuccccaagaccuccuccuggcccaaccacgacuccaacaagggcgucaccgccgccugcccccacgccggcgccaaguccuucuacaagaaccucaucuggcucgucaagaagggcaacuccuaccccaagcucuccaaguccuacaucaacgacaagggcaaggagguccucguccucuggggcauccaccaccccuccaccaccaccgaccagcagucccucuaccagaacgccgacgccuacgucuucgucggcaccucccgcuacuccaagaaguucaagcccgagaucgccauccgccccaagguccgcgaccaggagggccgcaugaacuacuacuggacccucgucgagcccggcgacaagaucaccuucgaggccaccggcaaccucgucgucccccgcuacgccuucgccauggagcgcaacgccggcuccggcaucaucaucuccgacacccccguccacgacugcaacaccaccugccagacccccaagggcgccaucaacaccucccuccccuuccagaacauccaccccaucaccaucggcaagugccccaaguacgucaaguccaccaagcuccgccucgccaccggccuccgcaacguccccuccauccagucccgcggccucuucggcgccaucgccggcuucaucgagggcggcuggaccggcauggucgacggcugguacggcuaccaccaccagaacgagcagggcuccggcuacgccgccgaccucaaguccacccagaacgccaucgacaagaucaccaacaaggucaacuccgucaucgagaagaugaacacccaguucaccgccgucggcaaggaguucaaccaccucgagaagcgcaucgagaaccucaacaagaaggucgacgacggcuuccucgacaucuggaccuacaacgccgagcuccucguccuccucgagaacgagcgcacccucgacuaccacgacuccaacgucaagaaccucuacgagaagguccgcaaccagcucaagaacaacgccaaggagaucggcaacggcugcuucgaguucuaccacaagugcgacaacaccugcauggaguccgucaagaacggcaccuacgacuaccccaaguacuccgaggaggccaagcucaaccgcgaggagaucgacggcgucaagcucgaguccacccgcaucuaccagauccucgccaucuacuccaccgucgccuccucccucguccucgucgucucccucggcgccaucuccuucuggaugugcuccaacggcucccuccagugccgcaucugcaucuga

SEQ ID NO: 105883 - RNA, 1701 nt, Artificial Sequence; identical to SEQ ID NO: 104387
  derived and/or modified CDS sequence (opt2) from hemagglutinin__InfluenzaA__AGE89371

SEQ ID NO: 105884 - RNA, 1701 nt, Artificial Sequence
  derived and/or modified CDS sequence (opt2) from hemagglutinin__InfluenzaA__AGE89382
augaaggccauccucgucguccuccucuacaccuucgccaccgccaacgccgacacccucugcaucggcuaccacgccaacaacuccaccgacaccgucgacaccguccucgagaagaacgucaccgucacccacuccgucaaccuccucgaggacaagcacaacggcaagcucugcaagcuccgcggcgucgccccccuccaccucggcaagugcaacaucgccggcuggauccucggcaaccccgagugcgagucccucuccaccgccuccuccugguccuacaucgucgagaccuccuccuccgacaacggcaccugcuaccccggcgacuucaucaacuacgaggagcuccgcgagcagcucuccuccgucuccuccuucgagcgcuucgagaucuuccccaagaccuccuccuggcccaaccacgacuccaacaagggcgucaccgccgccugcccccacgccggcgccaaguccuucuacaagaaccucaucuggcucgucaagaagggcaacuccuaccccaagcucuccaaguccuacaucaacgacaagggcaaggagguccucguccucuggggcauccaccaccccuccaccuccgccgaccagcagucccucuaccagaacgccgacgccuacgucuucgucggcaccuccaaguacuccaagaaguucaagcccgagaucgccguccgccccaagguccgcgaccaggagggccgcaugaacuacuacuggacccucgucaagcccggcgacaagaucaccuucgaggccaccggcaaccuccucgucccccgcuacgccuucgccauggagcgcaacgccggcuccggcaucaucaucuccgacacccccguccacgacugcaacaccaccugccagacccccaagggcgccaucaacaccucccuccccuuccagaacauccaccccaucaccaucggcaagugccccaaguacgucaaguccaccaagcuccgccucgccaccggccuccgcaacguccccuccauccagucccgcggccucuucggcgccaucgccggcuucaucgagggcggcuggaccggcauggucgacggcugguacggcuaccaccaccagaacgagcagggcuccggcuacgccgccgaccucaaguccacccagaacgccaucgacaagaucaccaacaaggucaacuccgucaucgagaagaugaacacccaguucaccgccgucggcaaggaguucaaccaccucgagaagcgcaucgagaaccucaacaagaaggucgacgacggcuuccucgacaucuggaccuacaacgccgagcuccucguccuccucgagaacgagcgcacccucgacuaccacgacuccaacgucaagaaccucuacgagaagguccgcucccagcucaagaacaacgccaaggagaucggcaacggcugcuucgaguucuaccacaagugcgacaacaccugcauggaguccgucaagaacggcaccuacgacuaccccaaguacuccgaggaggccaagcucaaccgcgaggagaucgacggcgucaagcucgaguccacccgcaucuaccagauccucgccaucuacuccaccgucgccuccucccucguccucgucgucucccucggcgccaucuccuucuggaugugcuccaacggcucccuccagugccgcaucugcaucuga

SEQ ID NO: 105885 - RNA, 1701 nt, Artificial Sequence
  derived and/or modified CDS sequence (opt2) from hemagglutinin__InfluenzaA__AGE89392
augaagaccaucaucgcccucuccuacauccucugccucgucuucgcccaggagcuccccggcaacgacaacuccaccgccacccucugccucggccaccacgccguccccaacggcaccaucgucaagaccaucaccaacgaccagaucgaggucaccaacgccaccgagcucguccaguccuccuccaccggcgagaucugcaacuccccccaccagauccucgacggcgagaacugcacccucaucgacgcccuccucggcgacccccagugcgacggcuuccagaacaagaagugggaccucuucgucgagcgcuccaaggcccacuccaacugcuaccccuacgacguccccgacuacgccucccuccgcucccucgucgccuccuccggcacccucgaguucaacaacgaguccuucaacuggaccggcgucacccagaacggcaccuccuccgccugcauccgccgcuccaacaacuccuucuucucccgccucaacuggcucacccaccucaacuucaaguaccccgcccucaacgucaccaugcccaacaacgagcaguucgacaagcucuacaucuggggcguccaccaccccggcaccgacaaggaccagaucuuccucuacgcccaggccuccggccgcaucaccgucuccaccaagcgcucccagcaggccgucauccccaacaucggcucccgcccccgcguccgcaacauccccucccgcgucuccaucuacuggaccaucgucaagcccggcgacauccuccucaucaacuccaccggcaaccucaucgccccccgcggcuacuucaagauccgcuccggcaaguccuccaucaugcgcuccgacgcccccaucggcaagugcaacuccgccugcaucacccccaacggcuccauccccaacgacaagcccuuccagaacgucaaccgcaucaccuacggcgccugcccccgcuacgucaagcagaacacccucaagcucgccaccggcaugcgcaacguccccgagaagcagacccgcggcaucuucggcgccaucgccggcuucaucgagaacggcugggagggcauggucgacggcugguacggcuuccgccaccagaacuccgagggccgcggccaggccgccgaccucaaguccacccaggccgccaucgaccagaucaacggcaagcucaaccgccucaucggcaagaccaacgagaaguuccaccagaucgagaaggaguucuccgaggucgagggccgcauccaggaccucgagaaguacgucgaggacaccaagaucgaccucugguccuacaacgccgagcuccucgucgcccucgagaaccagcacaccaucgaccucaccgacuccgagaugaacaagcucuucgagaagaccaagaagcagcuccgcgagaacgccgaggacaugggcaacggcugcuucaagaucuaccacaagugcgacaacgccugcaucggcuccauccgcaacggcaccuacgaccacgacgucuaccgcgacgaggcccucaacaaccgcuuccagaucaagggcgucgagcucaaguccggcuacaaggacuggauccucuggaucuccuucgccaucuccugcuuccuccucugcgucgcccuccucggcuucaucaugugggccugccagaagggcaacauccgcugcaacaucugcaucuga

SEQ ID NO: 105886 - RNA, 1701 nt, Artificial Sequence; identical to SEQ ID NO: 105873
  derived and/or modified CDS sequence (opt2) from hemagglutinin__InfluenzaA__AGE89422

SEQ ID NO: 105887 - RNA, 1701 nt, Artificial Sequence; identical to SEQ ID NO: 104370
  derived and/or modified CDS sequence (opt2) from hemagglutinin__InfluenzaA__AGE89719

SEQ ID NO: 105888 - RNA, 1701 nt, Artificial Sequence
  derived and/or modified CDS sequence (opt2) from hemagglutinin__InfluenzaA__AGE89730
augaaggccauccucgucguccuccucuacaccuucgccaccgccaacgccgacacccucugcaucggcuaccacgccaacaacuccaccgacaccgucgacaccguccucgagaagaacgucaccgucacccacuccgucaaccuccucgaggacaagcacaacggcaagcucugcaagcuccgcggcgucgccccccuccaccucggcaagugcaacaucgccggcuggauccucggcaaccccgagugcgagucccucuccaccgccuccuccugguccuacaucgucgagaccuccuccuccgacaacggcaccugcuaccccggcgacuucaucaacuacgaggagcuccgcgagcagcucuccuccgucuccuccuucgagcgcuucgagaucuuccccaagaccuccuccuggcccaaccacgacuccaacaagggcgucaccgccgccugcccccacgccggcgccaaguccuucuacaagaaccucaucuggcucgucaagaagggcaacuccuaccccaagcucuccaaguccuacaucaacgacaagggcaaggagguccucguccucuggggcauccaccaccccuccaccuccgccgaccagcagucccucuaccagaacgccgacgccuacgucuucgucggcaccuccaaguacuccaagaaguucaagcccgagaucgccguccgccccaagguccgcgaccaggagggccgcaugaacuacuacuggacccucgucgagcccggcgacaagaucaccuucgaggccaccggcaaccuccucgucccccgcuacgccuucgccauggagcgcaacgccggcuccggcaucaucaucuccgacacccccguccacgacugcaacaccaccugccagacccccaagggcgccaucaacaccucccuccccuuccagaacauccaccccaucaccaucggcaagugccccaaguacgucaaguccaccaagcuccgccucgccaccggccuccgcaacguccccuccauccagucccgcggccucuucggcgccaucgccggcuucaucgagggcggcuggaccggcauggucgacggcugguacggcuaccaccaccagaacggccagggcuccggcuacgccgccgaccucaaguccacccagaacgccaucgacaagaucaccaacaaggucaacuccgucaucgagaagaugaacacccaguucaccgccgucggcaaggaguucaaccaccucgagaagcgcaucgagaaccucaacaagaaggucgacgacggcuuccucgacaucuggaccuacaacgccgagcuccucguccuccucgagaacgagcgcacccucgacuaccacgacuccaacgucaagaaccucuacgagaagguccgcucccagcucaagaacaacgccaaggagaucggcaacggcugcuucgaguucuaccacaagugcgacaacaccugcauggaguccgucaagaacggcaccuacgacuaccccaaguacuccgaggaggccaagcucaaccgcgaggagaucgacggcgucaagcucgaguccacccgcaucuaccagauccucgccaucuacuccaccgucgccuccucccucguccucgucgucucccucggcgccaucuccuucuggaugugcuccaacggcucccuccagugccgcaucugcaucuga

SEQ ID NO: 105889 - RNA, 1701 nt, Artificial Sequence; identical to SEQ ID NO: 104387
  derived and/or modified CDS sequence (opt2) from hemagglutinin__InfluenzaA__AGE89740

SEQ ID NO: 105890 - RNA, 1701 nt, Artificial Sequence
  derived and/or modified CDS sequence (opt2) from hemagglutinin__InfluenzaA__AGE89751
augaagaccaucaucgcccucuccuacauccucugccucgucuucgcccagaagcuccccggcaacgacaacuccaccgccacccucugccucggccaccacgccguccccaacggcaccaucgucaagaccaucaccaacgaccagaucgaggucaccaacgccaccgagcucguccaguccuccuccgccggcgagaucugcgacuccccccaccacauccucgacggcgagaacugcacccucaucgacgcccuccucggcgacccccagugcgacggcuuccagaacaagaagugggaccucuucgucgagcgcucccgcgccuacuccaacugcuaccccuacgacguccccgacuacgccucccuccgcucccucgucgccuccuccggcacccucgaguucaacaacgaguccuucaacuggaccggcgucacccagaacggcaccuccuccgccugcauccgccgcuccaacaacuccuucuucucccgccucaacuggcucacccaccucaacuucaaguaccccgcccucaacgucaccaugcccaacaacgagcaguucgacaagcucuacaucuggggcguccaccaccccggcaccgacaaggaccagaucuuccucuacgcccaggccuccggccgcaucaccgucuccaccaagcgcucccagcaggccgucauccccaacaucggcucccgcccccgcguccgcaacauccccucccgcaucuccaucuacuggaccaucgucaagcccggcgacauccuccucaucaacuccaccggcaaccucaucgccccccgcggcuacuucaagauccgcuccggcaaguccuccaucaugcgcuccgacgcccccaucggcaagugcaacuccgagugcaucacccccaacggcuccauccccaacgacaagcccuuccagaacgucaaccgcaucaccuacggcgccugcccccgcuacgucaagcaguccacccucaagcucgccaccggcaugcgcaacguccccgagaagcagacccgcggcaucuucggcgccaucgccggcuucaucgagaacggcugggagggcaugauggacggcugguacggcuuccgccaccagaacuccgagggccgcggccaggccgccgaccucaaguccacccaggccgccaucgaccagaucaacggcaagcucaaccgccucaucggcaagaccaacgagaaguuccaccagaucgagaaggaguucuccgaggucgagggccgcauccaggaccucgagaaguacgucgaggacaccaagaucgaccucugguccuacaacgccgagcuccucgucgccauggagaaccagcacaccaucgaccucaccgacuccgagaugaacaagcucuucgagaagaccaagaagcagcuccgcgagaacgccgaggacaugggcaacggcugcuucaagaucuaccacaagugcgacaacgccugcaucggcuccauccgcaacggcaccuacgaccacgacgucuaccgcgacgaggcccucuccaaccgcuuccagaucaagggcgucgagcucaaguccggcuacaaggacuggauccucuggaucuccuucgccaucuccugcuuccuccucugcgucgcccuccucggcuucaucaugugggccugccagaagggcaacauccgcugcaacaucugcaucuga

SEQ ID NO: 105891 - RNA, 1701 nt, Artificial Sequence; identical to SEQ ID NO: 104390
  derived and/or modified CDS sequence (opt2) from hemagglutinin__InfluenzaA__AGE89762

SEQ ID NO: 105892 - RNA, 1701 nt, Artificial Sequence
  derived and/or modified CDS sequence (opt2) from hemagglutinin__InfluenzaA__AGF44891
augaaggccauccucgucguccuccucuacaccuucgccaccgccaacgccgacacccucugcaucggcuaccacgccaacaacuccaccgacaccgucgacaccguccucgagaagaacgucaccgucacccacuccgucaaccuccucgaggacaagcacaacggcaagcucugcaagcuccgcggcgucgccccccuccaccucggcaagugcaacaucgccggcuggauccucggcaaccccgagugcgagucccucuccaccgccuccuccugguccuacaucgucgagaccuccuccuccgacaacggcaccugcuaccccggcgacuucaucaacuacgaggagcuccgcgagcagcucuccuccgucuccuccuucgagcgcuucgagaucuuccccaagaccuccuccuggcccaaccacgacuccaacaagggcgucaccgccgccugcccccacgccggcgccaaguccuucuacaagaaccucaucuggcucgucaagaagggcaacuccuaccccaagcucuccaaguccuacaucaacgacaagggcaaggagguccucguccucuggggcauccaccaccccuccaccaccgccgaccagcagucccucuaccagaacgccgacgccuacgucuucgucggcaccucccgcuacuccaagaaguucaagcccgagaucgccauccgccccaagguccgcgaccaggagggccgcaugaacuacuacuggacccucaucgagcccggcgacaagaucaccuucgaggccaccggcaaccucgucgucccccgcuacgccuucgccauggagcgcaacgccggcuccggcaucaucaucuccgacacccccguccacgacugcaacaccaccugccagacccccgagggcgccaucaacaccucccuccccuuccagaacauccaccccaucaccaucggcaagugccccaaguacgucaaguccaccaagcuccgccucgccaccggccuccgcaacguccccuccauccagucccgcggccucuucggcgccaucgccggcuucaucgagggcggcuggaccggcauggucgacggcugguacggcuaccaccaccagaacgagcagggcuccggcuacgccgccgaccucaaguccacccagaacgccgucgacaagaucaccaacaaggucaacuccgucaucgagaagaugaacacccaguucaccgccgucggcaaggaguucaaccaccucgagaagcgcaucgagaaccucaacaagaaggucgacgacggcuuccucgacaucuggaccuacaacgccgagcuccucguccuccucgagaacgagcgcacccucgacuaccacgacuccaacgucaagaaccucuacgagaagguccgcaaccagcucaagaacaacgccaaggagaucggcaacggcugcuucgaguucuaccacaagugcgacaacaccugcauggaguccgucaagaacggcaccuacgacuaccccaaguacuccgaggaggccaagcucaaccgcgagaagaucgacggcgucaagcucgaguccacccgcaucuaccagauccucgccaucuacuccaccgucgccuccucccucguccucgucgucucccucggcgccaucuccuucuggaugugcuccaacggcucccuccagugccgcaucugcaucuga

SEQ ID NO: 105893 - RNA, 1701 nt, Artificial Sequence; identical to SEQ ID NO: 105892
  derived and/or modified CDS sequence (opt2) from hemagglutinin__InfluenzaA__AGF44892

SEQ ID NO: 105894 - RNA, 1701 nt, Artificial Sequence
  derived and/or modified CDS sequence (opt2) from hemagglutinin__InfluenzaA__AGF44895
augaagaccaucaucgcccucuccuacauccucugccucgucuucgcccagaagcuccccggcaacgacaacuccaccgccacccucugccucggccaccacgccguccccaacggcaccaucgucaagaccaucaccaacgaccgcaucgaggucaccaacgccaccgagcucguccagaacuccuccaucggcgagaucugcgacuccccccaccagauccucgacggcgagaacugcacccucaucgacgcccuccucggcgacccccagugcgacggcuuccagaacaagaagugggaccucuucgucgagcgcuccaaggccuacuccaacugcuaccccuacgacguccccgacuacgccucccuccgcucccucgucgccuccuccggcacccucgaguucaacaacgaguccuucaacuggaccggcgucacccagaacggcaccuccuccgccugcauccgccgcuccaacuccuccuucuucucccgccucaacuggcucacccaccucaacuucaaguaccccgcccucaacgucaccaugcccaacaacgagcaguucgacaagcucuacaucuggggcguccaccaccccggcaccgacaaggaccagaucuuccucuacgcccaguccuccggccgcaucaccgucuccaccaagcgcucccagcaggccgucauccccaacaucggcucccgcccccgcauccgcaacauccccucccgcaucuccaucuacuggaccaucgucaagcccggcgacauccuccucaucaacuccaccggcaaccucaucgccccccgcggcuacuucaagauccgcuccggcaaguccuccaucaugcgcuccgacgcccccaucggcaagugcaaguccgagugcaucacccccaacggcuccauccccaacgacaagcccuuccagaacgucaaccgcaucaccuacggcgccugcccccgcuacgucaagcaguccacccucaagcucgccaccggcaugcgcaacguccccgagaagcagacccgcggcaucuucggcgccaucgccggcuucaucgagaacggcugggagggcauggucgacggcugguacggcuuccgccaccagaacuccgagggccgcggccaggccgccgaccucaaguccacccaggccgccaucgaccagaucaacggcaagcucaaccgccucaucggcaagaccaacgagaaguuccaccagaucgagaaggaguucuccgaggucgagggccgcauccaggaccucgagaaguacgucgaggacaccaagaucgaccucugguccuacaacgccgagcuccucgucgcccucgagaaccagcacaccaucgaccucaccgacuccgagaugaacaagcucuucgagaagaccaagaagcagcuccgcgagaacgccgaggacaugggcaacggcugcuucaagaucuaccacaagugcgacaacgccugcaucggcuccauccgcaacggcaccuacgaccacaacgucuaccgcgacgaggcccucaacaaccgcuuccagaucaagggcgucgagcucaaguccggcuacaaggacuggauccucuggaucuccuucgccaucuccugcuuccuccucugcgucgcccuccucggcuucaucaugugggccugccagaagggcaacauccgcugcaacaucugcaucuga

SEQ ID NO: 105895 - RNA, 1701 nt, Artificial Sequence; identical to SEQ ID NO: 105871
  derived and/or modified CDS sequence (opt2) from hemagglutinin__InfluenzaA__AGF44896

SEQ ID NO: 105896 - RNA, 1701 nt, Artificial Sequence
  derived and/or modified CDS sequence (opt2) from hemagglutinin__InfluenzaA__AGF44897
augaagaccaucaucgcccucuccuacauccucugccucgucuucgcccaggagcuccccggcaacgacgacuccaccgccacccucugccucggccaccacgccguccccaacggcaccaucgucaagaccaucaccaacgaccagaucgaggucaccaacgccaccgagcucguccaguccuccuccaccggcgagaucugcaacuccccccaccagauccucgacggcgagaacugcacccucaucgacgcccuccucggcgacccccagugcgacggcuuccagaacaagaagugggaccucuucgucgagcgcuccaaggcccacuccaacugcuaccccuacgacguccccgacuacgccucccuccgcucccucgucgccuccuccggcacccucgaguucaacaacgaguccuucaacuggaccggcgucacccagaacggcaccuccuccgccugcaugcgccgcuccaacaacuccuucuucucccgccucaacuggcucacccaccucaacuucaaguaccccgcccucaacgucaccaugcccaacaacgagcaguucgacaagcucuacaucuggggcguccaccaccccggcaccgacaaggaccagaucuuccucuacgcccaggccuccggccgcaucaccgucuccaccaagcgcucccagcaggccgucauccccaacaucggcucccgcccccgcguccgcaacauccccucccgcgucuccaucuacuggaccaucgucaagcccggcgacauccuccucaucaacuccaccggcaaccucaucgccccccgcggcuacuucaagauccaguccggcaaguccuccaucaugcgcuccgacgcccccaucggcaagugcaacuccgccugcaucacccccaacggcuccauccccaacgacaagcccuuccagaacgucaaccgcaucaccuacggcgccugcccccgcuacgucaagcagaacacccucaagcucgccaccggcaugcgcaacguccccgagaagcagacccgcggcaucuucggcgccaucgccggcuucaucgagaacggcugggagggcauggucgacggcugguacggcuuccgccaccagaacuccgagggccgcggccaggccgccgaccucaaguccacccaggccgccaucgaccagaucaacggcaagcucaaccgccucaucggcaagaccaacgagaaguuccaccagaucgagaaggaguucuccgaggucgagggccgcauccaggaccucgagaaguacgucgaggacaccaagaucgaccucugguccuacaacgccgagcuccucgucgcccucgagaaccagcacaccaucgaccucaccgacuccgagaugaacaagcucuucgagaagaccaagaagcagcuccgcgagaacgccgaggacaugggcaacggcugcuucaagaucuaccacaagugcgacaacgccugcaucggcuccauccgcaacggcaccuacgaccacgacgucuaccgcgacgaggcccucaacaaccgcuuccagaucaagggcgucgagcucaaguccggcuacaaggacuggauccucuggaucuccuucgccaucuccugcuuccuccucugcgucgcccuccucggcuucaucaugugggccugccagaagggcaacauccgcugcaacaucugcaucuga

SEQ ID NO: 105897 - RNA, 1701 nt, Artificial Sequence; identical to SEQ ID NO: 105894
  derived and/or modified CDS sequence (opt2) from hemagglutinin__InfluenzaA__AGF44900

SEQ ID NO: 105898 - RNA, 1701 nt, Artificial Sequence; identical to SEQ ID NO: 105894
  derived and/or modified CDS sequence (opt2) from hemagglutinin__InfluenzaA__AGF44901

SEQ ID NO: 105899 - RNA, 1701 nt, Artificial Sequence; identical to SEQ ID NO: 105894
  derived and/or modified CDS sequence (opt2) from hemagglutinin__InfluenzaA__AGF44902

SEQ ID NO: 105900 - RNA, 1701 nt, Artificial Sequence; identical to SEQ ID NO: 105894
  derived and/or modified CDS sequence (opt2) from hemagglutinin__InfluenzaA__AGF44903

SEQ ID NO: 105901 - RNA, 1701 nt, Artificial Sequence; identical to SEQ ID NO: 105894
  derived and/or modified CDS sequence (opt2) from hemagglutinin__InfluenzaA__AGF44904

SEQ ID NO: 105902 - RNA, 1701 nt, Artificial Sequence
  derived and/or modified CDS sequence (opt2) from hemagglutinin__InfluenzaA__AGF44905
augaagaccaucaucgcccucuccuacauccucugccucgucuucgcccagaagcuccccggcaacgacaacuccaccgccacccucugccucggccaccacgccguccccaacggcaccaucgucaagaccaucaccaacgaccgcaucgaggucaccaacgccaccgagcucguccagaacuccuccaucggcgagaucugcgacuccccccaccagauccucgacggcgagaacugcacccucaucgacgcccuccucggcgacccccagugcgacggcuuccagaacaagaagugggaccucuucgucgagcgcuccaaggccuacuccaacugcuaccccuacgacguccccgacuacgccucccuccgcucccucgucgccuccuccggcacccucgaguucaacaacgaguccuucaacuggaccggcgucacccagaacggcaccuccuccgccugcauccgccgcuccaacuccuccuucuucucccgccucaacuggcucacccaccucaacuucaaguaccccgcccucaacgucaccaugcccaacaacgagcaguucgacaagcucuacaucuggggcguccaccaccccggcaccgacaaggaccagaucuuccucuacgcccaguccuccggccgcaucaccgucuccaccaagcgcucccagcaggccgucauccccaacaucggcucccgcccccgcauccgcaacauccccucccgcaucuccaucuacuggaccaucgucaagcccggcgacauccuccucaucaacuccaccggcaaccucaucgccccccgcggcuacuucaagauccgcuccggcaaguccuccaucaugcgcuccgacgcccccaucggcaagugcaaguccgagugcaucacccccaacggcuccauccccaacgacaagcccuuccagaacgucaaccgcaacaccuacggcgccugcccccgcuacgucaagcaguccacccucaagcucgccaccggcaugcgcaacguccccgagaagcagacccgcggcaucuucggcgccaucgccggcuucaucgagaacggcugggagggcauggucgacggcugguacggcuuccgccaccagaacuccgagggccgcggccaggccgccgaccucaaguccacccaggccgccaucgaccagaucaacggcaagcucaaccgccucaucggcaagaccaacgagaaguuccaccagaucgagaaggaguucuccgaggucgagggccgcauccaggaccucgagaaguacgucgaggacaccaagaucgaccucugguccuacaacgccgagcuccucgucgcccucgagaaccagcacaccaucgaccucaccgacuccgagaugaacaagcucuucgagaagaccaagaagcagcuccgcgagaacgccgaggacaugggcaacggcugcuucaagaucuaccacaagugcgacaacgccugcaucggcuccauccgcaacggcaccuacgaccacaacgucuaccgcgacgaggcccucaacaaccgcuuccagaucaagggcgucgagcucaaguccggcuacaaggacuggauccucuggaucuccuucgccaucuccugcuuccuccucugcgucgcccuccucggcuucaucaugugggccugccagaagggcaacauccgcugcaacaucugcaucuga

SEQ ID NO: 105903 - RNA, 1701 nt, Artificial Sequence; identical to SEQ ID NO: 105894
  derived and/or modified CDS sequence (opt2) from hemagglutinin__InfluenzaA__AGF44906

SEQ ID NO: 105904 - RNA, 1701 nt, Artificial Sequence
  derived and/or modified CDS sequence (opt2) from hemagglutinin__InfluenzaA__AGF44908
augaagaccaucaucgcccucuccuacauccucugccucgucuucgcccagaagcuccccggcaacgacaacuccaccgccacccucugccucggccaccacgccguccccaacggcaccaucgucaagaccaucaccaacgaccgcaucgaggucaccaacgccaccgagcucguccagaacuccuccaucggcgagaucugcgacuccccccaccagauccucgacggcgagaacugcacccucaucgacgcccuccucggcgacccccagugcgacggcuuccagaacaagaagugggaccucuucgucgagcgcuccaaggccuacuccaacugcuaccccuacgacguccccgacuacgccucccuccgcucccucgucgccuccuccggcacccucgaguucaacaacgaguccuucaacugggccggcgucacccagaacggcaccuccuccgccugcauccgcggcuccaacuccuccuucuucucccgccucaacuggcucacccaccucaacuucaaguaccccgcccucaacgucaccaugcccaacaacgagcaguucgacaagcucuacaucuggggcguccaccaccccggcaccgacaaggaccagaucuuccucuacgcccaguccuccggccgcaucaccgucuccaccaagcgcucccagcaggccgucauccccaacaucggcucccgcccccgcauccgcaacauccccucccgcaucuccaucuacuggaccaucgucaagcccggcgacauccuccucaucaacuccaccggcaaccucaucgccccccgcggcuacuucaagauccgcuccggcaaguccuccaucaugcgcuccgacgcccccaucggcaagugcaaguccgagugcaucacccccaacggcuccauccccaacgacaagcccuuccagaacgucaaccgcaucaccuacggcgccugcccccgcuacgucaagcaguccacccucaagcucgccaccggcaugcgcaacguccccgagaagcagacccgcggcaucuucggcgccaucgccggcuucaucgagaacggcugggagggcaugauggacggcugguacggcuuccgccaccagaacuccgagggccgcggccaggccgccgaccucaaguccacccaggccgccaucgaccagaucaacggcaagcucaaccgccucaucggcaagaccaacgagaaguuccaccagaucgagaaggaguucuccgaggucgagggccgcauccaggaccucgagaaguacgucgaggacaccaagaucgaccucugguccuacaacgccgagcuccucgucgcccucgagaaccagcacaccaucgaccucaccgacuccgagaugaacaagcucuucgagaagaccaagaagcagcuccgcgagaacgccgaggacaugggcaacggcugcuucaagaucuaccacaagugcgacaacgccugcaucggcuccauccgcaacggcaccuacgaccacgacgucuaccgcgacgaggcccucaacaaccgcuuccagaucaagggcgucgagcucaaguccggcuacaaggacuggauccucuggaucuccuucgccaucuccugcuuccuccucugcgucgcccuccucggcuucaucaugugggccugccagaagggcaacauccgcugcaacaucugcaucuga

SEQ ID NO: 105905 - RNA, 1701 nt, Artificial Sequence; identical to SEQ ID NO: 105894
  derived and/or modified CDS sequence (opt2) from hemagglutinin__InfluenzaA__AGF44909

SEQ ID NO: 105906 - RNA, 1701 nt, Artificial Sequence; identical to SEQ ID NO: 105894
  derived and/or modified CDS sequence (opt2) from hemagglutinin__InfluenzaA__AGF44910

SEQ ID NO: 105907 - RNA, 1701 nt, Artificial Sequence
  derived and/or modified CDS sequence (opt2) from hemagglutinin__InfluenzaA__AGF44911
augaagaccaucaucgcccucuccuacauccucugccucgucuucgcccagaagcuccccggcaacgacaacuccaccgccacccucugccucggccaccacgccguccccaacggcaccaucgucaagaccaucaccaacgaccgcaucgaggucaccaacgccaccgagcucguccagaacuccuccaucggcgagaucugcgacuccccccaccagauccucgacggcgagaacugcacccucaucgacgcccuccucggcgacccccagugcgacggcuuccagaacaagaagugggaccucuucgucgagcgcuccaaggccuacuccaacugcuaccccuacgacguccccgacuacgccucccuccgcucccucgucgccuccuccggcacccucgaguucaacaacgaguccuucaacugggccggcgucacccagaacggcaccuccuccgccugcauccgcggcuccaacuccuccuucuucucccgccucaacuggcucacccaccucaacuucaaguaccccgcccucaacgucaccaugcccaacaacgagcaguucgacaagcucuacaucuggggcguccaccaccccggcaccgacaaggaccagaucuuccucuacgcccaguccuccggccgcaucaccgucuccaccaagcgcucccagcaggccgucauccccaacaucggcucccgcccccgcauccgcaacauccccucccgcaucuccaucuacuggaccaucgucaagcccggcgacauccuccucaucaacuccaccggcaaccucaucgccccccgcggcuacuucaagauccgcuccggcaaguccuccaucaugcgcuccgacgcccccaucggcaagugcaaguccgagugcaucacccccaacggcuccauccccaacgacaagcccuuccagaacgucaaccgcaucaccuacggcgccugcccccgcuacgucaagcaguccacccucaagcucgccaccggcaugcgcaacguccccgagaagcagacccgcggcaucuucggcgccaucgccggcuucaucgagaacggcugggagggcauggucgacggcugguacggcuuccgccaccagaacuccgagggccgcggccaggccgccgaccucaaguccacccaggccgccaucgaccagaucaacggcaagcucaaccgccucaucggcaagaccaacgagaaguuccaccagaucgagaaggaguucuccgaggucgagggccgcauccaggaccucgagaaguacgucgaggacaccaagaucgaccucugguccuacaacgccgagcuccucgucgcccucgagaaccagcacaccaucgaccucaccgacuccgagaugaacaagcucuucgagaagaccaagaagcagcuccgcgagaacgccgaggacaugggcaacggcugcuucaagaucuaccacaagugcgacaacgccugcaucggcuccauccgcaacggcaccuacgaccacgacgucuaccgcgacgaggcccucaacaaccgcuuccagaucaagggcgucgagcucaaguccggcuacaaggacuggauccucuggaucuccuucgccaccuccugcuuccuccucugcgucgcccuccucggcuucaucaugugggccugccagaagggcaacauccgcugcaacaucugcaucuga

SEQ ID NO: 105908 - RNA, 1701 nt, Artificial Sequence; identical to SEQ ID NO: 105894
  derived and/or modified CDS sequence (opt2) from hemagglutinin__InfluenzaA__AGF44912

SEQ ID NO: 105909 - RNA, 1701 nt, Artificial Sequence; identical to SEQ ID NO: 105894
  derived and/or modified CDS sequence (opt2) from hemagglutinin__InfluenzaA__AGF44913

SEQ ID NO: 105910 - RNA, 1701 nt, Artificial Sequence
  derived and/or modified CDS sequence (opt2) from hemagglutinin__InfluenzaA__AGF44914
augaagaccaucaucgcccucuccuacauccucugccucgucuucgcccagaagcuccccggcaacgacaacuccaccgccacccucugccucggccaccacgccguccccaacggcaccaucgucaagaccaucaccaacgaccgcaucgaggucaccaacgccaccgagcucguccagaacuccuccaucggcgagaucugcgacuccccccaccagauccucgacggcgagaacugcacccucaucgacgcccuccucggcgacccccagugcgacggcuuccagaacaagaagugggaccucuucgucgagcgcuccaaggccuacuccaacugcuaccccuacgacguccccgacuacgccucccuccgcucccucgucgccuccuccggcacccucgaguucaacaacgaguccuucaacuggaccggcgucacccagaacggcaccuccuccgccugcauccgccgcuccaacuccuccuucuucucccgccucaacuggcucacccaccucaacuucaaguaccccgcccucaacgucaccaugcccaacaacgagcaguucgacaagcucuacaucuggggcguccaccaccccggcaccgacaaggaccagaucuuccucuacgcccaguccuccggccgcaucaccgucuccaccaagcgcucccagcaggccgucauccccaacaucggcucccgcccccgcauccgcaacauccccucccgcaucuccaucuacuggaccaucgucaagcccggcgacauccuccucaucaacuccaccggcaaccucaucgccccccgcggcuacuucaagauccgcuccggcaaguccuccaucaugcgcuccgacgcccccaucggcaagugcaaguccgagugcaucacccccaacggcuccauccccaacgacaagcccuuccagaacgucaacaagaucaccuacggcgccugcccccgcuacgucaagcaguccacccucaagcucgccaccggcaugcgcaacguccccgagaagcagacccgcggcaucuucggcgccaucgccggcuucaucgagaacggcugggagggcauggucgacggcugguacggcuuccgccaccagaacuccgagggccgcggccaggccgccgaccucaaguccacccaggccgccaucgaccagaucaacggcaagcucaaccgccucaucggcaagaccaacgagaaguuccaccagaucgagaaggaguucuccgaggucgagggccgcauccaggaccucgagaaguacgucgaggacaccaagaucgaccucugguccuacaacgccgagcuccucgucgcccucgagaaccagcacaccaucgaccucaccgacuccgagaugaacaagcucuucgagaagaccaagaagcagcuccgcgagaacgccgaggacaugggcaacggcugcuucaagaucuaccacaagugcgacaacgccugcaucggcuccauccgcaacggcaccuacgaccacaacgucuaccgcgacgaggcccucaacaaccgcuuccagaucaagggcgucgagcucaaguccggcuacaaggacuggauccucuggaucuccuucgccaucuccugcuuccuccucugcgucgcccuccucggcuucaucaugugggccugccagaagggcaacauccgcugcaacaucugcaucuga

SEQ ID NO: 105911 - RNA, 1701 nt, Artificial Sequence; identical to SEQ ID NO: 105871
  derived and/or modified CDS sequence (opt2) from hemagglutinin__InfluenzaA__AGF44916

SEQ ID NO: 105912 - RNA, 1701 nt, Artificial Sequence
  derived and/or modified CDS sequence (opt2) from hemagglutinin__InfluenzaA__AGF44917
augaagaccaucaucgcccucuccuacauccucugccucgucuucgcccagaagauccccggcaacgacaacuccaccgccacccucugccucggccaccacgccguccccaacggcaccaucgucaagaccaucaccaacgagcagaucgaggucaccaacgccaccgagcucguccaguccuccuccaccggcgagaucugcaacuccccccaccagauccucgacggcgagaacugcacccucaucgacgcccuccucggcgacccccagugcgacggcuuccagaacaagaagugggaccucuucgucgagcgcuccaaggccuacuccaacugcuaccccuacgacguccccgacuacgccucccuccgcucccucgucgccuccuccggcacccucgaguucaacaacgaguccuucaacuggaccggcgucacccagaacggcaccuccuccgccugcauccgcggcuccgacuccuccuucuucucccgccucaacuggcucacccaccucaacuucaaguaccccgcccucaacgucaccaugcccaacaacgagcaguucgacaagcucuacaucuggggcguccaccaccccggcaccgacaaggaccagaucuuccucuacgcccaggccuccggccgcaucaccgucuccaccaagcgcucccagcaggccgucauccccaacaucggcucccgcccccgcauccgcaacauccccucccgcaucuccaucuacuggaccaucgucaagcccggcgacauccuccucaucaacuccaccggcaaccucaucgccccccgcggcuacuucaagauccgcuccggcaaguccuccaucaugcgcuccgacgcccccaucggcaagugcaacuccgagugcaucacccccaacggcuccauccccaacgacaagcccuuccagaacgucaaccgcaucaccuacggcgccugcccccgcuacgucaagcagaacacccucaagcucgccaccggcaugcgcaacguccccgagaagcagacccgcggcaucuucggcgccaucgccggcuucaucgagaacggcugggagggcaugauggacggcugguacggcuuccgccaccagaacuccgagggccgcggccaggccgccgaccucaaguccacccaggccgccaucgaccagaucaacggcaagcucaaccgccucaucggcaagaccaacgagaaguuccaccagaucgagaaggaguucuccgaggucgagggccgcauccaggaccucgagaaguacgucgaggacaccaagaucgaccucugguccuacaacgccgagcuccucgucgcccucgagaaccagcacaccaucgaccucaccgacuccgagaugaacaagcucuucgagaagaccaagaagcagcuccgcgagaacgccgaggacaugggcaacggcugcuucaagaucuaccacaagugcgacaacgccugcaucggcuccauccgcaacggcaccuacaaccacgacgucuaccgcgacgaggcccucaacaaccgcuuccagaucaagggcgucgagcucaaguccggcuacaaggacuggauccucuggaucuccuucgccaucuccugcuuccuccucugcgucgcccuccucggcuucaucaugugggccugccagaagggcaacauccgcugcaacaucugcaucuga

SEQ ID NO: 105913 - RNA, 1701 nt, Artificial Sequence; identical to SEQ ID NO: 105871
  derived and/or modified CDS sequence (opt2) from hemagglutinin__InfluenzaA__AGF44918

SEQ ID NO: 105914 - RNA, 1701 nt, Artificial Sequence
  derived and/or modified CDS sequence (opt2) from hemagglutinin__InfluenzaA__AGF44919
augaagaccaucaucgcccucuccuacauccucugccucgucuucgcccagaagcuccccggcaacgacaacuccaccgccacccucugccucggccaccacgccguccccaacggcaccaucgucaagaccaucaccaacgaccgcaucgaggucaccaacgccaccgagcucguccagaacuccuccaucggcgagaucugcgacuccccccaccagauccucgacggcgagaacugcacccucaucgacgcccuccucggcgacccccagugcgacggcuuccagaacaagaagugggaccucuucgucgagcgcuccaaggccuacuccaacugcuaccccuacgacguccccgacuacgccucccuccgcucccucgucgccuccuccggcacccucgaguucaacaacgaguccuucaacugggccggcgucacccagaacggcaccuccuccgccugcauccgcggcuccaacuccuccuucuucucccgccucaacuggcucacccaccucaacuucaaguaccccgcccucaacgucaccaugcccaacaacgagcaguucgacaagcucuacaucuggggcguccaccaccccggcaccgacaaggaccagaucuuccucuacgcccaguccuccggccgcaucaccgucuccaccaagcgcucccagcaggccgucauccccaacaucggcucccgcccccgcauccgcaacauccccucccgcaucuccaucuacuggaccaucgucaagcccggcgacauccuccucaucaacuccaccggcaaccucaucgccccccgcggcuacuucaagauccgcuccggcaaguccuccaucaugcgcuccgacgcccccaucggcaagugcaaguccgagugcaucacccccaacggcuccauccccaacgacaagcccuuccagaacgucaaccgcaucaccuacggcgccugcccccgcuacgucaagcaguccacccucaagcucgccaccggcaugcgcaacguccccgagaagcagacccgcggcaucuucggcgccaucgccggcuucaucgagaacggcugggagggcauggucgacggcugguacggcuuccgccaccagaacuccgagggccgcggccaggccgccgaccucaaguccacccaggccgccaucgaccagaucaacggcaagcucaaccgccucaucggcaagaccaacgagaaguuccaccagaucgagaaggaguucuccgaggucgagggccgcauccaggaccucgagaaguacgucgaggacaccaagaucgaccucugguccuacaacgccgagcuccucgucgcccucgagaaccagcacaccaucgaccucaccgacuccgagaugaacaagcucuucgagaagaccaagaagcagcuccgcgagaacgccgaggacaugggcaacggcugcuucaagaucuaccacaagugcgacaacgccugcaucggcuccauccgcaacggcaccuacgaccacuacgucuaccgcgacgaggcccucaacaaccgcuuccagaucaagggcgucgagcucaaguccggcuacaaggacuggauccucuggaucuccuucgccaucuccugcuuccuccucugcgucgcccuccucggcuucaucaugugggccugccagaagggcaacauccgcugcaacaucugcaucuga

SEQ ID NO: 105915 - RNA, 1701 nt, Artificial Sequence; identical to SEQ ID NO: 105871
  derived and/or modified CDS sequence (opt2) from hemagglutinin__InfluenzaA__AGF44920

SEQ ID NO: 105916 - RNA, 1701 nt, Artificial Sequence; identical to SEQ ID NO: 105894
  derived and/or modified CDS sequence (opt2) from hemagglutinin__InfluenzaA__AGF44921

SEQ ID NO: 105917 - RNA, 1701 nt, Artificial Sequence
  derived and/or modified CDS sequence (opt2) from hemagglutinin__InfluenzaA__AGG13411
augaagaccaucaucgcccucuccuacauccucugccucgucuucgcccaggagcuccccggcaacgacgacuccaccgccacccucugccucggccaccacgccguccccaacggcaccaucgucaagaccaucaccaacgaccgcaucgaggucaccaacgccaccgagcucguccaguccuccuccaccggcgagaucugcaacuccccccaccagauccucgacggcgagaacugcacccucaucgacgcccuccucggcgacccccagugcgacggcuuccagaacaagaagugggaccucuucgucgagcgcuccaaggcccacuccaacugcuaccccuacgacguccccgacuacgccucccuccgcucccucgucgccuccuccggcacccucgaguucaacaacgaguccuucaacuggaccggcgucacccagaacggcaccuccuccgccugcauccgccgcuccaacaacuccuucuucucccgccucaacuggcucacccaccucaacuucaaguaccccgcccucaacgucaccaugcccaacaacgagcaguucgacaagcucuacaucuggggcguccaccaccccggcaccgacaaggaccagaucuuccucuacgcccaggccuccggccgcaucaccgucuccaccaagcgcaaccagcagaccgucauccccaacaucggcucccgcccccgcguccgcaacauccccucccgcgucuccaucuacuggaccaucgucaagcccggcgacauccuccucaucaacuccaccggcaaccucaucgccccccgcggcuacuucaagauccgcuccggcaaguccuccaucaugcgcuccgacgcccccaucggcaagugcaacuccgccugcaucacccccaacggcuccauccccaacgacaagcccuuccagaacgucaaccgcaucaccuacggcgccugcccccgcuacgucaagcagaacacccucaagcucgccaccggcaugcgcaacguccccgagaagcagacccgcggcaucuucggcgccaucgccggcuucaucgagaacggcugggagggcauggucgacggcugguacggcuuccgccaccagaacuccgagggccgcggccaggccgccgaccucaaguccacccaggccgccaucgaccagaucaacggcaagcucaaccgccucaucggcaagaccaacgagaaguuccaccagaucgagaaggaguucuccgaggucgagggccgcauccaggaccucgagaaguacgucgaggacaccaagaucgaccucugguccuacaacgccgagcuccucgucgcccucgagaaccagcacaccaucgaccucaccgacuccgagaugaacaagcucuucgagaagaccaagaagcagcuccgcgagaacgccgaggacaugggcaacggcugcuucaagaucuaccacaagugcgacaacgccugcaucggcuccauccgcaacggcaccuacgaccacgacgucuaccgcgacgaggcccucaacaaccgcuuccagaucaagggcgucgagcucaaguccggcuacaaggacuggauccucuggaucuccuucgccaucuccugcuuccuccucugcgucgcccuccucggcuucaucaugugggccugccagaagggcaacauccgcugcaacaucugcaucuga

SEQ ID NO: 105918 - RNA, 1701 nt, Artificial Sequence
  derived and/or modified CDS sequence (opt2) from hemagglutinin__InfluenzaA__AGG13447
augaagaccaucaucgcccucuccuacauccucugccucgucuucgcccaggagcuccccggcaacgacgacuccaccgccacccucugccucggccaccacgccguccccaacggcaccaucgucaagaccaucaccaacgaccgcaucgaggucaccaacgccaccgagcucguccaguccuccuccaccggcgagaucugcaacuccccccaccagauccucgacggcgagaacugcacccucaucgacgcccuccucggcgacccccagugcgacggcuuccagaacaagaagugggaccucuucgucgagcgcuccaaggcccacuccaacugcuaccccuacgacguccccgacuacgccucccuccgcucccucgucgccuccuccggcacccucgaguucaacaacgaguccuucaacuggaccggcgucacccagaacggcaccuccuccgccugcauccgccgcuccaacaacuccuucuucucccgccucaacuggcucacccaccucaacuucaaguaccccgcccucaacgucaccaugcccaacaacgagcaguucgacaagcucuacaucuggggcguccaccaccccggcaccgacaaggaccagaucuuccucuacgcccaggccuccggccgcaucaccgucuccaccaagcgcucccagcagaccgucauccccaacaucggcucccgcccccgcguccgcaacauccccucccgcgucuccaucuacuggaccaucgucaagcccggcgacauccuccucaucaacuccaccggcaaccucaucgccccccgcggcuacuucaagauccgcuccggcaaguccuccaucaugcgcuccgacgcccccaucggcaagugcaacuccgccugcaucacccccaacggcuccauccccaacgacaagcccuuccagaacgucaaccgcaucaccuacggcgccugcccccgcuacgucaagcagaacacccucaagcucgccaccggcaugcgcaacguccccgagaagcagacccgcggcaucuucggcgccaucgccggcuucaucgagaacggcugggagggcauggucgacggcugguacggcuuccgccaccagaacuccgagggccgcggccaggccgccgaccucaaguccacccaggccgccaucgaccagaucaacggcaagcucaaccgccucaucggcaagaccaacgagaaguuccaccagaucgagaaggaguucuccgaggucgagggccgcauccaggaccucgagaaguacgucgaggacaccaagaucgaccucugguccuacaacgccgagcuccucgucgcccucgagaaccagcacaccaucgaccucaccgacuccgagaugaacaagcucuucgagaagacccagaagcagcuccgcgagaacgccgaggacaugggcaacggcugcuucaagaucuaccacaagugcgacaacgccugcaucggcuccauccgcaacggcaccuacgaccacgacgucuaccgcgacgaggcccucaacaaccgcuuccagaucaagggcgucgagcucaaguccggcuacaaggacuggauccucuggaucuccuucgccaucuccugcuuccuccucugcgucgcccuccucggcuucaucaugugggccugccagaagggcaacauccgcugcaacaucugcaucuga

SEQ ID NO: 105919 - RNA, 1701 nt, Artificial Sequence
  derived and/or modified CDS sequence (opt2) from hemagglutinin__InfluenzaA__AGG13459
augaagaccaucaucgcccucuccuacauccucugccucgucuucgcccagaagcuccccggcaacgacaacuccaccgccacccucugccucggccaccacgccguccccaacggcaccaucgucaagaccaucaccaacgaccgcaucgaggucaccaacgccaccgagcucguccagaacuccuccaucggcgagaucugcgacuccccccaccagauccucgacggcgagaacugcacccucaucgacgcccuccucggcgacccccagugcgacggcuuccagaacaagaagugggaccucuucgucgagcgcuccaaggccuacuccaacugcuaccccuacgacguccccgacuacgccucccuccgcucccucgucgccuccuccggcacccucgaguucaacaacgaguccuucaacuggaccggcgucacccagaacggcaccuccuccgccugcauccgccgcuccaacuccuccuucuucucccgccucaacuggcucacccaccucaacuucaaguaccccgcccucaacgucaccaugcccaacaacgagcaguucgacaagcucuacaucuggggcguccaccaccccggcaccgacaaggaccagaucuuccucuacgcccaguccuccggccgcaucaccgucuccaccaagcgcucccagcaggccgucauccccaacaucggcucccgcccccgcauccgcaacauccccucccgcaucuccaucuacuggaccaucgucaagcccggcgacauccuccucaucaacuccaccggcaaccucaucgccccccgcggcuacuucaagauccgcuccggcaaguccuccaucaugcgcuccgacgcccccaucggcaagugcaaguccgagugcaucacccccaacggcuccauccccaacgacaagcccuuccagaacgucaaccgcaucaccuacggcgccugcccccgcuacgucaagcaguccacccucaagcucgccaccggcaugcgcaacguccccgagaagcagacccgcggcaucuucggcgccaucgccggcuucaucgagaacggcugggagggcauggucgacggcugguacggcuuccgccaccagaacuccgagggccgcggccaggccgccgaccucaaguccacccaggccgccaucgaccagaucaacggcaagcucaaccgccucaucggcaagaccaacgagaaguuccaccagaucgagaaggaguucuccgaggucgagggccgcauccaggaccucgagaaguacgucgaggacaccaagaucgaccucugguccuacaacgccgagcuccucgucgcccucgagaaccagcacaccaucgaccucaccgacuccgagaugaacaagcucuucgagaagaccaagaagcagcuccgcgagaacgccgaggacaugggcaacggcugcuucaagaucuaccacaagugcgacaacgccugcaucggcuccauccgcaacggcaccuacgaccacgacgucuaccgcgacgaggcccucaacaaccgcuuccagaucaagggcgucgagcucaaguccggcuacaaggacuggauccucuggaucuccuucgccaucuccugcuuccuccucugcgucgcccuccucggcuucaucaugugggccugccagaagggcaacauccgcugcaacaucugcaucuga

SEQ ID NO: 105920 - RNA, 1701 nt, Artificial Sequence
  derived and/or modified CDS sequence (opt2) from hemagglutinin__InfluenzaA__AGG13495
augaagaccaucaucgcccucuccuacauccucugccucgucuucgcccagaagcuccccggcaacgacaacuccaccgccacccucugccucggccaccacgccguccccaacggcaccaucgucaagaccaucaccaacgaccagaucgaggucaccaacgccaccgagcucguccaguccuccuccaccggcgagaucugcgacuccccccaccagauccucgacggcgagaacugcacccucaucgacgcccuccucggcgacccccagugcgacggcuuccagaacaagaagugggaccucuucgucgagcgcuccaaggccuacuccaacugcuaccccuacgacguccccgacuacgccucccuccgcucccucgucgccuccuccggcacccucgaguucaacaacgaguccuucaacuggaccggcgucacccagaacggcaccuccuccgccugcauccgccgcuccgacuccuccuucuucucccgccucaacuggcucacccaccucaacuucaaguaccccgcccucaacgucaccaugcccaacaacgagcaguucgacaagcucuacaucuggggcguccaccaccccggcaccgacaaggaccagaucuuccucuacgcccaggccuccggccgcaucaccgucuccaccaagcgcucccagcaguccgucauccccaacaucggcucccgcccccgcauccgcaacauccccucccgcaucuccaucuacuggaccaucgucaagcccggcgacauccuccucaucaacuccaccggcaaccucaucgccccccgcggcuacuucaagauccaguccggcaaguccuccaucaugcgcuccgacgcccccaucggcaagugcaacuccgagugcaucacccccaacggcuccauccccaacgacaagcccuuccagaacgucaaccgcaucaccuacggcgccugcccccgcuacgucaagcagaacacccucaagcucgccaccggcaugcgcaacguccccgagaagcagacccgcggcaucuucggcgccaucgccggcuucaucgagaacggcugggagggcauggucgacggcugguacggcuuccgccaccagaacuccgagggccgcggccaggccgccgaccucaaguccacccaggccgccaucgaccagaucaacggcaagcucaaccgccucaucggcaagaccaacgagaaguuccaccagaucgagaaggaguucuccgaggucgagggccgcauccaggaccucgagaaguacgucgaggacaccaagaucgaccucugguccuacaacgccgagcuccucgucgcccucgagaaccagcacaccaucgaccucaccgacuccgagaugaacaagcucuucgagaagaccaagaagcagcuccgcgagaacgccgaggacaugggcaacggcugcuucaagaucuaccacaagugcgacaacgccugcaucggcuccauccgcaacggcaccuacaaccacgacgucuaccgcgacgaggcccucaacaaccgcuuccagaucaagggcgucgagcucaaguccggcuacaaggacuggauccucuggaucuccuucgccaucuccugcuuccuccucugcgucgcccuccucggcuucaucaugugggccugccagaagggcaacauccgcugcaacaucugcaucuga

SEQ ID NO: 105921 - RNA, 1701 nt, Artificial Sequence; identical to SEQ ID NO: 105919
  derived and/or modified CDS sequence (opt2) from hemagglutinin__InfluenzaA__AGG13507

SEQ ID NO: 105922 - RNA, 1701 nt, Artificial Sequence
  derived and/or modified CDS sequence (opt2) from hemagglutinin__InfluenzaA__AGG13519
augaagaccaucaucgcccucuccuacauccucugccucgucuucgcccagaagcuccccggcaacgacaacuccaccgccacccucugccucggccaccacgccguccccaacggcaccaucgucaagaccaucaccaacgaccagaucgaggucaccaacgccaccgagcucguccaguccuccuccaccggcgagaucugcgacuccccccaccagauccucgacggcgagaacugcacccucaucgacgcccuccucggcgacccccagugcgacggcuuccagaacaagaagugggaccucuucgucgagcgcuccaaggccuacuccaacugcuaccccuacgacguccccgacuacgccucccuccgcucccucgucgccuccuccggcacccucgaguucaacaacgaguccuucaacuggaccggcgucacccagaacggcaccuccuccgccugcauccgccgcuccgacuccuccuucuucucccgccucaacuggcucacccaccucaacuucaaguaccccgcccucaacgucaccaugcccaacaacgagcaguucgacaagcucuacaucuggggcguccaccaccccggcaccgacaaggaccagaucuuccucuacgcccaggccuccggccgcaucaccgucuccaccaagcgcucccagcaguccgucauccccaacaucggcucccgcccccgcauccgcaacauccccucccgcaucuccaucuacuggaccaucgucaagcccggcgacauccuccucaucaacuccaccggcaaccucaucgccccccgcggcuacuucaagauccaguccggcaaguccuccaucaugcgcuccgacgcccccaucggcaagugcaacuccgagugcaucacccccaacggcuccauccccaacgacaagcccuuccagaacgucaaccgcaucaccuacggcgccugcccccgcuacgucaagcagaacacccucaagcucgccaccggcaugcgcaacguccccgagaagcagacccgcggcaucuucggcgccaucgccggcuucaucgagaacggcugggagggcauggucgacggcugguacggcuuccgccaccagaacuccgagggccgcggccaggccgccgaccucaaguccacccaggccgccaucgaccagaucaacggcaagcucaaccgccucaucggcaagaccaacgagaaguuccaccagaucgagaaggaguucuccgaggucgagggccgcguccaggaccucgagaaguacgucgaggacaccaagaucgaccucugguccuacaacgccgagcuccucgucgcccucgagaaccagcacaccaucgaccucaccgacuccgagaugaacaagcucuucgagaagaccaagaagcagcuccgcgagaacgccgaggacaugggcaacggcugcuucaagaucuaccacaagugcgacaacgccugcaucggcuccauccgcaacggcaccuacaaccacgacgucuaccgcgacgaggcccucaacaaccgcuuccagaucaagggcgucgagcucaaguccggcuacaaggacuggauccucuggaucuccuucgccaucuccugcuuccuccucugcgucgcccuccucggcuucaucaugugggccugccagaagggcaacauccgcugcaacaucugcaucuga

SEQ ID NO: 105923 - RNA, 1701 nt, Artificial Sequence; identical to SEQ ID NO: 105919
  derived and/or modified CDS sequence (opt2) from hemagglutinin__InfluenzaA__AGG13531

SEQ ID NO: 105924 - RNA, 1701 nt, Artificial Sequence
  derived and/or modified CDS sequence (opt2) from hemagglutinin__InfluenzaA__AGG13543
augaagaccaucaucgcccucuccuacauccucugccucgucuucgcccagaagcuccccggcaacgacaacuccaccgccacccucugccucggccaccacgccguccccaacggcaccaucgucaagaccaucaccaacgaccgcaucgaggucaccaacgccaccgagcucguccagaacuccuccaucggcgagaucugcgacuccccccaccagauccucgacggcgagaacugcacccucaucgacgcccuccucggcgacccccagugcgacggcuuccagaacaagaagugggaccucuucgucgagcgcuccaaggccuacuccaacugcuaccccuacgacguccccgacuacgccucccuccgcucccucgucgccuccuccggcacccucgaguucaacaacgaguccuucaacuggaccggcgucacccagaacggcaccuccuccgccugcauccgccgcuccaacuccuccuucuucucccgccucaacuggcucacccaccucaacuucaaguaccccgcccucaacgucaccaugcccaacaacgagcaguucgacaagcucuacaucuggggcguccaccaccccggcaccgacaaggaccagaucuuccucuacgcccaguccuccggccgcaucaccgucuccaccaagcgcucccagcaggccgucauccccaacaucggcucccgcccccgcauccgcaacauccccucccgcaucuccaucuacuggaccaucgucaagcccggcgacauccuccucaucaacuccaccggcaaccucaucgccccccgcggcuacuucaagauccgcuccggcaaguccuccaucaugcgcuccgacgcccccaucggcaagugcaaguccgagugcaucacccccaacggcuccauccccaacgacaagcccuuccagaacgucaaccgcaucaccuacggcgccugcccccgcuacgucaagcaguccacccucaagcucgccaccggcaugcgcaacguccccgagaagcagacccgcggcaucuucggcgccaucgccggcuucaucgagaacggcugggagggcauggucgacggcugguacggcuuccgccaccagaacuccgagggccgcggccaggccgccgaccucaaguccacccaggccgccaucgaccagaucaacggcaagcucaaccgccucaucggcaagaccaacgagaaguuccaccagaucgagaaggaguucuccgaggucgagggccgcauccaggacaucgagaaguacgucgaggacaccaagaucgaccucugguccuacaacgccgagcuccucgucgcccucgagaaccagcacaccaucgaccucaccgacuccgagaugaacaagcucuucgagaagaccaagaagcagcuccgcgagaacgccgaggacaugggcaacggcugcuucaagaucuaccacaagugcgacaacgccugcaucggcuccauccgcaacggcaccuacgaccacaacgucuaccgcgacgaggcccucaacaaccgcuuccagaucaagggcgucgagcucaaguccggcuacaaggacuggauccucuggaucuccuucgccaucuccugcuuccuccucugcgucgcccuccucggcuucaucaugugggccugccagaagggcaacauccgcugcaacaucugcaucuga

SEQ ID NO: 105925 - RNA, 1701 nt, Artificial Sequence; identical to SEQ ID NO: 105919
  derived and/or modified CDS sequence (opt2) from hemagglutinin__InfluenzaA__AGG13555

SEQ ID NO: 105926 - RNA, 1701 nt, Artificial Sequence; identical to SEQ ID NO: 105919
  derived and/or modified CDS sequence (opt2) from hemagglutinin__InfluenzaA__AGG13567

SEQ ID NO: 105927 - RNA, 1701 nt, Artificial Sequence
  derived and/or modified CDS sequence (opt2) from hemagglutinin__InfluenzaA__AGG13591
augaagaccaucaucgcccucuccuacauccucugccucgucuucgcccagaagcuccccggcaacgacaacuccaccgccacccucugccucggccaccacgccguccccaacggcaccaucgucaagaccaucaccaacgaccgcaucgaggucaccaacgccaccgagcucguccagaacuccuccaucggcgagaucugcgacuccccccaccagauccucgacggcgagaacugcacccucaucgacgcccuccucggcgacccccagugcgacggcuuccagaacaagaagugggaccucuucgucgagcgcuccaaggccuacuccaacugcuaccccuacgacguccccgacuacgccucccuccgcucccucgucgccuccuccggcacccucgaguucaacaacgagaacuucaacuggaccggcgucacccagaacggcaccuccuccgccugcauccgccgcuccaacuccuccuucuucucccgccucaacuggcucacccaccucaacuucaaguaccccgcccucaacgucaccaugcccaacaacgagcaguucgacaagcucuacaucuggggcguccaccaccccggcaccgacaaggaccagaucuuccucuacgcccaguccuccggccgcaucaccgucuccaccaagcgcucccagcaggccgucauccccaacaucggcucccgcccccgcauccgcaacauccccucccgcaucuccaucuacuggaccaucgucaagcccggcgacauccuccucaucaacuccaccggcaaccucaucgccccccgcggcuacuucaagauccgcuccggcaaguccuccaucaugcgcuccgacgcccccaucggcaagugcaaguccgagugcaucacccccaacggcuccauccccaacgaccgccccuuccagaacgucaaccgcaucaccuacggcgccugcccccgcuacgucaagcaguccacccucaagcucgccaccggcaugcgcaacguccccgagaagcagacccgcggcaucuucggcgccaucgccggcuucaucgagaacggcugggagggcauggucgacggcugguacggcuuccgccaccagaacuccgagggccgcggccaggccgccgaccucaaguccacccaggccgccaucgaccagaucaacggcaagcucaaccgccucaucggcaagaccaacgagaaguuccaccagaucgagaaggaguucuccgaggucgagggccgcauccaggaccucgagaaguacgucgaggacaccaagaucgaccucugguccuacaacgccgagcuccucgucgcccucgagaaccagcacaccaucgaccucaccgacuccgagaugaacaagcucuucgagaagaccaagaagcagcuccgcgagaacgccgaggacaugggcaacggcugcuucaagaucuaccacaagugcgacaacgccugcaucggcuccauccgcaacggcaccuacgaccacgacgucuaccgcgacgaggcccucaacaaccgcuuccagaucaagggcgucgagcucaaguccggcuacaaggacuggauccucuggaucuccuucgccaucuccugcuuccuccucugcgucgcccuccucggcuucaucaugugggccugccagaagggcaacauccgcugcaacaucugcaucuga

SEQ ID NO: 105928 - RNA, 1701 nt, Artificial Sequence
  derived and/or modified CDS sequence (opt2) from hemagglutinin__InfluenzaA__AGG13615
augaagaccaucaucgcccucuccuacauccucugccucgucuucgcccagaagauccccggcaacgacaacuccaccgccacccucugccucggccaccacgccguccccaacggcaccaucgucaagaccaucaccaacgaccgcaucgaggucaccaacgccaccgagcucguccagaacuccuccaucggcgagaucugcgacuccccccaccagauccucgacggcgagaacugcacccucaucgacgcccuccucggcgacccccagugcgacggcuuccagaacaagaagugggaccucuucgucgagcgcuccaaggccuacuccaacugcuaccccuacgacguccccgacuacgccucccuccgcucccucgucgccuccuccggcacccucgaguucaacaacgaguccuucaacuggaccggcgucacccagaacggcaccuccuccgccugcauccgccgcuccaacuccuccuucuucucccgccucaacuggcucacccaccucaacuucaaguaccccgcccucaacgucaccaugcccaacaacgagcaguucgacaagcucuacaucuggggcguccaccaccccggcaccgacaaggaccagaucuuccucuacgcccaguccuccggccgcaucaccgucuccaccaagcgcucccagcaggccgucauccccaacaucggcucccgcccccgcauccgcaacauccccucccgcaucuccaucuacuggaccaucgucaagcccggcgacauccuccucaucaacuccaccggcaaccucaucgccccccgcggcuacuucaagauccgcuccggcaaguccuccaucaugcgcuccgacgcccccaucggcaagugcaaguccgagugcaucacccccaacggcuccauccccuccgacaagcccuuccagaacgucaaccgcaucaccuacggcgccugcccccgcuacgucaagcaguccacccucaagcucgccaccggcaugcgcaacguccccgagaagcagacccgcggcaucuucggcgccaucgccggcuucaucgagaacggcugggagggcauggucgacggcugguacggcuuccgccaccagaacuccgagggccgcggccaggccgccgaccucaaguccacccaggccgccaucgaccagaucaacggcaagcucaaccgccucaucggcaagaccaacgagaaguuccaccagaucgagaaggaguucuccgaggucgagggccgcauccaggaccucgagaaguacgucgaggacaccaagaucgaccucugguccuacaacgccgagcuccucgucgcccucgagaaccagcacaccaucgaccucaccgacuccgagaugaacaagcucuucgagaagaccaagaagcagcuccgcgagaacgccgaggacaugggcaacggcugcuucaagaucuaccacaagugcgacaacgccugcaucggcuccauccgcaacggcaccuacgaccacgacgucuaccgcgacgaggcccucaacaaccgcuuccagaucaagggcgucgagcucaaguccggcuacaaggacuggauccucuggaucuccuucgccaucuccugcuuccuccucugcgucgcccuccucggcuucaucaugugggccugccagaagggcaacauccgcugcaacaucugcaucuga

SEQ ID NO: 105929 - RNA, 1701 nt, Artificial Sequence; identical to SEQ ID NO: 105927
  derived and/or modified CDS sequence (opt2) from hemagglutinin__InfluenzaA__AGG13627

SEQ ID NO: 105930 - RNA, 1701 nt, Artificial Sequence
  derived and/or modified CDS sequence (opt2) from hemagglutinin__InfluenzaA__AGG13639
augaagaccaucaucgcccucuccuacauccucugccucgucuucgcccagaagcuccccggcaacgacaacuccaccgccacccucugccucggccaccacgccguccccaacggcaccaucgucaagaccaucaccaacgaccgcaucgaggucaccaacgccaccgagcucguccagaacuccuccaucggcgagaucugcgacuccccccaccagauccucgacggcgagaacugcacccucaucgacgcccuccucggcgacccccagugcgacggcuuccagaacaagaagugggaccucuucgucgagcgcuccaaggccuacuccaacugcuaccccuacgacguccccgacuacgccucccuccgcucccucgucgccuccuccggcacccucgaguucaacaacgaguccuucaacugggccggcgucacccagaacggcaccuccuccgccugcauccgcggcuccaacuccuccuucuucucccgccucaacuggcucacccaccucaacuucaaguaccccgcccucaacgucaccaugcccaacaacgagcaguucgacaagcucuacaucuggggcguccaccaccccggcaccaacaaggaccagaucuuccucuacgcccaguccuccggccgcaucaccgucuccaccaagcgcucccagcaggccgucauccccaacaucggcucccgcccccgcauccgcaacauccccucccgcaucuccaucuacuggaccaucgucaagcccggcgacauccuccucaucaacuccaccggcaaccucaucgccccccgcggcuacuucaagauccgcuccggcaaguccuccaucaugcgcuccgacgcccccaucggcaagugcaaguccgagugcaucacccccaacggcuccauccccaacgacaagcccuuccagaacgucaaccgcaucaccuacggcgccugcccccgcuacgucaagcaguccacccucaagcucgccaccggcaugcgcaacguccccgagaagcagacccgcggcaucuucggcgccaucgccggcuucaucgagaacggcugggagggcauggucgacggcugguacggcuuccgccaccagaacuccgagggccgcggccaggccgccgaccucaaguccacccaggccgccaucgaccagaucaacggcaagcucaaccgccucaucggcaagaccaacgagaaguuccaccagaucgagaaggaguucuccgaggucgagggccgcauccaggaccucgagaaguacgucgaggacaccaagaucgaccucugguccuacaacgccgagcuccucgucgcccucgagaaccagcacaccaucgaccucaccgacuccgagaugaacaagcucuucgagaagaccaagaagcagcuccgcgagaacgccgaggacaugggcaacggcugcuucaagaucuaccacaagugcgacaacgccugcaucggcuccauccgcaacggcaccuacgaccacgacgucuaccgcgacgaggcccucaacaaccgcuuccagaucaagggcgucgagcucaaguccggcuacaaggacuggauccucuggaucuccuucgccaucuccugcuuccuccucugcgucgcccuccucggcuucaucaugugggccugccagaagggcaacauccgcugcaacaucugcaucuga

SEQ ID NO: 105931 - RNA, 1701 nt, Artificial Sequence; identical to SEQ ID NO: 105920
  derived and/or modified CDS sequence (opt2) from hemagglutinin__InfluenzaA__AGG13651

SEQ ID NO: 105932 - RNA, 1701 nt, Artificial Sequence; identical to SEQ ID NO: 105919
  derived and/or modified CDS sequence (opt2) from hemagglutinin__InfluenzaA__AGG13663

SEQ ID NO: 105933 - RNA, 1701 nt, Artificial Sequence; identical to SEQ ID NO: 105920
  derived and/or modified CDS sequence (opt2) from hemagglutinin__InfluenzaA__AGG13675

SEQ ID NO: 105934 - RNA, 1701 nt, Artificial Sequence; identical to SEQ ID NO: 105919
  derived and/or modified CDS sequence (opt2) from hemagglutinin__InfluenzaA__AGG13687

SEQ ID NO: 105935 - RNA, 1701 nt, Artificial Sequence; identical to SEQ ID NO: 105920
  derived and/or modified CDS sequence (opt2) from hemagglutinin__InfluenzaA__AGG13711

SEQ ID NO: 105936 - RNA, 1701 nt, Artificial Sequence; identical to SEQ ID NO: 105919
  derived and/or modified CDS sequence (opt2) from hemagglutinin__InfluenzaA__AGG13723

SEQ ID NO: 105937 - RNA, 1701 nt, Artificial Sequence; identical to SEQ ID NO: 105919
  derived and/or modified CDS sequence (opt2) from hemagglutinin__InfluenzaA__AGG13735

SEQ ID NO: 105938 - RNA, 1701 nt, Artificial Sequence; identical to SEQ ID NO: 105919
  derived and/or modified CDS sequence (opt2) from hemagglutinin__InfluenzaA__AGG13747

SEQ ID NO: 105939 - RNA, 1701 nt, Artificial Sequence
  derived and/or modified CDS sequence (opt2) from hemagglutinin__InfluenzaA__AGG13759
augaagaccaucaucgcccucuccuacauccucugccucgucuucgcccaggagcuccccggcaacgacgacuccaccgccacccucugccucggccaccacgccguccccaacggcaccaucgucaagaccaucaccaacgaccgcaucgaggucaccaacgccaccgagcucguccaguccuccuccaccggcgagaucugcaacuccccccaccagauccucgacggcgagaacugcacccucaucgacgcccuccucggcgacccccagugcgacggcuuccagaacaagaagugggaccucuucgucgagcgcuccaaggcccacuccaacugcuaccccuacgacguccccgacuacgccucccuccgcucccucgucgccuccuccggcacccucgaguucaacaacgaguccuucaacuggaccggcgucacccagaacggcaccuccuccgccugcauccgccgcuccaacaacuccuucuucucccgccucaacuggcucacccaccucaacuucaaguaccccgcccucaacgucaccaugcccaacaacgagcaguucgacaagcucuacaucuggggcguccaccaccccggcaccgacaaggaccagaucuuccucuacgcccaggccuccggccgcaucaccgucuccaccaagcgcucccagcagaccgucauccccaacaucggcucccgcccccgcguccgcaacauccccucccgcgucuccaucuacuggaccaucgucaagcccggcgacauccuccucaucaacuccaccggcaaccucaucgccccccgcggcuacuucaagauccgcuccggcaaguccuccaucaugcgcuccgacgcccccaucggcaagugcaacuccgccugcaucacccccaacggcuccauccccaacgacaagcccuuccagaacgucaaccgcaucaccuacggcgccugcccccgcuacgucaagcagaacacccucaagcucgccaccggcaugcgcaacguccccgagaagcagacccgcggcaucuucggcgccaucgccggcuucaucgagaacggcugggagggcauggucgacggcugguacggcuuccgccaccagaacuccgagggccgcggccaggccgccgaccucaaguccacccaggccgccaucgaccagaucaacggcaagcucaaccgccucaucggcaagaccaacgagaaguuccaccagaucgagaaggaguucuccgaggucgagggccgcauccaggaccucgagaaguacgucgaggacaccaagaucgaccucugguccuacaacgccgagcuccucgucgcccucgagaaccagcacaccaucgaccucaccgacuccgagaugaacaagcucuucgagaagaccaagaagcagcuccgcgagaacgccgaggacaugggcaacggcugcuucaagaucuaccacaagugcgacaacgccugcaucggcuccauccgcaacggcaccuacgaccacgacgucuaccgcgacgaggcccucaacaaccgcuuccagaucaagggcgucgagcucaaguccggcuacaaggacuggauccucuggaucuccuucgccaucuccugcuuccuccucugcgucgcccuccucggcuucaucaugugggccugccagaagggcaacauccgcugcaacaucugcaucuga

SEQ ID NO: 105940 - RNA, 1701 nt, Artificial Sequence
  derived and/or modified CDS sequence (opt2) from hemagglutinin__InfluenzaA__AGG13771
augaagaccaucaucgcccucuccuacauccucugccucgucuucgcccagaagcuccccggcaacgacaacuccaccgccacccucugccucggccaccacgccguccccaacggcaccaucgucaagaccaucaccaacgaccagaucgaggucaccaacgccaccgagcucguccaguccuccuccaccggcgagaucugcgacuccccccaccagauccucgacggcgagaacugcacccucaucgacgcccuccucggcgacccccagugcgacggcuuccagaacaagaagugggaccucuucgucgagcgcuccaaggccuacuccaacugcuaccccuacgacguccccgacuacgccucccuccgcucccucgucgccuccuccggcacccucgaguucaacaacgaguccuucaacuggaccggcgucacccagaacggcaccuccuccgccugcauccgccgcuccgacuccuccuucuucucccgccucaacuggcucacccaccucaacuucaaguaccccgcccucaacgucaccaugcccaacaacgagcaguucgacaagcucuacaucuggggcguccaccaccccggcaccgacaaggaccagaucuuccucuacgcccaggccuccggccgcaucaccgucuccaccaagcgcucccagcaguccgucauccccaacaucggcucccgcccccgcauccgcaacauccccucccgcaucuccaucuacuggaccaucgucaagcccggcgacauccuccucaucaacuccaccggcaaccucaucgccccccgcggcuacuucaagauccaguccggcaaguccuccaucaugcgcuccgacgcccccaucggcaagugcaacuccgagugcaucacccccaacggcuccauccccaacgacaagcccuuccagaacgucaaccgcaucaccuacggcgccugcccccgcuacgucaagcagaacacccucaagcucgccaccggcaugcgcaacguccccgagaagcagacccgcggcaucuucggcgccaucgccggcuucaucgagaacggcugggagggcauggucgacggcugguacggcuuccgccaccagaacuccgagggccgcggccaggccgccgaccucaaguccacccaggccgccaucgaccagaucaacggcaagcucaaccgccucaucggcaagaccaacgagaaguuccaccagaucgagaaggaguucuccgaggucgagggccgcauccaggaccucgagaaguacgucgaggacaacaagaucgaccucugguccuacaacgccgagcuccucgucgcccucgagaaccagcacaccaucgaccucaccgacuccgagaugaacaagcucuucgagaagaccaagaagcagcuccgcgagaacgccgaggacaugggcaacggcugcuucaagaucuaccacaagugcgacaacgccugcaucggcuccauccgcaacggcaccuacaaccacgacgucuaccgcgacgaggcccucaacaaccgcuuccagaucaagggcgucgagcucaaguccggcuacaaggacuggauccucuggaucuccuucgccaucuccugcuuccuccucugcgucgcccuccucggcuucaucaugugggccugccagaagggcaacauccgcugcaacaucugcaucuga

SEQ ID NO: 105941 - RNA, 1701 nt, Artificial Sequence
  derived and/or modified CDS sequence (opt2) from hemagglutinin__InfluenzaA__AGG13783
augaagaccaucaucgcccucuccuacauccucugccucgucuucgcccagaagcuccccggcaacgacaacuccaccgccacccucugccucggccaccacgccguccccaacggcaccaucgucaagaccaucaccaacgaccagaucgaggucaccaacgccaccgagcucguccagaacuccuccaugggcgagaucugcgacuccccccaccagauccucgacggcgagaacugcacccucaucgacgcccuccucggcgacccccagugcgacggcuuccagaacaagaagugggaccucuucgucgagcgcuccaaggccuacuccaacugcuaccccuacgacguccccgacuacgccucccuccgcucccucgucgccuccuccggcacccucgaguucaacaacgaguccuucaacugggccggcgucacccagaacggcaccuccuccgccugcauccgcggcuccaacuccuccuucuucucccgccucaacuggcucacccaccucaacuucaaguaccccgcccucaacgucaccaugcccaacaacgagcaguucgacaagcucuacaucuggggcguccaccaccccggcaccgacaaggaccagaucuuccucuacgcccaguccuccggccgcaucaccgucuccaccaagcgcucccagcaggccgucauccccaacaucggcucccgcccccgcauccgcaacguccccucccgcaucuccaucuacuggaccaucgucaagcccggcgacauccuccucaucaacuccaccggcaaccucaucgccccccgcggcuacuucaagauccgcuccggcaaguccuccaucaugcgcuccgacgcccccaucggcaagugcaaguccgagugcaucacccccaacggcuccauccccaacgacaagcccuuccagaacgucaaccgcaucaccuacggcgccugcccccgcuacgucaagcaguccacccucaagcucgccaccggcaugcgcaacguccccgagaagcagacccgcggcaucuucggcgccaucgccggcuucaucgagaacggcugggagggcauggucgacggcugguacggcuuccgccaccagaacuccgagggccgcggccaggccgccgaccucaaguccacccaggccgccaucgaccagaucaacggcaagcucaaccgccucaucggcaagaccaacgagaaguuccaccagaucgagaaggaguucuccgaggucgagggccgcauccaggaccucgagaaguacgucgaggacaccaagaucgaccucugguccuacaacgccgagcuccucgucgcccucgagaaccagcacaccaucgaccucaccgacuccgagaugaacaagcucuucgagaagaccaagaagcagcuccgcgagaacgccgaggacaugggcaacggcugcuucaagaucuaccacaagugcgacaacgccugcaucggcuccauccgcaacggcaccuacgaccacgacgucuaccgcgacgaggcccucaacaaccgcuuccagaucaagggcgucgagcucaaguccggcuacaaggacuggauccucuggaucuccuucgccaucuccugcuuccuccucugcgucgcccuccucggcuucaucaugugggccugccagaagggcaacauccgcugcaacaucugcaucuga

SEQ ID NO: 105942 - RNA, 1701 nt, Artificial Sequence; identical to SEQ ID NO: 105920
  derived and/or modified CDS sequence (opt2) from hemagglutinin__InfluenzaA__AGG13795

SEQ ID NO: 105943 - RNA, 1701 nt, Artificial Sequence; identical to SEQ ID NO: 105871
  derived and/or modified CDS sequence (opt2) from hemagglutinin__InfluenzaA__AGG13807

SEQ ID NO: 105944 - RNA, 1701 nt, Artificial Sequence; identical to SEQ ID NO: 105920
  derived and/or modified CDS sequence (opt2) from hemagglutinin__InfluenzaA__AGG13819

SEQ ID NO: 105945 - RNA, 1701 nt, Artificial Sequence; identical to SEQ ID NO: 105920
  derived and/or modified CDS sequence (opt2) from hemagglutinin__InfluenzaA__AGG13831

SEQ ID NO: 105946 - RNA, 1701 nt, Artificial Sequence; identical to SEQ ID NO: 105919
  derived and/or modified CDS sequence (opt2) from hemagglutinin__InfluenzaA__AGG13855

SEQ ID NO: 105947 - RNA, 1701 nt, Artificial Sequence
  derived and/or modified CDS sequence (opt2) from hemagglutinin__InfluenzaA__AGG13867
augaagaccaucaucgcccucuccuacauccucugccucgucuucgcccagaagcuccccggcaacgacaacuccaccgccacccucugccucggccaccacgccguccccaacggcaccaucgucaagaccaucaccaacgaccgcaucgaggucaccaacgccaccgagcucguccagaacuccuccaucggcaagaucugcgacuccccccaccagauccucgacggcgagaacugcacccucauggacgcccuccucggcgacccccagugcgacggcuuccagaacaagaagugggaccucuucgucgagcgcuccaaggccuacuccaacugcuaccccuacgacguccccgacuacgccucccuccgcucccucgucgccuccuccggcacccucgaguucaacaacgaguccuucaacuggaccggcgucacccagaacggcaccuccuccgccugcauccgccgcuccaacuccuccuucuucucccgccucaacuggcucacccaccucaacuucaaguaccccgcccucaacgucaccaugcccaacaacgagcaguucgacaagcucuacaucuggggcguccaccaccccggcaccgacaaggaccagaucuuccucuacgcccaguccuccggccgcaucaccgucuccaccaagcgcucccagcaggccgucauccccaacaucggcucccgcccccgcauccgcaacauccccucccgcaucuccaucuacuggaccaucgucaagcccggcgacauccuccucaucaacuccaccggcaaccucaucgccccccgcggcuacuucaagauccgcuccggcaaguccuccaucaugcgcuccgacgcccccaucggcaagugcaaguccgagugcaucacccccaacggcuccauccccaacgacaagcccuuccagaacgucaaccgcaucaccuacggcgccugcccccgcuacgucaagcaguccacccucaagcucgccaccggcaugcgcaacguccccgagaagcagacccgcggcaucuucggcgccaucgccggcuucaucgagaacggcugggagggcauggucgacggcugguacggcuuccgccaccagaacuccgagggccgcggccaggccgccgaccucaaguccacccaggccgccaucgaccagaucaacggcaagcucaaccgccucaucggcaagaccaacgagaaguuccaccagaucgagaaggaguucuccgaggucgagggccgcauccaggaccucgagaaguacgucgaggacaccaagaucgaccucugguccuacaacgccgagcuccucgucgcccucgagaaccagcacaccaucgaccucaccgacuccgagaugaacaagcucuucgagaagaccaagaagcagcuccgcgagaacgccgaggacaugggcaacggcugcuucaagaucuaccacaagugcgacaacgccugcaucggcuccauccgcaacggcaccuacgaccacaacgucuaccgcgacgaggcccucaacaaccgcuuccagaucaagggcgucgagcucaaguccggcuacaaggacuggauccucuggaucuccuucgccaucuccugcuuccuccucugcgucgcccuccucggcuucaucaugugggccugccagaagggcaacauccgcugcaacaucugcaucuga

SEQ ID NO: 105948 - RNA, 1701 nt, Artificial Sequence; identical to SEQ ID NO: 105919
  derived and/or modified CDS sequence (opt2) from hemagglutinin__InfluenzaA__AGG13879

SEQ ID NO: 105949 - RNA, 1701 nt, Artificial Sequence; identical to SEQ ID NO: 105919
  derived and/or modified CDS sequence (opt2) from hemagglutinin__InfluenzaA__AGG13891

SEQ ID NO: 105950 - RNA, 1701 nt, Artificial Sequence
  derived and/or modified CDS sequence (opt2) from hemagglutinin__InfluenzaA__AGG13903
augaagaccaucaucgcccucuccuacauccucugccucgucuucgcccagaagcuccccggcaacgacaacuccaccgccacccucugccucggccaccacgccguccccaacggcaccaucgucaagaccaucaccaacgaccagaucgaggucaccaacgccaccgagcucguccaguccuccuccaccggcgagaucugcgacuccccccaccagauccucgacggcgagaacugcacccucaucgacgcccuccucggcgacccccagugcgacggcuuccagaacaagaagugggaccucuucgucgagcgcuccaaggccuacuccaacugcuaccccuacgacguccccgacuacgccucccuccgcucccucgucgccuccuccggcacccucgaguucaacaacgaguccuucaacuggaccggcgucacccagaacggcaccuccuccgccugcauccgccgcuccgacuccuccuucuucucccgccucaacuggcucacccaccucaacuucaaguaccccgcccucaacgucaccaugcccaacaacgagcaguucgacaagcucuacaucuggggcguccaccaccccggcaccgacaaggaccagaucuuccucuacgcccaggccuccggccgcaucaccgucuccaccaagcgcucccagcaguccguccuccccaacaucggcucccgcccccgcauccgcaacauccccucccgcaucuccaucuacuggaccaucgucaagcccggcgacauccuccucaucaacuccaccggcaaccucaucgccccccgcggcuacuucaagauccaguccggcaaguccuccaucaugcgcuccgacgcccccaucggcaagugcaacuccgagugcaucacccccaacggcuccauccccaacgacaagcccuuccagaacgucaaccgcaucaccuacggcgccugcccccgcuacgucaagcagaacacccucaagcucgccaccggcaugcgcaacguccccgagaagcagacccgcggcaucuucggcgccaucgccggcuucaucgagaacggcugggagggcauggucgacggcugguacggcuuccgccaccagaacuccgagggccgcggccaggccgccgaccucaaguccacccaggccgccaucgaccagaucaacggcaagcucaaccgccucaucggcaagaccaacgagaaguuccaccagaucgagaaggaguucuccgaggucgagggccgcauccaggaccucgagaaguacgucgaggacaccaagaucgaccucugguccuacaacgccgagcuccucgucgcccucgagaaccagcacaccaucgaccucaccgacuccgagaugaacaagcucuucgagaagaccaagaagcagcuccgcgagaacgccgaggacaugggcaacggcugcuucaagaucuaccacaagugcgacaacgccugcaucggcuccauccgcaacggcaccuacaaccacgacgucuaccgcgacgaggcccucaacaaccgcuuccagaucaagggcgucgagcucaaguccggcuacaaggacuggauccucuggaucuccuucgccaucuccugcuuccuccucugcgucgcccuccucggcuucaucaugugggccugccagaagggcaacauccgcugcaacaucugcaucuga

SEQ ID NO: 105951 - RNA, 1701 nt, Artificial Sequence; identical to SEQ ID NO: 105919
  derived and/or modified CDS sequence (opt2) from hemagglutinin__InfluenzaA__AGG13927

SEQ ID NO: 105952 - RNA, 1701 nt, Artificial Sequence; identical to SEQ ID NO: 105927
  derived and/or modified CDS sequence (opt2) from hemagglutinin__InfluenzaA__AGG13939

SEQ ID NO: 105953 - RNA, 1701 nt, Artificial Sequence
  derived and/or modified CDS sequence (opt2) from hemagglutinin__InfluenzaA__AGG13962
augaaggccauccucgucguccuccucuacaccuucgccaccgccaacgccgacacccucugcaucggcuaccacgccaacaacuccaccgacaccgucgacaccguccucgagaagaacgucaccgucacccacuccgucaaccuccucgaggacaagcacaacggcaagcucugcaagcuccgcggcgucgccccccuccaccucggcaagugcaacaucgccggcuggauccucggcaaccccgagugcgagucccucuccaccgccuccuccugguccuacaucgucgagaccuccuccuccgacaacggcaccugcuaccccggcgacuucaucaacuacgaggagcuccgcgagcagcucuccuccgucuccuccuucgagggcuucgagaucuuccccaagaccuccuccuggcccaaccacgacuccaacaagggcgucaccgccgccugcccccacgccggcgccaaguccuucuacaagaaccucaucuggcucgucaagaagggcaacuccuaccccaagcucuccaaguccuacaucaacgacaagggcaaggagguccucguccucuggggcauccaccaccccuccaccaccgccgaccagcagucccucuaccagaacgccgacgccuacgucuucgucggcaccucccgcuacuccaagaaguucaagcccgagaucgccauccgccccaagguccgcgaccaggagggccgcaugaacuacuacuggacccucaucgagcccggcgacaagaucaccuucgaggccaccggcaaccucgucgucccccgcuacgccuucgccauggagcgcaacgccgaguccggcaucaucaucuccgacacccccguccacgacugcaacaccaccugccagacccccgagggcgccaucaacaccucccuccccuuccagaacauccaccccaucaccaucggcaagugccccaaguacgucaaguccaccaagcuccgccucgccaccggccuccgcaacguccccuccauccagucccgcggccucuucggcgccaucgccggcuucaucgagggcggcuggaccggcauggucgacggcugguacggcuaccaccaccagaacgagcagggcuccggcuacgccgccgaccucaaguccacccagaacgccaucgacaagaucaccaacaaggucaacuccgucaucgagaagaugaacacccaguucaccgccgucggcaaggaguucaaccaccucgagaagcgcaucgagaaccucaacaagaaggucgacgacggcuuccucgacaucuggaccuacaacgccgagcuccucguccuccucgagaacgagcgcacccucgacuaccacgacuccaacgucaagaaccucuacgagaagguccgcaaccagcucaagaacaacgccaaggagaucggcaacggcugcuucgaguucuaccacaagugcgacaacaccugcauggaguccgucaagaacggcaccuacgacuaccccaaguacuccgaggaggccaagcucaaccgcgagaagaucgacggcgucaagcucgaguccacccgcaucuaccagauccucgccaucuacuccaccgucgccuccucccucguccucgucgucucccucggcgccaucuccuucuggaugugcuccaacggcucccuccagugccgcaucugcaucuga

SEQ ID NO: 105954 - RNA, 1701 nt, Artificial Sequence; identical to SEQ ID NO: 105919
  derived and/or modified CDS sequence (opt2) from hemagglutinin__InfluenzaA__AGG13973

SEQ ID NO: 105955 - RNA, 1701 nt, Artificial Sequence; identical to SEQ ID NO: 105919
  derived and/or modified CDS sequence (opt2) from hemagglutinin__InfluenzaA__AGG13985

SEQ ID NO: 105956 - RNA, 1701 nt, Artificial Sequence; identical to SEQ ID NO: 105919
  derived and/or modified CDS sequence (opt2) from hemagglutinin__InfluenzaA__AGG13997

SEQ ID NO: 105957 - RNA, 1701 nt, Artificial Sequence; identical to SEQ ID NO: 105919
  derived and/or modified CDS sequence (opt2) from hemagglutinin__InfluenzaA__AGG14009
